United States Patent Application Publication US 2018/0126003 A1 - sequence listing, part 111

SEQ ID NO: 196293 - DNA, 6236 bp, Artificial Sequence
  derived and/or modified sequence
atgccatggcctttttcggagtccatcaagaagcgcgcttgccgatacctgttacaacgttacctggggcacttcctacaagagaagctatctctagaacaactgagcctggatttgtaccaggggaccggcagcctcgcccaggtgccactcgacaaatggtgcttgaacgagattctggagagcgccgacgcacctctggaagtgactgaaggtttcattcaatccattagcctgtctgtaccctggggttccctcctgcaggacaattgcgcgctggaggtacgaggactggagatggtattccgtcccaggcctagacccgctacaggcagcgaaccaatgtattggagtagcttcatgacctccagcatgcagctagcaaaggaatgcctctctcagaaactcactgatgagcagggagaaggcagtcagccgtttgaaggcctggagaagtttgctgagacaatagagacggtcctgcggagggtgaaggtcacttttatcgataccgtgctccggatagagcacgtgccggaaaattccaagactggaactgcactggagattcgcatcgaaaggacagtgtactgtgacgagacagccgacgaaagcagtggcatcaacgtccaccagccaactgcgtttgcccacaaactgttgcagctctcaggagtgagcctgttctgggatgaattttccgcaagtgcaaagtcgtcacccgtgtgttctaccgcacctgtcgagactgagcccaaactctctccttcctggaacccaaaaatcatctatgaacctcacccccaactgacgcgcaatctgccagagatcgccccaagtgaccctgtgcagataggcagactcatcggccgtttggaactgagtttgacgttgaaacagaatgaagtgctgcctggggcaaagctcgacgttgacggacagatcgacagcatacatttattgctgtctcctagacaggtacatctgctgcttgatatgttagccgctattgcagggcctgaaaatagcagcaagattgggttggccaacaaagatcgcaagaaccgccctatgcagcaggaggatgaatatcgtatccaaatggaactcaataggtactatctgcgtaaggactctctgagcgtgggagtaagttcagagcagagcttctatgaaactgagaccgctcggacaccctctagcagagaagaggaagtgtttttctcaatggctgatatggacatgtctcacagcctgtcaagtctgcccccacttggcgaccctccgaacatggacctggagctgtctctcaccagcacatataccaacactcccgctggtagtccactgagcgctaccgtgttgcagcccacatggggagagttcttggatcaccataaggaacagcctgtccgtggttccaccttcccgtctaacctggtccaccctactccactgcagaaaactagcttgccatcccggtcggtctccgttgacgagtcacgcccagagctcatcttccggctggcagtcgggaccttttccataagtgtgctccatatcgaccctctctcccctcccgagacaagtcaaaacttgaatcccctgaccccaatggcggtcgctttctttacctgcattgagaagatagaccccgctcgctttagcactgaggactttaagagcttcagagccgtgttcgcagaagcctgctcgcatgaccacctgcgcttcatcggcacgggaatcaaggtcagctatgaacaaaggcagcgcagcgcgtcgaggtacttctccacagacatgagcatcggccaaatggaatttctggaatgcttgttcccaacagattttcactccgtgccaccccattataccgagttgctaacttttcactccaaagaagaaactgggagtcatagcccagtatgccttcagctgcattacaagcattcagagaaccgaggaccacaagggaaccaggctagattgtcctcagttccacacaaagccgaactgcagattaaactgaatccagtgtgctgtgaattagacatatctatagtcgaccgcctgaactctctgttgcaaccacagaaattagcaaccgtcgaaatgatggcttcacacatgtatacaagctataataagcatatttctttacataaggcatttactgaggtatttctggatgatagccatagtcctgcaaactgtcggatttcagtacaagtcgccacacccgctctgaatctgtcagtgcggttcccgattcccgatttgagatcggatcaggagagaggaccctggtttaaaaagagcctccagaaggaaattctctatttagctttcaccgatttggagtttaaaactgagtttatagggggttcaactccagaacagattaagcttgagctgacattcagggagcttatagggtccttccaagaggagaaaggggatcctagcattaagttcttccacgtatccagcggtgttgatggagataccacctctagtgacgattttgattggcccagaatcgttctcaagattaatccgcctgccatgcactcaattctagagcgaattgctgcagaagaggaagaggagaacgatgggcactaccaagaggaggaggaaggaggcgctcactctctgaaagacgtttgcgatctgcgtcggcctgcccctagtcctttctcgagtcgtagggtgatgtttgagaacgaacagatggtgatgcctggggaccctgttgaaatgaccgaattccaggataaggcgattagcaattcgcactatgttttggagcttaccctgccaaatatctacgtcaccctacccaacaagagcttctatgagaaattgtacaaccgtattttcaatgatctcctcctgtgggagcctactgccccttctcctgtggaaacatttgagaatatctcctacggaattgggctctccgtggcgagtcaactgattaacacatttaacaaggactctttcagtgctttcaaaagtgctgtccattacgacgaggaatccgggtccgaggaggaaaccctacagtatttttctacggttgaccccaactatcgctcaagaagaaagaagaagctggactcccagaacaagaacagccagagcttcctttctgtactgctcaatatcaaccacgggttaatagcagttttcacagacgtaaaacaggacaacggtgatctgttagagaataaacatggagaattctggctggagttcaattcaggaagcctcttctgcgtgactaaatatgagggatttgatgataaacactatatttgcttgcactcctcaagctttagcctctaccataaagggattgtcaatggagtcatcttgcccacagaaactcgtctgccaagttccacccggcctcactggttagagcccaccatctacagctccgaagaggacgggctcagtaaaaccagctcggatggggttggcggagactcactcaatatgctgtctgtggcagtgaaaatcctgtccgataagagcgagagtaatactaaggagttcctgatcgccgtgggcctcaagggcgcaactttacagcacaggatgctgcccagtggactcagttggcacgaacagatcctatactttcttaacatcgcagatgagccagtcctggggtacaacccgcctactagctttacaactttccacgtgcatctctggtcctgtgccctcgattaccgcccactctacttacctataagatcactgctgaccgttgagaccttctccgtgagcagttctgtagctctggacaaatcttcatccacattgcggatcatactcgatgaggctgccctgcatctgtctgataaatgcaacacggtgactataaacttatcaagggactacgtgcgggtcatggacatgggccttctggagttaacgatcaccgctgtcaaatcagactcagatggggagcagacggagcctagatttgagcttcattgctctagtgatgtcgtccacatccgcacctgctccgacagttgtgccgctctgatgaacctgatacagtatatcgcgtcttatggggatttacaaacacctaataaggcagacatgaaacccggtgccttccagcggaggtccaaggtggactcatccggcagaagctcttcccgagggccagtgcttccagaggccgaccagcagatgctgcgcgacttgatgtccgacgccatggaggaaatcgacatgcagcagggaacatcatcagttaaaccacaagcgaacggtgtgctggatgaaaaaagccagattcaggagccgtgctgtagcgacctgttcctatttcctgacgagtcaggcaatgtcagccaggaatccggaccaacatacgcctctttttcgcaccacttcatctcagacgccatgacaggcgtgcctaccgagaatgacgacttttgcattctgtttgcccctaaagccgctatgcaagaaaaggaagaggaacccgtgatcaagataatggtggatgatgccatagtgattcgagacaactatttctctctccctgtgaataaaaccgacacttcaaaggcacctcttcacttcccgatcccagtaattaggtatgttgtgaaggaagtgtccctcgtgtggcatctttatgggggtaaggacttcgggattgtccctccaacgagccctgcaaaatcctacatatccccccacagctcaccctctcataccccaaccagacatggaagaaatacagtgtgtggtgggaagggccgtaatcacgatttccttatggaaatccaactctcaaaggtgaagtttcagcacgaagtgtatcccccatgcaagccagactgcgactcatctcttagtgagcacccagtctctcgacaggtctttatagtacaggatctggagattcgggatcggctcgcaacatcccagatgaacaagtttctctatctgtactgtagcaaagagatgccaagaaaagcgcattccaatatgctcaccgtaaaggccttacatgtgtgccccgagagcgggagaagtcctcaggagtgttgcctcagggtgtcactcatgcccctgagactgaacatcgatcaggatgcgctgtttttcctgaaagacttcttcacatcactcagcgcagaggtagaactccaaatgactcctgatcccgaagtgaagaaaagccccggtgctgacgttacctgttctctcccgcgtcacttgagcacctctaaggagcccaacctcgttatcagcttcagtgggccaaaacagcccagccagaacgactcagccaacagcgtagaggtggtgaatgggatggaggagaagaatttttccgccgaagaagcaagttttcgtgatcaaccggtgttttttagagaattccgtttcacctctgaagtgccaattcgcctcgactaccatggaaaacacgtcagcatggaccagggcaccctggctggcatcctcattggactcgcgcagctaaactgcagcgaactgaagctgaagaggctcagctacagacatgggttgctgggggttgataagttattctcctatgccatcaccgagtggttaaatgacataaagaagaaccagctgccaggaatcttaggaggagtcggtcccatgcattctctcgtccagctggtgcaggggctgaaggatctggtgtggttgcccatcgagcagtatcggaaggacgggcgtatcgtgcgcggattccagcggggagcagcaagtttcggcacatccacggccatggcagccctggagctcaccaacagaatggtccagacaattcaagcagccgctgagactgcctatgacatggtatcccctggaaccttgagtatagagcccaaaaaaactaagaggttcccacaccaccgcctggcccaccaacctgttgacctgcgcgagggcgtcgccaaagcctacagcgtcgttaaagaaggcatcaccgacacagcccaaacaatctacgaaaccgcagcccgtgaacacgagagtagaggcgttaccggggctgtgggagaagtactgcggcaaattcccccagccgtggtaaaaccgctgatcgtggctacagaggcaacctctaatgtgttggggggaatgagaaaccagatacggcctgatgtccgacaggatgagagccaaaagtggcgccatggggatgatta

SEQ ID NO: 196294 - DNA, 11628 bp, Artificial Sequence
  derived and/or modified sequence
ggtgcgggcggggatgctcgagaagggctccagtcctcccagcggagacggcggagccccaagtgtgcgtttccggggcgccgaggtctgaggggagccgggagagccaggccggccagaccggcccccagacccctcttaacacgggcgcggggcccctgcagcctgccgcccctctcggcccagccagctgcatggcgtcgcgtccccatccggaaggcctgacggcccgccggcgccccgagcccctagcccttctcgggggccgcccctcgcccgcagccaccccggctgccgctcacctgcgcgcccggcgtcctcttcttccttcctccggaggcgactggagccgaccggcggtgccgccccctccctccccgccttcttccgccccgccccctcggagccggaactgctccagcccccgcccttctgcccgccttccgcggccccagtgtggcgtcacttccgccagcgcccggcggcgcgccgggagtctgggtctcgtgaacgcgccaggagcgtccctacagccgggaacgcgcctcgcggatgacaacaaattcgtcgcgcggcggcagtggcggtggctgcctcagcccctgccgcctcctctcgcgctctcttgcactctctccgagccggttgggaccctcctcggaagtcccctggcctggggccaggaggacccctctgcgtcttgcctccgccaggcccagcgcgagcggtgcggcgccggcgatggggtctccctgagggactcccggcaccaaatagggatggaggggccgccccaggcttaggccccgccgcggcctggagccggagtcgctaccccgaggccggagccgtcgcaacccgcagccgcagtcagcccagctgccagcagtcactatgccttggccgttttcggagtccatcaagaagagggcctgccggtacctcctgcagaggtacctgggccactttctgcaggagaagctgagcctggagcagctcagcctggacctgtaccaaggcaccgggtccctcgcccaggtccccttggacaaatggtgtctcaatgagatcttggagtcagcagatgcacccttagaagtcactgaaggattcattcagtcaatttccctgtcagttccatggggctctttactgcaggataattgtgcactggaagtgagaggattagaaatggtcttccggcctagacctcgcccagcaactggttctgagcctatgtattggtcaagttttatgaccagcagtatgcaattggcaaaagaatgtcttagccagaaactaacagatgaacaaggagaaggatcccagccttttgaaggacttgaaaagtttgctgaaaccattgaaacagtactaagaagagtaaaagtcacttttatagatactgttttgagaattgaacatgtgccagaaaattccaaaactggaactgcacttgaaattcgaatagaaagaactgtgtactgtgatgaaactgctgacgaatcctcaggaattaatgtgcatcaacccactgcttttgctcacaagttacttcagctctctggagtgtctctcttctgggatgagttttctgcatcagccaaatcttccccagtgtgttcaactgcaccagtggaaactgagccaaagctctcacctagctggaaccccaaaattatttatgagccacacccacagctaactagaaatttaccagagatagcaccttctgacccagtgcagattggacggttaattggtaggttggagttgagtctcacgttgaaacagaatgaagtgcttcctggagctaagttggatgttgatggacagatagactctattcatctactcctgtcaccaagacaggtgcacttgcttttggatatgttggcagctattgctggaccagaaaattctagcaaaatagggttagctaataaagataggaaaaatcgacccatgcagcaggaagacgagtatcgaattcagatggaattaaaccggtattatttgagaaaagattccctctctgtgggtgtatcttcagagcaaagcttttatgagacagaaacagctcgtacaccttctagccgtgaagaagaagtattcttctccatggctgatatggacatgtctcatagtctctcttctcttccaccccttggggaccccccaaacatggaccttgagttatcattaactagtacatatacaaataccccagcaggatctccattaagtgctactgtgcttcagcccacttggggagagttccttgatcatcataaagaacagccagtaagagggtcaacatttccatccaacctagttcacccaacacctttacagaagacatctctcccatctagatctgtttcagtggatgaatcaaggcctgaacttatttttagactagctgtgggaactttttcaatctctgtgcttcacattgatcctttatctccacctgaaacgtcacagaaccttaatccattgacacctatggcagtagctttctttacttgtatagaaaagattgatccagcaagattttcaacagaagattttaagtctttccgagcagtgtttgcagaagcttgctcacacgatcaccttagatttataggtactggcattaaagtatcctatgaacaaagacaaagatcagcttcccgatattttagtactgatatgtccattgggcaaatggaatttttggagtgcctatttccaactgattttcattctgttcctcctcactatacagagcttttaacgttccattccaaagaagaaactggttcccattcccctgtgtgtcttcagcttcattataagcattctgagaatagagggccccagggtaatcaagcaagacttagttcagttcctcacaaggcagaattgcaaattaaattaaatccagtgtgttgtgagctggatatcagtattgtggacaggttaaattccttgcttcaaccacagaaacttgccacagtagagatgatggcatcccacatgtatacttcatataataaacatattagtctgcacaaggctttcactgaagtgtttctagatgattcacatagtcctgcaaattgtcggatatcagtacaagttgccacaccagcattaaacctttctgttcgcttcccaatacctgatcttcgatctgatcaagaaagaggaccatggtttaagaagtcacttcagaaggagatcctttatttagccttcacagatctagaatttaagactgaatttataggaggatcaaccccagaacaaattaaattggaacttacctttagagaactaattggatcgttccaggaagagaaaggagatccatctattaagtttttccatgtgtctagtggagtagatggagatacaacatcgtcagatgactttgactggccacgaattgtactgaaaataaatccaccagccatgcattccattttggagagaattgcagctgaagaagaagaggagaatgatggtcactaccaggaggaagaggaaggaggtgctcattccttgaaagatgtttgtgatctaagaagaccagccccatctcctttttcttctcgtagagtaatgtttgaaaatgaacagatggtgatgccaggagaccctgtagaaatgacagaatttcaggataaagcaatcagcaattctcactatgtgctggaacttacgttaccaaatatttatgtaacactacctaataagagcttttatgagaagctttataataggatctttaatgacttgctactgtgggaaccaacagctccttcaccagtggagacattcgagaatatttcctatggcattgggctttcagtagccagtcagctcattaatactttcaacaaagatagttttagtgcatttaaatctgcagttcactatgatgaggaaagtggatctgaggaggagactttgcagtatttttccactgttgatcccaactatcgttctcgcaggaaaaaaaaattagactctcagaacaagaactctcagagttttctctcagttcttctgaatattaatcatggattaatagcagtgttcacagatgtgaagcaagataatggagatctgttggaaaacaagcatggtgaattctggttagagttcaatagtggttcattattttgtgtgacaaaatatgaaggttttgatgacaagcactacatttgccttcattctagcagtttcagtctgtaccataaaggcatagtgaatggagtgattctcccgacagaaacacgacttcccagctcaacccgcccacactggttggaacctactatttattcctctgaagaagatggcctcagtaaaacttcttcagatggagttggaggagacagtttgaatatgctgtctgttgccgttaaaatattgtctgataaatcagagtccaatacaaaggaatttctcattgccgtaggactgaaaggagccactctccagcatagaatgcttccttctgggcttagctggcatgagcagattttatacttcttgaatattgctgatgaacctgttttgggatataatcctccaacttcatttacaacttttcatgttcatctttggagctgtgcacttgattatagacccctttatttgccaatccgatctcttcttaccgtggaaacattcagtgtttccagtagcgttgcattggataaatcttcctctactctcagaataatcttggatgaagctgctttacatctatctgacaaatgcaatactgtcactataaatctgagtagagattatgttcgtgtgatggatatggggcttttggagttaaccataactgcagtgaagtctgattctgatggagagcaaactgagccccgctttgagttacactgttccagcgatgttgtccatatcagaacgtgctcagactcttgtgctgcgttaatgaatctcattcagtacattgcaagctatggtgacttgcagacacctaacaaggcagatatgaagcctggagcctttcaaagaaggtctaaggtagattccagtggtcgatcatcctcacgtggtccagtacttcctgaagcagatcaacaaatgttacgagatctgatgagtgatgctatggaggagatcgacatgcaacaaggcacctcgtcagtaaaaccacaggctaatggtgttttggatgaaaaatctcaaattcaggagccatgttgttcagacctcttcctgtttcctgacgagagtgggaatgtatcccaggagtccggccccacctatgcctcattctctcaccatttcatcagtgatgcaatgacaggtgtgcccactgagaatgatgacttttgcattctttttgcaccaaaagcagccatgcaggagaaggaagaagaaccagttataaaaatcatggttgatgatgcaattgtgataagagacaattatttcagtctgcccgttaataagaccgatacgagcaaagcccccttacactttcccattcctgtgattcgctatgtggtgaaggaggtctctcttgtctggcatctttatggaggaaaggattttggaatagtccctcccacttctccggctaaaagttatattagtccccacagttcgccttctcacacacccacgagacatggacgtaatacagtatgtgggggaaaaggaaggaaccatgactttttaatggaaatacagctaagcaaggtgaagtttcagcatgaagtctacccgccatgcaaacctgattgtgattccagcctctcagaacacccagtctcccggcaggtgttcattgttcaggatcttgagattcgagatcgtttggcaacatcacaaatgaataaatttttatacctgtattgcagtaaagaaatgcctcgaaaagctcactccaacatgttgacagtgaaagccttacacgtgtgtccagaatctggcaggtccccacaggagtgctgcttgagagtgtcgctgatgccgctccgcctcaatattgaccaggatgctttgttcttcctgaaggatttcttcacaagtctttctgcagaagtagagcttcaaatgactccagatccagaagttaaaaagtctcctggagctgatgtcacctgcagtttgccaaggcatttgagtacctcaaaggagccaaatctggttatttctttctctgggccaaaacagccttcccaaaatgatagtgccaattcagtggaagtggttaatggcatggaagagaagaacttctctgctgaagaagcatcttttagggatcagcctgtgttttttagagaatttagattcacgtcagaagttcccattcgacttgattatcatggcaaacatgtatcaatggatcagggtacgctagctgggattttgattggtctggctcagttaaactgctctgaactaaagctcaagaggctttcctatcgacatggtttactaggcgttgacaaattattctcatatgcaatcactgagtggcttaatgacattaagaagaaccagctaccaggaatcctgggaggtgttggacctatgcattcactagtacaattagtacaaggcctaaaggacttggtctggctcccaatagagcagtaccggaaggatggccgcattgtcagagggtttcagagaggcgctgcttcctttggtacctcgacagcgatggctgctctagaactcacaaacagaatggttcaaaccatacaggcagctgcagagactgcttatgatatggtgtctcctggtaccctttctatcgagcccaagaagaccaaaaggtttcctcatcaccggttagcccaccagccagtagacctgagggaaggtgtggccaaggcctacagtgttgtgaaagagggaatcacagacacggctcagaccatttatgaaactgcggctcgagaacacgagagcagaggggtgactggtgccgtgggcgaggttctgcgccagattcctccggcagtggtgaaacctctgattgttgccacagaagcaacgtcaaacgtgctgggtggcatgagaaaccaaattaggccagatgtccggcaagacgagtcacagaaatggcgccacggggatgactgatggcttggaactgacagtgtgaagataaggagagtggaaccaggagctcagagtcctgacagcagcttcagaggaagctcgtttaattttattgtgctcatctcaggaacaaaagcattttttagttaaataatttaacatcaaaacaacatgcaaccaaaaacttctgacatttatagttgatacttgcctatagaaatgtttggtggctggtgtcaaaggtccttaaagcatttgctgccaagttagtggaaggctcacttttgttaagatgactgtaattctccttgttaccgacgagagatcattggaagctgccttctaacactttgtgtagctctgtggagttggattttcttaaggtttaaaaagaatcacagcttcggaacttttaactgaaaatgagagacagaagccacaggggaagcaaagcaaataggattttcaatataaatatcagtgtggaaaaataacctattctgttgaatttagtgttcatgcacttgagaacaacattatttccatttactccgaaaatccttctgtgggggtttgagaaagtgaatgttgcagacatgttctgttgtgttgcactttatcctgtgtttatgtgtatgtgtttttagattaattcaagttgtgtgctatatttcttgtataatttacaaagttacacaaaatataaagagcagtaaacttgtctgaaagtttttggcaaaggaaggtaacttcaatgtaatagcttcctttaagagtacaggaaaatgcattctgtaatgaagtggggcccatgtaattgtttatattttcagttttaagcaggtatagtgcaggcttgttaggaatgtgtggaagggaagattggaagtgatttttcctcttttaaaagtaaacaaaattcttcaaatatgccctagttaactatttcagcataccatttttacttggttaacagtgtacattttgataacctatcaggaatgaataaagtatttttatttaaaggtgatattgttttatgcttccatgaatattttgcttttcttagagcatattcatagatgcagtactgtgatttaccacaagataattgggaacactttctcaaaatcgattttggttaatatcaggtaaatcattacctaggagtaagagggaaattgttgtcaattcctgactttagattgatccagcagaaagaaaaggtggaactttgtatatatccactgttgaaagttgcatgacctgacttcctgttttctaaagttgggggaatattattgaacttcaatttcagaactgcatttcaatttggggcttggaaaatgtagttaaatcaatttcgttctctaaattttctaagcaggaaagcaatgtaaaccaaaaatcaaaatgtttagaatttataaaaatggggttatatagcttttaattttagtttcctttttactgccaaaaaacttaaaaagacaacagcgtaaccacctgtttaagcaccgtgggaccatctcttattcgggtagagcctggtcctggcgacacactaacaggaaggcgtgctgtgttaccgggaaggcgcctctggctgtggggtgcgttctgaccaccccgctcagatgccagcattttccatttgcccttaaggaaacttgctatgtgtgttaacccagttatgattagtcaaactggaaaacacttgatcaaacttaaaattgtaaaatctgtctaacttttaaatatactttccacagttgtacttaagttcaattaactacagtatagagaaaaataattattctcttctttgcacccggagttgcaaacaaattaagtttacaaatctcatttaaacatatatctttgtaatgtaatctccgcggttctttctttgttctaccctcctgcacctgttgtcgatgtaatcattttgggaacagaaacgttgtgtctcaaaaagattcgttgtcagttcagccaagatgttctttacctgagattctggaaagatgtttatctatatcggaacacttctacattattaaatgtccttaagctttttcttttttacaagtgtcttttcagactttggtgttgtgatgacacagtagaaagagcgtggctagaatccgtggtttgccacatctgcagcttaccaaacggatgacttgtccaggacatctgatccctgtaagcctcagcatccctcctggtaaatggagggttttttacgacaaagcccaaagggaggttttggatgattaggctgtgtgtgcgtgtgagaatgatcacatgtggcgtcatgctttgtacagagcctcagaccactgggcctcgtccagtgagagtcctctctggcgacatcacacgcggagcagccaggggccaccttagatctcagatctctcagagcaatacttttctgaactgccactgtgcctgggtggttgggttggtgtcatgcttctgactagagtagatcgcgcatgtccaccagtgatacgttgagtccttacagttccccccatggagtcccataagcagctccatcgagatctgtcagcaagttgcaggaccccacaatgttctgacatgttaagacccccttacatgacgagtagagaggcagctgaggccacaaccgtgtcttcctcttgaatggagctaactcggaaccccccgttttctcttcctttctgcccaccactgaacattgccttttagataactcagtgtttcttctagatgtcatagcaatagactttcactttcatgaagtttgggtacgatttggattctcgcttaagtacatatatttatcaatatttttataaggcaaagttcacttaaaaaatctttccaagtagcagtgtgcctaagatggcaaaatactaaaaactggtgtttcctgctcctgttgtgtgtcacttttcaagccgattgaaatatttctggcttttagggcattactttttaactatctcctttaaaaacgatgttctgtaggtttagtgtctttgttcatttccaaaagagtccagacaactgtgtctgcccctgcagaggctgtttgtccaaaggcagcatgccgcttccaccggaatgcagacagcaggggagcggaattctaaagcagcgacttaaaatgaggaatccccaattgcactaaatggtttcaggattgactaatcattgtcttaacattaactcagattttcaatgtgtaaagagctgtgtgacttggcgtctgagagatccctctgctttgctttgcttcagagtcctcgcacccgcatcctcagaactgtggggcatggtgggctctaacgagcactccccttctgttttccttcattacttttgacctccttaagacttcagagagaatgtccgtcaagttcttttctccatcaagttctttaagttccttgaaaggaagggactgtgcaaacacaaagcaatattcttttgtatctgcaaatgcatcagctggacataccaattggtatcaaatagaataaaatcaaatataaatgtttgagtcttaggttaaaaaggaaggttatttgtatagtttatagataatgaaggaaaaatttctttttcattgcaggaaatcttgtttactggaagatagagtcactcttttcatataagacaaatagtgctttaatgccaacttctttttatctcaacatttcaggatcatgctaggcacactgcccccttgaatagacattatatgcacagttgcaagtcagccaatgtttttattcagaagtatttccccccattatagtgcctgcatatcagagatacaaaaagcatccaacacactaccgtaataggcttctttggggatgagaaatttgagtctcaacaactcagagtttgagatgtcagcttttttggtaaacgtaggtgttagaggtatattttgctttcctacaacaattgttggcccttgatttcaagcatgttgcttcataggaagcaccagagtgccatctgctgcatttcaagagattgtaaatgtcatctcagctggctcagttatatctctaatgtcccgggtagcagcacctccctctaaaaatatgtttacttcactgtttcacttgtattttgtgtatacgaaatggcagcttccgatttctagttggatttgtcttgcattgtttgtataacttgctggtcacccagggctatttgctttttcattgagaaatttggtaggggtgtctagttcagcttttatgttgatccatcctgacttattttagacattgaatttatctcaccacaagtaaaagaacatgtgtattgactgtctttgctaagtttcctaatttttcctaattatggcaattatggatgtgaataagaatactgatgctgtacaaatatttttgtggaaatgtaccttgttaatgtgactatttaaataatatgaaaataagaatactcttgaagaaaaaattaaaatatttactctttgga

SEQ ID NO: 196295 - protein, 528 aa, Artificial Sequence
  derived and/or modified sequence
MFGAAGRQPIGAPAAGNSWHFSRTMEELVHDLVSALEESSEQARGGFAETGDHSRSISCPLKRQARKRRGRKRRSYNVHHPWETGHCLSEGSDSSLEEPSKDYRENHNNNKKDHSDSDDQMLVAKRRPSSNLNNNVRGKRPLWHESDFAVDNVGNRTLRRRRKVKRMAVDLPQDISNKRTMTQPPEGCRDQDMDSDRAYQYQEFTKNKVKKRKLKIIRQGPKIQDEGVVLESEETNQTNKDKMECEEQKVSDELMSESDSSSLSSTDAGLFTNDEGRQGDDEQSDWFYEKESGGACGITGVVPWWEKEDPTELDKNVPDPVFESILTGSFPLMSHPSRRGFQARLSRLHGMSSKNIKKSGGTPTSMVPIPGPVGNKRMVHFSPDSHHHDHWFSPGARTEHDQHQLLRDNRAERGHKKNCSVRTASRQTSMHLGSLCTGDIKRRRKAAPLPGPTTAGFVGENAQPILENNIGNRMLQNMGWTPGSGLGRDGKGISEPIQAMQRPKGLGLGFPLPKSTSATTTPNAGKSA

SEQ ID NO: 196296 - DNA, 1587 bp, Artificial Sequence
  derived and/or modified sequence
atgttcggcgccgccggcagacagcccatcggcgcccccgccgccggcaacagctggcacttcagcagaaccatggaggagctggtgcacgacctggtgagcgccctggaggagagcagcgagcaggccagaggcggcttcgccgagaccggcgaccacagcagaagcatcagctgccccctgaagagacaggccagaaagagaagaggcagaaagagaagaagctacaacgtgcaccacccctgggagaccggccactgcctgagcgagggcagcgacagcagcctggaggagcccagcaaggactacagagagaaccacaacaacaacaagaaggaccacagcgacagcgacgaccagatgctggtggccaagagaagacccagcagcaacctgaacaacaacgtgagaggcaagagacccctgtggcacgagagcgacttcgccgtggacaacgtgggcaacagaaccctgagaagaagaagaaaggtgaagagaatggccgtggacctgccccaggacatcagcaacaagagaaccatgacccagccccccgagggctgcagagaccaggacatggacagcgacagagcctaccagtaccaggagttcaccaagaacaaggtgaagaagagaaagctgaagatcatcagacagggccccaagatccaggacgagggcgtggtgctggagagcgaggagaccaaccagaccaacaaggacaagatggagtgcgaggagcagaaggtgagcgacgagctgatgagcgagagcgacagcagcagcctgagcagcaccgacgccggcctgttcaccaacgacgagggcagacagggcgacgacgagcagagcgactggttctacgagaaggagagcggcggcgcctgcggcatcaccggcgtggtgccctggtgggagaaggaggaccccaccgagctggacaagaacgtgcccgaccccgtgttcgagagcatcctgaccggcagcttccccctgatgagccaccccagcagaagaggcttccaggccagactgagcagactgcacggcatgagcagcaagaacatcaagaagagcggcggcacccccaccagcatggtgcccatccccggccccgtgggcaacaagagaatggtgcacttcagccccgacagccaccaccacgaccactggttcagccccggcgccagaaccgagcacgaccagcaccagctgctgagagacaacagagccgagagaggccacaagaagaactgcagcgtgagaaccgccagcagacagaccagcatgcacctgggcagcctgtgcaccggcgacatcaagagaagaagaaaggccgcccccctgcccggccccaccaccgccggcttcgtgggcgagaacgcccagcccatcctggagaacaacatcggcaacagaatgctgcagaacatgggctggacccccggcagcggcctgggcagagacggcaagggcatcagcgagcccatccaggccatgcagagacccaagggcctgggcctgggcttccccctgcccaagagcaccagcgccaccaccacccccaacgccggcaagagcgcctag

SEQ ID NO: 196297 - DNA, 1587 bp, Artificial Sequence
  derived and/or modified sequence
atgttcggtgcagcgggtagacagccaattggcgccccagctgccggtaactcctggcacttttcccgtacaatggaggagctggtccacgacttagtctctgctctcgaagaatcatctgagcaggcacggggaggttttgccgagacaggtgaccattctaggtccatttcatgtcccctcaaacggcaggcccgtaaacgtcgaggaaggaaacgacgcagctataatgtgcaccatccctgggaaactggccactgcctttcggaggggtcagacagcagccttgaagagccatccaaagactaccgtgaaaaccataataacaacaaaaaggatcatagcgattccgatgaccagatgctggtggctaagcgccgccccagcagcaacctgaataacaatgtgagagggaagcggcccctgtggcacgaatctgacttcgcggtggataacgtgggaaatcggaccctgcgccgaagaaggaaggtcaagcgaatggcggtcgacctgccccaggacatatcaaacaaaagaaccatgacacaaccacctgagggatgtcgcgaccaggatatggacagcgaccgtgcctaccagtatcaggaattcactaaaaataaggtcaagaaaaggaaacttaagatcattagacagggcccaaaaattcaagacgagggcgtggtcctcgaatcggaagagactaatcaaactaacaaagacaaaatggaatgtgaggaacagaaagtatcagatgaactgatgtcggagtcagattccagctcattgtcaagcaccgacgccggactattcacaaatgacgagggccgacagggcgacgacgagcagtcagactggttttacgaaaaggagtctggcggtgcttgcggcattactggggtcgtcccttggtgggagaaggaggaccccactgaactcgataaaaacgtccctgatccagtattcgagagcattcttaccggttcattcccattgatgtcacaccctagcaggcgcggattccaagcacgacttagtcgcttacacggtatgtcaagtaaaaacatcaaaaagagcggaggaactccgactagtatggtgccgatcccaggaccagtcggcaataaaaggatggtgcatttctcacctgacagccaccaccatgaccactggttttctcccggtgctcgaaccgaacatgaccagcaccagctacttagggataatcgggcagaacggggtcataaaaagaattgttcggtgagaaccgcctctagacagacttccatgcatctcgggagtctgtgcacgggtgacattaaaaggcggcggaaggccgcaccccttcctggcccaacaactgccggcttcgtgggagaaaacgcccaacccatcctggagaacaatatcggaaacagaatgctgcagaacatgggatggactcccggatccgggctgggcagagacggtaaggggatctcagaacccattcaggcgatgcagaggccaaaagggttaggccttggcttccccctacctaagtcaacatctgccactacgacacctaacgctggcaaatccgcctag

SEQ ID NO: 196298 - DNA, 1587 bp, Artificial Sequence
  derived and/or modified sequence
atgtttggagctgctggccggcagcccatcggggccccagctgctggcaacagctggcacttcagcaggaccatggaggagctggtgcatgacctggtgtctgccctggaggagagcagcgagcaggcccggggcggctttgctgagaccggggaccacagccgcagcatcagctgccccctgaagaggcaggccaggaagaggcggggcaggaagagaagaagctacaacgtgcaccacccctgggagaccggccactgcctgtctgagggcagtgacagcagcctggaggagcccagcaaggactaccgggagaaccacaacaacaacaagaaggaccacagcgacagtgatgaccagatgctggtggccaagaggcggcccagcagcaacctgaacaacaacgtgcggggcaagaggcccctgtggcatgaaagtgactttgctgtggacaacgtgggcaacagaaccctgcggcggcggaggaaggtgaagaggatggctgtggacctgccccaggacatcagcaacaagaggaccatgacccagcccccagagggctgccgggaccaggacatggacagcgaccgggcctaccagtaccaggagttcaccaagaacaaggtgaagaagaggaagctgaagatcatccggcagggccccaagatccaggatgaaggagtggtgctggagagcgaggagaccaaccagaccaacaaggacaagatggagtgtgaggagcagaaggtgtctgatgagctgatgtctgagagtgacagcagcagcctgagcagcacagatgctggcctcttcaccaatgatgagggccggcagggagatgatgagcagagcgactggttctatgagaaggagagcggcggggcctgtggcatcactggagtggtgccctggtgggagaaggaggaccccacagagctggacaagaatgtgcctgaccctgtgtttgagagcatcctgaccggcagcttccccctgatgagccaccccagccggcggggcttccaggcccggctgagccggctgcacggcatgagcagcaagaacatcaagaagagcggcggcacccccacctccatggtgcccatccctggccctgtgggcaacaagaggatggtgcacttctccccagacagccaccaccacgaccactggttcagccctggggccaggacagaacatgaccagcaccagctgctgcgggacaacagagctgagcggggccacaagaagaactgcagcgtgaggacagccagccggcagacctccatgcacctgggcagcctgtgcacaggagacatcaagagaagaaggaaggccgcccccctgcccggccccaccacagctggctttgtgggggagaatgcccagcccatcctggagaacaacatcggcaacaggatgctgcagaacatgggctggaccccaggcagcggcctgggcagagatggcaagggcatcagcgagcccatccaggccatgcagaggcccaagggcctgggcctgggcttccccctgcccaagagcaccagcgccaccaccaccccaaatgctgggaagagcgcctag

SEQ ID NO: 196299 - DNA, 5851 bp, Artificial Sequence
  derived and/or modified sequence
ccggaagctcatctcaaaatgctgaactgctctttggaagtcgccggtgctgttgtagttggagtctgttcacgggcctgagcttcgaggccaggctcccgggtgtcgttaatgttcggggccgccgggcgccaaccgatcggagctccagcagccgggaacagctggcatttcagtagaaccatggaggagctggttcatgaccttgtctcagcattggaagagagctcagagcaagctcgaggtggatttgctgaaacaggagaccattctcgaagtatatcttgccctctgaaacgccaggcaaggaaaaggagagggagaaaacggaggtcgtataatgtgcatcacccgtgggagactggtcactgcttaagtgaaggctctgattctagtttagaagaaccaagcaaggactatagagagaatcacaataataataaaaaagatcacagtgactctgatgaccaaatgttagtagcaaagcgcaggccgtcatcaaacttaaataataatgttcgagggaaaagacctctatggcatgagtctgattttgctgtggacaatgttgggaatagaactctgcgcaggaggagaaaggtaaaacgcatggcagtagatctcccacaggacatctctaacaaacggacaatgacccagccacctgagggttgtagagatcaggacatggacagtgatagagcctaccagtatcaagaatttaccaagaacaaagtcaaaaaaagaaagttgaaaataatcagacaaggaccaaaaatccaagatgaaggagtagttttagaaagtgaggaaacgaaccagaccaataaggacaaaatggaatgtgaagagcaaaaagtctcagatgagctcatgagtgaaagtgattccagcagtctcagcagcactgatgctggattgtttaccaatgatgagggaagacaaggtgatgatgaacagagtgactggttctacgaaaaggaatcaggtggagcatgtggtatcactggagttgtgccctggtgggaaaaggaagatcctactgagctagacaaaaatgtaccagatcctgtctttgaaagtatcttaactggttcttttccccttatgtcacacccaagcagaagaggtttccaagctagactcagtcgccttcatggaatgtcttcaaagaatattaaaaaatctggagggactccaacttcaatggtacccattcctggcccagtgggtaacaagagaatggttcatttttccccggattctcatcaccatgaccattggtttagccctggggctaggacagagcatgaccagcatcagcttctgagagataatcgagctgaaagaggacacaagaaaaattgttctgtgagaacagccagcaggcaaacaagcatgcatttaggatccttatgcacgggagatatcaaacggagaagaaaagctgcacctttgcctggacctactactgcaggatttgtaggtgaaaatgcccagccaatcctagaaaataatattggaaaccgaatgcttcagaatatgggctggacgcctgggtcaggccttggacgagatggcaaggggatctctgagccaattcaagccatgcagaggccaaagggattaggacttggatttcctctaccaaaaagtacttccgcaactactacccccaatgcaggaaaatccgcctaagaaaagcaaagaagaaatgttttacagactttattcactatgtcccattgttctaaaatgataacatgacttctgtttttgaagcaaaaatctacattgcctcaaacacatcactctagcttccttactgcatacagtcctgccatagtgagagaaatgggatttcatcacaattcatggtgctaaaatgaaaacctctgcactttaatttttttcagtaatttccagctatttctaggtataaagagcagctcgtttctcttatttattttagtctcatgtgtcaatactttccgatgctttgcttaattcatgtatgtgtgcagtgctgcaatgcccagacaaacgtgagcacacccaccagtttctaaaatggaatagacaggaaaagattgtgttttatatcatccctatctattgtaacccaaaagacctaccatcgcatcagtgaagtccgaacacatctttgtttgaaaggcttgtcaatttcatattccttgaattggcttcttggtgaggattttctgacagagtgatacccatcaattttctatccttagacaatgtagtgtgaagttcacagttgacaaacaacaattaatgtttcccttggatgttttgacaaaaataaacctcatcgttgttatcaccagagtgccctctaccttactttaatgcagattttataaattttacctcatttagaacataaaataattattgaaagaaaaatgtattttttaaattcaccgtgattgaactgtaaattctattaatccagatgtacttctacctctgttttcccaaagattgatattatttttaagatcaactcaagtgtagtaaacggatttaaaattttaatcattggagtaatttattacaatattgaatcaatttacatgaaaagttaaatggctctcccagaactcagatttctggcaatgacccaacccatttagaaggtgaacaaaagaagtaaatggtactgatttgccctttctaggacccaagatgttactttaaaacctagcaaaagaggtcgtttgtattacgtgcctagtattgagctgtttctgagtcatttgcttcatagtatcagaaattctaaattgcttttagtttagaagatctttatttattatcttcattattaacaacttattatgatgatgattattatcattctatttataatggcctttgctggttgagtaaagactgagataacacatgtgaatcacctttctaatgggtttttaaaatcttgtcactttccaaaagagtttttttgtttctttttttttttttttttttttgacagagtctgcctctgtcgcccaggctggagtgcagtggcgcactctcggctcactgcagcctccccctcctgggttcaagtgattgttctgcctcagcctcccaaatagcagggattacaggcacccacgaccatacccggataatttttgtatttttagtatagacggagtttcaccatgttggccaggctggtctcgaactcctgacctcaagtgatccgcccaccttggcctcccaaagagctgggattacaggcatgaaccacagcgcccagcccccagaagagtttttaaaaggtgttaaaggaggtttatgcacgtaacagacctttctcaggtggtcccctaaaaaaaatcctgccaactagggaggggaagtccaacctgctatttgaaagccttcacggtttgccaaatgtacatttcttgagaattatcttctttcccagggatattgtacctagaggacaggttggttagggaactatggacgaccagaagagatgttcttttgaagcattcttactggataaagtaaccccatggtatcattactttctacaagttttttacttacaaatttgccatttttttaactgatattttctaaatgctcattctgtctatgtagccggggggagattatatacaagttttaaaacttctttgtgatagtgtattgtgctctggggtctattcaaaatttggtgtttgaggttttgttaatttgattgcctggagatctgctaaaatcctagaatctcaaaaagccaagtttgaagccactgagagcaaacaatgaggtcattgttagcctggttccacactcctgaggacttggctgttctttttcaccttattatgttctaatggaagtaaaaaccctcatagtgaagaagagcagtatatacaccagactagtgtataggaacttcttcattaaatattgcagtccttatgagtgctctttattgttgctgttctggacaggtacaaatcttctgaagcaacttctgtgggatgttaacttagcttctctaacacctaaaaaaattcttctttgtattttcagctaatagaagacagttcttcttcatcttgacacctagagccctctatgtgattcacagaggacttaaaatacttcttactctgttgaagtgtttaattgtacagaatatatgtactctacagtatatgtgaatcagcactcaaagcagagaagtgataacatcccaagcttcccccatacttctactgacatgccctcagtctttaagaaaactcagtacagacctgatgttctggttgtacctgaacttaattggagaaacaaacgcaattaaaatacgaattttttagtgcaaatcaaatgtctttcaccatctgaagcccactaatttgtcttttatatatagttaattttttgccagttacaacgtccatagaaccccaagatttagaatgtatcatttatatttcctctaaaaggtagtaagatatttcttctgctgttttgtgaagccactcttctacagtatctgtagccttatagcaaattaattggttgtactaaaaattttagagactgcataggtctcccttttctatcctaattacctgcaatagcctagagacgctgagcatgattacattagcaacttgactgtttaaaaaatttgttatacttgataatgaccagactgtgtgctggagtcatttgtttccttcttttctgctccccgaatacactatttaatttggttacttttatttttaaactatatggcacccttttaaataaacattcattgctaattaaaatctgccaataaattggtctcagcatttaaataccatatattttataactcatactgtggctatcaaacagaagttaacacagtaggggtaaagatatacataatgtgtacctataggtgtatttataatgcctgtgtgcagtatacagacataattacaaaatactgcattttattaatgtttattttaatattgagaattggcattcttgtaaattgaactgacaattgcttctattcagtacactttattttgagcagatatttccgaaaagagaaaaaatcactgttgacatgctttttaaaactgttttcacctgtattttgtctttcaaaaagaaaagtgatctaagttggcattgtaaagaaattgttagcaaagaatatttttttttattttttcttttggtagaaagtcatgttaatagtacaacaaagaatcaaagaataaaacataatgtttaagaacattatttataagtagtcattgtctttgtgctttaaatgtttcccttttaccttagagttattttttaaaagttgaaagtactttaaaaattggtttaaatgagtacccattgacaattatcatttaatagtgcagttaagttcagcgaaaaatttcaatatctcaaaaaaattagagaaaaatattggtaaatgtatttgattcacaaatgtattcatagccgattgtgagctgctctaccacattttcctgtttttattgtttctgtgaagcttgattagactaacttgcttaaggtctctttcccctcaaggattctgtgattctaatgtaacaaggtacacacgctctctctgaccacttaaagtatcagagttcaaatctgttacaatcactccatttccttttggaaagttgtgcctctcataaagctgcttggacattttaagtgttttgtaatatgcattgaagtgttgagttttgtttgctgtaagaggcatttcactatgttgattaaacttatcttttctcccaaaaaa

SEQ ID NO: 196300 - DNA, 1587 bp, Artificial Sequence
  derived and/or modified sequence
atgttcggcgccgccggccggcagcccatcggcgcccccgccgccggcaattcctggcattttagccgtaccatggaggaactggtccatgaccttgtctccgcccttgaagagagctcagagcaagcccggggcggctttgctgagactggggaccactcacggagcattagctgtcctttaaaaagacaggcaaggaagcgccgtggtcggaagaggcgctcctataacgtgcatcacccatgggagacagggcattgcttgagtgaaggaagcgattcctctctggaagagccgtcaaaggactaccgcgagaatcataataacaataagaaggaccatagtgactcagatgatcagatgcttgtggcgaagcgccgtccctcgtctaacctgaataataatgtcaggggcaagagacccctatggcatgagtctgacttcgccgtcgacaacgttgggaatcgaaccttacgacgccgacggaaggtcaagaggatggctgtagacttgccccaggatatttcaaacaaaagaactatgacccagcctcctgaaggctgcagggatcaggatatggactcagatcgagcgtaccagtatcaggagttcactaagaataaggttaagaagcggaagctcaagatcataagacaagggcccaaaatccaagacgagggggtagtactcgagtccgaggaaacgaatcagacaaacaaagataagatggagtgcgaagagcaaaaagtgagcgatgagttgatgtcagagagcgattcctcttctttgtcttcaacagatgcgggcctgttcaccaacgatgagggacgccagggagatgatgagcagagcgactggttctacgagaaggaaagcggcggagcgtgcggcattacaggcgttgtgccatggtgggagaaagaagacccaacggaactcgataagaacgtgccagaccctgtgttcgaatccatcctgaccggctcattccctctcatgtcacatcccagcagaagggggtttcaagcacgcctcagccggctgcatggtatgtctagcaagaacatcaagaagtctggtggcacccccacttccatggttcctatccctggtcctgttggtaacaagcgtatggtgcacttttcacccgacagccatcaccatgaccactggtttagccctggggcacggaccgagcacgatcagcatcaacttctgcgtgataatcgggcagagaggggccacaaaaaaaattgcagcgtgcggactgcatcacggcagacaagtatgcatctgggaagcctgtgcacaggagacattaaacgccggagaaaggcggccccattgccagggccaaccactgccgggtttgtgggggaaaatgctcagcccattctggagaataatattggcaatcgcatgctgcagaatatgggctggactccaggctcaggccttgggcgagacggaaaaggcatctccgagcctatccaagccatgcaaagacctaagggcctgggcttgggcttcccactgccaaaaagtacaagcgctactacgactcccaatgcaggaaagtctgcatag

SEQ ID NO: 196301 - DNA, 1587 bp, Artificial Sequence
  derived and/or modified sequence
atgttcggcgctgctggtaggcagcctattggtgccccagccgctggtaattcctggcacttttcgaggactatggaggaactggtgcacgacctggtatcggcgctggaggaaagctcagagcaggcaagggggggatttgcagagactggtgatcactcccgaagtattagttgtccccttaagagacaagctaggaaaagaagagggcgtaagcgtaggagttataacgtgcatcatccttgggaaactggccactgcctttccgaagggtcagactcatccctggaagaaccgtccaaggattatcgggagaaccataataataataagaaagatcactcagacagtgacgatcagatgctggttgcaaaacgacgacctagttctaatcttaacaacaatgtacgaggcaagagacccttgtggcatgagagtgatttcgccgtcgataacgtgggcaatagaacgttgagaaggcgtcggaaggtcaaaaggatggcagtggacttgccacaggatatcagtaataagcggaccatgacgcagccccctgagggctgtagggaccaggacatggatagcgacagggcctaccagtaccaggagttcacaaaaaataaagtcaagaaacggaaactgaaaatcatcaggcaggggccaaagatccaagacgaaggggttgtgcttgaatccgaggagacaaatcagactaacaaagataagatggagtgcgaggagcagaaggttagtgacgaattgatgtctgaatctgactctagcagtcttagctcaacagacgcaggcctatttacaaacgatgaggggagacagggtgacgatgagcagagcgattggttctatgaaaaggagtccggaggcgcatgcgggatcacaggcgtcgtcccgtggtgggagaaagaagatccgaccgaattagacaaaaatgttcctgaccctgtgttcgaaagtattttgacgggctctttccccctcatgagccacccgtctcgcagaggcttccaggctcggctttctaggctgcacggaatgtctagtaagaatataaaaaagtcaggaggaactccgacatcgatggtcccgatccccggtcccgttggcaataagcgcatggtgcacttttctcccgacagccaccaccatgaccactggttctcccccggtgcccgaacagagcatgaccagcaccagttactgcgggacaatcgtgcagaacgtgggcacaagaaaaattgttccgtgcgcactgcatcaaggcaaacaagcatgcatctaggctccctctgcactggtgatattaagaggcgacgaaaagctgctccccttccaggacctaccaccgccggtttcgttggagagaatgcacagccgattctagaaaacaacattggaaatcggatgcttcagaacatggggtggacccccggaagcggtcttggtcgcgacggtaagggaatttcagaaccaatccaagccatgcagagacctaagggactcggtctcggattcccattgcctaagtccacaagcgcaacaacaaccccgaatgctggtaagtctgcgtag

SEQ ID NO: 196302 - protein, 986 aa, Artificial Sequence
  derived and/or modified sequence
MRVNEKYSTLPAEDRSVHIINICAIEDIGYLPSEGTLLNSLSVDPDAECKYGLYFRDGRRKVDYILVYHHKRPSGNRTLVRRVQHSDTPSGARSVKQDHPLPGKGASLDAGSGEPPMDYHEDDKRFRREEYEGNLLEAGLELERDEDTKIHGVGFVKIHAPWNVLCREAEFLKLKMPTKKMYHINETRGLLKKINSVLQKITDPIQPKVAEHRPQTMKRLSYPFSREKQHLFDLSDKDSFFDSKTRSTIVYEILKRTTCTKAKYSMGITSLLANGVYAAAYPLHDGDYNGENVEFNDRKLLYEEWARYGVFYKYQPIDLVRKYFGEKIGLYFAWLGVYTQMLIPASIVGIIVFLYGCATMDENIPSMEMCDQRHNITMCPLCDKTCSYWKMSSACATARASHLFDNPATVFFSVFMALWAATFMEHWKRKQMRLNYRWDLTGFEEEEEAVKDHPRAEYEARVLEKSLKKESRNKEKRRHIPEESTNKWKQRVKTAMAGVKLTDKVKLTWRDRFPAYLTNLVSIIFMIAVTFAIVLGVIIYRISMAAALAMNSSPSVRSNIRVTVTATAVIINLVVIILLDEVYGCIARWLTKIEVPKTEKSFEERLIFKAFLLKFVNSYTPIFYVAFFKGRFVGRPGDYVYIFRSFRMEECAPGGCLMELCIQLSIIMLGKQLIQNNLFEIGIPKMKKLIRYLKLKQQSPPDHEECVKRKQRYEVDYNLEPFAGLTPEYMEMIIQFGFVTLFVASFPLAPLFALLNNIIEIRLDAKKFVTELRRPVAVRAKDIGIWYNILRGIGKLAVIINAFVISFTSDFIPRLVYLYMYSKNGTMHGFVNHTLSSFNVSDFQNGTAPNDPLDLGYEVQICRYKDYREPPWSENKYDISKDFWAVLAARLAFVIVFQNLVMFMSDFVDWVIPDIPKDISQQIHKEKVLMVELFMREEQDKQQLLETWMEKERQKDEPPCNHHNTKACPDSLGSPAPSHAYHGGVL

SEQ ID NO: 196303 - protein, 986 aa, Artificial Sequence
  derived and/or modified sequence
MRVNEKYSTLPAEDRSVHIINICAIEDIGYLPSEGTLLNSLSVDPDAECKYGLYFRDGRRKVDYILVYHHKRPSGNRTLVRRVQHSDTPSGARSVKQDHPLPGKGASLDAGSGEPPMDYHEDDKRFRREEYEGNLLEAGLELERDEDTKIHGVGFVKIHAPWNVLCREAEFLKLKMPTKKMYHINETRGLLKKINSVLQKITDPIQPKVAEHRPQTMKRLSYPFSREKQHLFDLSDKDSFFDSKTRSTIVYEILKRTTCTKAKYSMGITSLLANGVYAAAYPLHDGDYNGENVEFNDRKLLYEEWARYGVFYKYQPIDLVRKYFGEKIGLYFAWLGVYTQMLIPASIVGIIVFLYGCATMDENIPSMEMCDQRHNITMCPLCDKTCSYWKMSSACATARASHLFDNPATVFFSVFMALWAATFMEHWKRKQMRLNYRWDLTGFEEEEKALLDHPRAEYEARVLEKSLKKESRNKEKRRHIPEESTNKWKQRVKTAMAGVKLTDKVKLTWRDRFPAYLTNLVSIIFMIAVTFAIVLGVIIYRISMAAALAMNSSPSVRSNIRVTVTATAVIINLVVIILLDEVYGCIARWLTKIEVPKTEKSFEERLIFKAFLLKFVNSYTPIFYVAFFKGRFVGRPGDYVYIFRSFRMEECAPGGCLMELCIQLSIIMLGKQLIQNNLFEIGIPKMKKLIRYLKLKQQSPPDHEECVKRKQRYEVDYNLEPFAGLTPEYMEMIIQFGFVTLFVASFPLAPLFALLNNIIEIRLDAKKFVTELRRPVAVRAKDIGIWYNILRGIGKLAVIINAFVISFTSDFIPRLVYLYMYSKNGTMHGFVNHTLSSFNVSDFQNGTAPNDPLDLGYEVQICRYKDYREPPWSENKYDISKDFWAVLAARLAFVIVFQNLVMFMSDFVDWVIPDIPKDISQQIHKEKVLMVELFMREEQDKQQLLETWMEKERQKDEPPCNHHNTKACPDSLGSPAPSHAYHGGVL

SEQ ID NO: 196304 - DNA, 2961 bp, Artificial Sequence
  derived and/or modified sequence
atgagagtgaacgaaaaatacagcactctacctgctgaggaccggtctgtgcacatcatcaatatatgcgctatagaagacataggctaccttccatcagagggaacactgcttaacagtctttcagtcgatccagatgccgagtgcaaatacggcttgtattttagggacgggcgcaggaaggtggattatattttagtttaccatcacaagcgcccctccggtaacaggacattggttagaagagtgcaacattcagatactccctcaggagccaggtccgttaagcaagatcacccactgccaggcaaaggcgcctctcttgacgctggctctggagaacccccgatggattaccatgaagatgacaaaagattcaggcgagaagaatatgagggtaatctcttggaggccgggcttgagttggagcgagatgaggacacaaagatccatggcgtcgggtttgtgaagatccacgctccatggaacgttctgtgtcgagaggccgaattcttgaagttaaaaatgccaacgaaaaagatgtatcatattaatgagacccgaggcctgcttaagaaaatcaattctgtgctgcagaaaataactgatcctatccagcccaaggtcgcggagcacagaccccagacgatgaagaggctgagctacccattcagcagagaaaagcagcacctgttcgatctgtcggacaaagatagctttttcgactccaagacccggagtaccatcgtgtacgaaattctgaagcgtaccacatgcacaaaggcaaagtattccatgggaataacttctctgttggcaaacggtgtgtacgccgctgcctacccactgcatgacggtgactacaacggtgagaatgtagagtttaacgaccgcaaactcctgtacgaggaatgggccaggtatggagtattctataagtaccaacctatcgatttggtaaggaagtacttcggggaaaaaataggtctgtacttcgcttggttgggagtttatactcagatgctcatcccagcttccattgtagggatcatagtgtttctgtatgggtgcgccacaatggacgaaaatattccgtcaatggagatgtgcgaccaacgccataacattactatgtgccctttatgcgacaagacctgttcttactggaagatgtcctcggcctgcgctaccgctagggcttcgcatctctttgacaatcctgccacggtgtttttctctgtgtttatggccctctgggccgccaccttcatggaacactggaagcgcaagcaaatgcggctgaactacaggtgggatctcactggctttgaggaggaggaggaggcagtcaaggaccacccaagggctgaatacgaggcaagggtgctggaaaaatccctgaaaaaagagtctaggaacaaggagaaaagaagacatatccctgaagagtctaccaacaaatggaaacaacgagtaaaaactgccatggcaggcgtcaagctgaccgataaggtcaaactgacttggcgggatagattcccagcctacttaaccaatctagtgtccattatcttcatgatcgccgtgacttttgctattgttctgggtgtgatcatatacaggatttccatggctgccgccctggcaatgaacagctcgccatcagtgagatcaaatatcagagtgacggtgacagctaccgccgtgattatcaaccttgtggttataatcctcttagacgaagtttacggctgcatagcgcgatggctcacaaagatcgaggtgcctaagacagaaaaatcctttgaggagaggttgattttcaaggcttttctgctgaaatttgtgaactcctatacccccatcttctatgttgcgttctttaagggccgattcgttggaaggccgggggattacgtgtatattttccggagttttaggatggaggaatgcgctccgggaggctgtttgatggagttatgtatccaactatcaataattatgctgggcaaacagctgatccagaacaatttatttgagataggaatccccaaaatgaaaaagctcatccgctatctaaagctcaagcagcagagccccccagatcacgaggagtgcgttaagaggaaacagaggtacgaagtggattataaccttgaaccctttgctggcctgacgccagagtacatggagatgatcattcagttcgggttcgtcaccctctttgtggcctcctttccgctcgcccccctgtttgctctgttaaacaacatcattgaaattcgcctggacgctaagaagtttgtcacggagctgagaagaccagttgccgtcagggccaaggatattggaatctggtataacatcttacgcgggattggaaaactcgccgtcatcatcaacgctttcgtgatttcttttaccagtgatttcatccctcggttggtctacctttacatgtattcaaagaatggaaccatgcatgggtttgttaatcatactctctcatctttcaacgtgtcagacttccagaatggcaccgcccccaacgatcctctggatctcgggtacgaagtgcagatttgcagatacaaagactaccgggagcccccatggtccgagaataagtacgacatttcgaaagacttctgggcggtgctggctgccagactcgcctttgtgatagtcttccagaacctagttatgttcatgtcagatttcgttgattgggtgatccctgacatccccaaggacatttcccagcagattcacaaggagaaggtcctgatggttgagctatttatgcgggaggagcaggacaagcagcagctgctggaaacatggatggagaaggaaaggcagaaagatgagcccccatgcaaccatcacaataccaaggcttgccccgactctctcgggagtcctgccccgtcccacgcttatcatggtggagtgctgtag

SEQ ID NO: 196305 - DNA, 2961 bp, Artificial Sequence
  derived and/or modified sequence
atgcgcgtgaatgagaagtattctacactcccggcggaggaccgctccgttcacatcattaacatctgtgccattgaggatattgggtatctgccatcagagggtacactgctcaactctctctcggtggaccctgatgcagagtgtaagtacggcctgtactttagagacggccgacggaaagttgattatatcctcgtttatcaccacaaacgacctagtggtaaccggaccctggtccgccgcgttcagcactcagatacgccatccggagctagaagcgtcaaacaagatcatcctttgccaggcaagggcgcaagcttggacgccgggtctggtgagcccccaatggactatcacgaagacgataagcgctttcggcgcgaggaatacgaaggcaatctcctggaggctggcctggaactggaaagagatgaggacactaaaatccacggcgtcggctttgtcaaaatccatgcaccctggaacgtgctgtgtagggaagccgaatttctgaagctaaagatgcctacaaagaagatgtatcacatcaatgagacgagggggctcctgaagaaaatcaatagtgtgctgcagaagatcactgaccccatacaaccgaaggtggctgaacaccgccctcagaccatgaagcgcctgagttatcctttctcccgtgaaaagcagcatctttttgacctcagcgataaggatagcttttttgatagtaagacccgctccaccatcgtgtatgaaatcctaaagagaacaacgtgtaccaaagcaaagtattcaatgggtatcaccagtcttctggccaatggtgtgtacgcagccgcctatccgctgcacgacggggactacaacggtgaaaatgtcgaatttaacgatagaaaactgctttatgaggagtgggccaggtacggcgtcttttacaaatatcagccaattgacctggtacgaaagtattttggtgagaaaattgggttgtactttgcctggctaggagtgtacacccagatgcttatccccgcgagtattgtagggatcattgtgtttctgtacggatgcgccacgatggacgagaatataccctccatggaaatgtgcgaccagagacataacatcaccatgtgcccactctgcgacaaaacttgcagttactggaaaatgtcctctgcgtgtgccacagcacgcgccagtcatttatttgataatcccgccactgtctttttctcagtatttatggccctgtgggcggccactttcatggaacattggaaacggaaacaaatgcgcctgaactacagatgggacctgacagggttcgaagaggaggagaaggcccttctcgaccatccacgggcggagtacgaagctagggttctggaaaagagtctgaagaaggagtcacgcaataaagagaaacgcaggcatatcccagaggagagcacgaataagtggaagcagcgagtgaaaactgccatggcaggggtgaaattgacagacaaagtcaagctgacttggcgggaccgcttccccgcctatctcacaaatctggtgtcaattattttcatgatcgccgttacctttgccattgtactcggcgtaatcatctatagaatatccatggccgccgccctggctatgaacagctcaccgagcgtgaggagcaacatccgcgtcaccgtcacggccaccgctgttatcatcaacttggtcgttatcattctgctggatgaagtgtacgggtgcatcgctcgctggcttaccaaaattgaggtcccaaagactgagaaaagttttgaagagcggctaatctttaaagccttcctgcttaaatttgtgaattcatacacccccattttctatgtcgcattttttaaagggcggttcgtggggagaccgggagactacgtctacatcttccggtctttcaggatggaggaatgtgccccgggtgggtgtctgatggagctctgtatccagctgtccatcatcatgctgggcaagcagctcattcagaacaatctgttcgagatagggatacccaagatgaaaaaactgattcggtatctcaagttaaagcaacagtctcccccagatcatgaagagtgcgttaagcggaaacagagatatgaagtggactataacctggaaccctttgccggtcttacccctgagtatatggaaatgattatacagttcggattcgtgaccctgtttgtagccagctttccactcgctcccctgtttgctctactcaacaacataatcgagatccggctggacgcgaagaagttcgttacagaactccgcaggccagtggcagtgcgagcaaaagatattggtatatggtacaacatactccgagggataggcaaactagccgtcattatcaatgcttttgtgatctctttcacaagtgattttatcccaagactcgtgtatctttatatgtatagcaagaacggcacaatgcatgggtttgtcaaccacaccctgagtagttttaacgtgtccgacttccagaacgggaccgcgcccaacgaccctctcgatctgggttatgaggtccagatatgtcggtacaaagactatcgcgaacccccatggagcgagaataagtatgatatctccaaggacttctgggccgtccttgcggctcgtctggctttcgtgatcgtctttcagaacctcgtgatgttcatgtccgactttgtcgactgggttatcccggatattcctaaggacatctcacagcagatccacaaagagaaagtattgatggtggaactgtttatgcgggaagagcaggataagcagcagctcctggagacctggatggaaaaagagcggcaaaaagatgaacccccctgtaatcaccacaacaccaaagcctgtccagattctcttgggtccccagcgccttcacacgcttaccacgggggggtgctgtag

SEQ ID NO: 196306 - DNA, 2961 bp, Artificial Sequence
  derived and/or modified sequence
atgagggtgaatgagaagtacagcaccctgcctgcagaagatagatctgtgcacatcatcaacatctgtgccatcgaggacatcggctacctgcccagcgagggcaccctgctgaacagcctgtctgtggaccctgatgctgagtgcaagtatggcctgtacttcagagatggaagaaggaaggtggactacatcctggtgtaccaccacaagaggcccagcggcaacagaaccctggtgagaagagtgcagcacagcgacacccccagcggggcccggtctgtgaagcaggaccaccccctgcccgggaagggggccagcctggatgctggcagcggggagccccccatggactaccatgaagatgacaagcgcttcagaagagaggagtatgagggcaacctgctggaggccggcctggagctggagagagatgaggacaccaagatccatggagtgggctttgtgaagatccacgccccctggaatgtgctgtgccgggaggccgagttcctgaagctgaagatgcccaccaagaagatgtaccacatcaatgagacccggggcctgctgaagaagatcaacagcgtgctgcagaagatcacagaccccatccagcccaaggtggccgagcaccggccccagaccatgaagaggctgagctaccccttcagccgggagaagcagcacctgtttgacctgagtgacaaggacagcttctttgacagcaagaccaggagcaccatcgtgtatgagatcctgaagaggaccacctgcaccaaggccaagtacagcatgggcatcaccagcctgctggccaacggggtgtatgctgctgcctaccccctgcatgatggagactacaatggagaaaatgtggagttcaatgacaggaagctgctgtatgaggagtgggcccgctatggagtcttctacaagtaccagcccatcgacctggtgaggaagtactttggagagaagattggcctgtactttgcctggctgggcgtgtacacccagatgctgatcccagccagcatcgtgggcatcatcgtgttcctgtatggctgtgccaccatggatgagaacatccccagcatggagatgtgtgaccagaggcacaacatcaccatgtgccccctgtgtgacaagacctgcagctactggaagatgagcagcgcctgtgccacagcccgggccagccacctgtttgacaacccagccaccgtcttcttctctgtgttcatggccctgtgggccgccaccttcatggagcactggaagaggaagcagatgaggctgaactaccgctgggacctgactggatttgaggaggaggaggaggccgtgaaggaccaccccagggcagaatatgaggcccgggtgctggagaagagcctgaagaaggagagcaggaacaaggagaagagaagacacatccctgaggagagcaccaacaagtggaagcagagggtgaagacagccatggccggcgtgaagctgacagacaaggtgaagctgacctggagggaccgcttccctgcctacctgaccaacctggtgtccatcatcttcatgattgctgtgacctttgccatcgtgctgggcgtcatcatctaccgcatctccatggccgccgccctggccatgaacagcagccccagcgtgcgcagcaacatccgggtgacagtgacagccacagctgtgatcatcaacctggtggtgatcatcctgctggatgaggtgtatggctgcatcgcccgctggctgaccaagattgaggtgcccaagacagagaagagctttgaggagcggctcatcttcaaggccttcctgctgaagtttgtgaacagctacacccccatcttctacgtggccttcttcaagggccgctttgtgggccggcctggggactatgtgtacatcttccgctccttcaggatggaggagtgtgcccctgggggctgcctgatggagctgtgcatccagctgagcatcatcatgctgggcaagcagctgatccagaacaacctgtttgaaattggcatccccaagatgaagaagctgatccgctacctgaagctgaagcagcagagccccccagaccatgaagaatgtgtgaagaggaagcagagatatgaggtggactacaacctggagccctttgctggcctgaccccagagtacatggagatgatcatccagtttggatttgtgaccctgtttgtggccagcttccccctggcccccctgtttgccctgctgaacaacatcatcgagatccggctggatgccaagaagtttgtgacagagctgcggcggcctgtggccgtgcgggccaaggacatcggcatctggtacaacatcctgcggggcatcggcaagctggccgtcatcatcaatgcctttgtgatctccttcaccagtgacttcatcccccggctggtgtacctgtacatgtacagcaagaatggcaccatgcacggctttgtgaaccacaccctgagcagcttcaacgtgtctgacttccagaatggaacagccccaaatgaccccctggacctgggctatgaggtgcagatctgccgctacaaggactaccgggagcccccctggagcgagaacaagtatgacatcagcaaggacttctgggccgtgctggccgcccggctggcctttgtgattgtgttccagaacctggtgatgttcatgtctgactttgtggactgggtgatcccagacatccccaaggacatcagccagcagatccacaaggagaaggtgctgatggtggagctgttcatgagggaggagcaggacaagcagcagctgctggagacctggatggagaaggagcggcagaaggatgagcccccctgcaaccaccacaacaccaaggcctgcccagacagcctgggcagccctgcccccagccacgcctaccacggcggcgtgctgtag

SEQ ID NO: 196307 - DNA, 2961 bp, Artificial Sequence
  derived and/or modified sequence
atgagggtgaatgagaagtacagcaccctgcctgcagaagatagatctgtgcacatcatcaacatctgtgccatcgaggacatcggctacctgcccagcgagggcaccctgctgaacagcctgtctgtggaccctgatgctgagtgcaagtatggcctgtacttcagagatggaagaaggaaggtggactacatcctggtgtaccaccacaagaggcccagcggcaacagaaccctggtgagaagagtgcagcacagcgacacccccagcggggcccggtctgtgaagcaggaccaccccctgcccgggaagggggccagcctggatgctggcagcggggagccccccatggactaccatgaagatgacaagcgcttcagaagagaggagtatgagggcaacctgctggaggccggcctggagctggagagagatgaggacaccaagatccatggagtgggctttgtgaagatccacgccccctggaatgtgctgtgccgggaggccgagttcctgaagctgaagatgcccaccaagaagatgtaccacatcaatgagacccggggcctgctgaagaagatcaacagcgtgctgcagaagatcacagaccccatccagcccaaggtggccgagcaccggccccagaccatgaagaggctgagctaccccttcagccgggagaagcagcacctgtttgacctgagtgacaaggacagcttctttgacagcaagaccaggagcaccatcgtgtatgagatcctgaagaggaccacctgcaccaaggccaagtacagcatgggcatcaccagcctgctggccaacggggtgtatgctgctgcctaccccctgcatgatggagactacaatggagaaaatgtggagttcaatgacaggaagctgctgtatgaggagtgggcccgctatggagtcttctacaagtaccagcccatcgacctggtgaggaagtactttggagagaagattggcctgtactttgcctggctgggcgtgtacacccagatgctgatcccagccagcatcgtgggcatcatcgtgttcctgtatggctgtgccaccatggatgagaacatccccagcatggagatgtgtgaccagaggcacaacatcaccatgtgccccctgtgtgacaagacctgcagctactggaagatgagcagcgcctgtgccacagcccgggccagccacctgtttgacaacccagccaccgtcttcttctctgtgttcatggccctgtgggccgccaccttcatggagcactggaagaggaagcagatgaggctgaactaccgctgggacctgactggatttgaggaggaggagaaggccctgctggaccaccccagggcagaatatgaggcccgggtgctggagaagagcctgaagaaggagagcaggaacaaggagaagagaagacacatccctgaggagagcaccaacaagtggaagcagagggtgaagacagccatggccggcgtgaagctgacagacaaggtgaagctgacctggagggaccgcttccctgcctacctgaccaacctggtgtccatcatcttcatgattgctgtgacctttgccatcgtgctgggcgtcatcatctaccgcatctccatggccgccgccctggccatgaacagcagccccagcgtgcgcagcaacatccgggtgacagtgacagccacagctgtgatcatcaacctggtggtgatcatcctgctggatgaggtgtatggctgcatcgcccgctggctgaccaagattgaggtgcccaagacagagaagagctttgaggagcggctcatcttcaaggccttcctgctgaagtttgtgaacagctacacccccatcttctacgtggccttcttcaagggccgctttgtgggccggcctggggactatgtgtacatcttccgctccttcaggatggaggagtgtgcccctgggggctgcctgatggagctgtgcatccagctgagcatcatcatgctgggcaagcagctgatccagaacaacctgtttgaaattggcatccccaagatgaagaagctgatccgctacctgaagctgaagcagcagagccccccagaccatgaagaatgtgtgaagaggaagcagagatatgaggtggactacaacctggagccctttgctggcctgaccccagagtacatggagatgatcatccagtttggatttgtgaccctgtttgtggccagcttccccctggcccccctgtttgccctgctgaacaacatcatcgagatccggctggatgccaagaagtttgtgacagagctgcggcggcctgtggccgtgcgggccaaggacatcggcatctggtacaacatcctgcggggcatcggcaagctggccgtcatcatcaatgcctttgtgatctccttcaccagtgacttcatcccccggctggtgtacctgtacatgtacagcaagaatggcaccatgcacggctttgtgaaccacaccctgagcagcttcaacgtgtctgacttccagaatggaacagccccaaatgaccccctggacctgggctatgaggtgcagatctgccgctacaaggactaccgggagcccccctggagcgagaacaagtatgacatcagcaaggacttctgggccgtgctggccgcccggctggcctttgtgattgtgttccagaacctggtgatgttcatgtctgactttgtggactgggtgatcccagacatccccaaggacatcagccagcagatccacaaggagaaggtgctgatggtggagctgttcatgagggaggagcaggacaagcagcagctgctggagacctggatggagaaggagcggcagaaggatgagcccccctgcaaccaccacaacaccaaggcctgcccagacagcctgggcagccctgcccccagccacgcctaccacggcggcgtgctgtag

SEQ ID NO: 196308 - DNA, 2961 bp, Artificial Sequence
  derived and/or modified sequence
atgcgggtgaacgagaagtacagcaccctgcccgccgaggaccggagtgttcacatcatcaacatctgcgctatagaagacattggctaccttccttccgagggcactctcttgaattcactaagtgtggacccagacgccgaatgcaagtacggattgtatttccgggacggcaggaggaaagtggattatattctcgtctaccatcacaagcgacccagcgggaaccgaaccctggttcgccgtgtgcagcactcggatacaccttctggcgcccgcagcgtgaaacaggatcatcccctgcccggaaagggagcgagtctcgacgcaggtagcggagaaccccccatggactaccacgaagacgacaaaaggttcaggcgcgaggaatacgagggcaacctgctggaggccgggcttgaattggagcgagatgaagacacaaagatccacggagtggggttcgtaaagattcatgccccctggaacgttctgtgtagggaggcagagttcctgaaactgaagatgcctacaaagaagatgtatcatataaacgagactaggggcctgttaaaaaagataaacagtgttctgcaaaagattaccgatcctatccaacctaaagtggctgagcatagaccacagacaatgaagcgtctctcatatcccttttcccgggagaagcaacatctctttgatctctctgacaaggatagcttcttcgattcaaagacacgttccacgatagtgtacgagatacttaagcggacaacttgcactaaagctaaatactctatgggtatcactagtctgttggccaatggagtctatgccgccgcctaccccctgcacgacggagattataatggggagaacgtggagtttaacgataggaagttgctctatgaggagtgggccagatacggcgtattttacaaatatcaaccgatcgacttggtgcgaaagtactttggggagaagatcgggttgtatttcgcatggctgggagtgtacacccaaatgctgatcccagctagcattgtggggatcattgtgttcctctacgggtgtgcaacaatggatgaaaatatcccaagcatggaaatgtgtgaccagaggcataacatcactatgtgtccactgtgtgacaagacatgtagctactggaaaatgtcttcagcgtgtgctaccgcaagagcatcccacctgttcgataatccagccacggtgttctttagcgtgtttatggctctgtgggcagctacattcatggagcattggaagcgaaaacagatgcgcttgaactacagatgggacctgaccggcttcgaagaagaagaggaggctgttaaggaccacccccgggccgaatacgaggcccgagtcctggaaaagagtcttaaaaaggaaagccggaataaagagaagcgacggcacattcctgaggaatctactaacaaatggaagcagcgcgtcaaaacggccatggccggggtgaagctgaccgataaagttaaactgacctggcgggacagattccccgcttatctgactaacttggtgagcattattttcatgattgccgtgaccttcgcaattgtactgggggtgattatctaccgcatctctatggcagctgctctggccatgaattccagtcccagtgtacgtagcaatatcagggttaccgtcacagccaccgcggtgatcattaaccttgtggtgattatattacttgatgaagtgtatggttgcatcgctcgctggctgacaaagattgaagttccgaaaacagagaagtccttcgaggagcgacttatattcaaagcattcctcctgaagttcgtaaactcttatactcccattttttatgtggctttcttcaaaggacgctttgtggggagacctggggattatgtctatatatttcgatcatttcgaatggaggagtgcgcaccagggggttgtctcatggagttatgtatccaactctcaattatcatgttggggaagcagctgatccaaaataatttgtttgagattggcattccaaagatgaagaaattgattcgctaccttaagctgaaacagcagagcccccccgaccacgaggaatgcgtcaaacggaagcagagatacgaggtggattacaatctggagccgtttgctggcctaactccagagtacatggagatgattattcagtttgggttcgtgacgctttttgtggcctccttccctctagcacctctctttgctctgcttaataatatcattgagattaggttggacgctaaaaagttcgtgacagaactgcgccgcccggtcgcagtccgggctaaggacatcggtatttggtataacattttacgggggatcggcaaactcgctgtcattattaacgcattcgtgatttcatttaccagtgatttcattccaagactcgtgtatttgtatatgtatagcaaaaatggaactatgcatggctttgtgaaccacacactgtccagtttcaacgtgtctgatttccagaacggtaccgcacctaacgatcccctggatctggggtatgaagttcaaatctgccgatacaaagattatagagaaccaccttggtccgaaaataaatacgatatcagcaaggatttctgggccgttctcgctgctaggcttgcctttgtaatagttttccaaaatctggtgatgttcatgagtgacttcgttgactgggtgatccccgacataccaaaagacatcagccagcagattcataaagagaaagtgcttatggtggagctgtttatgagggaggagcaggacaagcagcagttgcttgaaacatggatggaaaaggagcgccagaaggatgagccgccctgcaaccaccacaacacgaaggcgtgtcccgactctctggggtcaccagcaccttcccatgcttatcatggaggtgtgctgtag

SEQ ID NO: 196309 - DNA, 2961 bp, Artificial Sequence
  derived and/or modified sequence
atgcgggtgaacgagaagtacagcaccctgcccgccgaggaccggtccgtgcacattatcaatatctgcgccattgaggatatcgggtaccttccctcagaggggacactcctgaactctctgtcagtggatcctgacgccgagtgtaagtacggtttgtactttcgggacggcagacggaaggtggactacatacttgtataccatcacaagagacccagcggcaacagaactcttgtgagaagggtgcagcattccgacactcccagcggagctcgttccgttaagcaggaccaccccttgccaggcaaaggggccagcttggatgcgggaagcggcgaacccccgatggactatcacgaggatgacaaacggttcaggagagaagaatatgaggggaatctgctcgaagctggattggaactggagcgcgacgaggacaccaagattcatggggttggctttgtcaaaatccacgccccgtggaatgtgttgtgcagagaggccgagttcctcaagctcaagatgcccaccaaaaagatgtatcacataaatgaaaccagaggcctactaaagaagattaattccgtattacagaaaatcaccgacccaatccagcccaaagtagctgagcaccggcctcagactatgaagcggctgtcttatccatttagcagagaaaagcagcaccttttcgaccttagcgacaaagattcttttttcgactccaagacgcgaagtactattgtatacgaaattctgaagcgaaccacttgcactaaagctaagtacagcatgggcatcacttcactgctggccaacggagtctatgcagccgcttatcctcttcacgacggggactacaatggggagaatgtcgaattcaatgaccggaaactcctatacgaggagtgggcccgatacggggtcttttacaagtaccagcctatcgacctggtcaggaagtatttcggagaaaagattggtctatactttgcttggctcggcgtgtacacccaaatgcttattccagcttctatcgtgggcatcattgtgtttctgtatggttgcgccaccatggacgaaaatattcctagtatggaaatgtgcgatcaacgacacaacattacgatgtgcccattatgtgataagacctgttcctactggaagatgagttcagcctgtgccacagctcgcgcgtcccatctttttgacaaccctgccacagtgttttttagcgtgttcatggcattatgggccgcgacattcatggaacattggaagagaaagcaaatgcgactgaattataggtgggatctgacaggatttgaggaagaagaaaaagcccttcttgatcacccaagagcagaatacgaggctcgggttctcgagaagtcacttaaaaaagagagcaggaataaggagaagagaaggcatatccctgaggagagtactaataagtggaaacaaagagttaagaccgcaatggcaggagtgaaactcacggacaaagtgaaattgacgtggcgagatagattcccagcttacctgacaaatctggtatccataatcttcatgatcgcagtgacgttcgctatcgtcctgggcgtaatcatttaccgcatctcaatggcagctgcactggctatgaacagtagccctagtgtgaggagcaacattcgtgtgacagtgactgctaccgccgttatcatcaacttagttgttataatattactggacgaagtgtacgggtgtatagcacggtggctgaccaagatcgaagtacccaagacagagaagagttttgaagagcggcttatatttaaggcatttctgctaaagtttgttaattcctatacacctatcttctacgtggccttttttaaaggtaggttcgtgggtcggccaggcgactatgtttacatattccggagctttcggatggaggagtgcgctcctggcgggtgtctgatggaactctgcatccaattatctatcattatgttagggaaacagcttattcagaacaatttatttgagattggcataccaaagatgaagaagctcatccgatacctcaagttgaagcaacagtctccacccgaccacgaggagtgcgtgaaacgaaagcagcgctatgaggtggactataacctggagcccttcgccggacttacaccggaatacatggaaatgatcatccagttcggctttgtaactttgttcgttgcaagcttcccattggctcctctgttcgccttactcaacaatatcatagaaatacgcctcgatgctaaaaagttcgtgacagaactaaggcgccccgtggctgttagagcaaaggacattggcatctggtacaacattctgagagggattggcaaactcgctgtaatcattaatgcttttgtcatttccttcacatccgattttattccaagattggtgtacctctacatgtatagcaagaacggaaccatgcatggatttgtgaatcatacccttagcagcttcaatgtgtccgactttcagaacgggaccgcccctaatgatcccctggacctgggctacgaggtgcaaatttgtaggtacaaggactaccgtgagcctccttggtccgagaacaagtatgacataagcaaggatttctgggcggtcctcgccgcaaggttggcctttgttatcgtcttccagaacttagttatgtttatgtcagactttgtggattgggtgattccagatattcctaaagacatatctcaacagatccacaaggaaaaggtcctgatggtcgagctttttatgcgggaagaacaggacaaacagcagctgctggagacctggatggagaaggagcgccagaaagatgagccaccgtgcaaccaccataacacgaaggcttgtcccgactccttaggcagtcctgcccccagccacgcttatcatgggggtgtcctttag

SEQ ID NO: 196310 - DNA, 4790 bp, Artificial Sequence
  derived and/or modified sequence
aaaggcgggccggctggcgtccaagttcctgaccaggcgcgggccggcccgcgggaccagcagccgggtggcggcgcgatcggccccgagaggctcaggcgccccccgcatcgagcgcgcgggccgggcgggccagggcggcgggcggagcgggaggcggccacgtccccggcgggcctgggcgcggggaggcccggccccctgcgagcgcgccgcgaacgctgcggtctccgcccgcagaggccgccggggccgtggatggggagggcgcgccgcccggcggtcccagcgcacaggcggccacgatgagggtcaacgagaagtactcgacgctcccggccgaggaccgcagcgtccacatcatcaacatctgcgccatcgaggacatcggctacctgccgtccgagggcacgctgctgaactccttatctgtggaccctgatgccgagtgcaagtatggcctgtacttcagggacggccggcgcaaggtggactacatcctggtgtaccatcacaagaggccctcgggcaaccggaccctggtcaggagggtgcagcacagcgacaccccctctggggctcgcagcgtcaagcaggaccaccccctgccgggcaagggggcgtcgctggatgcaggctcgggggagcccccgatggactaccacgaggatgacaagcgcttccgcagggaggagtacgagggcaacctcctggaggcgggcctggagctggagcgggacgaggacactaaaatccacggagtcgggtttgtgaaaatccatgccccctggaacgtgctgtgcagagaggccgagtttctgaaactgaagatgccgacgaagaagatgtaccacattaatgagacccgtggcctcctgaaaaaaatcaactctgtgctccagaaaatcacagatcccatccagcccaaagtggctgagcacaggccccagaccatgaagagactctcctatcccttctcccgggagaagcagcatctatttgacttgtctgataaggattcctttttcgacagcaaaacccggagcacgattgtctatgagatcttgaagagaacgacgtgtacaaaggccaagtacagcatgggcatcacgagcctgctggccaatggtgtgtacgcggctgcatacccactgcacgatggagactacaacggtgaaaacgtcgagttcaacgacagaaaactcctgtacgaagagtgggcacgctatggagttttctataagtaccagcccatcgacctggtcaggaagtattttggggagaagatcggcctgtacttcgcctggctgggcgtgtacacccagatgctcatccctgcctccatcgtgggaatcattgtcttcctgtacggatgcgccaccatggatgaaaacatccccagcatggagatgtgtgaccagagacacaatatcaccatgtgcccgctttgcgacaagacctgcagctactggaagatgagctcagcctgcgccacggcccgcgccagccacctcttcgacaaccccgccacggtcttcttctctgtcttcatggccctctgggctgccaccttcatggagcactggaagcggaaacagatgcgactcaactaccgctgggacctcacgggctttgaagaggaagaggaggctgtcaaggatcatcctagagctgaatacgaagccagagtcttggagaagtctctgaagaaagagtccagaaacaaagagaagcgccggcatattccagaggagtcaacaaacaaatggaagcagagggttaagacagccatggcgggggtgaaattgactgacaaagtgaagctgacatggagagatcggttcccagcctacctcactaacttggtctccatcatcttcatgattgcagtgacgtttgccatcgtcctcggcgtcatcatctacagaatctccatggccgccgccttggccatgaactcctccccctccgtgcggtccaacatccgggtcacagtcacagccaccgcagtcatcatcaacctagtggtcatcatcctcctggacgaggtgtatggctgcatagcccgatggctcaccaagatcgaggtcccaaagacggagaaaagctttgaggagaggctgatcttcaaggctttcctgctgaagtttgtgaattcctacacccccatcttttacgtggcgttcttcaaaggccggtttgttggacgcccgggcgactacgtgtacattttccgttccttccgaatggaagagtgtgcgccagggggctgcctgatggagctatgcatccagctcagcatcatcatgctggggaaacagctgatccagaacaacctgttcgagatcggcatcccgaagatgaagaagctcatccgctacctgaagctgaagcagcagagcccccctgaccacgaggagtgtgtgaagaggaaacagcggtacgaggtggattacaacctggagcccttcgcgggcctcaccccagagtacatggaaatgatcatccagtttggcttcgtcaccctgtttgtcgcctccttccccctggccccactgtttgcgctgctgaacaacatcatcgagatccgcctggacgccaaaaagtttgtcactgagctccgaaggccggtagctgtcagagccaaagacatcggaatctggtacaatatcctcagaggcattgggaagcttgctgtcatcatcaatgccttcgtgatctccttcacgtctgacttcatcccgcgcctggtgtacctctacatgtacagtaagaacgggaccatgcacggcttcgtcaaccacaccctctcctccttcaacgtcagtgacttccagaacggcacggcccccaatgaccccctggacctgggctacgaggtgcagatctgcaggtataaagactaccgagagccgccgtggtcggaaaacaagtacgacatctccaaggacttctgggccgtcctggcagcccggctggcgtttgtcatcgtcttccagaacctggtcatgttcatgagcgactttgtggactgggtcatcccggacatccccaaggacatcagccagcagatccacaaggagaaggtgctcatggtggagctgttcatgcgggaggagcaagacaagcagcagctgctggaaacctggatggagaaggagcggcagaaggacgagccgccgtgcaaccaccacaacaccaaagcctgcccagacagcctcggcagcccagcccccagccatgcctaccacgggggcgtcctgtagctatgccagcggggctgggcaggccagccgggcatcctgaccgatgggcaccctctcccagggcaggcggcttcccgctcccaccagggcccggtgggtcctgggttttctgcaaacatggaggaccactttctgataggacattttcctttcttctttctgttttctttcccttgtttttgcacaaagccattatgcagggaatattttttaatctgtagtattcaagatgaatcaaaatgatggctggtaatacggcaataaggtagcaaaggcaggtgctttgcagaaagaatgcttggaaacttgagtctccctagaggtgaaaagtgagcagaggcccgtagaaaccctcctctgaatcctcctaattccttaagatagatgcaaaatggtaagccgaggcatcgcgcaaaagctggtgcgatgcttcagggaaaatggaaaacccacgcaagaataatgattgattccggttccaaaaggtgtcacctacctgtttcagaaaagttagactttccatcgccttttccttccatcagttgagtggctgagagagaagtgcctcatccctgagccacacagggggcgtgggagcatcccagttatccctggaaagctagaaggggacagaggtgtccctgattaagcaggaaacagcacccttggcgtccccagcaggctccccactgtcagccacacacctgcccccatcacaccaagccgacctcagagttgttcatcttccttatgggacaaaaccggttgaccagaaaatgggcagagagagatgacctcggaagcatttccacagatggtgtcagggtttcaagaagtcttagggcttccaggggtcccctggaagctttagaatatttatgggttttttttcaaatatcaattatatggtagattgaggattttttttctgtagctcaaaggtggagggagtttattagttaaccaaatatcgttgagaggaatttaaaatactgttactaccaaagatttttattaataaaggcttatattttggtaacacttctctatatttttactcacaggaatgtcactgttggacaattattttaaaagtgtataaaaccaagtctcataaatgatatgagtgatctaaatttgcagcaatgatactaaacaactctctgaaatttctcaagcaccaagagaaacatcattttagcaaaggccaggaggaaaaatagaaataaatttgtcttgaagatctcattgatgtgatgttacattccctttaatctgccaactgtggtcaaagttcataggtgtcgtacatttccattatttgctaaaatcatgcaatctgatgcttctcttttctcttgtacagtaagtagtttgaagtgggttttgtatataaatactgtattaaaaattaggcaattaccaaaaatccttttatggaaaccatttttttaaaaagtgaatgtacacaaatccacagaggactgtggctggacattcatctaaataaatttgaatatacga

SEQ ID NO: 196311 - DNA, 4533 bp, Artificial Sequence
  derived and/or modified sequence
ggatggggagggcgcgccgcccggcggtcccagcgcacaggcggccacgatgagggtcaacgagaagtactcgacgctcccggccgaggaccgcagcgtccacatcatcaacatctgcgccatcgaggacatcggctacctgccgtccgagggcacgctgctgaactccttatctgtggaccctgatgccgagtgcaagtatggcctgtacttcagggacggccggcgcaaggtggactacatcctggtgtaccatcacaagaggccctcgggcaaccggaccctggtcaggagggtgcagcacagcgacaccccctctggggctcgcagcgtcaagcaggaccaccccctgccgggcaagggggcgtcgctggatgcaggctcgggggagcccccgatggactaccacgaggatgacaagcgcttccgcagggaggagtacgagggcaacctcctggaggcgggcctggagctggagcgggacgaggacactaaaatccacggagtcgggtttgtgaaaatccatgccccctggaacgtgctgtgcagagaggccgagtttctgaaactgaagatgccgacgaagaagatgtaccacattaatgagacccgtggcctcctgaaaaaaatcaactctgtgctccagaaaatcacagatcccatccagcccaaagtggctgagcacaggccccagaccatgaagagactctcctatcccttctcccgggagaagcagcatctatttgacttgtctgataaggattcctttttcgacagcaaaacccggagcacgattgtctatgagatcttgaagagaacgacgtgtacaaaggccaagtacagcatgggcatcacgagcctgctggccaatggtgtgtacgcggctgcatacccactgcacgatggagactacaacggtgaaaacgtcgagttcaacgacagaaaactcctgtacgaagagtgggcacgctatggagttttctataagtaccagcccatcgacctggtcaggaagtattttggggagaagatcggcctgtacttcgcctggctgggcgtgtacacccagatgctcatccctgcctccatcgtgggaatcattgtcttcctgtacggatgcgccaccatggatgaaaacatccccagcatggagatgtgtgaccagagacacaatatcaccatgtgcccgctttgcgacaagacctgcagctactggaagatgagctcagcctgcgccacggcccgcgccagccacctcttcgacaaccccgccacggtcttcttctctgtcttcatggccctctgggctgccaccttcatggagcactggaagcggaaacagatgcgactcaactaccgctgggacctcacgggctttgaagaggaagagaaagcacttctggatcatcctagagctgaatacgaagccagagtcttggagaagtctctgaagaaagagtccagaaacaaagagaagcgccggcatattccagaggagtcaacaaacaaatggaagcagagggttaagacagccatggcgggggtgaaattgactgacaaagtgaagctgacatggagagatcggttcccagcctacctcactaacttggtctccatcatcttcatgattgcagtgacgtttgccatcgtcctcggcgtcatcatctacagaatctccatggccgccgccttggccatgaactcctccccctccgtgcggtccaacatccgggtcacagtcacagccaccgcagtcatcatcaacctagtggtcatcatcctcctggacgaggtgtatggctgcatagcccgatggctcaccaagatcgaggtcccaaagacggagaaaagctttgaggagaggctgatcttcaaggctttcctgctgaagtttgtgaattcctacacccccatcttttacgtggcgttcttcaaaggccggtttgttggacgcccgggcgactacgtgtacattttccgttccttccgaatggaagagtgtgcgccagggggctgcctgatggagctatgcatccagctcagcatcatcatgctggggaaacagctgatccagaacaacctgttcgagatcggcatcccgaagatgaagaagctcatccgctacctgaagctgaagcagcagagcccccctgaccacgaggagtgtgtgaagaggaaacagcggtacgaggtggattacaacctggagcccttcgcgggcctcaccccagagtacatggaaatgatcatccagtttggcttcgtcaccctgtttgtcgcctccttccccctggccccactgtttgcgctgctgaacaacatcatcgagatccgcctggacgccaaaaagtttgtcactgagctccgaaggccggtagctgtcagagccaaagacatcggaatctggtacaatatcctcagaggcattgggaagcttgctgtcatcatcaatgccttcgtgatctccttcacgtctgacttcatcccgcgcctggtgtacctctacatgtacagtaagaacgggaccatgcacggcttcgtcaaccacaccctctcctccttcaacgtcagtgacttccagaacggcacggcccccaatgaccccctggacctgggctacgaggtgcagatctgcaggtataaagactaccgagagccgccgtggtcggaaaacaagtacgacatctccaaggacttctgggccgtcctggcagcccggctggcgtttgtcatcgtcttccagaacctggtcatgttcatgagcgactttgtggactgggtcatcccggacatccccaaggacatcagccagcagatccacaaggagaaggtgctcatggtggagctgttcatgcgggaggagcaagacaagcagcagctgctggaaacctggatggagaaggagcggcagaaggacgagccgccgtgcaaccaccacaacaccaaagcctgcccagacagcctcggcagcccagcccccagccatgcctaccacgggggcgtcctgtagctatgccagcggggctgggcaggccagccgggcatcctgaccgatgggcaccctctcccagggcaggcggcttcccgctcccaccagggcccggtgggtcctgggttttctgcaaacatggaggaccactttctgataggacattttcctttcttctttctgttttctttcccttgtttttgcacaaagccattatgcagggaatattttttaatctgtagtattcaagatgaatcaaaatgatggctggtaatacggcaataaggtagcaaaggcaggtgctttgcagaaagaatgcttggaaacttgagtctccctagaggtgaaaagtgagcagaggcccgtagaaaccctcctctgaatcctcctaattccttaagatagatgcaaaatggtaagccgaggcatcgcgcaaaagctggtgcgatgcttcagggaaaatggaaaacccacgcaagaataatgattgattccggttccaaaaggtgtcacctacctgtttcagaaaagttagactttccatcgccttttccttccatcagttgagtggctgagagagaagtgcctcatccctgagccacacagggggcgtgggagcatcccagttatccctggaaagctagaaggggacagaggtgtccctgattaagcaggaaacagcacccttggcgtccccagcaggctccccactgtcagccacacacctgcccccatcacaccaagccgacctcagagttgttcatcttccttatgggacaaaaccggttgaccagaaaatgggcagagagagatgacctcggaagcatttccacagatggtgtcagggtttcaagaagtcttagggcttccaggggtcccctggaagctttagaatatttatgggttttttttcaaatatcaattatatggtagattgaggattttttttctgtagctcaaaggtggagggagtttattagttaaccaaatatcgttgagaggaatttaaaatactgttactaccaaagatttttattaataaaggcttatattttggtaacacttctctatatttttactcacaggaatgtcactgttggacaattattttaaaagtgtataaaaccaagtctcataaatgatatgagtgatctaaatttgcagcaatgatactaaacaactctctgaaatttctcaagcaccaagagaaacatcattttagcaaaggccaggaggaaaaatagaaataaatttgtcttgaagatctcattgatgtgatgttacattccctttaatctgccaactgtggtcaaagttcataggtgtcgtacatttccattatttgctaaaatcatgcaatctgatgcttctcttttctcttgtacagtaagtagtttgaagtgggttttgtatataaatactgtattaaaaattaggcaattaccaaaaatccttttatggaaaccatttttttaaaaagtgaatgtacacaaatccacagaggactgtggctggacattcatctaaataaatttgaatatacg

SEQ ID NO: 196312 - DNA, 2961 bp, Artificial Sequence
  derived and/or modified sequence
atgcgggtaaacgagaagtatagcacccttcctgccgaagaccggtcagtccacataatcaatatttgtgccatcgaggacatcggctacctcccctctgagggtaccctgttaaacagtttgtcggtggaccccgatgcggagtgcaaatacggactttactttcgagacggcagacgaaaagtcgattatatactggtgtatcatcacaaacgccctagcggcaaccgtacattagtcaggagggtgcagcactctgacacgccttctggggcacgctccgtcaaacaggaccatccattgccagggaagggcgctagccttgatgccggatccggggaacccccaatggactatcacgaggacgacaagaggttcaggcgggaggaatacgaggggaatctgttggaggccggacttgaactcgagcgggatgaagatacgaaaatccatggagtgggatttgtcaaaatccatgcaccttggaacgtgctgtgtagagaggctgagttcctcaaactcaagatgccaacaaaaaaaatgtaccacatcaacgagacacggggtctgctcaaaaagattaatagtgtgcttcagaaaattactgaccccatccagccgaaagtagccgagcatcggcctcagactatgaaaagactgtcctatccattctcaagggagaaacagcacttgttcgacctgagtgacaaagacagcttcttcgacagtaagaccagatccacaatcgtgtacgagatactcaagcgaaccacatgcacaaaggcaaagtattccatggggataacttctttgttagccaatggcgtttatgccgcagcctacccgctgcacgatggcgactacaacggtgagaacgtggagttcaacgatcggaagctgctctatgaggaatgggccaggtatggcgtgttttataagtatcagcctattgacctagtcagaaagtattttggggagaaaatcggtctgtactttgcttggcttggtgtgtacacacagatgcttatccctgcaagcatcgtaggcataatcgtttttctgtacggatgcgcaaccatggatgagaatatcccgagcatggaaatgtgtgatcagcgccataacatcacaatgtgtcctctctgtgataagacctgtagttattggaaaatgtcatccgcctgcgctactgcccgtgcctctcacctattcgacaatccagcaaccgtgtttttctctgtattcatggcactgtgggccgctacctttatggagcattggaaaagaaagcagatgagactgaactataggtgggacctaaccggctttgaggaagaggaggaggctgtgaaagatcatccacgcgctgagtatgaagcgagagttctcgagaagtcacttaaaaaggagtcaagaaataaggagaagcgtcgccacatcccagaggagagcactaataagtggaaacagagggtgaagactgccatggcaggagttaaattgaccgataaggttaagttgacttggcgtgacaggttccccgcatacctgaccaatctcgtgtcaattattttcatgattgccgtaaccttcgccatagtccttggtgtgatcatttacagaatctccatggccgctgctcttgcaatgaactccagtcctagcgttagatccaacatccgggtgaccgtgaccgctaccgccgtgattattaacttggtggtgattattttgctggacgaggtgtacggctgcatcgcccgttggctgaccaagattgaggtcccaaagacagagaagagcttcgaggagcgcctcattttcaaagccttcctgctgaagttcgttaactcgtacacacctatcttctacgttgcgttcttcaaaggaaggttcgtaggacgaccaggcgattacgtttatatctttaggtcttttaggatggaagagtgcgccccagggggatgcctgatggaactttgcattcagttgtcgattatcatgcttggtaagcaacttatccagaacaacttgttcgagatcggaataccgaaaatgaagaaactcatccgctatctgaagttgaaacagcagtctccacccgaccacgaggaatgtgtcaagcggaaacagaggtatgaagtggactataatttggagccattcgcaggcctgacacccgagtacatggagatgatcatccagttcggctttgtgacccttttcgtcgcatcctttcctctggcgcctctgtttgccttgttgaacaacattatcgaaatacggttagacgcgaagaagttcgttacagagctccgcagacccgttgctgttcgcgctaaagacatcggcatctggtacaacattctgcgtggtattggcaaactagcagtaataataaacgccttcgtgattagctttaccagcgacttcataccgaggctggtttacttgtacatgtattccaagaatggtaccatgcatggtttcgtcaaccatacactgtctagttttaacgtgagcgattttcagaacggaaccgcccctaacgaccctctcgatcttggctacgaggtccagatttgtaggtataaggattacagagagccaccctggtcagaaaataaatatgacatctcgaaggacttttgggctgtcttggcagcccgtcttgctttcgtgatcgtgttccagaaccttgtaatgttcatgtccgacttcgtcgactgggttattcctgatataccgaaggatataagccaacagatccacaaagaaaaggttctcatggtcgaactgttcatgcgagaggaacaagacaaacagcagctgttggagacatggatggagaaggagcggcaaaaagatgaacctccatgcaatcatcataacacaaaagcctgccctgacagccttgggtccccagctccttcacatgcttatcatggaggagtgctatag

SEQ ID NO: 196313 - DNA, 2961 bp, Artificial Sequence
  derived and/or modified sequence
atgagagttaacgaaaagtattctaccctgcccgcagaagataggtctgtgcatatcattaacatctgcgccatagaggatattggctacctcccctcagaagggaccttgctcaactctttgtcggtggacccagatgcagagtgtaagtacggcctgtattttagggacgggagacggaaagtcgactatatacttgtctaccatcataaaagaccttccgggaaccggaccctggtcaggcgggtgcaacactccgatacacccagcggagcgagaagtgtaaaacaggaccaccctctgcccggaaagggggcttcccttgatgccggatccggcgagccccctatggattaccacgaggatgacaaaaggtttcggagggaagagtacgaaggaaatctgctcgaagccggtcttgaactggaaagagatgaagacactaagatacacggggtgggtttcgtcaagattcatgccccatggaacgtcctgtgccgcgaagcagaattcctcaaattaaagatgccgacaaagaagatgtaccacattaatgaaaccagaggactgttgaagaagattaattccgtgttgcagaagatcacagaccccatccaacccaaagtggcagaacaccggccacagaccatgaagcgcttatcttaccccttttctagggaaaagcagcatctcttcgacttgagtgataaggattccttctttgactcaaaaacccggtcgaccatagtttacgagatactgaagcggacaacttgcacaaaggctaagtatagcatgggcatcacaagcttactcgccaatggagtttacgccgctgcctacccattgcacgatggcgactataacggagaaaacgttgagttcaatgacaggaagctgctgtacgaggaatgggccagatacggagtgttctacaaataccagccgattgatctggtgcggaagtatttcggagaaaagatcggactttatttcgcctggctgggtgtgtacacgcagatgctgataccagcttctatcgttggtattatcgtcttcctgtatggctgcgcaactatggacgaaaacatcccgtccatggagatgtgcgaccaacgacataatattacaatgtgccctctatgcgacaagacctgctcgtactggaagatgagctccgcttgtgccactgccagggcctcccatttgtttgataacccagccacggtatttttttcggtgtttatggccctctgggctgcaacttttatggaacactggaagagaaagcaaatgcgcctgaattaccgatgggacctgacagggttcgaggaagaggaaaaggccctcttggaccaccccagagccgagtatgaagccagggtcctggagaaaagcttgaaaaaggagagccgaaataaggaaaagagacggcacatcccagaagaatccacaaataagtggaagcagagagttaagaccgccatggcaggggtgaaactcacagataaagtgaaattgacttggcgtgacaggtttcctgcctacctaaccaatctggtctccatcatttttatgatcgctgtgacatttgcaatagttctgggggtcataatctaccggataagtatggcggcagccttagctatgaattcctcaccatctgttaggagtaacatcagagtgacagtcaccgccactgctgtcattattaacctcgtggtgataatcctgctcgatgaggtctatggctgtatcgccagatggttgacgaagatcgaggtccccaagacggagaagagtttcgaagagcggctgattttcaaagcattcctactgaagttcgtcaatagttacactcccatcttctacgtcgcctttttcaaaggacggttcgtggggagaccgggagattacgtatatatttttagatcattccgcatggaagagtgtgctccaggaggatgcttgatggaactgtgtatccagttatccatcataatgctggggaagcagcttattcaaaacaatctattcgagatagggatcccgaaaatgaagaagcttatcagatatctgaaactgaagcagcagtctccccctgatcatgaagagtgcgtgaaaagaaaacagaggtatgaagtcgactacaacctggaaccattcgccggactaactcccgaatatatggagatgataattcagttcggcttcgtgaccctctttgtcgcttccttcccactcgccccactgttcgctcttttgaacaatattatcgagattagacttgacgccaagaagttcgtaacagagctgcgcaggcccgtcgccgtgagggccaaagatattggcatctggtataacatcctcagaggaattggcaagctggccgtcatcattaacgccttcgttatcagtttcacgtccgattttatccccagactggtctacttgtacatgtatagcaagaatggtacaatgcacggatttgttaatcacaccctcagctcgtttaacgtcagcgacttccagaacgggaccgcacctaatgatcccctggacctaggttacgaggttcagatctgccggtacaaagactatagagaacccccatggtctgagaacaaatacgatatctccaaagacttctgggcggtgctcgcagccaggctagctttcgttatcgtgttccaaaatttggtaatgttcatgtctgatttcgtcgattgggtcatcccggatatcccaaaagacatttctcaacagattcacaaggagaaagttcttatggttgagctctttatgagagaggagcaggataaacagcagctactcgagacatggatggaaaaggaacgacagaaagatgagcctccatgcaatcaccacaataccaaggcttgtccagattccctgggaagcccagccccttcccacgcgtatcatggaggagtgctttag

SEQ ID NO: 196314 - DNA, 2961 bp, Artificial Sequence
  derived and/or modified sequence
atgagagtgaacgagaagtacagcaccctgcccgccgaggacagaagcgtgcacatcatcaacatctgcgccatcgaggacatcggctacctgcccagcgagggcaccctgctgaacagcctgagcgtggaccccgacgccgagtgcaagtacggcctgtacttcagagacggcagaagaaaggtggactacatcctggtgtaccaccacaagagacccagcggcaacagaaccctggtgagaagagtgcagcacagcgacacccccagcggcgccagaagcgtgaagcaggaccaccccctgcccggcaagggcgccagcctggacgccggcagcggcgagccccccatggactaccacgaggacgacaagagattcagaagagaggagtacgagggcaacctgctggaggccggcctggagctggagagagacgaggacaccaagatccacggcgtgggcttcgtgaagatccacgccccctggaacgtgctgtgcagagaggccgagttcctgaagctgaagatgcccaccaagaagatgtaccacatcaacgagaccagaggcctgctgaagaagatcaacagcgtgctgcagaagatcaccgaccccatccagcccaaggtggccgagcacagaccccagaccatgaagagactgagctaccccttcagcagagagaagcagcacctgttcgacctgagcgacaaggacagcttcttcgacagcaagaccagaagcaccatcgtgtacgagatcctgaagagaaccacctgcaccaaggccaagtacagcatgggcatcaccagcctgctggccaacggcgtgtacgccgccgcctaccccctgcacgacggcgactacaacggcgagaacgtggagttcaacgacagaaagctgctgtacgaggagtgggccagatacggcgtgttctacaagtaccagcccatcgacctggtgagaaagtacttcggcgagaagatcggcctgtacttcgcctggctgggcgtgtacacccagatgctgatccccgccagcatcgtgggcatcatcgtgttcctgtacggctgcgccaccatggacgagaacatccccagcatggagatgtgcgaccagagacacaacatcaccatgtgccccctgtgcgacaagacctgcagctactggaagatgagcagcgcctgcgccaccgccagagccagccacctgttcgacaaccccgccaccgtgttcttcagcgtgttcatggccctgtgggccgccaccttcatggagcactggaagagaaagcagatgagactgaactacagatgggacctgaccggcttcgaggaggaggaggaggccgtgaaggaccaccccagagccgagtacgaggccagagtgctggagaagagcctgaagaaggagagcagaaacaaggagaagagaagacacatccccgaggagagcaccaacaagtggaagcagagagtgaagaccgccatggccggcgtgaagctgaccgacaaggtgaagctgacctggagagacagattccccgcctacctgaccaacctggtgagcatcatcttcatgatcgccgtgaccttcgccatcgtgctgggcgtgatcatctacagaatcagcatggccgccgccctggccatgaacagcagccccagcgtgagaagcaacatcagagtgaccgtgaccgccaccgccgtgatcatcaacctggtggtgatcatcctgctggacgaggtgtacggctgcatcgccagatggctgaccaagatcgaggtgcccaagaccgagaagagcttcgaggagagactgatcttcaaggccttcctgctgaagttcgtgaacagctacacccccatcttctacgtggccttcttcaagggcagattcgtgggcagacccggcgactacgtgtacatcttcagaagcttcagaatggaggagtgcgcccccggcggctgcctgatggagctgtgcatccagctgagcatcatcatgctgggcaagcagctgatccagaacaacctgttcgagatcggcatccccaagatgaagaagctgatcagatacctgaagctgaagcagcagagcccccccgaccacgaggagtgcgtgaagagaaagcagagatacgaggtggactacaacctggagcccttcgccggcctgacccccgagtacatggagatgatcatccagttcggcttcgtgaccctgttcgtggccagcttccccctggcccccctgttcgccctgctgaacaacatcatcgagatcagactggacgccaagaagttcgtgaccgagctgagaagacccgtggccgtgagagccaaggacatcggcatctggtacaacatcctgagaggcatcggcaagctggccgtgatcatcaacgccttcgtgatcagcttcaccagcgacttcatccccagactggtgtacctgtacatgtacagcaagaacggcaccatgcacggcttcgtgaaccacaccctgagcagcttcaacgtgagcgacttccagaacggcaccgcccccaacgaccccctggacctgggctacgaggtgcagatctgcagatacaaggactacagagagcccccctggagcgagaacaagtacgacatcagcaaggacttctgggccgtgctggccgccagactggccttcgtgatcgtgttccagaacctggtgatgttcatgagcgacttcgtggactgggtgatccccgacatccccaaggacatcagccagcagatccacaaggagaaggtgctgatggtggagctgttcatgagagaggagcaggacaagcagcagctgctggagacctggatggagaaggagagacagaaggacgagcccccctgcaaccaccacaacaccaaggcctgccccgacagcctgggcagccccgcccccagccacgcctaccacggcggcgtgctgtag

SEQ ID NO: 196315 - DNA, 2961 bp, Artificial Sequence
  derived and/or modified sequence
atgagagtgaacgagaagtacagcaccctgcccgccgaggacagaagcgtgcacatcatcaacatctgcgccatcgaggacatcggctacctgcccagcgagggcaccctgctgaacagcctgagcgtggaccccgacgccgagtgcaagtacggcctgtacttcagagacggcagaagaaaggtggactacatcctggtgtaccaccacaagagacccagcggcaacagaaccctggtgagaagagtgcagcacagcgacacccccagcggcgccagaagcgtgaagcaggaccaccccctgcccggcaagggcgccagcctggacgccggcagcggcgagccccccatggactaccacgaggacgacaagagattcagaagagaggagtacgagggcaacctgctggaggccggcctggagctggagagagacgaggacaccaagatccacggcgtgggcttcgtgaagatccacgccccctggaacgtgctgtgcagagaggccgagttcctgaagctgaagatgcccaccaagaagatgtaccacatcaacgagaccagaggcctgctgaagaagatcaacagcgtgctgcagaagatcaccgaccccatccagcccaaggtggccgagcacagaccccagaccatgaagagactgagctaccccttcagcagagagaagcagcacctgttcgacctgagcgacaaggacagcttcttcgacagcaagaccagaagcaccatcgtgtacgagatcctgaagagaaccacctgcaccaaggccaagtacagcatgggcatcaccagcctgctggccaacggcgtgtacgccgccgcctaccccctgcacgacggcgactacaacggcgagaacgtggagttcaacgacagaaagctgctgtacgaggagtgggccagatacggcgtgttctacaagtaccagcccatcgacctggtgagaaagtacttcggcgagaagatcggcctgtacttcgcctggctgggcgtgtacacccagatgctgatccccgccagcatcgtgggcatcatcgtgttcctgtacggctgcgccaccatggacgagaacatccccagcatggagatgtgcgaccagagacacaacatcaccatgtgccccctgtgcgacaagacctgcagctactggaagatgagcagcgcctgcgccaccgccagagccagccacctgttcgacaaccccgccaccgtgttcttcagcgtgttcatggccctgtgggccgccaccttcatggagcactggaagagaaagcagatgagactgaactacagatgggacctgaccggcttcgaggaggaggagaaggccctgctggaccaccccagagccgagtacgaggccagagtgctggagaagagcctgaagaaggagagcagaaacaaggagaagagaagacacatccccgaggagagcaccaacaagtggaagcagagagtgaagaccgccatggccggcgtgaagctgaccgacaaggtgaagctgacctggagagacagattccccgcctacctgaccaacctggtgagcatcatcttcatgatcgccgtgaccttcgccatcgtgctgggcgtgatcatctacagaatcagcatggccgccgccctggccatgaacagcagccccagcgtgagaagcaacatcagagtgaccgtgaccgccaccgccgtgatcatcaacctggtggtgatcatcctgctggacgaggtgtacggctgcatcgccagatggctgaccaagatcgaggtgcccaagaccgagaagagcttcgaggagagactgatcttcaaggccttcctgctgaagttcgtgaacagctacacccccatcttctacgtggccttcttcaagggcagattcgtgggcagacccggcgactacgtgtacatcttcagaagcttcagaatggaggagtgcgcccccggcggctgcctgatggagctgtgcatccagctgagcatcatcatgctgggcaagcagctgatccagaacaacctgttcgagatcggcatccccaagatgaagaagctgatcagatacctgaagctgaagcagcagagcccccccgaccacgaggagtgcgtgaagagaaagcagagatacgaggtggactacaacctggagcccttcgccggcctgacccccgagtacatggagatgatcatccagttcggcttcgtgaccctgttcgtggccagcttccccctggcccccctgttcgccctgctgaacaacatcatcgagatcagactggacgccaagaagttcgtgaccgagctgagaagacccgtggccgtgagagccaaggacatcggcatctggtacaacatcctgagaggcatcggcaagctggccgtgatcatcaacgccttcgtgatcagcttcaccagcgacttcatccccagactggtgtacctgtacatgtacagcaagaacggcaccatgcacggcttcgtgaaccacaccctgagcagcttcaacgtgagcgacttccagaacggcaccgcccccaacgaccccctggacctgggctacgaggtgcagatctgcagatacaaggactacagagagcccccctggagcgagaacaagtacgacatcagcaaggacttctgggccgtgctggccgccagactggccttcgtgatcgtgttccagaacctggtgatgttcatgagcgacttcgtggactgggtgatccccgacatccccaaggacatcagccagcagatccacaaggagaaggtgctgatggtggagctgttcatgagagaggagcaggacaagcagcagctgctggagacctggatggagaaggagagacagaaggacgagcccccctgcaaccaccacaacaccaaggcctgccccgacagcctgggcagccccgcccccagccacgcctaccacggcggcgtgctgtag

SEQ ID NO: 196316 - DNA, 1290 bp, Artificial Sequence
  derived and/or modified sequence
atgggcctgtacgccgccgccgccggcgtgctggccggcgtggagagcagacagggcagcatcaagggcctggtgtacagcagcaacttccagaacgtgaagcagctgtacgccctggtgtgcgagacccagagatacagcgccgtgctggacgccgtgatcgccagcgccggcctgctgagagccgagaagaagctgagaccccacctggccaaggtgctggtgtacgagctgctgctgggcaagggcttcagaggcggcggcggcagatggaaggccctgctgggcagacaccaggccagactgaaggccgagctggccagactgaaggtgcacagaggcgtgagcagaaacgaggacctgctggaggtgggcagcagacccggccccgccagccagctgcccagattcgtgagagtgaacaccctgaagacctgcagcgacgacgtggtggactacttcaagagacagggcttcagctaccagggcagagccagcagcctggacgacctgagagccctgaagggcaagcacttcctgctggaccccctgatgcccgagctgctggtgttccccgcccagaccgacctgcacgagcaccccctgtacagagccggccacctgatcctgcaggacagagccagctgcctgcccgccatgctgctggaccccccccccggcagccacgtgatcgacgcctgcgccgcccccggcaacaagaccagccacctggccgccctgctgaagaaccagggcaagatcttcgccttcgacctggacgccaagagactggccagcatggccaccctgctggccagagccggcgtgagctgctgcgagctggccgaggaggacttcctggccgtgagccccagcgaccccagataccacgaggtgcactacatcctgctggaccccagctgcagcggcagcggcatgcccagcagacagctggaggagcccggcgccggcacccccagccccgtgagactgcacgccctggccggcttccagcagagagccctgtgccacgccctgaccttccccagcctgcagagactggtgtacagcacctgcagcctgtgccaggaggagaacgaggacgtggtgagagacgccctgcagcagaaccccggcgccttcagactggcccccgccctgcccgcctggccccacagaggcctgagcaccttccccggcgccgagcactgcctgagagccagccccgagaccaccctgagcagcggcttcttcgtggccgtgatcgagagagtggaggtgcccagatag

SEQ ID NO: 196317 - DNA, 1290 bp, Artificial Sequence
  derived and/or modified sequence
atgggactctatgccgccgccgcaggcgtgttggccggcgtagagagtcgacagggcagtatcaagggccttgtctactctagtaacttccagaatgtgaaacagctttatgctctggtgtgtgagacacagagatattcagccgttcttgacgccgtgattgcgagcgcaggcctgttgcgtgcagagaagaagctgagaccacatctggctaaagtcctggtgtacgagttactgcttgggaagggcttccgtgggggcggcggtcggtggaaggctctgttgggtagacaccaggccaggctgaaggccgagttagctaggttgaaggtgcaccgcggggtgtccaggaatgaagatctcttggaagtgggtagtcggccaggcccagctagccagctcccaaggtttgttagggtaaacaccctaaaaacatgtagtgacgatgtcgtggattacttcaagcgacaggggttcagctaccagggaagagctagctccctggatgaccttcgagccctgaaaggaaaacatttcttgctcgaccctttgatgccagagttgctggtatttcctgcacagacagaccttcacgaacatccactgtaccgggcaggacatctcatcctgcaagatagagcaagctgcctgcctgctatgctgcttgatccgccacctggcagtcatgtgatagatgcttgtgctgcccccggcaataagacgtctcacctagccgctttgcttaagaaccagggaaagattttcgcatttgacctcgacgccaaaagactcgcatccatggcaacgctgttggctcgagccggcgtctcatgttgcgaacttgctgaggaggacttccttgccgtgtctcccagtgatccccggtatcacgaagtgcattacatccttctggatccatcttgtagtggcagcggcatgccgtccagacagctggaggaacctggagccggtactccttcccctgtgaggttgcacgcactggcaggctttcagcagagggctctgtgtcacgccctcacgtttccctctctgcagaggctggtgtactccacctgctccctttgtcaggaggagaacgaagatgttgtccgcgacgctctgcaacagaatccgggagcatttcggctggcccctgcgttgcctgcatggccccaccgcggtctcagcacgttccccggggctgaacactgtctgcgagcctccccggagacaactctgtcatccggattttttgtagcagtcattgagcgtgttgaggtgcctaggtag

SEQ ID NO: 196318 - DNA, 1290 bp, Artificial Sequence
  derived and/or modified sequence
atgggcctgtatgctgctgctgctggggtgctggccggcgtggagagccggcagggcagcatcaagggcctggtgtacagcagcaacttccagaatgtgaagcagctgtatgccctggtgtgtgagacccagcgctacagcgctgtgctggatgctgtgattgccagcgctggcctgctgcgggcagagaagaagctgcggccccacctggccaaggtgctggtgtatgagctgctgctgggcaagggcttccggggcggcggcggccgctggaaggccctgctgggccgccaccaggcccggctgaaggccgagctggcccggctgaaggtgcaccggggcgtgtccagaaatgaagacctgctggaggtgggcagccggcccggccctgccagccagctgcccaggtttgtgcgggtgaacaccctgaagacctgcagtgatgatgtggtggactacttcaagaggcagggcttctcctaccagggccgggccagcagcctggatgacctgcgggccctgaagggcaagcacttcctgctggaccccctgatgcctgagctgctggtgtttcctgcccagacagacctgcacgagcaccccctgtacagagctggccacctgatcctgcaggaccgggccagctgcctgcctgccatgctgctggaccccccacctggcagccacgtgattgatgcctgtgccgcccctggcaacaagaccagccacctggccgccctgctgaagaaccagggcaagatctttgcctttgacctggatgccaagaggctggcctccatggccaccctgctggcccgggccggcgtgtcctgctgtgagctggccgaggaggacttcctggccgtgagccccagcgacccccgctaccacgaggtgcactacatcctgctggaccccagctgcagcggcagcggcatgcccagccggcagctggaggagcctggagctggcacccccagccctgtgcggctgcacgccctggccggcttccagcagagggccctgtgccacgccctgaccttccccagcctgcagaggctggtgtacagcacctgcagcctgtgccaggaggagaatgaagatgtggtgagagatgccctgcagcagaaccctggggccttccggctggccccagccctgcctgcctggccccaccggggcctgagcaccttccctggagctgagcactgcctgcgggccagccctgagaccaccctgagcagcggcttctttgtggccgtcatcgagcgggtggaggtgcccaggtag

SEQ ID NO: 196319 - DNA, 1290 bp, Artificial Sequence
  derived and/or modified sequence
atgggcctgtacgccgccgccgccggcgtgctggccggcgtggagagccgccagggatctattaagggactcgtgtattcttcaaacttccagaatgtgaaacagctatatgccctggtgtgcgagactcaacgctactcagctgtactagatgccgtgatcgcaagcgctggcctgcttcgagctgagaaaaagctacgaccccacttagccaaagtgttggtctatgaactgttgctaggaaagggctttcgaggcgggggaggtcgctggaaggcccttctggggcgccatcaagcacgtttgaaggccgagctggccagactcaaagtgcacagaggtgtgtcccgaaacgaggacctgctggaagttgggagcagacccggaccggcctctcagctcccacgctttgtacgcgtcaatactctgaagacctgtagtgatgacgttgttgattacttcaagcggcaggggttttcctatcaaggcagggcttcaagtctagacgaccttcgcgcgctgaaaggtaaacatttcctactggaccccctaatgcccgaacttctcgtttttccagcccagaccgacctgcacgagcatcctctgtatagagcaggccacctgatcctgcaggatagagcctcatgcctacccgctatgttgctggaccctccgcctgggagtcatgtgattgacgcctgcgccgcgccagggaacaagacttcacatctggccgcattactaaaaaatcagggaaaaatttttgcctttgatcttgacgctaagcggttggcctctatggctaccctacttgccagagcaggcgtctcgtgctgcgagttggccgaagaggactttctggcagtgagcccaagcgaccctagatatcacgaagtgcactacattttgctggatccctcatgtagcggatcgggcatgccttcaagacagctagaagaaccaggcgccggtactccctctcccgtccgcctgcatgctttggccggtttccaacagagagcgctgtgccatgcattgacgttcccctccctgcagaggctcgtgtactccacatgtagtctgtgtcaggaagaaaatgaagacgttgtccgggacgccctccagcagaatcccggcgccttcagactggccccagccctccccgcttggcctcatagaggattatctacgtttcctggagccgagcattgcctgcgagcttctcctgagacaaccctgagtagcggcttttttgtcgcagtaattgaacgcgttgaggtgccacgctag

SEQ ID NO: 196320 - DNA, 1290 bp, Artificial Sequence
  derived and/or modified sequence
atgggactttatgccgctgctgcaggcgttctcgccggtgtggaatccaggcagggctcaattaaagggctagtgtacagtagtaattttcagaacgtgaagcagctctatgctttagtgtgtgaaacacagaggtactccgcagtgctggacgccgttatcgcaagcgcaggactgctccgggctgaaaagaaactgcgcccacatctcgcaaaggtgctcgtgtatgaattgttgttgggaaaaggttttcggggtgggggaggacgatggaaggctctcctgggcagacatcaagctagactcaaagccgagctggccagactgaaggtgcaccgcggtgtttctagaaatgaggatctgctggaggtgggctcaagacctggccctgcgagccagctgcccaggtttgtgcgagtgaatacgctcaaaacctgcagcgatgatgtggtggattatttcaaaagacagggcttctcctatcaggggagagcaagttctttggacgatctgcgggcactgaaggggaaacattttctgttagacccgcttatgcccgaactccttgtgtttccagctcaaactgatctgcacgaacaccccttgtacagagccggtcaccttatcctgcaggaccgggcaagttgcttacctgccatgctgctcgaccctcctcctggatctcacgttatcgatgcctgtgcagcccctggaaacaagacatctcatctcgctgcgttgttaaaaaatcaggggaagatattcgcctttgacctggacgccaaacgcctcgccagtatggcgaccttgctggccagagccggtgtttcttgctgcgagctggctgaagaggacttcttagccgtatccccctcagatccccgttaccacgaggttcattatatcctgctcgatcccagctgctcagggtccggtatgccatctcggcaactggaagaacccggtgccggaaccccatcgccagttcgactccacgcgcttgcaggctttcagcagagagctctttgccatgctcttaccttcccatccctgcaacgactagtgtactcaacttgcagtctgtgtcaggaggaaaatgaagacgtggtccgggacgcactacagcaaaatccaggggctttccggcttgcccctgcgttgccagcttggccacaccgaggattgtctacattccccggagcagaacattgccttcgggcatctcccgagactacattgtctagtggatttttcgtggctgtgattgaaagagttgaagtgcccaggtag

SEQ ID NO: 196321 - protein, 714 aa, Artificial Sequence
  derived and/or modified sequence
MASEAPSPPRSPPPPTSPEPELAQLRRKVEKLERELRSCKRQVREIEKLLHHTERLYQNAESNNQELRTQVEELSKILQRGRNEDNKKSDVEVQTENHAPWSISDYFYQTYYNDVSLPNKVTELSDQQDQAIETSILNSKDHLQVENDAYPGTDRTENVKYRQVDHFASNSQEPASALATEDTSLEGSSLAESLRAAAEAAVSQTGFSYDENTGLYFDHSTGFYYDSENQLYYDPSTGIYYYCDVESGRYQFHSRVDLQPYPTSSTKQSKDKKLKKKRKDPDSSATNEEKDLNSEDQKAFSVEHTSCNEEENFANMKKKAKIGIHHKNSPPKVTVPTSGNTIESPLHENISNSTSFKDEKIMETDSEPEEGEITDSQTEDSYDEAITSEGNVTAEDSEDEDEDKIWPPCIRVIVIRSPVLQIGSLFIITAVNPATIGREKDMEHTLRIPEVGVSKFHAEIYFDHDLQSYVLVDQGSQNGTIVNGKQILQPKTKCDPYVLEHGDEVKIGETVLSFHIHPGSDTCDGCEPGQVRAHLRLDKKDESFVGPTLSKEEKELERRKELKKIRVKYGLQNTEYEDEKTLKNPKYKDRAGKRREQVGSEGTFQRDDAPASVHSEITDSNKGRKMLEKMGWKKGEGLGKDGGGMKTPIQLQLRRTHAGLGTGKPSSFEDVHLLQNKNKKNWDKARERFTENFPETKPQKDDPGTMPWVKGTLE

SEQ ID NO: 196322 - protein, 176 aa, Artificial Sequence
  derived and/or modified sequence
MASEAPSPPRSPPPPTSPEPELAQLRRKVEKLERELRSCKRQVREIEKLLHHTERLYQNAESNNQELRTQVEELSKILQRGRNEDNKKSDVEVQTENHAPWSISDYFYQTYYNDVSLPNKVTELSDQQDQAIETSILNSKDHLQVENDAYPGTDRTENVKYRQVDHFASNSQVIKC

SEQ ID NO: 196323 - DNA, 2145 bp, Artificial Sequence
  derived and/or modified sequence
atggcctcggaggccccatctccacctagaagccctcccccaccaaccagtcctgaacccgaactggctcagctccgcagaaaggtggagaagttggagagagaacttaggagctgcaaaaggcaagtgcgcgaaatcgaaaagctgctccatcacacagaacggctttaccagaacgctgaatctaataaccaagaactgcgtacccaggtagaggaactgtccaagattttgcagcgagggagaaatgaagacaacaagaagtcagatgtcgaagtgcaaaccgaaaatcacgcgccatggtccatcagcgactatttttaccagacatactataatgacgtgtcacttcctaacaaggttactgagttatccgaccaacaagaccaggctatcgagacatctattctcaattccaaagatcacctgcaggtggagaatgatgcataccctggaactgaccggaccgaaaatgtcaaatatagacaggtggatcattttgcaagcaactctcaggagcccgccagcgccctcgcaaccgaggatactagcctagagggctctagtttggccgaaagtttgagggccgcagcagaagcggccgtcagccagacgggcttttcgtacgacgagaataccgggctgtattttgaccactctacgggtttttactatgattctgagaaccagctgtactatgacccctcaacgggaatctattattattgtgatgtggagagcggcagatatcaatttcactcccgggtggacctccagccctaccccacgagtagcactaagcaatctaaggataagaaacttaagaagaaacgtaaggatccagattcttcagctactaacgaagagaaggacttgaacagcgaagatcagaaggcgttcagcgtggaacacacctcctgcaacgaggaagaaaactttgccaacatgaaaaagaaagcgaagatcggaatccaccacaaaaatagtccgcccaaggtcacagtgccgacaagtggaaatacaatcgagagcccactgcacgaaaatattagtaatagcacctctttcaaggacgagaaaataatggagacagactcagagccagaggagggggaaatcactgatagccagacagaggattcctacgatgaggctatcacatctgagggaaatgtaacggccgaggactctgaggacgaagacgaggataagatctggccaccttgtataagggttatcgtgattaggtctcctgtccttcaaattggctctttattcattatcaccgccgtcaatccggccactattgggcgagagaaagatatggaacatacattacgcatccctgaagtgggagtctccaagtttcatgccgaaatatacttcgatcacgatttgcaatcgtacgtgctggtggaccaagggtcccagaacggaaccatcgtcaatggtaagcagatcctgcagcctaagacaaaatgtgatccttatgtcttggagcacggagacgaggtcaagatcggagaaactgtgctatcattccacatccacccaggttccgacacatgtgatggctgcgaaccaggtcaggtcagggcccacctgcggctggacaaaaaggatgagtctttcgttgggccaacactgagcaaagaggagaaggagctcgagagacgaaaggaactcaagaaaatcagggtgaagtacggcctccagaacaccgagtacgaggatgagaaaactcttaagaacccgaaatataaagacagagcaggcaagcgccgggaacaggttggctccgaagggacttttcagcgagatgacgctcccgcttcagtgcacagcgagatcaccgatagtaataaaggtaggaagatgctagaaaagatgggttggaaaaagggggagggcctgggaaaggacggaggcgggatgaagacccctattcagctccagctacggcgcactcacgccggtctcgggacggggaagcctagtagcttcgaagacgtccacctattacagaataagaacaaaaaaaactgggataaagctagggaacgcttcacagaaaatttcccagaaaccaagccacagaaagacgacccaggtaccatgccttgggtgaagggaaccttggaatag

SEQ ID NO: 196324 - DNA, 531 bp, Artificial Sequence
  derived and/or modified sequence
atggctagcgaggctccctctcctccacgttctccacctccaccgacaagccctgagccagaattagcacaactgcgccgaaaagtggaaaaactcgaaagggagctgagatcatgtaagcggcaggtaagagaaattgagaagctactccaccacaccgagcgcctctaccagaacgcagaaagtaataatcaggagctgcggactcaggttgaagagctcagcaagattcttcaacgcggcaggaatgaagacaacaaaaagagtgacgtcgaagttcagaccgagaaccatgctccctggtctatctccgattacttttaccaaacatactataatgatgtgtccctccccaataaagtgaccgagctttctgatcaacaagaccaggctattgaaacttcaattcttaattccaaagatcacctgcaagtagagaatgacgcttatcccggaacagacaggacggagaacgtcaagtatagacaagtggatcattttgctagtaacagccaggtgataaaatgttag

SEQ ID NO: 196325 - DNA, 2145 bp, Artificial Sequence
  derived and/or modified sequence
atggccagcgaggcccccagcccccccaggagccccccaccacccaccagccctgagcctgagctggcccagctgcggaggaaggtggagaagctggagcgggagctgcggagctgcaagaggcaggtgcgggagattgagaagctgctgcaccacacagagcggctgtaccagaatgctgagagcaacaaccaggagctgcggacccaggtggaggagctgagcaagatcctgcagagaggaagaaatgaagacaacaagaagagtgatgtggaggtgcagacagagaaccacgccccctggagcatcagtgactacttctaccagacctactacaatgatgtgtccctgcccaacaaggtgacagagctgagtgaccagcaggaccaggccatcgagaccagcatcctgaacagcaaggaccacctgcaggtggagaatgatgcctacccaggcacagacagaacagaaaatgtgaagtaccggcaggtggaccactttgccagcaacagccaggagcccgccagcgccctggccacagaggacaccagcctggagggcagcagcctggccgagagcctgcgggctgctgctgaggccgctgtgtcccagacaggcttctcctatgatgaaaatacaggcctgtactttgaccacagcacaggcttctactatgattctgagaaccagctgtactatgaccccagcacaggcatctactactactgtgatgtggagagcggccgctaccagttccacagccgggtggacctgcagccctaccccaccagcagcaccaagcagagcaaggacaagaagctgaagaagaagaggaaggaccctgacagcagcgccaccaatgaggagaaggacctgaacagcgaggaccagaaggccttctctgtggagcacaccagctgcaatgaggaggagaactttgccaacatgaagaagaaggccaagattggcatccaccacaagaacagcccccccaaggtgacagtgcccaccagcggcaacaccatcgagagccccctgcacgagaacatcagcaacagcaccagcttcaaggatgagaagatcatggagacagacagcgagcctgaggagggggagatcacagacagccagacagaagattcctatgatgaggccatcaccagcgagggcaatgtgacagcagaagattctgaagatgaagatgaggacaagatctggccaccctgcatccgggtgattgtcatccgcagccctgtgctgcagatcggcagcctcttcatcatcacagctgtgaacccagccaccatcggccgggagaaggacatggagcacaccctgcgcatccctgaggtgggcgtgtccaagttccacgccgagatctactttgaccatgacctgcagagctatgtgctggtggaccagggcagccagaatggcaccatcgtgaatggcaagcagatcctgcagcccaagaccaagtgtgacccctacgtgctggagcacggagatgaggtgaagattggagagaccgtgctgtccttccacatccaccctggcagtgacacctgtgatggctgtgagcccggccaggtgcgggcccacctgcggctggacaagaaggatgagagctttgtgggccccaccctgagcaaggaggagaaggagctggagaggaggaaggagctgaagaagatccgggtgaagtatggcctgcagaacacagaatatgaagatgagaagaccctgaagaaccccaagtacaaggacagagctgggaagaggcgggagcaggtgggcagcgagggcaccttccagagagatgatgccccagcctctgtgcacagcgagatcacagacagcaacaagggcaggaagatgctggagaagatgggctggaagaagggggagggcctgggcaaggatggcggcggcatgaagacccccatccagctgcagctgcggaggacccacgccggcctgggcaccgggaagcccagcagctttgaagatgtgcacctgctgcagaacaagaacaagaagaactgggacaaggcccgggagcgcttcacagagaacttccctgagaccaagccccagaaggatgatcctggcaccatgccctgggtgaagggcaccctggagtag

SEQ ID NO: 196326 - DNA, 531 bp, Artificial Sequence
  derived and/or modified sequence
atggccagcgaggcccccagcccccccaggagccccccaccacccaccagccctgagcctgagctggcccagctgcggaggaaggtggagaagctggagcgggagctgcggagctgcaagaggcaggtgcgggagattgagaagctgctgcaccacacagagcggctgtaccagaatgctgagagcaacaaccaggagctgcggacccaggtggaggagctgagcaagatcctgcagagaggaagaaatgaagacaacaagaagagtgatgtggaggtgcagacagagaaccacgccccctggagcatcagtgactacttctaccagacctactacaatgatgtgtccctgcccaacaaggtgacagagctgagtgaccagcaggaccaggccatcgagaccagcatcctgaacagcaaggaccacctgcaggtggagaatgatgcctacccaggcacagacagaacagaaaatgtgaagtaccggcaggtggaccactttgccagcaacagccaggtgatcaagtgctag

SEQ ID NO: 196327 - DNA, 2145 bp, Artificial Sequence
  derived and/or modified sequence
atggccagcgaggcccccagccccccccggagcccccccccccccacaagcccagagccagagctggcgcagctgcgccgcaaggtagaaaagcttgagcgagaactaaggtcgtgcaaaagacaggtacgcgaaattgagaaattgctgcaccacactgagcggctctaccagaatgccgagtcgaataatcaggagctgcggacccaggtcgaagagctgagcaagattctgcagcgcgggcgtaatgaggacaacaaaaagtccgatgtagaggttcagacagagaatcacgctccatggagcatatcagattatttttaccaaacgtactacaacgacgtcagcctgcctaataaggtgacagagctgtcagaccaacaggatcaagctattgaaacttcaatattgaactcaaaggaccatctgcaggtcgagaatgatgcatacccaggtactgaccgcaccgaaaacgtaaaatatcgacaagttgatcatttcgcctctaacagccaggagcccgcttctgccctcgctaccgaggacacatctctggagggttcctcacttgccgagtctctccgtgcagcagcagaagctgcagtgtcccaaacagggtttagctacgatgagaatactggcctgtacttcgatcactcaacaggcttctattatgattccgagaaccagctgtattatgacccctccaccggaatctactactactgcgacgttgaatctgggcgctaccagtttcactcccgcgtggacctccaaccgtatcctacatcctccactaagcagagcaaggacaaaaagctaaagaaaaagcgcaaggaccccgattctagtgcgaccaacgaggagaaggatctcaactctgaagaccagaaggccttttcagttgagcacacttcctgtaatgaagaggaaaatttcgcaaatatgaagaagaaggcgaaaattggcatccaccacaagaatagccctcccaaggtcaccgttcccacaagcgggaacaccattgagtcgccgctgcatgaaaacatcagcaattcaacatccttcaaggatgaaaaaatcatggaaaccgactcggagccagaagagggcgaaattaccgactcccaaaccgaggattcctacgacgaggcaatcacctccgaggggaacgttaccgccgaggactcagaagacgaggacgaggataagatctggcccccttgcatacgggtgattgtgatccgttctcctgtactgcagatcgggtcactttttataatcacagcggtgaatcctgccaccatcggacgagagaaggacatggagcataccctgaggatccctgaagtgggggtgtccaaattccacgcagagatttactttgaccacgatctccagtcttacgtcctcgtggatcagggctcccagaatggaactatcgtgaacggaaagcagatattacagccgaagacaaagtgtgacccatacgtgttggagcacggagatgaggttaagattggagagactgtgctttcattccatattcatcctggcagtgatacatgtgacggttgtgagcccggtcaggtgcgagcccacctaaggctagataaaaaggacgaatcgtttgtgggacccaccttgtccaaagaagaaaaggagctggaaaggcgcaaagaactgaagaaaatcagagttaagtacggcttgcaaaacacagaatacgaagacgagaagacgcttaagaacccaaaatacaaagatcgtgctggaaagcggcgcgaacaggtcgggagtgaaggtactttccagcgcgatgacgcccctgcaagtgtacattccgaaatcacagattccaataaaggccgtaagatgttggagaagatggggtggaaaaagggcgagggccttggcaaggatggaggtggaatgaagactcctatccagcttcagttgcggaggactcatgcaggcctcgggaccggtaagccaagctcatttgaagacgtgcacttgctgcagaacaagaataaaaagaactgggataaggcacgagagagattcactgaaaactttccagaaacgaaaccccaaaaagacgatcctgggactatgccatgggttaaagggactttggaatag

SEQ ID NO: 196328 - DNA, 531 bp, Artificial Sequence
  derived and/or modified sequence
atggccagcgaggcccccagccccccccggagcccccccccccccacgtccccggaacccgagctggcacagttacgccgcaaggtagaaaagttggaacgcgagttgcgatcctgtaagcggcaagttcgagaaatcgaaaagcttcttcatcacactgagcgcctttaccagaatgccgaatccaacaaccaggaacttcgaacacaggttgaagaactatccaaaatcctgcagcggggtagaaatgaagacaacaagaagtctgatgtcgaagttcagaccgaaaatcatgccccttggagtattagtgactacttttaccagacatactataacgatgtgagcttaccaaacaaagtgactgagctgagcgaccaacaggatcaggctatagagacttctatccttaacagtaaggatcatcttcaagttgagaacgatgcatatcctggcactgacagaacagaaaatgttaaatatcgccaggttgaccacttcgctagcaattcacaggtgatcaagtgttag

SEQ ID NO: 196329 - DNA, 4509 bp, Artificial Sequence
  derived and/or modified sequence
ggtcccgcctgccgctggcgccgttgtttccggctcaactggggagctgctggagctcttctggcctctggttttccgactgcttatccgacgctcctccctctgtctctgtagctggagaaggtagtttccaggaaagttttccggtttgcaggccgcgcacatcgggcaggggccatcctcggtccccttgctcgttgctcgcagccccgttcggctacaagtgagtttcagggcgtcatggccaggggccaccgcggccagccgggtgtgaggctgcctttcgctgcccgcgcgctccagtggtctctgggtccgccggcgtccgtttcggcctgaacgcagcccctccgcggcgacgagcagtctcgcgccggagctcatggcctcggaggcgccgtccccgccgcggtcgccgccgccgcccacctcccccgagcctgagctggcccagctaaggcggaaggtggagaagttggaacgtgaactgcggagctgcaagcggcaggtgcgggagatcgagaagctgctgcatcacacagaacggctgtaccagaacgcagaaagcaacaaccaggagctccgcacgcaggtggaagaactcagtaaaatactccaacgtgggagaaatgaagataataaaaagtctgatgtagaagtacaaacagagaaccatgctccttggtcaatctcagattatttttatcagacgtactacaatgacgttagtcttccaaataaagtgactgaactgtcagatcaacaagatcaagctatcgaaacttctattttgaattctaaagaccatttacaagtagaaaatgatgcttaccctggtaccgatagaacagaaaatgttaaatatagacaagtggaccattttgcctcaaattcacaggagccagcatctgcattagcaacagaagatacctccttagaaggctcatcattagctgaaagtttgagagctgcagcagaagcggctgtatcacagactggatttagttatgatgaaaatactggactgtattttgaccacagcactggtttctattatgattctgaaaatcaactctattatgatccttccactggaatttattactattgtgatgtggaaagtggtcgttatcagtttcattctcgagtagatttgcaaccttatccgacttctagcacaaaacaaagtaaagataaaaaattgaagaagaaaagaaaagatccagattcttctgcaacaaatgaggaaaaggatttgaactcagaggatcaaaaagccttcagtgttgaacatacaagctgcaatgaggaagaaaatttcgcaaatatgaaaaagaaggccaaaataggcattcatcacaaaaatagtccccccaaagtcactgttccaactagtggaaatactatagagtctcctcttcatgaaaacatctctaattcaacatcatttaaagatgagaaaatcatggagactgatagtgaaccagaggaaggtgaaattacagactctcagactgaggatagttatgacgaagccattaccagtgaaggcaatgtaactgcagaagatagtgaggatgaagatgaagacaaaatttggcccccatgtattagagtaattgtcattagatcacctgtgttgcagataggatcactctttatcattactgctgtaaaccctgctacaattggaagagaaaaggatatggaacatactctccgaatccctgaagttggtgtcagtaagtttcatgcagaaatttattttgaccatgacttacaaagttatgtccttgtggatcaaggcagtcaaaatggcacaattgttaatggaaaacagattcttcagccgaaaactaaatgtgacccttacgtacttgagcatggagatgaagtcaaaattggagaaactgtcttatcctttcacattcatcctggcagtgatacctgtgatggctgtgaaccagggcaggttagagcccaccttcgccttgataagaaagatgaatcttttgttggtccaacactaagtaaggaggaaaaagagttggaaagaagaaaagaattaaagaaaatacgagtaaaatatggtttacagaatacagaatacgaagatgaaaagacattgaagaatccaaaatataaagatagagctggaaaacgtagggagcaggttggaagtgaaggaactttccaaagagatgatgctcctgcatctgttcattctgaaattactgatagcaacaaaggtcggaagatgttggagaagatgggttggaagaaaggagagggcctggggaaggatggtggaggaatgaaaacgccgatccagcttcagcttcggcgaacacatgcaggcttggggacaggcaaaccatcctcatttgaagatgttcaccttctccaaaacaagaacaaaaaaaactgggacaaagcacgagagcggtttactgaaaacttcccagaaactaagcctcaaaaagatgacccagggaccatgccttgggtaaaagggactttagagtgaaggctaatcatagaaaaaaaacctctagtttttttaaaaatagaatttggaaacttattttttctccccaaaagaatcagcagcacaggggaactatgtcacagtttacctcttcctgattcagaaatgtgtatggtttgcagcttttaaaaaccatttttttaaaactaataaatagtgactgaaccaatttatgcagtaaatagactaaagttcacagggcacggatgagtttatcaaacttcgttattttatcttgtcatttacaacatccatataagcaactagccatataagcaaaattcatagaactactaatgacttaagtgtacatctgttcttgtctccatatattcatgtaagatgcacaacaaaagaaacatcagaagtttataaaaataaatctgactatatgcatcctcatttattccctttagaacctaggtaaaaaatgttgcgaaaacatgggtagtggcgcatacattttgttatccttgaaatagcctaagtaatgttattgaagaactaatgaacaggtaacatattgtagaaaattagtctttcattgttttcttctgtgaagaatctgttgctatgtactgtatattcagcatttatatttggtttgtttcatagctaatgaggtatttagatatgaacaactgaatacatattgaaatagtgtgctggcttttgtagttttgataaagaccattgcaggcaatggaattgtgccagagaaatctgatttctagtacaaaaggaatacttagccagggcctcaagctcaagatacttattgaaaacatcctcaattgcaataaaaacattataacatgaaaaagagtgattttttgaaccggtgatttaaatgtattgatctgctttgaattttcaagcagccagaattttctagtttaaattggcagagttataacaaaggagagcctcaaatattagacaattgcagtgcggctttctgggcacaggtgtcactgctctgccacctatcactattctttttctgttcagtttttctctcaggtgtttgctgggaaattaacactggaactgacccttttctggcagtgaatgtaagctctagctcccccatctactataaagaaatgtcttcgagatgtagaaataaggaatattctgaaaataaaaattatacagtagtaaagataattcagaaagaaaaagctacctgttagaatttccagtctaaatggcacagggtagttacggagaaaaggggatggagaaggagaaactatgactaaagatgagaggtatgaacgagttgtcaggttcctatgggcttaagctaggacaatcaggccctaaactccaaatttggataaaatatctctttgcattcttcttggccacctgcatagtctgacacatacgtatgtacagttagacttgcaggctgcaggagtgccctgcattgttttcttttaattagaaataaaaagtattagtctaaatgtggttctggtgctggtgccctgtatatatgtaacaatataggacccctccaaataggttttgcttctggtgaatcttggtcattgggttagtatatgactgtctataatattttccatttgtattattatattggggaaaacattttttatcattttctattaagaaaatggaaaacttaaatatggtgttaaaaatggaaatatatgtgatatttgcattattaaacccctttgcagatctaaagtctcagggttccactattagtggttaaagtactgaataatgtctgggtctatttccatctgtaaaataagaatatttgtctcacgtgtctgtcatgaatagcaaatgagaaaatgtatataaaagcactttgtaaattgtaaaagtagtacagatgtgagcttctatttgtttagaagcataaatgtgaattatatacagtttgaattttgcataaattttttgtgtctaattttaaa

SEQ ID NO: 196330 - DNA, 1142 bp, Artificial Sequence
  derived and/or modified sequence
ttttccgactgcttatccgacgctcctccctctgtctctgtagctggagaaggtagtttccaggaaagttttccggtttgcaggccgcgcacatcgggcaggggccatcctcggtccccttgctcgttgctcgcagccccgttcggctacaagtgagtttcagggcgtcatggccaggggccaccgcggccagccgggtgtgaggctgcctttcgctgcccgcgcgctccagtggtctctgggtccgccggcgtccgtttcggcctgaacgcagcccctccgcggcgacgagcagtctcgcgccggagctcatggcctcggaggcgccgtccccgccgcggtcgccgccgccgcccacctcccccgagcctgagctggcccagctaaggcggaaggtggagaagttggaacgtgaactgcggagctgcaagcggcaggtgcgggagatcgagaagctgctgcatcacacagaacggctgtaccagaacgcagaaagcaacaaccaggagctccgcacgcaggtggaagaactcagtaaaatactccaacgtgggagaaatgaagataataaaaagtctgatgtagaagtacaaacagagaaccatgctccttggtcaatctcagattatttttatcagacgtactacaatgacgttagtcttccaaataaagtgactgaactgtcagatcaacaagatcaagctatcgaaacttctattttgaattctaaagaccatttacaagtagaaaatgatgcttaccctggtaccgatagaacagaaaatgttaaatatagacaagtggaccattttgcctcaaattcacaggtaataaaatgctaaacatgaaactgttgatgcccaagaacctgtccttctttgttgttattatgtggaaagatagacttctttggtccgtcacagcatatataagggttataaacattcttatgtgtaattatgcaaagaatgttgtagtttttccaaaaccagaattagaacttcttcatatatgtagtggttttcctactacattgtgttccaaaattttgtgatctacataaactaaaacaaaatttgtccagatattttgactgaacaaaagaactgtggacaacaataccacatttacacctaaaaaaa

SEQ ID NO: 196331 - DNA, 2145 bp, Artificial Sequence
  derived and/or modified sequence
atggcttctgaagccccttcaccaccgcgatcacccccacctcccacatccccagagcctgagctggcccaattgagacggaaagtggagaagctggagagagagctccgctcgtgtaaacgccaggtccgcgagattgagaagttactgcatcacaccgagagactctaccagaacgcggagtccaataaccaggaacttcgaacacaggtcgaggagcttagtaaaattttacagcgcggaagaaacgaggataataagaagtccgatgtcgaagtgcagactgaaaatcatgcaccttggtcaattagtgattatttttaccagacttattacaatgacgtgagcctgcccaacaaggtcacagaactctccgatcagcaggaccaggccatcgaaacctccatcttgaactccaaagaccatctgcaggtggaaaatgacgcatatcctgggactgatcggaccgagaatgttaagtaccgccaggtcgatcacttcgcatctaattctcaagaaccagcctccgccctcgcgactgaggatacatcccttgaagggtccagccttgcagaatctctgagagctgcagcggaagccgcagtaagccagactggatttagctacgatgaaaacacgggactgtatttcgaccactctactggattctattatgactccgagaatcagctgtactacgatccatccacaggaatctactactactgtgacgtggagagcggcaggtatcaatttcactctagagtagacctgcagccataccctaccagctctacgaagcagagcaaagataaaaagctcaagaaaaagagaaaagacccggactcctcggccacgaacgaagagaaagatctgaattccgaagaccagaaagcctttagtgttgagcatacaagttgtaatgaagaagaaaacttcgccaatatgaaaaaaaaagccaagattggtattcaccataagaacagtcctcctaaggttaccgtgcctacaagtgggaatacaattgaatcccccctgcatgaaaatatttccaacagtacaagcttcaaagacgagaaaataatggaaaccgattcggaacctgaggagggagagatcacagacagtcagaccgaggattcttatgacgaggccataacttctgaagggaatgtcaccgccgaggatagcgaggacgaggacgaggataaaatctggccaccttgtattagagtgatcgtcatcaggagtccagtgctccagattggatccctgttcatcataactgcggtcaaccccgctacaatagggcgagaaaaagacatggaacatacacttcgcatcccggaggtaggggtctctaaattccatgccgaaatctatttcgaccacgatcttcagagctacgttctggtcgaccagggttctcagaatgggacaattgtcaatggcaagcagattttgcagcccaaaactaagtgtgatccttacgtgttggagcacggcgatgaggtcaaaatcggcgagactgttcttagttttcatattcaccccggtagtgacacttgtgacgggtgtgaacccggacaggtccgggcacaccttaggcttgataagaaggatgagtcttttgtggggccaacactaagcaaggaagagaaggaactagagcgtagaaaagagctcaagaaaatacgggtgaagtacggactacagaatactgagtatgaagatgagaaaacgctgaaaaatcctaaatacaaggatcgcgctggcaagcggcgtgagcaggtggggtctgaaggcacatttcagcgagacgatgcgcctgcatctgttcattccgaaataacggattctaataaaggccgaaagatgctggaaaagatgggttggaagaaaggggagggcttaggcaaagacgggggtggaatgaagaccccgatacagctgcagctgcgtcgcacgcacgcgggactggggaccggtaaaccgtcgagctttgaagatgtccatttgctccagaataaaaacaaaaaaaactgggataaagcaagggaacggttcacagaaaacttccctgagactaagcctcagaaggacgatccaggaactatgccatgggtgaagggcacgctggagtag

SEQ ID NO: 196332 - DNA, 531 bp, Artificial Sequence
  derived and/or modified sequence
atggcatcagaagccccatcgcctcccagatcgcctccacccccaactagtccagagccagaactggcccagctccgacgcaaagtggagaaactcgagcgcgaattgcggtcatgcaagcgacaggtgagggaaatcgagaaattactacaccataccgaaagactgtaccagaacgcggagtccaataatcaggaactccggacccaagttgaggagctatcgaagatcctgcaacggggaaggaacgaggataataaaaagtccgacgttgaagtccaaaccgagaatcacgctccctggtccatctcggattacttttatcagacttattataatgacgtctctctgccaaacaaggtaactgagctgagcgatcagcaggatcaggctattgaaacaagcattcttaacagcaaggaccacctgcaggtggagaacgatgcttaccccggaactgaccgcactgagaatgtcaaatacaggcaggtggatcacttcgcatctaactctcaggttataaaatgctag

SEQ ID NO: 196333 - DNA, 2145 bp, Artificial Sequence
  derived and/or modified sequence
atggccagcgaggcccccagcccccccagaagcccccccccccccaccagccccgagcccgagctggcccagctgagaagaaaggtggagaagctggagagagagctgagaagctgcaagagacaggtgagagagatcgagaagctgctgcaccacaccgagagactgtaccagaacgccgagagcaacaaccaggagctgagaacccaggtggaggagctgagcaagatcctgcagagaggcagaaacgaggacaacaagaagagcgacgtggaggtgcagaccgagaaccacgccccctggagcatcagcgactacttctaccagacctactacaacgacgtgagcctgcccaacaaggtgaccgagctgagcgaccagcaggaccaggccatcgagaccagcatcctgaacagcaaggaccacctgcaggtggagaacgacgcctaccccggcaccgacagaaccgagaacgtgaagtacagacaggtggaccacttcgccagcaacagccaggagcccgccagcgccctggccaccgaggacaccagcctggagggcagcagcctggccgagagcctgagagccgccgccgaggccgccgtgagccagaccggcttcagctacgacgagaacaccggcctgtacttcgaccacagcaccggcttctactacgacagcgagaaccagctgtactacgaccccagcaccggcatctactactactgcgacgtggagagcggcagataccagttccacagcagagtggacctgcagccctaccccaccagcagcaccaagcagagcaaggacaagaagctgaagaagaagagaaaggaccccgacagcagcgccaccaacgaggagaaggacctgaacagcgaggaccagaaggccttcagcgtggagcacaccagctgcaacgaggaggagaacttcgccaacatgaagaagaaggccaagatcggcatccaccacaagaacagcccccccaaggtgaccgtgcccaccagcggcaacaccatcgagagccccctgcacgagaacatcagcaacagcaccagcttcaaggacgagaagatcatggagaccgacagcgagcccgaggagggcgagatcaccgacagccagaccgaggacagctacgacgaggccatcaccagcgagggcaacgtgaccgccgaggacagcgaggacgaggacgaggacaagatctggcccccctgcatcagagtgatcgtgatcagaagccccgtgctgcagatcggcagcctgttcatcatcaccgccgtgaaccccgccaccatcggcagagagaaggacatggagcacaccctgagaatccccgaggtgggcgtgagcaagttccacgccgagatctacttcgaccacgacctgcagagctacgtgctggtggaccagggcagccagaacggcaccatcgtgaacggcaagcagatcctgcagcccaagaccaagtgcgacccctacgtgctggagcacggcgacgaggtgaagatcggcgagaccgtgctgagcttccacatccaccccggcagcgacacctgcgacggctgcgagcccggccaggtgagagcccacctgagactggacaagaaggacgagagcttcgtgggccccaccctgagcaaggaggagaaggagctggagagaagaaaggagctgaagaagatcagagtgaagtacggcctgcagaacaccgagtacgaggacgagaagaccctgaagaaccccaagtacaaggacagagccggcaagagaagagagcaggtgggcagcgagggcaccttccagagagacgacgcccccgccagcgtgcacagcgagatcaccgacagcaacaagggcagaaagatgctggagaagatgggctggaagaagggcgagggcctgggcaaggacggcggcggcatgaagacccccatccagctgcagctgagaagaacccacgccggcctgggcaccggcaagcccagcagcttcgaggacgtgcacctgctgcagaacaagaacaagaagaactgggacaaggccagagagagattcaccgagaacttccccgagaccaagccccagaaggacgaccccggcaccatgccctgggtgaagggcaccctggagtag

SEQ ID NO: 196334 - DNA, 531 bp, Artificial Sequence
  derived and/or modified sequence
atggccagcgaggcccccagcccccccagaagcccccccccccccaccagccccgagcccgagctggcccagctgagaagaaaggtggagaagctggagagagagctgagaagctgcaagagacaggtgagagagatcgagaagctgctgcaccacaccgagagactgtaccagaacgccgagagcaacaaccaggagctgagaacccaggtggaggagctgagcaagatcctgcagagaggcagaaacgaggacaacaagaagagcgacgtggaggtgcagaccgagaaccacgccccctggagcatcagcgactacttctaccagacctactacaacgacgtgagcctgcccaacaaggtgaccgagctgagcgaccagcaggaccaggccatcgagaccagcatcctgaacagcaaggaccacctgcaggtggagaacgacgcctaccccggcaccgacagaaccgagaacgtgaagtacagacaggtggaccacttcgccagcaacagccaggtgatcaagtgctag

SEQ ID NO: 196335 - protein, 431 aa, Artificial Sequence
  derived and/or modified sequence
MFFGGEGSLTYTLVIICFLTLRLSASQNCLKKSLEDVVIDIQSSLSKGIRGNEPVYTSTQEDCINSCCSTKNISGDKACNLMIFDTRKTARQPNCYLFFCPNEEACPLKPAKGLMSYRIITDFPSLTRNLPSQELPQEDSLLHGQFSQAVTPLAHHHTDYSKPTDISWRDTLSQKFGSSDHLEKLFKMDEASAQLLAYKEKGHSQSSQFSSDQEIAHLLPENVSALPATVAVASPHTTSATPKPATLLPTNASVTPSGTSQPQLATTAPPVTTVTSQPPTTLISTVFTRAAATLQAMATTAVLTTTFQAPTDSKGSLETIPFTEISNLTLNTGNVYNPTALSMSNVESSTMNKTASWEGREASPGSSSQGSVPENQYGLPFEKWLLIGSLLFGVLFLVIGLVLLGRILSESLRRKRYSRLDYLINGIYVDI

SEQ ID NO: 196336 - protein, 57 aa, Artificial Sequence
  derived and/or modified sequence
MFFGGEGSLTYTLVIICFLTLRLSASQNCLKKSLEDVVIDIQSSLSKGIRGNEPVYT

SEQ ID NO: 196337 - DNA, 1296 bp, Artificial Sequence
  derived and/or modified sequence
atgttcttcggcggcgagggcagcctgacctacaccctggtgatcatctgcttcctgaccctgagactgagcgccagccagaactgcctgaagaagagcctggaggacgtggtgatcgacatccagagcagcctgagcaagggcatcagaggcaacgagcccgtgtacaccagcacccaggaggactgcatcaacagctgctgcagcaccaagaacatcagcggcgacaaggcctgcaacctgatgatcttcgacaccagaaagaccgccagacagcccaactgctacctgttcttctgccccaacgaggaggcctgccccctgaagcccgccaagggcctgatgagctacagaatcatcaccgacttccccagcctgaccagaaacctgcccagccaggagctgccccaggaggacagcctgctgcacggccagttcagccaggccgtgacccccctggcccaccaccacaccgactacagcaagcccaccgacatcagctggagagacaccctgagccagaagttcggcagcagcgaccacctggagaagctgttcaagatggacgaggccagcgcccagctgctggcctacaaggagaagggccacagccagagcagccagttcagcagcgaccaggagatcgcccacctgctgcccgagaacgtgagcgccctgcccgccaccgtggccgtggccagcccccacaccaccagcgccacccccaagcccgccaccctgctgcccaccaacgccagcgtgacccccagcggcaccagccagccccagctggccaccaccgccccccccgtgaccaccgtgaccagccagccccccaccaccctgatcagcaccgtgttcaccagagccgccgccaccctgcaggccatggccaccaccgccgtgctgaccaccaccttccaggcccccaccgacagcaagggcagcctggagaccatccccttcaccgagatcagcaacctgaccctgaacaccggcaacgtgtacaaccccaccgccctgagcatgagcaacgtggagagcagcaccatgaacaagaccgccagctgggagggcagagaggccagccccggcagcagcagccagggcagcgtgcccgagaaccagtacggcctgcccttcgagaagtggctgctgatcggcagcctgctgttcggcgtgctgttcctggtgatcggcctggtgctgctgggcagaatcctgagcgagagcctgagaagaaagagatacagcagactggactacctgatcaacggcatctacgtggacatctag

SEQ ID NO: 196338 - DNA, 174 bp, Artificial Sequence
  derived and/or modified sequence
atgttcttcggcggcgagggcagcctgacctacaccctggtgatcatctgcttcctgaccctgagactgagcgccagccagaactgcctgaagaagagcctggaggacgtggtgatcgacatccagagcagcctgagcaagggcatcagaggcaacgagcccgtgtacacctag

SEQ ID NO: 196339 - DNA, 1296 bp, Artificial Sequence
  derived and/or modified sequence
atgttctttgggggggaaggatctctaacctacactctggttatcatttgttttttaacgctgagactgagtgcctcgcaaaactgcttaaagaagtcgctggaggacgtcgtgatcgacattcagagctccttaagcaaaggcattcgggggaacgagccagtatatacaagcacacaggaagactgcatcaatagctgttgttccaccaagaacatcagcggcgataaggcttgcaacctgatgatattcgacacccggaaaactgccagacagccaaattgttacctcttcttttgtcccaacgaggaggcatgccctttgaaacctgccaaagggcttatgagctaccgcatcattacagatttcccttctctaactcgtaacttaccatcccaggagctgccgcaggaggactccctgctgcacgggcaattcagccaggctgtgactcctctcgctcatcaccacactgactactctaaacctaccgatatctcgtggcgggataccctatctcagaagtttggctcgagcgaccaccttgaaaaactttttaagatggatgaagcctctgcacagctacttgcatataaggagaaagggcacagccagtcttctcagttcagctcagatcaggaaattgcccatctgcttcccgagaacgtgagtgcactgcccgcgacggtggccgttgcgtccccccatacaacctctgctacccccaaaccagctacacttttgccaactaatgctagtgttactccaagcgggactagccaaccccaactggccactactgctccgcctgtcacaactgttacttcccaaccacccacaaccttaatttctactgtgtttacccgcgctgccgccaccctgcaagcaatggccacgacagctgtgttgacaaccacatttcaggcccctactgactcaaagggctctctggaaacgatcccctttacggagatttcaaacctgacattgaatacagggaatgtctacaacccaactgctctcagtatgagtaacgttgaaagctcgacaatgaacaaaaccgcgtcctgggagggacgagaggcttctcccggaagctcctcacagggcagcgtgccagagaaccagtacgggctgcccttcgagaagtggctcctgatcggatccttactgttcggcgtcctgtttttggtgattgggctcgtacttctggggaggattctgtctgagtcactacgccgaaagagatactcacggctagattacctgatcaatgggatctacgtggacatatag

SEQ ID NO: 196340 - DNA, 174 bp, Artificial Sequence
  derived and/or modified sequence
atgttcttcggcggagagggctctctgacgtacacgctggtgatcatttgctttttgacgctcaggctgtctgccagccaaaactgtctgaaaaagagcctcgaggacgtagtaatcgacatccagtcctcgctctccaagggaattagggggaacgaaccggtgtatacatag

SEQ ID NO: 196341 - DNA, 1296 bp, Artificial Sequence
  derived and/or modified sequence
atgttctttggaggagagggcagcctgacctacaccctggtgatcatctgcttcctgaccctgcggctgagcgccagccagaactgcctgaagaagagcctggaggatgtggtgattgacatccagagcagcctgagcaagggcatcagaggaaatgaacctgtgtacaccagcacccaggaggactgcatcaacagctgctgcagcaccaagaacatcagcggggacaaggcctgcaacctgatgatctttgacaccaggaagacagcccggcagcccaactgctacctgttcttctgccccaatgaggaggcctgccccctgaagccagccaagggcctgatgagctaccgcatcatcacagacttccccagcctgaccaggaacctgcccagccaggagctgccccaggaggacagcctgctgcacggccagttcagccaggccgtgacccccctggcccaccaccacacagactacagcaagcccacagacatctcctggagggacaccctgagccagaagtttggcagcagtgaccacctggagaagctgttcaagatggatgaggccagcgcccagctgctggcctacaaggagaagggccacagccagagcagccagttcagcagtgaccaggagatcgcccacctgctgcctgaaaatgtgtctgccctgcctgccaccgtggccgtggccagcccccacaccaccagcgccacccccaagccagccaccctgctgcccaccaatgcctctgtgaccccatctggcaccagccagccccagctggccaccacagcccctcctgtgaccaccgtgaccagccagccccccaccaccctcatcagcacagtgttcaccagggctgctgccaccctgcaggccatggccaccacagctgtgctgaccaccaccttccaggcccccacagacagcaagggcagcctggagaccatccccttcacagagatcagcaacctgaccctgaacacaggaaatgtgtacaaccccacagccctgtccatgagcaatgtggagagcagcaccatgaacaagacagcctcctgggagggccgggaggccagccctggcagcagcagccagggctctgtgcctgagaaccagtatggcctgccctttgagaagtggctgctgattggcagcctgctgtttggagtgctcttcctggtgattggcctggtgctgctgggccgcatcctgtctgagagcctgcggaggaagcgctacagccggctggactacctgatcaatggcatctacgtggacatctag

SEQ ID NO: 196342 - DNA, 174 bp, Artificial Sequence
  derived and/or modified sequence
atgttctttggaggagagggcagcctgacctacaccctggtgatcatctgcttcctgaccctgcggctgagcgccagccagaactgcctgaagaagagcctggaggatgtggtgattgacatccagagcagcctgagcaagggcatcagaggaaatgaacctgtgtacacctag

SEQ ID NO: 196343 - DNA, 2623 bp, Artificial Sequence
  derived and/or modified sequence
ttttaacttgcgcgggccgcgaggcaaggctcacctgcagaccctcgggccaccagcagggaggcacgcactccccctcgcagcgcgcccagcccggggtcagcggtgtggctgagctgggggggagcgcggggcggtggggggagccacctccctgcggggctcagcgctggggccgggagcccggagcctccgcggggagggacgcgctaatgttgccgggaagcagctccgggttgcagggcaggaacgtgcccttcccccgcggcaaacttgccgtcgctgcgacggaagcaggaacttgctaaccacaaaacccgccaggccggtgcgggagctgcggagcatccgctgcggtcctcgccgagacccccgcgcggattcgccggtccttcccgcgggcgcgacagagctgtcctcgcacctggatggcagcaggggcgccggggtcctctcgacgccagagagaaatctcatcatctgtgcagccttcttaaagcaaactaagaccagagggaggattatccttgacctttgaagaccaaaactaaactgaaatttaaaatgttcttcgggggagaagggagcttgacttacactttggtaataatttgcttcctgacactaaggctgtctgctagtcagaattgcctcaaaaagagtctagaagatgttgtcattgacatccagtcatctctttctaagggaatcagaggcaatgagcccgtatatacttcaactcaagaagactgcattaattcttgctgttcaacaaaaaacatatcaggggacaaagcatgtaacttgatgatcttcgacactcgaaaaacagctagacaacccaactgctacctatttttctgtcccaacgaggaagcctgtccattgaaaccagcaaaaggacttatgagttacaggataattacagattttccatctttgaccagaaatttgccaagccaagagttaccccaggaagattctctcttacatggccaattttcacaagcagtcactcccctagcccatcatcacacagattattcaaagcccaccgatatctcatggagagacacactttctcagaagtttggatcctcagatcacttggagaaactatttaagatggatgaagcaagtgcccagctccttgcttataaggaaaaaggccattctcagagttcacaattttcctctgatcaagaaatagctcatctgctgcctgaaaatgtgagtgcgctcccagctacggtggcagttgcttctccacataccacctcggctactccaaagcccgccacccttctacccaccaatgcttcagtgacaccttctgggacttcccagccacagctggccaccacagctccacctgtaaccactgtcacttctcagcctcccacgaccctcatttctacagtttttacacgggctgcggctacactccaagcaatggctacaacagcagttctgactaccacctttcaggcacctacggactcgaaaggcagcttagaaaccataccgtttacagaaatctccaacctaactttgaacacagggaatgtgtataaccctactgcactttctatgtcaaatgtggagtcttccactatgaataaaactgcttcctgggaaggtagggaggccagtccaggcagttcctcccagggcagtgttccagaaaatcagtacggccttccatttgaaaaatggcttcttatcgggtccctgctctttggtgtcctgttcctggtgataggcctcgtcctcctgggtagaatcctctcggaatcactccgcaggaaacgttactcaagactggattatttgatcaatgggatctatgtggacatctaaggatggaactcggtgtctcttaattcatttagtaaccagaagcccaaatgcaatgagtttctgctgacttgctagtcttagcaggaggttgtattttgaagacaggaaaatgcccccttctgctttccttttttttttttggagacagagtcttgctttgttgcccaggctggagtgcagtagcacgatctcggctctcaccgcaacctccgtctcctgggttcaagcgattctcctgcctcagcctcctaagtatctgggattacaggcatgtgccaccacacctgggtgatttttgtatttttagtagagacggggtttcaccatgttggtcaggctggtctcaaactcctgacctagtgatccaccctcctcggcctcccaaagtgctgggattacaggcatgagccaccacagctggcccccttctgttttatgtttggtttttgagaaggaatgaagtgggaaccaaattaggtaattttgggtaatctgtctctaaaatattagctaaaaacaaagctctatgtaaagtaataaagtataattgccatataaatttcaaaattcaactggcttttatgcaaagaaacaggttaggacatctaggttccaattcattcacattcttggttccagataaaatcaactgtttatatcaatttctaatggatttgcttttctttttatatggattcctttaaaacttattccagatgtagttccttccaattaaatatttgaataaatcttttgttactca

SEQ ID NO: 196344 - DNA, 496 bp, Artificial Sequence
  derived and/or modified sequence
acaaaacccgccaggccggtgcgggagctgcggagcatccgctgcggtcctcgccgagacccccgcgcggattcgccggtccttcccgcgggcgcgacagagctgtcctcgcacctggatggcagcaggggcgccggggtcctctcgacgccagatttttgtgtggacataagttttcaattcatttgagtgaatacataggaggacaattgctgaattgtatgagagaaatctcatcatctgtgcagccttcttaaagcaaactaagaccagagggaggattatccttgacctttgaagaccaaaactaaactgaaatttaaaatgttcttcgggggagaagggagcttgacttacactttggtaataatttgcttcctgacactaaggctgtctgctagtcagaattgcctcaaaaagagtctagaagatgttgtcattgacatccagtcatctctttctaagggaatcagaggcaatgagcccgtatatactt

SEQ ID NO: 196345 - DNA, 1296 bp, Artificial Sequence
  derived and/or modified sequence
atgttcttcggcggcgagggcagcctgacctacaccctggtgatcatctgcttcttgaccctgaggctgagtgcatctcagaactgcctgaaaaaaagtctggaggatgtggttatcgacattcaatcctctctgtcaaagggcattcgggggaacgagccagtgtatactagcacgcaggaggattgcatcaactcatgctgttcaaccaagaacatcagtggggataaggcctgtaatttgatgatcttcgatacacgcaagactgctcgccagcccaactgttacctgttcttttgtccaaacgaggaggcgtgcccccttaaacccgcaaaaggactgatgtcctatcgaatcataaccgatttcccaagcctgacccggaatctgccatctcaggaattacctcaagaggacagtctgttgcacggccagttttcccaggccgtgacccctctggctcaccatcacaccgattactccaagcccactgacatctcttggcgcgacactctgtcccagaaatttggtagttccgaccatttggagaaactcttcaagatggatgaagcttccgcccagctcttagcttataaggaaaagggccacagtcagtcttcccagtttagctccgaccaggagatcgcacatctgcttcccgagaatgtttctgcactccctgctacagtggccgttgcttcgccgcacaccacgtcagcaacacctaaacccgccacgctactccctaccaacgccagcgtgaccccctccggcactagtcagccacagcttgctacaaccgcacccccggtgacaaccgtcacgtcccagccccccaccactctcatttctaccgtttttacgagggccgccgccactttgcaggcaatggctaccacagctgttctcacgaccacctttcaagcccctacagacagcaagggatctttggaaaccattccgtttacagaaatttccaatctgacattgaacactggaaatgtttacaacccaaccgccctgagtatgtctaatgtcgagtccagcactatgaataaaaccgcttcatgggaggggcgtgaagcaagtcctgggtcctcttcacagggctcagtacctgaaaatcagtatggcctgccttttgagaagtggctgctgatcggcagcttgctgttcggcgtcttatttcttgtcatcgggctggtgctgcttggtagaatactgagcgagtccctccggcgcaagcggtactccaggctggattacctgatcaacggaatttatgtcgacatctag

SEQ ID NO: 196346 - DNA, 174 bp, Artificial Sequence
  derived and/or modified sequence
atgttcttcggcggcgagggcagcctgacctacaccctggtgatcatatgcttcctgacgctgcggctgtctgcttcacagaactgcctgaagaagtccctcgaggatgtagtcattgacatacagtcctcactcagtaagggtataaggggaaatgaacccgtctacacatag

SEQ ID NO: 196347 - DNA, 1296 bp, Artificial Sequence
  derived and/or modified sequence
atgttctttggcggagaggggtcattgacgtatacgcttgtgatcatctgtttcttgacactgaggctcagtgccagtcagaactgtctgaaaaaatcacttgaagacgtggtcattgacatccagagttctctgagtaaaggtattcgaggcaacgaacccgtgtataccagcacccaggaagactgtatcaattcgtgttgttccactaagaacatctccggggataaagcctgtaacttgatgatattcgatacccgcaagactgcacgacaacccaattgttacctgtttttttgccctaatgaggaggcatgtcccctgaagccagccaaaggcctgatgtcctatcgaatcatcacagacttcccttcgctcacccggaatttgccatcccaggaactgcctcaagaagactcgctgttgcatggccaattcagtcaggccgtaacccctctggctcaccaccacaccgactactcaaaaccgacggatatttcttggagggacacactgtcacagaaattcggatccagtgaccaccttgagaaactcttcaagatggatgaggcaagcgctcagctactggcttacaaggaaaagggccactcccagagcagccagttttcaagcgaccaggagatcgcgcatctcttgcctgaaaacgtttcagcgttaccggcaacagtggcagtggccagcccacataccacatctgctacccctaagccagctacacttctgcccacaaatgctagcgtgaccccttctggaacttcccagcctcagttggcaacaacagcacccccagttaccaccgtgacctctcagcctccgacaaccctcatttccaccgtgttcactcgggcagcagctaccctgcaagcaatggccacgaccgcggtactaacaacgacattccaagctcccacggatagcaaaggcagcctggaaaccatcccgttcacagagataagcaatctgacactcaatactggcaacgtgtataatccgaccgcgttgtctatgagcaatgtagagtcgagcactatgaataagactgctagctgggaaggacgtgaagcgtctccagggtcatctagccagggcagcgtgcccgagaaccagtatggtctacccttcgagaagtggctgcttattgggtcactcttgtttggcgtcctctttctggtcattgggctcgtgcttttgggcaggatcctctctgagtctttgaggcgcaagcgttactcccggttggattacctgatcaatggcatctacgtcgacatttag

SEQ ID NO: 196348 - DNA, 174 bp, Artificial Sequence
  derived and/or modified sequence
atgtttttcgggggtgaaggaagtctcacatacacattggtgatcatttgctttcttaccttgcgcctctcagcctcacaaaattgcctcaagaagagtctagaggatgtggtgattgacattcagagttctctgtcaaagggtattagaggtaacgaacctgtctatacgtag

SEQ ID NO: 196349 - protein, 1066 aa, Artificial Sequence
  derived and/or modified sequence
MEPGKRRTKDDTWKADDLRKHLWAIQSGGSKEERKHREKKLRKESEMDLPEHKEPRCRDPDQDARSRDRVAEVHTAKESPRGERDRDRQRERRRDAKDREKEKLKEKHREAEKSHSRGKDREKEKDRRARKEELRQTVAHHNLLGQETRDRQLLERAERKGRSVSKVRSEEKDEDSERGDEDRERRYRERKLQYGDSKDNPLKYWLYKEEGERRHRKPREPDRDNKHREKSSTREKREKYSKEKSNSFSDKGEERHKEKRHKEGFHFDDERHQSNVDRKEKSAKDEPRKRESQNGEHRNRGASSKRDGTSSQHAENLVRNHGKDKDSRRKHGHEEGSSVWWKLDQRPGGEETVEIEKEETDLENARADAYTASCEDDFEDYEDDFEVCDGDDDESSNEPESREKLEELPLAQKKEIQEIQRAINAENERIGELSLKLFQKRGRTEFEKEPRTDTNSSPSRASVCGIFVDFASASHRQKSRTQALKQKMRSTKLLRLIDLDFSFTFSLLDLPPVNEYDMYIRNFGKKNTKQAYVQCNEDNVERDIQTEEIETREVWTQHPGESTVVSGGSEQRDTSDAVVMPKIDTPRLCSFLRAACQVMAVLLEEDRLAAEPSWNLRAQDRALYFSDSSSQLNTSLPFLQNRKVSSLHTSRVQRQMVVSVHDLPEKSFVPLLDSKYVLCVWDIWQPSGPQKVLICESQVTCCCLSPLKAFLLFAGTAHGSVVVWDLREDSRLHYSVTLSDGFWTFRTATFSTDGILTSVNHRSPLQAVEPISTSVHKKQSFVLSPFSTQEEMSGLSFHIASLDESGVLNVWVVVELPKADIAGSISDLGLMPGGRVKLVHSALIQLGDSLSHKGNEFWGTTQTLNVKFLPSDPNHFIIGTDMGLISHGTRQDLRVAPKLFKPQQHGIRPVKVNVIDFSPFGEPIFLAGCSDGSIRLHQLSSAFPLLQWDSSTDSHAVTGLQWSPTRPAVFLVQDDTSNIYIWDLLQSDLGPVAKQQVSPNRLVAMAAVGEPEKAGGSFLALVLARASGSIDIQHLKRRWAAPEVDECNRLRLLLQEALWPEGKLHK

SEQ ID NO: 196350 - DNA, 3201 bp, Artificial Sequence
  derived and/or modified sequence
atggagcccggcaagagaagaaccaaggacgacacctggaaggccgacgacctgagaaagcacctgtgggccatccagagcggcggcagcaaggaggagagaaagcacagagagaagaagctgagaaaggagagcgagatggacctgcccgagcacaaggagcccagatgcagagaccccgaccaggacgccagaagcagagacagagtggccgaggtgcacaccgccaaggagagccccagaggcgagagagacagagacagacagagagagagaagaagagacgccaaggacagagagaaggagaagctgaaggagaagcacagagaggccgagaagagccacagcagaggcaaggacagagagaaggagaaggacagaagagccagaaaggaggagctgagacagaccgtggcccaccacaacctgctgggccaggagaccagagacagacagctgctggagagagccgagagaaagggcagaagcgtgagcaaggtgagaagcgaggagaaggacgaggacagcgagagaggcgacgaggacagagagagaagatacagagagagaaagctgcagtacggcgacagcaaggacaaccccctgaagtactggctgtacaaggaggagggcgagagaagacacagaaagcccagagagcccgacagagacaacaagcacagagagaagagcagcaccagagagaagagagagaagtacagcaaggagaagagcaacagcttcagcgacaagggcgaggagagacacaaggagaagagacacaaggagggcttccacttcgacgacgagagacaccagagcaacgtggacagaaaggagaagagcgccaaggacgagcccagaaagagagagagccagaacggcgagcacagaaacagaggcgccagcagcaagagagacggcaccagcagccagcacgccgagaacctggtgagaaaccacggcaaggacaaggacagcagaagaaagcacggccacgaggagggcagcagcgtgtggtggaagctggaccagagacccggcggcgaggagaccgtggagatcgagaaggaggagaccgacctggagaacgccagagccgacgcctacaccgccagctgcgaggacgacttcgaggactacgaggacgacttcgaggtgtgcgacggcgacgacgacgagagcagcaacgagcccgagagcagagagaagctggaggagctgcccctggcccagaagaaggagatccaggagatccagagagccatcaacgccgagaacgagagaatcggcgagctgagcctgaagctgttccagaagagaggcagaaccgagttcgagaaggagcccagaaccgacaccaacagcagccccagcagagccagcgtgtgcggcatcttcgtggacttcgccagcgccagccacagacagaagagcagaacccaggccctgaagcagaagatgagaagcaccaagctgctgagactgatcgacctggacttcagcttcaccttcagcctgctggacctgccccccgtgaacgagtacgacatgtacatcagaaacttcggcaagaagaacaccaagcaggcctacgtgcagtgcaacgaggacaacgtggagagagacatccagaccgaggagatcgagaccagagaggtgtggacccagcaccccggcgagagcaccgtggtgagcggcggcagcgagcagagagacaccagcgacgccgtggtgatgcccaagatcgacacccccagactgtgcagcttcctgagagccgcctgccaggtgatggccgtgctgctggaggaggacagactggccgccgagcccagctggaacctgagagcccaggacagagccctgtacttcagcgacagcagcagccagctgaacaccagcctgcccttcctgcagaacagaaaggtgagcagcctgcacaccagcagagtgcagagacagatggtggtgagcgtgcacgacctgcccgagaagagcttcgtgcccctgctggacagcaagtacgtgctgtgcgtgtgggacatctggcagcccagcggcccccagaaggtgctgatctgcgagagccaggtgacctgctgctgcctgagccccctgaaggccttcctgctgttcgccggcaccgcccacggcagcgtggtggtgtgggacctgagagaggacagcagactgcactacagcgtgaccctgagcgacggcttctggaccttcagaaccgccaccttcagcaccgacggcatcctgaccagcgtgaaccacagaagccccctgcaggccgtggagcccatcagcaccagcgtgcacaagaagcagagcttcgtgctgagccccttcagcacccaggaggagatgagcggcctgagcttccacatcgccagcctggacgagagcggcgtgctgaacgtgtgggtggtggtggagctgcccaaggccgacatcgccggcagcatcagcgacctgggcctgatgcccggcggcagagtgaagctggtgcacagcgccctgatccagctgggcgacagcctgagccacaagggcaacgagttctggggcaccacccagaccctgaacgtgaagttcctgcccagcgaccccaaccacttcatcatcggcaccgacatgggcctgatcagccacggcaccagacaggacctgagagtggcccccaagctgttcaagccccagcagcacggcatcagacccgtgaaggtgaacgtgatcgacttcagccccttcggcgagcccatcttcctggccggctgcagcgacggcagcatcagactgcaccagctgagcagcgccttccccctgctgcagtgggacagcagcaccgacagccacgccgtgaccggcctgcagtggagccccaccagacccgccgtgttcctggtgcaggacgacaccagcaacatctacatctgggacctgctgcagagcgacctgggccccgtggccaagcagcaggtgagccccaacagactggtggccatggccgccgtgggcgagcccgagaaggccggcggcagcttcctggccctggtgctggccagagccagcggcagcatcgacatccagcacctgaagagaagatgggccgcccccgaggtggacgagtgcaacagactgagactgctgctgcaggaggccctgtggcccgagggcaagctgcacaagtag

SEQ ID NO: 196351 - DNA, 3201 bp, Artificial Sequence
  derived and/or modified sequence
atggaacctggtaagcgcagaaccaaggacgacacgtggaaggcagatgacctccggaagcacctgtgggccattcagagcggcggctctaaggaagagagaaagcaccgagaaaagaagctgaggaaggagtccgaaatggatctgcctgagcataaggaaccgcgctgcagggatcctgaccaagatgcaagatcaagggatagagtcgccgaggtccacactgctaaggagagcccacggggcgagagggacagagaccgccaacgcgaacggcgcagggacgcaaaggacagggagaaagaaaagctcaaagagaagcaccgggaggccgaaaagtcgcacagtcgtggcaaagatagagaaaaggagaaagaccgaagagccaggaaggaagaattacgccaaaccgtcgctcaccataacttgctgggccaggaaactcgagatagacagcttcttgagagggccgagaggaaggggagatctgtgagtaaggttcggagcgaggagaaagatgaagattccgaacggggcgacgaggaccgagagcggcgatatcgcgagcggaaacttcagtacggcgattctaaggacaacccactcaagtactggttatacaaggaggagggcgaaaggagacataggaagcctcgggagccagaccgagataacaaacatagggagaagtccagtacccgggaaaagcgggagaagtattctaaagaaaaaagcaattctttcagcgacaaaggcgaggagcgccacaaggagaaacgccacaaagaagggttccacttcgatgacgagcggcaccaaagcaatgttgacagaaaagagaaaagtgcgaaagacgaaccccgaaagagagagtctcaaaacggagagcacagaaatcgaggggcttcctctaagcgggacgggaccagttctcagcacgcggagaacctggtccgcaatcatgggaaagataaagactcaaggagaaaacacggccatgaagaaggttcttcagtgtggtggaagctcgaccagaggccaggcggtgaagaaaccgtggagatcgagaaagaggaaactgatctggagaatgcccgagctgatgcttacaccgcatcctgtgaggatgatttcgaggattacgaagacgactttgaagtatgcgatggagatgacgatgaatcttcgaacgagccagagtcacgagaaaaactggaggagttgcccctcgcacaaaagaaggagattcaggaaattcagagagcgattaatgctgagaacgaaaggatcggagaactatcgctgaagctgttccaaaaacgtggccggacagagtttgagaaggagcctaggacagatacaaactcttcacccagccgggccagtgtgtgtggcatctttgtggactttgcatcagcgtctcaccggcagaagtcccgcactcaggcgctgaaacagaagatgagaagtactaagcttttgcgcctaatcgatctggatttttcctttacctttagtctgttggatttgcctccggtcaatgaatatgacatgtacatacggaatttcggcaagaagaacaccaaacaagcgtatgttcagtgtaacgaggacaacgtcgagcgggatatccaaaccgaggaaatcgagacgagggaagtctggacccagcatcccggcgaatccacggttgtctcaggcggctctgagcagagggacaccagcgacgccgttgtgatgccaaagatcgatacaccccggttgtgcagttttttgcgggccgcttgccaggtaatggcagttctgctcgaggaggatcgacttgctgcagagcccagctggaaccttcgagcccaggacagagctttatactttagcgatagctctagtcagctgaataccagcttgcccttcctgcagaatcggaaagtgtcctctctccatacatcgagagtgcagagacagatggtggtgagcgtgcatgatctccctgaaaaatcctttgtgccgttgctcgattctaagtacgtgctgtgtgtctgggacatttggcagccgtcagggccgcagaaagtgctgatctgtgagtcacaggtgacatgctgctgcctcagccccctgaaggcttttctgctgttcgctggaaccgctcacggcagcgtcgtggtctgggatctgcgcgaagattctaggctgcattatagcgtcactctttcggacggcttttggacattcaggacagccactttctccaccgacggcatcctgacatcagttaaccatcggagccctttgcaggcagtggagcccattagtactagcgtacacaagaaacaatctttcgttttatcaccgttctctacacaggaggagatgtctgggctttccttccatattgcctccctggatgaaagcggagtattgaatgtctgggtggtagtggaactgcccaaagcagatatcgcgggctctatctcggatctgggcttaatgcctgggggaagggtaaagttggttcacagcgctctgatccagttgggggatagtctcagccacaaaggcaatgaattctggggcacaacacagacactgaacgtgaagtttctccccagtgacccaaatcattttatcattggaacagatatgggactgattagtcatggaacccggcaagacctccgcgtggcacccaagctcttcaagccacagcaacatggaattcggcctgtgaaagtgaatgtgatagactttagtcccttcggcgaaccgattttccttgccggctgttcagatggttccatcaggctccatcagttgagctctgctttccccctgttacagtgggattccagtactgacagtcatgcagtcacaggcctacagtggagccctaccaggccagctgtgttcctggtgcaggatgataccagcaatatttatatctgggatctgcttcagtccgacctcggccctgtggcgaagcagcaggttagcccaaacaggctcgtggccatggctgctgtcggcgaacccgaaaaagctggtggatcgttcctggctttggtgctggcaagggcctcgggcagcattgacattcagcatctcaagcgccgttgggcagctcccgaagtggacgagtgtaaccgccttcgacttctactgcaggaagctttatggccggaagggaagctgcataagtag

SEQ ID NO: 196352 - DNA, 3201 bp, Artificial Sequence
  derived and/or modified sequence
atggagcccgggaagaggaggaccaaggatgacacctggaaggcagatgacctgaggaagcacctgtgggccatccagagcggcggcagcaaggaggagaggaagcaccgggagaagaagctgaggaaggagagcgagatggacctgcctgagcacaaggagccccgctgccgggaccctgaccaggatgcccggagccgggacagagtggccgaggtgcacacagccaaggagagccccagaggagagcgggaccgggaccggcagcgggagaggagaagagatgccaaggaccgggagaaggagaagctgaaggagaagcaccgggaggccgagaagagccacagccggggcaaggaccgggagaaggagaaggacagaagagccaggaaggaggagctgcggcagacagtggcccaccacaacctgctgggccaggagacccgggaccggcagctgctggagagagctgagaggaagggccgctctgtgtccaaggtgcgctctgaggagaaggatgaggacagcgagagaggagatgaagatcgggagcggcgctaccgggagaggaagctgcagtacggggacagcaaggacaaccccctgaagtactggctgtacaaggaggagggggagaggaggcacaggaagccccgggagccagaccgggacaacaagcaccgggagaagagcagcacccgggagaagcgggagaagtacagcaaggagaagagcaacagcttcagtgacaagggggaggagcggcacaaggagaagaggcacaaggagggcttccactttgatgatgagcggcaccagagcaatgtggacaggaaggagaagagcgccaaggatgagcccaggaagcgggagagccagaatggagagcacaggaacagaggagccagcagcaagagagatggcaccagcagccagcacgccgagaacctggtgagaaatcatggcaaggacaaggacagcaggaggaagcacggccacgaggagggcagctctgtgtggtggaagctggaccagaggcctggaggagaggagaccgtggagattgagaaggaggagacagacctggagaatgcccgggcagatgcctacacagccagctgtgaagatgactttgaagattatgaagatgactttgaggtgtgtgatggagatgatgatgagagcagcaatgaacctgagagccgggagaagctggaggagctgcccctggcccagaagaaggagatccaggagatccagagggccatcaatgcagaaaatgaaagaattggagagctgagcctgaagctgttccagaagaggggccgcacagaatttgagaaggagcccaggacagacaccaacagcagccccagccgggcctctgtgtgtggcatctttgtggactttgccagcgccagccaccggcagaagagcaggacccaggccctgaagcagaagatgaggagcaccaagctgctgcggctgattgacctggacttctccttcaccttcagcctgctggacctgccccctgtgaatgaatatgacatgtacatccggaactttgggaagaagaacaccaagcaggcctacgtgcagtgcaatgaagataatgtggagcgggacatccagacagaggagattgagacccgggaggtgtggacccagcaccctggagagagcacagtggtgtctgggggcagcgagcagagggacaccagtgatgctgtggtgatgcccaagattgacaccccccggctgtgcagcttcctgcgggccgcctgccaggtgatggctgtgctgctggaggaggaccggctggccgctgagcccagctggaacctgcgggcccaggaccgggccctgtacttcagtgacagcagcagccagctgaacaccagcctgcccttcctgcagaacaggaaggtgagcagcctgcacaccagccgggtgcagaggcagatggtggtgtctgtgcatgacctgcctgagaagagctttgtgcccctgctggacagcaaatatgtgctgtgtgtgtgggacatctggcagcccagcggcccccagaaggtgctgatctgtgagagccaggtgacctgctgctgcctgagccccctgaaggccttcctgctgtttgctggaacagcccacggctctgtggtggtgtgggacctgcgggaggacagccggctgcactacagcgtgaccctgagtgatggcttctggaccttcagaacagccaccttcagcacagatggcatcctgacctctgtgaaccacaggagccccctgcaggccgtggagcccatcagcacctctgtgcacaagaagcagagctttgtgctgagccccttcagcacccaggaggagatgagcggcctgtccttccacatcgccagcctggatgaaagtggagtgctgaatgtgtgggtggtggtggagctgcccaaggctgacattgctggcagcatcagtgacctgggcctgatgcctgggggccgggtgaagctggtgcacagcgccctgatccagctgggggacagcctgagccacaagggaaatgagttctggggcaccacccagaccctgaatgtgaagttcctgcccagcgaccccaaccacttcatcatcggcacagacatgggcctcatcagccacggcacccggcaggacctgcgggtggcccccaagctgttcaagccccagcagcacggcatccggcctgtgaaggtgaatgtgattgacttcagcccctttggagagcccatcttcctggccggctgcagtgatggcagcatccggctgcaccagctgagcagcgccttccccctgctgcagtgggacagcagcacagacagccatgctgtgacaggcctgcagtggagccccaccaggcctgctgtgttcctggtgcaggatgacaccagcaacatctacatctgggacctgctgcagagcgacctgggccctgtggccaagcagcaggtgagccccaaccggctggtggccatggctgctgtgggggagcctgagaaggccggcggcagcttcctggccctggtgctggcccgggccagcggcagcattgacatccagcacctgaagaggcgctgggccgcccctgaggtggatgagtgcaaccggctgcggctgctgctgcaggaggccctgtggccagagggcaagctgcacaagtag

SEQ ID NO: 196353 - DNA, 3201 bp, Artificial Sequence
  derived and/or modified sequence
atggagcccggcaagcggcggaccaaggacgacacctggaaggccgatgacttacgcaagcatttgtgggccatccagtccgggggaagtaaggaagaacggaagcaccgcgaaaaaaaactgcgaaaggagtcggagatggatctgcctgaacataaggaaccaaggtgtagggacccagatcaggacgcaagaagccgggatagggtggccgaagtacatactgctaaggagtctccgcggggggagcgtgaccgagacaggcaaagggaaagacgacgggatgccaaggatagagaaaaggagaaactgaaagagaaacaccgggaggctgaaaagtctcacagtcgaggaaaagatcgtgaaaaagaaaaggacaggagagcccggaaggaagagcttcgccagacagtggcccaccacaatctgcttggccaagaaacacgtgaccgccagctgctcgagagggctgaacggaaaggacgttccgtgagtaaggtgcgcagcgaggagaaggatgaggattcagaacgcggggatgaggaccgggagcgcaggtacagggagcggaaactccagtatggagatagtaaagacaatcctttgaaatactggctctataaggaagagggagaacgaaggcaccgaaagcccagggaacctgatcgggacaacaaacatcgcgaaaaatcatccaccagagagaagagagaaaaatactccaaggagaagtccaatagtttttcggacaagggggaggagcgacataaggagaaacgccataaggaaggctttcacttcgacgacgaacggcaccaatccaacgttgacagaaaggaaaagagtgctaaagacgagccaagaaagcgtgagtctcaaaatggtgagcacagaaataggggcgcctcaagcaaaagagacgggacctcatcacagcatgctgaaaatctggtgcggaaccatgggaaagacaaggacagtagaaggaagcacggacacgaggagggttccagcgtttggtggaagcttgaccaacgcccaggcggagaggagactgtcgaaattgaaaaggaggagacggacctcgagaatgcaagagccgatgcctacactgctagctgcgaggatgattttgaggactacgaagacgatttcgaggtgtgcgacggtgacgatgatgagtctagcaacgagcctgaatctcgagagaagctcgaagaactgccactcgcccagaaaaaagaaatccaagagatccaacgggcaatcaacgccgaaaatgagcgcatcggggaacttagcctcaagttgttccaaaagagggggagaacagagtttgagaaggaaccgcgcaccgatactaattcctccccctctagagcatctgtgtgtggtatctttgtagactttgcctcagcctctcatcgccaaaaaagcagaacccaggccttgaagcagaaaatgagatccactaaactgcttcgtctgatagacctcgatttctctttcacattttctctgctagaccttcccccagtcaacgagtatgacatgtacatccggaacttcggcaagaagaacaccaagcaggcctacgtgcagtgtaatgaagacaatgtagaaagagatatccagactgaagagatcgagacccgggaggtttggactcaacatccaggtgaatcaaccgtcgtgagcggcggctctgaacagagggacacctctgatgcagtcgttatgcctaagatcgacaccccccgtctgtgttcctttctgcgggcggcctgccaagtgatggcggtgctccttgaagaagatagactcgctgcagaacccagctggaatctgcgagctcaggatagagccctatacttctcggactcttcgtctcagctgaatacatccctgccctttctccaaaataggaaggtgtcatctctccataccagccgtgtccagcgccagatggtggtgtcagttcatgacctccctgaaaagagtttcgtccccctgcttgattcaaaatacgtcctatgcgtgtgggatatttggcagcctagcgggccccaaaaagtgctaatctgtgaaagccaagtgacctgttgctgcctgtctcctctgaaagcatttttattgttcgcaggcacagctcacggtagtgtggtcgtgtgggacctgcgcgaggattcccggctgcattattctgtgacactctccgacgggttttggactttcaggacagccacattctccacagacggcatcctgactagcgtgaaccaccggagtcccctccaggcagttgaaccgatttctaccagcgtacacaagaagcaatcctttgtcctgagcccattctctacccaggaggaaatgtcggggctcagctttcatatcgcttctctggatgagtccggcgtcctaaatgtgtgggtcgtggtggaactgccaaaggctgacatagccggtagtatcagtgacctgggactgatgcccggcggacgagtgaagctagttcacagtgcacttatacaattgggcgactctctttcacataaaggcaatgaattctggggcaccactcagaccctgaatgtaaaattcctaccttcagaccccaaccacttcattataggaaccgatatggggctgattagccatgggacgcgccaagatctgagggtggctccaaaattgtttaaaccccagcagcatggcattaggccggtaaaagtcaacgtgattgatttttcgccgttcggggagcccatcttccttgccgggtgttcagacggcagtattcggcttcatcagctttcaagcgcattcccattgttgcagtgggactcaagcaccgatagccacgctgtgaccggtctgcaatggtcccccaccaggccagccgtctttcttgtgcaggacgacactagtaatatttacatttgggatttacttcagtcagacctgggccccgttgccaaacagcaggttagcccaaacaggctcgtcgccatggccgccgtgggcgaaccggagaaagcaggaggtagcttccttgccctcgtcttggctcgtgcttctggaagcatcgatattcagcacctgaagagaagatgggccgccccagaggtagacgagtgtaatagattgcggctgctcctgcaagaagccctttggccagaagggaagttgcacaaatag

SEQ ID NO: 196354 - DNA, 3201 bp, Artificial Sequence
  derived and/or modified sequence
atggaacctggtaagagaaggaccaaagatgatacctggaaggcagatgacctgagaaagcacctgtgggcaattcaatctgggggaagtaaggaagagcggaaacaccgggagaagaaattgcgcaaagagtccgaaatggatcttccagagcataaggagccacgctgccgagatccagaccaggacgcgaggtccagggacagagtggccgaagtccatactgctaaagaaagtccccgtggagagagggaccgggatcgccagagggagcgtaggcgcgatgccaaagaccgcgagaaagaaaagctcaaagaaaagcatcgcgaagctgaaaaatctcactcccgcggtaaggaccgggagaaggagaaagatagacgggctcgtaaggaggaacttcgacagacagtggctcaccacaacctcctgggtcaggaaacgcgggataggcagctcttggagagagccgagcgcaagggcaggtccgtgagtaaggtcaggagcgaggagaaggacgaggactccgagcgaggggatgaggacagggagcgcagatacagagaacgaaaactacagtacggcgatagtaaggacaatcctttgaaatattggctgtataaggaggagggggaacggaggcatcgtaagcctagagagccagacagggacaacaagcatcgcgaaaagagtagtaccagggagaagagggaaaaatacagcaaagaaaaaagtaatagctttagcgataaaggtgaggagcgtcacaaagaaaaaaggcacaaggagggattccatttcgacgacgagagacaccagagcaatgtggatcgaaaagagaagtcggcaaaggatgagccccgaaaacgcgaatcacagaacggcgaacaccgcaacaggggagcatcctcaaagagggatggtacaagttctcagcacgcagaaaacttggtgcgcaatcatggaaaagacaaggatagccggagaaaacacgggcacgaggagggctcctctgtttggtggaagcttgaccagagacccggaggcgaggagaccgttgagatcgagaaggaagaaactgatctggaaaacgccagagctgacgcctatacggcgagctgtgaagacgacttcgaggattatgaggatgatttcgaagtgtgtgatggggacgacgacgagagcagcaacgaacctgagtctagggaaaaactggaagaacttcctctggcacagaagaaagagatccaagagatacagagggccataaatgccgagaatgaacgcatcggagagctgagtctcaaactctttcagaaacggggacggaccgagttcgagaaggagccacgcacagacactaattcttctcctagccgcgcaagcgtctgcggcatttttgtggacttcgcgtccgctagccatcggcagaagtcccggactcaagctttgaagcagaagatgagaagcaccaagctgttgagacttatcgatctagatttctcttttaccttctcactcctcgaccttcccccagtcaacgaatacgatatgtatatccggaatttcggcaagaaaaacaccaagcaagcatatgtccagtgcaatgaagacaatgtcgaacgcgatatacagacagaagagatagagacaagggaggtgtggactcaacatcctggtgagtcaaccgttgtaagcggaggctccgaacaacgcgacacctccgacgccgttgtgatgcccaagatcgacacacctaggttgtgctcttttctcagggccgcatgtcaagtgatggccgtcctactagaggaagacagattagccgctgagcccagctggaacttgcgcgctcaagacagggcactttacttttcagacagctcaagtcaactgaacacgtcccttccatttcttcagaatcgtaaagtcagcagcctgcacacttctagggtccaacgtcagatggtggtttcggtgcatgatctcccagagaagagcttcgtaccactgttggacagcaagtacgtcctctgcgtgtgggatatatggcagccctcaggcccacagaaagttctaatctgtgaatcccaggtgacatgctgctgcttgagcccactcaaagcatttcttctcttcgcgggaaccgctcacgggtcagtggtggtgtgggacttgcgtgaggacagccgacttcattacagtgtgactctgtccgacggtttctggactttcagaacagccacattctccacagacggcattctcaccagcgtcaatcacaggagtcccctgcaagccgtggaaccaataagcactagcgttcacaaaaagcagtcgttcgtgctatcgcctttttctacccaggaggagatgtcaggcctgtccttccacattgcttcccttgacgagagcggtgtgctgaacgtatgggtggtagtagagctacccaaagccgatatagctggctcgattagcgacttgggccttatgccgggagggcgtgtaaaactcgtgcattctgcgctcattcagctaggggactctctcagccataagggaaacgagttctggggcactacacaaacgctgaatgttaagttcctgcctagcgatcccaaccattttataatcgggacagacatggggcttatctcacatggaactaggcaggacctgagagtcgcccctaaactgtttaagccccagcaacacgggatccgcccagttaaggtaaatgtaattgacttttcccccttcggagagcctattttcctggccggatgctcagacggctccattagactgcatcaactgagttccgcatttcccctcctgcaatgggacagctctactgactcacacgctgtaaccgggctgcaatggtccccaaccagacctgcagtcttcttggttcaggatgatactagcaatatctacatctgggaccttttgcaaagcgatctgggtcccgtggctaagcagcaggtcagcccaaataggctagtagctatggcagcagttggtgaaccagaaaaagccggaggtagtttcctggctcttgtgttagccagggctagcggaagcatcgatattcagcacttgaagcgacgttgggccgcacctgaagttgatgaatgtaatcgattaagactgctcttgcaggaggccctgtggcccgaagggaaacttcataaatag

SEQ ID NO: 196355 - DNA, 3769 bp, Artificial Sequence
  derived and/or modified sequence
ctgggcagtgcttctgggccctctgctgctcctgcttgtcggttgctaggcgctgggacgcgcctcccgaagggtgcggggcacaggtggcctcttcggggtggaccgcgcctggccggggccgaggacaccgcggccgcccgggcctgcgggaagcgatggagcccgggaagagaagaaccaaagatgatacctggaaagcagatgacctcagaaaacatctctgggccatacagtcaggtggttccaaggaagaaagaaagcacagagagaagaagctgcgtaaggagtctgagatggaccttcctgaacataaggagccgaggtgcagggatcccgaccaggatgccaggagcagagacagggtggccgaagtccacaccgctaaggagagtcctcgtggggagagggacagagacagacagagggagaggagaagagacgcaaaagaccgggagaaagaaaagctgaaggagaaacatcgagaggcagaaaagtctcacagcagaggaaaggacagggaaaaagaaaaagacagaagggcccggaaggaagagctccggcagaccgtggcccaccacaacctgctgggccaggagacacgcgaccggcagctcctggagcgggcggagaggaaaggccgctcagtaagtaaagtaagaagtgaagagaaagatgaagactctgaaagaggagatgaagatagagaaagaagataccgagaaagaaagctgcagtacggagacagcaaggacaaccctctcaagtactggctttataaagaagaaggcgagaggagacacaggaagcccagagagccagatcgagacaacaaacaccgagaaaaaagcagcacaagggaaaaaagagagaaatattccaaagagaaaagtaattcattctctgacaaaggggaagaaagacataaagaaaagcgacacaaagaaggttttcattttgatgatgagaggcaccaaagcaacgtggatagaaaagagaaatcggcaaaagatgagcccaggaaaagggaatcccagaatggtgaacacagaaatcgaggtgcaagctcaaaaagagatgggaccagcagccagcatgctgagaatttagtaaggaatcatggaaaagataaagattcaagacggaagcatggccacgaggaaggctcttctgtgtggtggaagctggaccagaggccgggaggcgaggaaaccgtggaaattgaaaaggaagaaactgatttagaaaatgctagagctgatgcatatacagccagttgtgaagatgattttgaagactatgaagatgactttgaggtttgtgatggtgatgatgatgaaagcagtaatgaacctgagtcaagagaaaaactggaagaacttcctctagctcaaaaaaaggaaatacaagaaattcaaagagctattaatgcagaaaatgaaaggattggcgagttatctttgaaactgtttcagaagcgaggtagaacagaatttgaaaaggagcccaggacagatacaaacagttccccttccagagcctctgtttgtggaatttttgtggattttgcctcagcttcacaccgtcaaaagagtcggactcaggcccttaagcaaaagatgcgaagtacaaaactgcttcggctcattgacttagatttttcatttactttctctctcttggatctaccaccagtaaatgaatatgacatgtatatcagaaactttgggaaaaaaaataccaagcaggcatatgttcagtgtaacgaagataatgttgaaagagacattcaaacggaggaaatagagaccagggaagtgtggacccagcacccgggagaaagtactgttgtatctggaggcagtgaacaaagagatacctctgatgctgtagttatgccaaagattgatactccaaggttatgtagctttctgcgggctgcttgtcaggtgatggccgttttgctggaagaggatcgcttggcagctgaacccagctggaatcttagggctcaagacagggccctgtattttagtgacagctcatctcagctgaacaccagtctaccattccttcaaaatcgaaaagtatcctccttgcacacctcccgagttcagaggcagatggtggtctccgttcacgacttacccgagaagagctttgtgcccctgctggacagcaaatacgtcctctgtgtgtgggatatttggcagccttcagggccacagaaagttctgatatgtgagtcccaggtcacgtgttgctgcttgagccctttgaaagcatttttactgtttgccggaacagcgcacggctcagttgtcgtctgggatttgagagaagactcaaggctgcattactctgtgacgctgagcgatggcttctggacgttccggaccgccacgttttccaccgatggaatccttacctcagtaaaccaccgaagccctcttcaagcagtagaacctatctcaacgtccgtccacaaaaagcagagctttgtgctttcacccttttctactcaagaagaaatgtcaggtttgtccttccacatcgcttccttggatgagagtggggttctcaatgtatgggtggttgttgaattaccaaaggcagacatcgcaggttcaataagtgatttaggtctgatgcctggagggagggtcaagctggtacatagtgctctgatccagttgggtgacagtctttcccataaaggtaatgaattttggggcactacacaaacactgaatgttaaatttctgccttcagatcctaatcactttattattggcacagacatgggtctcataagccatggcacaagacaagatttgagagtggctcccaaactattcaaacctcagcaacatggtataagaccagtgaaagttaatgtcattgatttttcaccatttggagaaccaatatttttggccggctgttcggacggaagcatcaggctgcaccagctgagctccgcgtttccgctcctgcagtgggacagcagcacggacagccatgcggtcaccggcctgcagtggtccccaaccaggcctgccgtgttcctggtgcaggacgacacatccaacatctacatctgggacctcctccagagcgatctgggtcctgtcgccaaacagcaggtctcccccaacaggctggtggccatggctgcggtgggtgagcctgagaaggctggtggcagcttcctggccctggtgctggccagggcgtctggctccatcgacatccagcacctgaagaggcggtgggcggccccggaggtggacgagtgcaacaggctgcgtctgcttttgcaggaagccctgtggccagagggaaaactgcacaagtagcgggtgtggctgagaggaccgcgtttctgtaatgacccagatttaaaagacataaggtggataattctacatttgtgtgcaagtatatttatgtatatagactatgtatattctgtatataatttattttacatgaatatgtctttggtattcccagtaaatagatgactacttttgagtggaaacaaagaacattctagcatttacaaaacttccaggggaatgtagagccacgtccagggtgctcttttctgagagtatttcgagttatttttagaacagtttaaatattgtcacattactgctagattttaaacagcctaccatgaaaatgtatcttaatgaactattttcttatgcataaagtatgtgaacacatgtctaaattaaaaggaattactccaccgaaa

SEQ ID NO: 196356 - protein, 782 aa, Artificial Sequence
  derived and/or modified sequence
MNPEKDFAPLTPNIVRALNDKLYEKRKVAALEIEKLVREFVAQNNTVQIKHVIQTLSQEFALSQHPHSRKGGLIGLAACSIALGKDSGLYLKELIEPVLTCFNDADSRLRYYACEALYNIVKVARGAVLPHFNVLFDGLSKLAADPDPNVKSGSELLDRLLKDIVTESNKFDLVSFIPLLRERIYSNNQYARQFIISWILVLESVPDINLLDYLPEILDGLFQILGDNGKEIRKMCEVVLGEFLKEIKKNPSSVKFAEMANILVIHCQTTDDLIQLTAMCWMREFIQLAGRVMLPYSSGILTAVLPCLAYDDRKKSIKEVANVCNQSLMKLVTPEDDELDELRPGQRQAEPTPDDALPKQEGTASGGPDGSCDSSFSSGISVFTAASTERAPVTLHLDGIVQVLNCHLSDTAIGMMTRIAVLKWLYHLYIKTPRKMFRHTDSLFPILLQTLSDESDEVILKDLEVLAEIASSPAGQTDDPGPLDGPDLQASHSELQVPTPGRAGLLNTSGTKGLECSPSTPTMNSYFYKFMINLLKRFSSERKLLEVRGPFIIRQLCLLLNAENIFHSMADILLREEDLKFASTMVHALNTILLTSTELFQLRNQLKDLKTLESQNLFCCLYRSWCHNPVTTVSLCFLTQNYRHAYDLIQKFGDLEVTVDFLAEVDKLVQLIECPIFTYLRLQLLDVKNNPYLIKALYGLLMLLPQSSAFQLLSHRLQCVPNPELLQTEDSLKAAPKSQKADSPSIDYAELLQHFEKVQNKHLEVRHQRSGRGDHLDRRVVL

SEQ ID NO: 196357 - protein, 214 aa, Artificial Sequence
  derived and/or modified sequence
MADILLREEDLKFASTMVHALNTILLTSTELFQLRNQLKDLKTLESQNLFCCLYRSWCHNPVTTVSLCFLTQNYRHAYDLIQKFGDLEVTVDFLAEVDKLVQLIECPIFTYLRLQLLDVKNNPYLIKALYGLLMLLPQSSAFQLLSHRLQCVPNPELLQTEDSLKAAPKSQKADSPSIDYAELLQHFEKVQNKHLEVRHQRSGRGDHLDRRVVL

SEQ ID NO: 196358 - DNA, 2349 bp, Artificial Sequence
  derived and/or modified sequence
atgaaccccgagaaggacttcgcccccctgacccccaacatcgtgagagccctgaacgacaagctgtacgagaagagaaaggtggccgccctggagatcgagaagctggtgagagagttcgtggcccagaacaacaccgtgcagatcaagcacgtgatccagaccctgagccaggagttcgccctgagccagcacccccacagcagaaagggcggcctgatcggcctggccgcctgcagcatcgccctgggcaaggacagcggcctgtacctgaaggagctgatcgagcccgtgctgacctgcttcaacgacgccgacagcagactgagatactacgcctgcgaggccctgtacaacatcgtgaaggtggccagaggcgccgtgctgccccacttcaacgtgctgttcgacggcctgagcaagctggccgccgaccccgaccccaacgtgaagagcggcagcgagctgctggacagactgctgaaggacatcgtgaccgagagcaacaagttcgacctggtgagcttcatccccctgctgagagagagaatctacagcaacaaccagtacgccagacagttcatcatcagctggatcctggtgctggagagcgtgcccgacatcaacctgctggactacctgcccgagatcctggacggcctgttccagatcctgggcgacaacggcaaggagatcagaaagatgtgcgaggtggtgctgggcgagttcctgaaggagatcaagaagaaccccagcagcgtgaagttcgccgagatggccaacatcctggtgatccactgccagaccaccgacgacctgatccagctgaccgccatgtgctggatgagagagttcatccagctggccggcagagtgatgctgccctacagcagcggcatcctgaccgccgtgctgccctgcctggcctacgacgacagaaagaagagcatcaaggaggtggccaacgtgtgcaaccagagcctgatgaagctggtgacccccgaggacgacgagctggacgagctgagacccggccagagacaggccgagcccacccccgacgacgccctgcccaagcaggagggcaccgccagcggcggccccgacggcagctgcgacagcagcttcagcagcggcatcagcgtgttcaccgccgccagcaccgagagagcccccgtgaccctgcacctggacggcatcgtgcaggtgctgaactgccacctgagcgacaccgccatcggcatgatgaccagaatcgccgtgctgaagtggctgtaccacctgtacatcaagacccccagaaagatgttcagacacaccgacagcctgttccccatcctgctgcagaccctgagcgacgagagcgacgaggtgatcctgaaggacctggaggtgctggccgagatcgccagcagccccgccggccagaccgacgaccccggccccctggacggccccgacctgcaggccagccacagcgagctgcaggtgcccacccccggcagagccggcctgctgaacaccagcggcaccaagggcctggagtgcagccccagcacccccaccatgaacagctacttctacaagttcatgatcaacctgctgaagagattcagcagcgagagaaagctgctggaggtgagaggccccttcatcatcagacagctgtgcctgctgctgaacgccgagaacatcttccacagcatggccgacatcctgctgagagaggaggacctgaagttcgccagcaccatggtgcacgccctgaacaccatcctgctgaccagcaccgagctgttccagctgagaaaccagctgaaggacctgaagaccctggagagccagaacctgttctgctgcctgtacagaagctggtgccacaaccccgtgaccaccgtgagcctgtgcttcctgacccagaactacagacacgcctacgacctgatccagaagttcggcgacctggaggtgaccgtggacttcctggccgaggtggacaagctggtgcagctgatcgagtgccccatcttcacctacctgagactgcagctgctggacgtgaagaacaacccctacctgatcaaggccctgtacggcctgctgatgctgctgccccagagcagcgccttccagctgctgagccacagactgcagtgcgtgcccaaccccgagctgctgcagaccgaggacagcctgaaggccgcccccaagagccagaaggccgacagccccagcatcgactacgccgagctgctgcagcacttcgagaaggtgcagaacaagcacctggaggtgagacaccagagaagcggcagaggcgaccacctggacagaagagtggtgctgtag

SEQ ID NO: 196359 - DNA, 645 bp, Artificial Sequence
  derived and/or modified sequence
atggccgacatcctgctgagagaggaggacctgaagttcgccagcaccatggtgcacgccctgaacaccatcctgctgaccagcaccgagctgttccagctgagaaaccagctgaaggacctgaagaccctggagagccagaacctgttctgctgcctgtacagaagctggtgccacaaccccgtgaccaccgtgagcctgtgcttcctgacccagaactacagacacgcctacgacctgatccagaagttcggcgacctggaggtgaccgtggacttcctggccgaggtggacaagctggtgcagctgatcgagtgccccatcttcacctacctgagactgcagctgctggacgtgaagaacaacccctacctgatcaaggccctgtacggcctgctgatgctgctgccccagagcagcgccttccagctgctgagccacagactgcagtgcgtgcccaaccccgagctgctgcagaccgaggacagcctgaaggccgcccccaagagccagaaggccgacagccccagcatcgactacgccgagctgctgcagcacttcgagaaggtgcagaacaagcacctggaggtgagacaccagagaagcggcagaggcgaccacctggacagaagagtggtgctgtag

SEQ ID NO: 196360 - DNA, 2349 bp, Artificial Sequence
  derived and/or modified sequence
atgaatcctgaaaaggactttgcccccctgactcctaacatcgttagagccctgaacgacaagctgtatgaaaagaggaaggttgccgcactagaaattgagaagttagtgagagagtttgtggctcagaacaacaccgtccagattaaacacgtgatccagacactctctcaggaatttgccctgtcacagcatccacacagcaggaaggggggattaatcggccttgctgcttgtagcatcgccctgggcaaggactccggcttgtatcttaaggaacttatcgagccagtgcttacttgcttcaacgatgctgattccagactgcgctattatgcttgcgaggccctgtataacatcgtcaaagtggcccgaggcgctgttcttccacactttaacgtactctttgatggtcttagcaagctcgctgccgaccccgacccaaatgtgaaatcagggagcgaactcttagacaggttgcttaaggacattgtcaccgaatctaataaatttgatttggtcagcttcattcctctattacgagaaagaatatattcgaacaaccaatacgccagacagtttattatttcatggatcttagttctggagagcgtgccggatataaacttgctggattatctgcccgagatattggacggactctttcaaatattgggcgacaatggcaaggagataaggaagatgtgtgaagtcgttctgggagagttcttgaaagaaattaagaagaatccctcatctgtcaaattcgctgagatggcaaatatactggtaatacactgccagaccactgacgatctaattcagttgacagccatgtgttggatgcgggagtttatccagctggccgggcgggtgatgcttccctattctagcggtattttaacagccgtacttccctgtctggcctatgacgaccgaaagaaaagtatcaaggaagtggcgaacgtatgcaatcagagtctcatgaagctggtaacacccgaggacgacgaactcgacgaactacgtccgggacagcggcaggctgaacctacacctgatgacgccctccccaagcaggaaggcaccgcctccggggggccagatgggtcatgcgactcctctttcagcagtggaatctctgtgttcactgctgcctctacggaacgggccccagtgacattgcacctggatggaatcgtgcaagtgctcaattgccaccttagcgatacagctatcggcatgatgactaggatcgccgtacttaagtggctgtaccacttgtacatcaaaactcccagaaagatgttccgacatactgacagcctcttccccatcctgctacaaacactgtctgatgaaagtgatgaagtgattcttaaggatctggaagtcctggcagaaatcgcatcaagtccagcaggtcagaccgacgacccaggcccactcgacgggccagatctgcaggccagccacagcgagcttcaggtgcctactccaggcagagccgggctgttaaatacctccgggaccaaaggcctggaatgttccccgagcacccccaccatgaattcatacttttataagtttatgattaacttattgaaacgcttcagcagtgagcgtaaacttctggaggtgcggggcccttttatcataaggcaactttgcctgcttctaaacgctgagaatatctttcactccatggcggatatcctcctaagagaggaagatcttaagttcgcctccactatggtacatgcgctgaacaccattctcctgacttcgacagagctattccagctgaggaatcagctaaaagacctcaagactcttgaatcacagaacctgttttgctgtctgtatagaagttggtgtcacaaccctgtgaccactgtctctctgtgtttcctcacccagaattatcgccatgcgtatgatctgatccaaaaattcggcgacctcgaggtgactgtcgatttccttgcagaggttgacaagctggtgcaactcatagagtgcccaatcttcacgtatctccggcttcaactgctggacgtcaaaaataacccatatctcattaaggctctgtatggcctgctgatgctattgccacagtcctccgcatttcagttgctctctcaccgcttgcagtgtgtccccaacccggaactgctacagaccgaggacagccttaaggctgcgccaaagagtcagaaggccgatagcccgtccattgactacgccgaattgttacaacatttcgagaaggtccaaaataagcaccttgaagtaagacatcagagatctggtcggggtgaccacctggacagacgcgttgtgctgtag

SEQ ID NO: 196361 - DNA, 645 bp, Artificial Sequence
  derived and/or modified sequence
atggccgacatacttttgagggaagaggacctgaaatttgcaagcacaatggtccacgccctgaacacgatactgctgactagcaccgagctctttcaactgcggaaccaactgaaggacctgaaaaccctggagtcacaaaacttattctgttgcctgtacagatcctggtgccataaccctgtcacaaccgtttcactctgctttttaacccagaactaccgacatgcctacgatttgatacagaagtttggtgaccttgaggtcacggtggacttcctagcggaggtggataagttggtccagctgatagaatgccctattttcacctacctacgactgcaacttctggacgtgaagaataacccttacctaatcaaggccttatacggtctattaatgctccttccccagagtagtgcatttcaactgctttcgcaccgactccagtgcgtgcctaatcccgaactgctgcagaccgaagacagcttgaaggcagctcctaaatcccagaaagctgatagcccttcaattgattatgctgagctgctacagcatttcgagaaggttcagaataagcatctggaagtccgacaccagcggagcggacgcggggatcatctggaccggcgcgttgtgctctag

SEQ ID NO: 196362 - DNA, 2349 bp, Artificial Sequence
  derived and/or modified sequence
atgaaccctgagaaggactttgcccccctgacccccaacatcgtgcgggccctgaatgacaagctgtatgagaagaggaaggtggccgccctggagattgagaagctggtgcgggagtttgtggcccagaacaacacagtgcagatcaagcacgtgatccagaccctgagccaggagtttgccctgagccagcacccccacagcaggaagggcggcctcatcggcctggccgcctgcagcatcgccctgggcaaggacagcggcctgtacctgaaggagctgattgagcctgtgctgacctgcttcaatgatgctgacagccggctgcgctactatgcctgtgaggccctgtacaacatcgtgaaggtggcccggggagctgtgctgccccacttcaacgtgctgtttgatggcctgagcaagctggccgctgaccctgaccccaacgtgaagagcggcagcgagctgctggaccggctgctgaaggacatcgtgacagagagcaacaagtttgacctggtgtccttcatccccctgctgcgggagcgcatctacagcaacaaccagtatgcccggcagttcatcatctcctggatcctggtgctggagagcgtgcctgacatcaacctgctggactacctgcctgagatcctggatggcctcttccagatcctgggggacaacgggaaggagatcaggaagatgtgtgaggtggtgctgggggagttcctgaaggagatcaagaagaaccccagctctgtgaagtttgctgagatggccaacatcctggtgatccactgccagaccacagatgacctgatccagctgacagccatgtgctggatgagggagttcatccagctggccggccgggtgatgctgccctacagcagcggcatcctgacagctgtgctgccctgcctggcctatgatgacaggaagaagagcatcaaggaggtggccaacgtgtgcaaccagagcctgatgaagctggtgaccccagaagatgatgagctggatgagctgcggcccggccagaggcaggccgagcccaccccagatgatgccctgcccaagcaggagggcacagccagcggcggcccagatggcagctgtgacagcagcttcagcagcggcatctctgtgttcaccgctgccagcacagagcgggcccctgtgaccctgcacctggatggcatcgtgcaggtgctgaactgccacctgagtgacacagccatcggcatgatgaccagaattgctgtgctgaagtggctgtaccacctgtacatcaagacccccaggaagatgttccgccacacagacagcctcttccccatcctgctgcagaccctgagtgatgaaagtgatgaggtgatcctgaaggacctggaggtgctggccgagatcgccagcagccctgctggccagacagatgaccccggccccctggatggccctgacctgcaggccagccacagcgagctgcaggtgcccaccccaggccgggccggcctgctgaacaccagcggcaccaagggcctggagtgcagccccagcacccccaccatgaacagctacttctacaagttcatgatcaacctgctgaagcgcttcagcagcgagaggaagctgctggaggtgcggggccccttcatcatccggcagctgtgcctgctgctgaatgctgagaacatcttccacagcatggctgacatcctgctgcgggaggaggacctgaagtttgccagcaccatggtgcacgccctgaacaccatcctgctgaccagcacagagctgttccagctgaggaaccagctgaaggacctgaagaccctggagagccagaacctcttctgctgcctgtaccgctcctggtgccacaaccctgtgaccaccgtgtccctgtgcttcctgacccagaactacagacatgcctatgacctgatccagaagtttggagacctggaggtgacagtggacttcctggccgaggtggacaagctggtgcagctgattgaatgtcccatcttcacctacctgcggctgcagctgctggatgtgaagaacaacccctacctgatcaaggccctgtatggcctgctgatgctgctgccccagagcagcgccttccagctgctgagccaccggctgcagtgtgtgcccaaccctgagctgctgcagacagaggacagcctgaaggccgcccccaagagccagaaggctgacagccccagcattgattatgcagagctgctgcagcactttgagaaggtgcagaacaagcacctggaggtgcgccaccagaggagcggccgcggggaccacctggaccggcgggtggtgctgtag

SEQ ID NO: 196363 - DNA, 645 bp, Artificial Sequence
  derived and/or modified sequence
atggctgacatcctgctgcgggaggaggacctgaagtttgccagcaccatggtgcacgccctgaacaccatcctgctgaccagcacagagctgttccagctgaggaaccagctgaaggacctgaagaccctggagagccagaacctcttctgctgcctgtaccgctcctggtgccacaaccctgtgaccaccgtgtccctgtgcttcctgacccagaactacagacatgcctatgacctgatccagaagtttggagacctggaggtgacagtggacttcctggccgaggtggacaagctggtgcagctgattgaatgtcccatcttcacctacctgcggctgcagctgctggatgtgaagaacaacccctacctgatcaaggccctgtatggcctgctgatgctgctgccccagagcagcgccttccagctgctgagccaccggctgcagtgtgtgcccaaccctgagctgctgcagacagaggacagcctgaaggccgcccccaagagccagaaggctgacagccccagcattgattatgcagagctgctgcagcactttgagaaggtgcagaacaagcacctggaggtgcgccaccagaggagcggccgcggggaccacctggaccggcgggtggtgctgtag

SEQ ID NO: 196364 - DNA, 2349 bp, Artificial Sequence
  derived and/or modified sequence
atgaaccccgagaaggacttcgcccccctgacccccaacatcgtgcgggcccttaatgacaaattatacgaaaaaaggaaagtggccgccctggagatcgaaaagctcgtgagggagttcgttgcccagaataatacagtgcaaatcaagcacgtgattcagactctttcacaggaatttgcactctcacagcatccgcacagtcgcaagggcggcttgatcgggttggcggcctgtagtattgcgctcggcaaggactctgggctctatttaaaggaacttattgaacctgtgctcacatgtttcaatgacgcagattcgcggctgagatattatgcttgcgaggccctgtacaacatcgttaaggtggcccgtggggccgtgctcccccatttcaatgtgctatttgacgggctcagcaagctcgccgcggaccctgatccaaatgtgaagagcggctccgagctgctcgacagactgctcaaggatatcgtaaccgagagtaataagttcgacttggtttcctttattccccttctcagggaacggatctacagcaacaaccagtacgctaggcagtttataatcagctggatcctggtgcttgagtctgtccccgatatcaacctgttagactacctgcccgagattcttgacgggctcttccagatattgggagataacgggaaggaaatccgcaagatgtgtgaagtcgtgctgggcgaattcctgaaggagataaagaagaatccttcttccgtcaaatttgctgagatggcgaacattctggtcatacattgccagaccactgatgatttgattcagctaacagccatgtgctggatgagagagttcatccagttggctggacgcgttatgttgccctactcctccgggatcctaacggctgtgcttccctgtctggcctatgatgacagaaagaagagcatcaaagaagtggctaacgtgtgcaaccagtcactcatgaaactggttactccagaagatgacgagctggatgaactcaggccaggacagcgacaggccgagcctaccccagacgacgccctgccgaagcaagaaggcacagctagtgggggccctgatggaagttgcgacagcagcttcagttctggaatctccgtctttaccgcagcttctaccgagcgagcacccgtcaccttgcatctggatggtatagtgcaggttctcaactgtcacctctcagacactgccatcggcatgatgacgcgaattgcagtactgaaatggctctatcacttgtacataaagacaccaaggaagatgttccggcacacggattctcttttcccaatcttgttacagactctgtccgacgagagcgatgaggtgatccttaaggatctggaagtgctggctgaaatcgcgtcaagcccagccggacagaccgatgatccaggtcctcttgatggcccagatctacaggcgagccattcggagctccaagtgcccacacctggccgggctgggcttctgaacacttccggaacgaaaggcctggagtgcagtccatccacaccaaccatgaattcctacttctacaaatttatgattaacctacttaagcgcttttcaagtgagagaaagctgcttgaggttcgcgggccctttatcatccgccagctgtgtcttctcctgaatgccgaaaatatttttcattctatggcagatattctgctgcgcgaagaggatctgaagttcgcaagtacaatggtgcatgctctgaacacaatccttctgaccagtaccgagctgttccagctgcgcaaccaactgaaggacttaaagactctggagagccagaacctcttctgctgtttatatcgctcatggtgtcacaacccagtcacaaccgtatccctatgcttccttacccagaattataggcatgcatacgacctgattcaaaagtttggagacctggaggtgaccgtggacttcttggcagaagttgataaacttgtgcagctgattgagtgccctattttcacatatcttcggctccagcttcttgatgtcaagaacaacccatatttaattaaggcattgtacgggttgctgatgctgctgccccagagctctgccttccagctgctgtctcaccggctacagtgcgttccaaacccggagttactgcagacagaggactctctcaaggccgcccctaaatcacagaaggctgattccccaagcatagattatgccgaattactgcagcattttgagaaggtccaaaataagcatcttgaggtgcgccaccagcgtagtggacgcggagatcacctcgatcgccgcgtggtcctgtag

SEQ ID NO: 196365 - DNA, 645 bp, Artificial Sequence
  derived and/or modified sequence
atggccgacatcctgctgcgggaggaggacctgaagttcgccagcaccatggtgcatgccctcaataccattcttcttaccagtaccgagctattccagttgcggaatcagctgaaagaccttaagaccctggagtcacagaatctcttctgctgcctgtacagatcttggtgccataaccccgtgaccacggtgtcgctttgttttctgacccagaattatcggcatgcctatgacttaattcagaaatttggggaccttgaggtcaccgtcgattttctggccgaagtcgataagctcgtgcaacttattgagtgtcctatcttcacatacctacgcctgcagttactcgatgtcaaaaataatccatatcttattaaggccctttacggacttctgatgctcctgccccagtcctctgcattccagctcctttctcacaggctgcagtgtgttccaaacccagagttactccaaactgaggattcgttgaaggcagctccaaaatcacagaaggccgactcccctagcattgattacgccgaattgctgcagcattttgagaaagtgcagaataaacacttagaagttcgccatcagcggtccggccgtggggatcatttggacagacgagtggtcctatag

SEQ ID NO: 196366 - DNA, 2349 bp, Artificial Sequence
  derived and/or modified sequence
atgaatcctgaaaaggacttcgccccattgactcccaatattgtcagggcccttaatgataaactgtacgaaaagcgcaaggttgctgctctggaaatagaaaagctcgtccgggagtttgtggctcagaacaatactgtccagattaagcacgttattcaaactctgagtcaggaattcgccctttctcaacatccccatagtcgaaagggcggtttgattgggctcgcggcttgttctatcgcattgggcaaagacagcgggctttacctgaaagagctaatcgaaccagtgctcacttgctttaacgatgcggatagcaggctgagatattacgcttgtgaagcactgtacaacatcgtgaaagtcgcaaggggggcagttctgccacatttcaacgttcttttcgacggactgtcgaaactggcagccgatccagatcccaacgttaaatcaggttccgagttacttgacaggctgttgaaagatattgtaactgaatctaataagttcgacctcgtatcctttatcccgttgctgagggagcggatctacagtaataatcagtacgctcggcaattcattataagttggatcctagttctggagagcgtgcccgatatcaacctgctggactacttacccgagatcttggacggcctcttccagatactgggcgataacggtaaagaaattcggaaaatgtgcgaggtcgtccttggcgagtttctgaaagagattaaaaagaatcccagctctgtcaaatttgcggaaatggcgaatattctggtcattcactgccagacaaccgatgacctgattcaattgacagccatgtgttggatgagggaattcattcagctggctggcagggtcatgctgccctatagctctggtatcctcacagccgtcctcccctgcctggcctatgacgatcggaaaaaaagcattaaagaggtcgccaatgtctgtaaccagtctctgatgaaactggtgacacccgaagatgatgaactggacgaactccggccagggcagaggcaggcggagccgactcctgacgacgcactgccgaaacaggaggggactgcctccgggggtcccgacggctcgtgcgacagcagtttcagttcaggcatctccgtgtttactgccgcttctactgagcgggctcctgtgacacttcatctagacgggattgtgcaggtcctcaactgccacttgtctgataccgctattgggatgatgaccagaatcgctgttcttaaatggctctatcacctgtacatcaagacacctaggaaaatgttccgccacactgattccctgttccccatattactgcaaaccctaagtgacgagtcagatgaggtgatactgaaggatctggaggttctggccgagattgccagctccccagcgggacaaaccgatgatccagggccactggatgggcctgatctacaggctagccactcagaattacaggtgccaacgccaggacgggctgggctgttgaataccagtgggacaaagggcctggaatgtagtccctcaacacccactatgaatagctatttttataagtttatgattaatctcctgaagaggttcagctccgagagaaaactgctagaggtgaggggacctttcattattcggcagttgtgtctgctgcttaacgcagagaacatcttccactccatggccgacatcctcctccgggaagaggacttgaagttcgccagtactatggtgcatgcccttaatacgatcctgcttacctcaactgagttgtttcaactgagaaaccaactcaaggatctgaagacccttgagtcacagaacctgttctgctgcttatacagatcttggtgccataatcccgtgacaaccgtatccctgtgtttccttacccagaattatcgtcatgcttacgatcttatccagaaattcggcgatttggaggtcacagtggattttcttgccgaggtggacaaactcgtgcagctgatcgaatgtccgatttttacatatctgagacttcagcttctggatgtcaaaaataacccgtatctgataaaagcgttatacggactcctgatgcttctcccccaatcatctgctttccaacttctctctcatcggcttcagtgtgtgcccaacccagaacttctccagaccgaggacagcctaaaagcagctcccaaatcacaaaaagccgattcaccatctatcgactacgcagaactgctgcagcatttcgagaaggtgcagaacaagcacttggaggtgcgccaccagcgttccgggaggggcgaccacctcgaccgtcgagtggtcctctag

SEQ ID NO: 196367 - DNA, 645 bp, Artificial Sequence
  derived and/or modified sequence
atggctgacatcctactcagggaggaggatttgaaattcgcctcgaccatggtccacgcactcaacactattctgctgactagcactgaactcttccagctacgtaatcagctgaaggacttgaaaaccttagaatctcagaacctattttgctgcctctatcgctcgtggtgtcacaaccctgtgacaaccgtttctttgtgctttctgacacagaactatcgccacgcctacgaccttatccagaaattcggggatcttgaagttaccgtggattttctggccgaggtggacaagctcgttcaattgattgagtgcccgatattcacctacctgcgcctgcagcttctggacgtcaaaaacaacccttacctgatcaaagcactgtacggcctgctgatgctgctgcctcaatcctccgcttttcagttgcttagccataggctacagtgcgttccgaacccagaattgctgcaaactgaggattccctgaaagcagctcctaagagccaaaaggccgacagcccatcaatcgattatgcggagctactacagcattttgagaaagtgcaaaataagcacctggaggtgagacatcaacgctccggtcgcggagatcacttagataggcgggtggttctatag

SEQ ID NO: 196368 - DNA, 3106 bp, Artificial Sequence
  derived and/or modified sequence
agagtcatgtgactcgagtaacatggccgctgtctcgtgagtcccgctagtgccgggcgggagttgttaagcggccagggtcaggtgtgctggagcggggtccgggcccgggttccagggcgaggcggcggagcgtggcaggcaagcctagagcggcgtggtccatgcgccggcgccgggggcagagcggagccgcagactcccctggccccggcgcggccccggcagccgcgggctaaggagtcgcgaggttcccccagctgccaccatgaaccccgagaaggatttcgcgccgctcacgcctaacatcgtgcgcgccctcaatgacaagctgtacgaaaagcggaaggtggcagcgctggagatcgagaagctggtccgggagttcgtggcccagaacaataccgtgcaaatcaagcatgtgatccagaccctgtcccaggagtttgccctgtctcagcacccccacagccggaaagggggcctcatcggcctggccgcctgctccatcgcactgggcaaggactcagggctctacctgaaggagctgatcgagccagtgctgacctgcttcaatgatgcagacagcaggctgcgctactatgcctgcgaggccctctacaacatcgtcaaggtggcccggggcgctgtgctgccccacttcaacgtgctctttgacgggctgagcaagctggcagccgacccagaccccaatgtgaaaagcggatctgagctcctagaccgccttttaaaggacattgtgactgagagcaacaagtttgacctggtgagcttcatccccttgttgcgagagaggatttactccaacaaccagtatgcccggcagttcatcatctcctggatcctggttctggagtcggtgccagacattaacctgctggattacctgccggagatcctggatggactcttccagatcctgggtgacaatggcaaagagattcgcaaaatgtgtgaggttgttcttggagaattcttaaaagaaattaagaagaacccctccagtgtgaagtttgctgagatggccaacatcctggtgatccactgccagacaacagatgacctcatccagctgacagccatgtgctggatgcgggagttcatccagctggcgggccgcgtcatgctgccttactcctccgggatcctgactgctgtcttgccctgcttggcctacgatgaccgcaagaaaagcatcaaagaagtggccaacgtgtgcaaccagagcctgatgaagctggtcacccccgaggacgacgagctggatgagctgagacctgggcagaggcaggcagagcccacccctgacgatgccctgccaaagcaggagggcacagccagtggaggtccagatggttcctgtgactccagcttcagtagcggcatcagtgtcttcactgcagccagcactgaaagagccccagtgacccttcacctcgacgggatcgtgcaggtcctaaactgccacctcagtgacacggccattgggatgatgaccaggattgcagttctcaagtggctctaccacctctacatcaaaactcctcggaagatgttccggcacacggacagcctctttcccatcctactgcagacgttatcggatgaatcggatgaggtgatcctgaaggacctggaggtgctggcagaaatcgcttcctcccccgcaggccagacggatgacccaggccccctcgatggccctgacctccaggccagccactcagagctccaggtgcccacccctggcagagccggcctactgaacacctctggtaccaaaggcttagaatgttctccttcaactcccaccatgaattcttacttttataagttcatgatcaaccttctcaagagattcagcagcgaacggaagctcctggaggtcagaggccctttcatcatcaggcagctgtgcctcctgctgaatgcggagaacatcttccactcaatggcagacatcctgctgcgggaggaggacctcaagttcgcctcgaccatggtccacgccctcaacaccatcctgctgacctccacagagctcttccagctaaggaaccagctgaaggacctgaagaccctggagagccagaacctgttctgctgcctgtaccgctcctggtgccacaacccagtcaccacggtgtccctctgcttcctcacccagaactaccggcacgcctatgacctcatccagaagtttggggacctggaggtcaccgtggacttcctcgcagaggtggacaagctggtgcagctgattgagtgccccatcttcacatatctgcgcctgcagctgctggacgtgaagaacaacccctacctgatcaaggccctctacggcctgctcatgctcctgccgcagagcagcgccttccagctgctctcgcaccggctccagtgcgtgcccaaccctgagctgctgcagaccgaagacagtctaaaggcagcccccaagtcccagaaagctgactcccctagcatcgactacgcagagctgctgcagcactttgagaaggtccagaacaagcacctggaagtgcggcaccagcggagcgggcgtggggaccacctggaccggagggttgtcctctgacaggcctggcacggaggagggcccaccgagtggtcccatgaaacactaagggtcgtcacgccctcccgaggagctcaaggacctgcctgtcaggaccagggctgggcctgccaacccagggcagtgttggggccggaggctgctgtgtctgcccaagctcctctcagagtccagtccccaggcctccagcgctgtcagctgcaccctggcattctcacagagctggctgcccacccagtggggggctatagcctcagagaccactcatcctctggaatcaacctctttctaataccctcttggaaaaagagcttgcccctcctccagcacactagagctctggccttgtgtgtatatgtatacatacgtgaacacatgcctgtgtgtgtgtgtgtgtgtgtgtacttgtatgcacgtaggcaccagcacaaagatctgaatgatgcaccccacccccaccccaataaagaaataacagaaaaccctcaa

SEQ ID NO: 196369 - DNA, 2072 bp, Artificial Sequence
  derived and/or modified sequence
atcttctccagcctggccccagagccatggctggcgttcaggggcatttgggaagctgggcccaggtcatgcggagcggaggctgagtccagcgacctaggaggagatggaggtgtttcaggcctcccaccaagaaatgtggctcacgtcactgagcacccaagacctcggggcctccgacgccgtgttggaactgtggtgatgcttccctggagacgggatgcggcgtcaggcactggagcttagccccagacggaaggtggtgtgggcaggggtgccacgctgccgccagcccagcactcaggaagcgcagtgctgcacaccaccctctcaccagccaccccgctcatgccccatcctgcctgcatcatgctgttttggggaagctcccgaatccctgggactccagctgggaagcattgcccaggtgcccttcccctgcaggccaggcctccaagggcacgtggaaaagcagcgcggattcctccaagcctgtcctcaccacccacttctcactgctcgtgtcatccggcccagggaccctgaggaatctgcttttcttcatcctctgggttccctttttgccttttgtataacagggaggctcctcttcacaaagtccgatccttagccctgaacgactcttaactagacaagagatgggaaaggggtcatggcccagggaccagcgagccctaagtgactctggccgtaagtgactctgcgaccttagtcaagtcacttcaccagagtttcaccatccgtacagtgaagaaaaaactcagggtcataacgctgatcccacacggatctgtgctccaggccgcagggtacagcccgaacagtgcaaatccctgacctcgggggcttccaggaggaggagtggggcagtaaacaggcagctgtgcctcctgctgaatgcggagaacatcttccactcaatggcagacatcctgctgcgggaggaggacctcaagttcgcctcgaccatggtccacgccctcaacaccatcctgctgacctccacagagctcttccagctaaggaaccagctgaaggacctgaagaccctggagagccagaacctgttctgctgcctgtaccgctcctggtgccacaacccagtcaccacggtgtccctctgcttcctcacccagaactaccggcacgcctatgacctcatccagaagtttggggacctggaggtcaccgtggacttcctcgcagaggtggacaagctggtgcagctgattgagtgccccatcttcacatatctgcgcctgcagctgctggacgtgaagaacaacccctacctgatcaaggccctctacggcctgctcatgctcctgccgcagagcagcgccttccagctgctctcgcaccggctccagtgcgtgcccaaccctgagctgctgcagaccgaagacagtctaaaggcagcccccaagtcccagaaagctgactcccctagcatcgactacgcagagctgctgcagcactttgagaaggtccagaacaagcacctggaagtgcggcaccagcggagcgggcgtggggaccacctggaccggagggttgtcctctgacaggcctggcacggaggagggcccaccgagtggtcccatgaaacactaagggtcgtcacgccctcccgaggagctcaaggacctgcctgtcaggaccagggctgggcctgccaacccagggcagtgttggggccggaggctgctgtgtctgcccaagctcctctcagagtccagtccccaggcctccagcgctgtcagctgcaccctggcattctcacagagctggctgcccacccagtggggggctatagcctcagagaccactcatcctctggaatcaacctctttctaataccctcttggaaaaagagcttgcccctcctccagcacactagagctctggccttgtgtgtatatgtatacatacgtgaacacatgcctgtgtgtgtgtgtgtgtgtgtgtacttgtatgcacgtaggcaccagcacaaagatctgaatgatgcaccccacccccaccccaataaagaaataacagaaaaccct

SEQ ID NO: 196370 - protein, 347 aa, Artificial Sequence
  derived and/or modified sequence
MHAHCLPFLLHAWWALLQAGAATVATALLRTRGQPSSPSPLAYMLSLYRDPLPRADIIRSLQAEDVAVDGQNWTFAFDFSFLSQQEDLAWAELRLQLSSPVDLPTEGSLAIEIFHQPKPDTEQASDSCLERFQMDLFTVTLSQVTFSLGSMVLEVTRPLSKWLKHPGALEKQMSRVAGECWPRPPTPPATNVLLMLYSNLSQEQRQLGGSTLLWEAESSWRAQEGQLSWEWGKRHRRHHLPDRSQLCRKVKFQVDFNLIGWGSWIIYPKQYNAYRCEGECPNPVGEEFHPTNHAYIQSLLKRYQPHRVPSTCCAPVKTKPLSMLYVDNGRVLLDHHKDMIVEECGCL

SEQ ID NO: 196371 - protein, 292 aa, Artificial Sequence
  derived and/or modified sequence
DQQLGIQTKDVAVDGQNWTFAFDFSFLSQQEDLAWAELRLQLSSPVDLPTEGSLAIEIFHQPKPDTEQASDSCLERFQMDLFTVTLSQVTFSLGSMVLEVTRPLSKWLKHPGALEKQMSRVAGECWPRPPTPPATNVLLMLYSNLSQEQRQLGGSTLLWEAESSWRAQEGQLSWEWGKRHRRHHLPDRSQLCRKVKFQVDFNLIGWGSWIIYPKQYNAYRCEGECPNPVGEEFHPTNHAYIQSLLKRYQPHRVPSTCCAPVKTKPLSMLYVDNGRVLLDHHKDMIVEECGCL

SEQ ID NO: 196372 - DNA, 1044 bp, Artificial Sequence
  derived and/or modified sequence
atgcacgcccactgcctgcccttcctgctgcacgcctggtgggccctgctgcaggccggcgccgccaccgtggccaccgccctgctgagaaccagaggccagcccagcagccccagccccctggcctacatgctgagcctgtacagagaccccctgcccagagccgacatcatcagaagcctgcaggccgaggacgtggccgtggacggccagaactggaccttcgccttcgacttcagcttcctgagccagcaggaggacctggcctgggccgagctgagactgcagctgagcagccccgtggacctgcccaccgagggcagcctggccatcgagatcttccaccagcccaagcccgacaccgagcaggccagcgacagctgcctggagagattccagatggacctgttcaccgtgaccctgagccaggtgaccttcagcctgggcagcatggtgctggaggtgaccagacccctgagcaagtggctgaagcaccccggcgccctggagaagcagatgagcagagtggccggcgagtgctggcccagaccccccaccccccccgccaccaacgtgctgctgatgctgtacagcaacctgagccaggagcagagacagctgggcggcagcaccctgctgtgggaggccgagagcagctggagagcccaggagggccagctgagctgggagtggggcaagagacacagaagacaccacctgcccgacagaagccagctgtgcagaaaggtgaagttccaggtggacttcaacctgatcggctggggcagctggatcatctaccccaagcagtacaacgcctacagatgcgagggcgagtgccccaaccccgtgggcgaggagttccaccccaccaaccacgcctacatccagagcctgctgaagagataccagccccacagagtgcccagcacctgctgcgcccccgtgaagaccaagcccctgagcatgctgtacgtggacaacggcagagtgctgctggaccaccacaaggacatgatcgtggaggagtgcggctgcctgtag

SEQ ID NO: 196373 - DNA, 879 bp, Artificial Sequence
  derived and/or modified sequence
gaccagcagctgggcatccagaccaaggacgtggccgtggacggccagaactggaccttcgccttcgacttcagcttcctgagccagcaggaggacctggcctgggccgagctgagactgcagctgagcagccccgtggacctgcccaccgagggcagcctggccatcgagatcttccaccagcccaagcccgacaccgagcaggccagcgacagctgcctggagagattccagatggacctgttcaccgtgaccctgagccaggtgaccttcagcctgggcagcatggtgctggaggtgaccagacccctgagcaagtggctgaagcaccccggcgccctggagaagcagatgagcagagtggccggcgagtgctggcccagaccccccaccccccccgccaccaacgtgctgctgatgctgtacagcaacctgagccaggagcagagacagctgggcggcagcaccctgctgtgggaggccgagagcagctggagagcccaggagggccagctgagctgggagtggggcaagagacacagaagacaccacctgcccgacagaagccagctgtgcagaaaggtgaagttccaggtggacttcaacctgatcggctggggcagctggatcatctaccccaagcagtacaacgcctacagatgcgagggcgagtgccccaaccccgtgggcgaggagttccaccccaccaaccacgcctacatccagagcctgctgaagagataccagccccacagagtgcccagcacctgctgcgcccccgtgaagaccaagcccctgagcatgctgtacgtggacaacggcagagtgctgctggaccaccacaaggacatgatcgtggaggagtgcggctgcctgtag

SEQ ID NO: 196374 - DNA, 1044 bp, Artificial Sequence
  derived and/or modified sequence
atgcacgcccactgtctgccctttctgctgcatgcctggtgggccctgcttcaggccggagctgccactgtggcaactgcattgctgaggactagagggcagcctagctcgcccagccctctggcttacatgctgtccctgtatcgggatccattgccacgagcagacatcattagaagcttgcaagcggaagacgttgctgtagacgggcagaattggacttttgccttcgattttagcttcctgagtcagcaggaggatttggcctgggctgagctgcgccttcagctcagctcccctgtggacctgcccacagagggtagccttgccattgaaatatttcatcaacctaagcctgacacagaacaagctagcgattcctgccttgagcgttttcaaatggatctgttcacagttacactttcacaagtcacgttctccctgggttctatggttctagaggtcacgcggccactctccaaatggttaaagcatcccggcgcgctggagaaacaaatgtcccgcgtggctggagagtgctggccccggccccccacacccccagccactaacgtcctgttgatgctgtatagcaatctatctcaggaacagcgccagctcggaggaagtacactgctgtgggaagccgaatcctcctggcgggcgcaggagggtcaactctcctgggagtggggcaagaggcatcgcagacatcacctccccgacaggtcgcagctatgcaggaaagtcaagttccaggtggacttcaacctgatcggctgggggagttggatcatctaccccaagcagtacaacgcttacaggtgcgagggagagtgccccaatcctgtgggagaggagttccaccccactaatcacgcctacattcagagtctgcttaagcgctaccagccccaccgcgtacctagcacatgctgtgctcccgtgaaaactaagcccctctccatgctttacgtcgataacgggagggtcctgctggatcaccacaaagatatgatcgttgaagagtgtggctgcctgtag

SEQ ID NO: 196375 - DNA, 879 bp, Artificial Sequence
  derived and/or modified sequence
gatcagcagctgggcattcagaccaaggatgtggctgttgatggacagaattggactttcgcctttgatttttcatttctgtcccagcaagaagatttagcgtgggcggagctgcgcctgcagctctcatcaccagtcgatctgcctactgagggaagcctcgccatcgagatttttcaccaacccaaacccgacactgagcaggcatctgacagctgtcttgagcggtttcaaatggatctctttaccgttactctgtcgcaggtcaccttctctctgggctcaatggtcctggaagtcacaaggccactttccaaatggcttaagcatcctggtgctctcgaaaaacagatgagccgggtagctggggaatgttggccacggcctcccacacctccggccactaatgtgttgcttatgttgtattcaaatttgagccaagagcagcgacagctgggaggtagcacactactgtgggaagccgagagctcatggcgagcgcaggaaggccagctgagctgggaatggggaaagaggcatcggcggcaccacttgcccgaccggtcccagctttgtagaaaggtgaagtttcaggtcgacttcaatttgattggctggggctcgtggatcatctatccgaaacagtacaacgcctaccgctgcgaaggagagtgtccaaatccagtgggcgaagaatttcatccaacaaaccacgcttatattcagtctctccttaagcgataccagccgcacagggtaccctctacttgttgcgctcccgtcaaaactaagccactcagcatgttgtatgtggataatggccgcgtcctgctcgatcatcacaaggatatgatcgtggaggagtgcggctgcctgtag

SEQ ID NO: 196376 - DNA, 1044 bp, Artificial Sequence
  derived and/or modified sequence
atgcacgcccactgcctgcccttcctgctgcacgcctggtgggccctgctgcaggccggggccgccaccgtggccacagccctgctgcggacccggggccagcccagcagccccagccccctggcctacatgctgagcctgtacagagaccccctgcccagggctgacatcatccgcagcctgcaggccgaggatgtggccgtggatggccagaactggacctttgcctttgacttctccttcctgagccagcaggaggacctggcctgggccgagctgcggctgcagctgagcagccctgtggacctgcccacagagggcagcctggccatcgagatcttccaccagcccaagccagacacagagcaggccagtgacagctgcctggagcgcttccagatggacctcttcaccgtgaccctgagccaggtgaccttcagcctgggctccatggtgctggaggtgacccggcccctgagcaagtggctgaagcaccctggggccctggagaagcagatgagccgggtggccggggagtgctggccccggccccccaccccaccagccaccaacgtgctgctgatgctgtacagcaacctgagccaggagcagaggcagctgggcggcagcaccctgctgtgggaggccgagagctcctggagggcccaggagggccagctgtcctgggagtggggcaagaggcaccggcggcaccacctgcctgacaggagccagctgtgcaggaaggtgaagttccaggtggacttcaacctgattggctggggctcctggatcatctaccccaagcagtacaatgcctaccgctgtgaaggagaatgtcccaaccctgtgggggaggagttccaccccaccaaccacgcctacatccagagcctgctgaagcgctaccagccccaccgggtgcccagcacctgctgtgcccctgtgaagaccaagcccctgtccatgctgtatgtggacaatggccgggtgctgctggaccaccacaaggacatgattgtggaggagtgtggctgcctgtag

SEQ ID NO: 196377 - DNA, 879 bp, Artificial Sequence
  derived and/or modified sequence
gaccagcagctgggcatccagaccaaggatgtggccgtggatggccagaactggacctttgcctttgacttctccttcctgagccagcaggaggacctggcctgggccgagctgcggctgcagctgagcagccctgtggacctgcccacagagggcagcctggccatcgagatcttccaccagcccaagccagacacagagcaggccagtgacagctgcctggagcgcttccagatggacctcttcaccgtgaccctgagccaggtgaccttcagcctgggctccatggtgctggaggtgacccggcccctgagcaagtggctgaagcaccctggggccctggagaagcagatgagccgggtggccggggagtgctggcccaggcctcccaccccaccagccaccaacgtgctgctgatgctgtacagcaacctgagccaggagcagaggcagctgggcggcagcaccctgctgtgggaggccgagagctcctggagggcccaggagggccagctgtcctgggagtggggcaagaggcacagaagacaccacctgcctgacaggagccagctgtgcaggaaggtgaagttccaggtggacttcaacctgattggctggggctcctggatcatctaccccaagcagtacaatgcctaccgctgtgagggggagtgccccaaccctgtgggggaggagttccaccccaccaaccacgcctacatccagagcctgctgaagcgctaccagccccaccgggtgcccagcacctgctgtgcccctgtgaagaccaagcccctgtccatgctgtatgtggacaatggccgggtgctgctggaccaccacaaggacatgattgtggaggagtgtggctgcctgtag

SEQ ID NO: 196378 - DNA, 1044 bp, Artificial Sequence
  derived and/or modified sequence
atgcacgcccactgcctgcccttcctgctgcacgcctggtgggccctgttgcaggctggggccgccacagttgccaccgccctgctccgtacaaggggccagccgtcttccccatcaccgctcgcctacatgctgtcgctgtatagggatcccttgcctagggccgacatcattcgttccctgcaggccgaggatgtggcggtggatggtcagaactggactttcgctttcgatttcagcttccttagccagcaggaagatttagcttgggccgagcttcgactccagctctcatcacccgtcgacttgcctacagaaggctctctggccattgaaatattccaccaacctaagcccgacacagagcaggctagcgactcttgtctcgagcgatttcagatggatctgtttacggtgactctaagccaagtgacatttagtctggggagcatggtgttggaagtaactaggcccctttccaagtggctcaagcacccgggcgcccttgagaaacagatgtccagagtggccggcgagtgctggcccagaccacctaccccgcccgcaactaatgtgttgctgatgctttattccaatctgtcacaggaacagcggcaattgggcggatctactcttctgtgggaagccgagtcttcatggagggcccaagaagggcagctaagctgggagtggggtaagcgccataggcgacaccacctcccggatcgctctcaattgtgcaggaaagtgaagttccaggtggacttcaacctgatcggatggggttcatggataatttaccccaaacagtataacgcttatagatgcgagggggaatgtcccaatccagttggagaagaattccaccctacaaatcacgcctatatccaatcgttgcttaaaagatatcagccacacagagtaccctccacttgttgtgccccagtgaaaaccaaacccctttctatgctctacgtcgacaatggacgcgtgctgctggaccaccacaaagatatgatcgtggaggagtgtggatgcctgtag

SEQ ID NO: 196379 - DNA, 879 bp, Artificial Sequence
  derived and/or modified sequence
gaccagcagctgggcatccagaccaaggacgtggccgtggacggccagaactggacatttgcgtttgacttctcctttctgagccaacaggaagatctggcctgggcggagctgcgtctgcagctgagttcgccagtggatctgccaaccgaaggctcactggccattgaaatctttcaccagccaaagccagatactgagcaggcttctgacagctgcctcgaaaggttccagatggatctatttacggtcaccctttcacaggtgaccttctctctgggttccatggtcttagaagtaacccgccctctgtcaaaatggctcaaacaccccggggccttggagaagcaaatgtcccgagtcgcaggggagtgttggccacgccccccaactccccccgctacaaacgtgcttttgatgctgtattcgaatctctcacaggagcagcggcagctcggtggatccacattgctgtgggaggcggagagctcatggagggcgcaggaaggtcagcttagttgggaatgggggaagagacaccgtaggcaccatctccccgataggagccaattgtgtagaaaggtgaagttccaagtggacttcaatctcatcggctggggatcttggattatttatcctaaacagtacaatgcttataggtgcgagggtgagtgcccaaaccctgtcggtgaagagttccacccaacaaaccatgcatatatccagtccctgctgaagcgatatcaaccccatcgagttcccagcacttgctgtgctcccgtcaagacaaaacctctgtccatgctatacgttgacaacggcagagtactgctagaccatcataaagacatgatcgtggaggaatgtggatgcctgtag

SEQ ID NO: 196380 - DNA, 1665 bp, Artificial Sequence
  derived and/or modified sequence
atgcacgcccactgcctgcccttccttctgcacgcctggtgggccctactccaggcgggtgctgcgacggtggccactgcgctcctgcgtacgcgggggcagccctcgtcgccatcccctctggcgtacatgctgagcctctaccgcgacccgctgccgagggcagacatcatccgcagcctacaggcagaagatgtggcagtggatgggcagaactggacgtttgcttttgacttctccttcctgagccaacaagaggatctggcatgggctgagctccggctgcagctgtccagccctgtggacctccccactgagggctcacttgccattgagattttccaccagccaaagcccgacacagagcaggcttcagacagctgcttagagcggtttcagatggacctattcactgtcactttgtcccaggtcaccttttccttgggcagcatggttttggaggtgaccaggcctctctccaagtggctgaagcaccctggggccctggagaagcagatgtccagggtagctggagagtgctggccgcggccccccacaccgcctgccaccaatgtgctccttatgctctactccaacctctcgcaggagcagaggcagctgggtgggtccaccttgctgtgggaagccgagagctcctggcgggcccaggagggacagctgtcctgggagtggggcaagaggcaccgtcgacatcacttgccagacagaagtcaactgtgtcggaaggtcaagttccaggtggacttcaacctgatcggatggggctcctggatcatctaccccaagcagtacaacgcctatcgctgtgagggcgagtgtcctaatcctgttggggaggagtttcatccgaccaaccatgcatacatccagagtctgctgaaacgttaccagccccaccgagtcccttccacttgttgtgccccagtgaagaccaagccgctgagcatgctgtatgtggataatggcagagtgctcctagatcaccataaagacatgatcgtggaagaatgtgggtgcctctgatgacatcctggagggagactggatttgcctgcactctggaaggctgggaaactcctggaagacatgataaccatctaatccagtaaggagaaacagagaggggcaaagttgctctgcccaccagaactgaagaggaggggctgcccactctgtaaatgaagggctcagtggagtctggccaagcacagaggctgctgtcaggaagagggaggaagaagcctgtgcagggggctggctggatgttctctttactgaaaagacagtggcaaggaaaagcacaagtgcatgagttctttactggattttttaaaaacctgtgaaccccccgaaactgtatgtgaaagttgagacatatgtgcatgtattttggaggtgggatgaagtcacctatagctttcatgtattctccaaagtagtctgtgtgtgacctgtccccctccccaaagattaaggatcactgtatagattaaaaagagtccgtcaatctcattgcctcaggctgggttgggggagccccacagctttctggctggccagtggcaatctactggccttgtccagaggctcactggagtggttctctgctaatgagctgtacaacaataaagccattgtctagtt

SEQ ID NO: 196381 - DNA, 1066 bp, Artificial Sequence
  derived and/or modified sequence
gaccaacagttggggatacagactaaagatgtggcagtggatgggcagaactggacgtttgcttttgacttctccttcctgagccaacaagaggatctggcatgggctgagctccggctgcagctgtccagccctgtggacctccccactgagggctcacttgccattgagattttccaccagccaaagcccgacacagagcaggcttcagacagctgcttagagcggtttcagatggacctattcactgtcactttgtcccaggtcaccttttccttgggcagcatggttttggaggtgaccaggcctctctccaagtggctgaagcaccctggggccctggagaagcagatgtccagggtagctggagagtgctggccgcggccccccacaccgcctgccaccaatgtgctccttatgctctactccaacctctcgcaggagcagaggcagctgggtgggtccaccttgctgtgggaagccgagagctcctggcgggcccaggagggacagctgtcctgggagtggggcaagaggcaccgtcgacatcacttgccagacagaagtcaactgtgtcggaaggtcaagttccaggtggacttcaacctgatcggatggggctcctggatcatctaccccaagcagtacaacgcctatcgctgtgagggcgagtgtcctaatcctgttggggaggagtttcatccgaccaaccatgcatacatccagagtctgctgaaacgttaccagccccaccgagtcccttccacttgttgtgccccagtgaagaccaagccgctgagcatgctgtatgtggataatggcagagtgctcctagatcaccataaagacatgatcgtggaagaatgtgggtgcctctgatgacatcctggagggagactggatttgcctgcactctggaaggctgggaaactcctggaagacatgataaccatctaatccagtaaggagaaacagagaggggcaaagttgctctgcccaccagaactgaagaggaggggctgcccactctgtaaatgaagggctcagtggagtctggccaagcaca

SEQ ID NO: 196382 - DNA, 1044 bp, Artificial Sequence
  derived and/or modified sequence
atgcacgcccactgcctgcccttcctcctgcacgcttggtgggctttgctgcaagctggagctgccactgtggcaaccgccttactccggaccagagggcaaccgtcttcacccagtccactcgcctatatgctgagcctttatcgtgatccactgccccgtgccgatatcatacggagcctgcaggccgaagatgtagctgtggatgggcagaattggacgttcgccttcgatttctccttcctaagccagcaggaggaccttgcgtgggcggagctgaggctacagctgtcctctccagttgatttgcccaccgaaggctcactggccattgagattttccatcagccaaagccagacactgagcaggcaagtgattcttgcctggagaggtttcaaatggatctgtttaccgttactctgagtcaggtgacgttcagtctaggtagcatggttctagaggtcacgaggcccttgtctaaatggttgaaacaccctggcgcactggagaaacagatgtctcgcgtcgccggagagtgttggcctagaccccctacccctcccgcaaccaatgtcctgttgatgttatacagtaacctgagtcaagagcagagacagctgggcggaagtactctcttgtgggaggcggagtcttcctggcgtgctcaggaaggacagctttcctgggagtggggaaaaagacacagacgccaccatctccccgaccgaagtcagttgtgtaggaaagtgaaattccaggtggacttcaacttaattggatgggggagctggataatctaccctaagcagtacaatgcctacaggtgtgagggtgaatgccctaaccccgtcggtgaggagtttcaccctacaaaccatgcctacatccaaagccttctcaagcgttaccagccccatcgggtgccttccacctgttgtgccccagtaaaaactaaaccattgtccatgctttatgtggacaacggaagggtactgctggatcaccacaaagacatgatcgtggaagaatgtggctgcttgtag

SEQ ID NO: 196383 - DNA, 879 bp, Artificial Sequence
  derived and/or modified sequence
gaccagcagctggggatccagacaaaggacgtcgccgtggacggccagaattggactttcgccttcgacttcagcttcctgtctcagcaggaagacctggcatgggcagaattgagactgcagctctcaagcccagtagacttgccgaccgagggttccctggctattgagatcttccaccagcccaagccagataccgagcaggcttcagattcctgtctggaacgattccagatggatttgtttacagtcacactcagtcaggtgaccttctccctggggagcatggtgttggaagtcactagacccctatccaaatggctcaaacatcctggcgctctcgagaagcagatgtcgagggtggcgggagagtgttggcctagacctccaaccccgccagcaaccaacgttctcctcatgctgtactctaatctcagccaggagcagaggcagcttggtgggagcaccctgctctgggaggctgagagcagctggcgcgcacaagagggacagctctcgtgggaatggggcaagaggcatcggagacatcatctgcctgaccggagccagctttgccgcaaagtcaaattccaggtggactttaatctgatcgggtggggctcttggattatctaccccaaacaatataacgcctatcgatgtgagggggaatgcccaaatccggtgggggaggaattccaccctaccaaccatgcctatattcagagcctgctgaagcgttaccaaccgcaccgggtgccaagcacctgttgtgccccagtgaagaccaagccactttccatgttatacgtggacaacggcagagttctcctcgatcaccacaaagacatgatcgtcgaggagtgcggctgtctgtag

SEQ ID NO: 196384 - DNA, 474 bp, Artificial Sequence
  derived and/or modified sequence
atggttggccgaatgaaactgctcccgaatcggataaggactctggcactgaccgccattggcgtcgtactgctgggcgtagacgacccaggggcaccgagcgatcaggtcgaggtgcacctggaactggatctgcctacccagctgacctctgtatggcaggtgatgtctactgtgccattagcccccctacctgggcagctctcacttttggggcctccgggggctctggggtttccccagcaaggggggcctacccagttacccctgttgttaagggaggtaggagtggaacacaaggagcatattggtggtaggagatgcggtggcccgagacccgcactatctagctatcccggtcacctgctgctacagggccccagagtgctgcagccccttggggagaggccggggcatctgcaaaaccatgctgcccagggaaaaggcgacctggggcagtccgacagcgaatag

SEQ ID NO: 196385 - DNA, 474 bp, Artificial Sequence
  derived and/or modified sequence
atggtgggccgcatgaagctgctgcccaaccgcatccgcaccctggccctgacagccatcggcgtggtgctgctgggcgtggatgaccccggggcccccagcgaccaggtggaggtgcacctggagctggacctgcccacccagctgacctctgtgtggcaggtgatgagcacagtgcccctggcccccctgcccggccagctgagcctgctgggccccccaggggccctgggcttcccccagcagggcggccccacccagctgcccctgctgctgcgggaggtgggcgtggagcacaaggagcacatcggcggccgccgctgtggcggccccaggcctgccctgagcagctacccaggccacctgctgctgcagggcccccgggtgctgcagcccctgggggagaggcctggccacctgcagaaccacgccgcccagggcaagggggacctgggccagagcgacagcgagtag

SEQ ID NO: 196386 - DNA, 474 bp, Artificial Sequence
  derived and/or modified sequence
atggtgggccggatgaagctgctgcccaaccggatccggaccctggcattaactgcaataggtgtcgtgctgctgggcgtggatgatcctggtgccccttctgaccaggtggaagtacatctcgaactggacctccccacccagttgacatctgtttggcaggtgatgagtactgttcctcttgctcccctaccaggacagcttagtctgttgggcccaccaggcgcccttgggttccctcagcagggcggcccgacccagctgccgctactgctgcgagaggtcggggtggaacacaaggagcatataggcggaaggcgatgcggaggccctcgccctgcgctgtccagctacccaggccaccttctgctgcagggtccccgcgtccttcagccattgggcgagaggccaggccacctgcaaaatcatgccgctcagggcaaaggcgatttaggacagtcggactccgaatag

SEQ ID NO: 196387 - DNA, 474 bp, Artificial Sequence
  derived and/or modified sequence
atggtcggcaggatgaaacttctgcccaaccgaattcgcacactggcattgaccgctattggcgtggtactgctgggcgtcgacgaccccggtgctccctccgatcaggtcgaggttcacctggagctggatctgccaacacagctcacatccgtgtggcaagtaatgtcaacagtgcctttagcaccattacctggccaactgagcctccttgggccacccggtgccctgggattcccacagcaagggggacccacacaactgcctctgctgctcagagaggtgggggtggagcacaaggaacacattggcggtaggcgctgtggcggtcccagaccagcactgtcctcataccccggacacctgctgctccaaggcccacgggtcctgcagcccctgggggaacggcctggccacctccagaaccacgcggcacagggcaagggcgaccttggtcagtctgactctgagtag

SEQ ID NO: 196388 - DNA, 1730 bp, Artificial Sequence
  derived and/or modified sequence
tctgaaatatggcattgccctcctcatcttacaggtggaaaaactgaagcttgagagaataagcaacctaaacagtatcacacagctaatgaggagtcaaatgcaggcctgcctgtccccaaagtccagattcttcctttcctagaatgtcagggctagggaagtgctgagaccctctggtctacccccaccccctaattttatgaaagacaaggataaagtcccagggaaacaatgtgttcaaggctacccagtgacgcatgaccccatacaggctctataaggatgttacactcggtcatctctacatgcctggtacctagcacaggatcctggtacattggaggtgcttgagtaactgtgaatacaggaacatagtcatttaatagcaaagctagagccctgtcccccaaggccagcttactgcctcccctccccctcacgcctggcatcccacctggatgtatgcatggttggtcggatgaaactcctccccaacaggattaggacactcgccctcacagcgataggcgttgtactgcttggggtagatgatccaggagccccatccgatcaggttgaagtccacctggaacttgaccttccgacacagttgacttctgtctggcaagtgatgtcgacggtgcctcttgccccactcccaggacagctgtccctcctgggcccgccaggagctctcggcttcccacagcaaggtggacccacccagctgcctctgctcctgcgagaggttggagtagagcataaggagcacattggtggcaggcggtgtggggggccgcggccagcactctccagctaccctggacatctgcttctccagggccccagggtgcttcagccacttggagagaggcctggtcacctccaaaaccatgctgcccaaggaaaaggtgacctgggacaaagtgacagtgaataggtccatctgaaaccgctctaagcagctgtctgaagcctgctctgtgtcgggctttggctggtggaaaatctcaatggcaagtgagccctcagtggggaggtccacagggctggacagctgcagccggagctcagcccatgccagatcctcttgttggctcaggaaggagaagtcaaaagcaaacgtccagttctgcccatccactgccacatctgggtaggagaaaaccaagaaggaaggagggtgagtgagggcctcccccagcctcagtcagtgtcacaaccaccatagctcttgctggaggccttaccttatatagaattaccttcgaattctcaccccaactctatgagttggtaagattttcgagtcccttttagagatgaggaaaactgaggctcagtgtggttaaaagatctgaccaaggtgtcattcttggaaggtggcagagccaagagtaaacctggatttgcccaactgccaagcccagactccgaattactgttcttccagtcccccttccaagataacttgcacagccagaggacagtcagtaaaaatgtgatgagttgcatctccccctcccctgtctcctcccatacatgaagtctgaccaacatggagaaaccctgtctctactaaaaatacaaaattagctgggcgtggtggtttgcgcctgtaatcccagccactcgagaatcatttgaacccgggaggcagaggttgcagtgagccaagacagtgccattgcactccagcctgcacaacaagagtgaaactctgtctc

SEQ ID NO: 196389 - protein, 289 aa, Artificial Sequence
  derived and/or modified sequence
MPKNSKVVKRELDDDVTESVKDLLSNEDAADDAFKTSELIVDGQEEKDTDVEEGSEVEDERPAWNSKLQYILAQVGFSVGLGNVWRFPYLCQKNGGGAYLLPYLILLMVIGIPLFFLELSVGQRIRRGSIGVWNYISPKLGGIGFASCVVCYFVALYYNVIIGWSLFYFSQSFQQPLPWDQCPLVKNASHTFVEPECEQSSATTYYWYREALNISSSISESGGLNWKMTICLLAAWVMVCLAMIKGIQSSGKVSMLEPFLILLITISGFIPLSNSVTDFCGQITHNTSF

SEQ ID NO: 196390 - DNA, 870 bp, Artificial Sequence
  derived and/or modified sequence
atgcccaagaacagcaaggtggtgaagagagagctggacgacgacgtgaccgagagcgtgaaggacctgctgagcaacgaggacgccgccgacgacgccttcaagaccagcgagctgatcgtggacggccaggaggagaaggacaccgacgtggaggagggcagcgaggtggaggacgagagacccgcctggaacagcaagctgcagtacatcctggcccaggtgggcttcagcgtgggcctgggcaacgtgtggagattcccctacctgtgccagaagaacggcggcggcgcctacctgctgccctacctgatcctgctgatggtgatcggcatccccctgttcttcctggagctgagcgtgggccagagaatcagaagaggcagcatcggcgtgtggaactacatcagccccaagctgggcggcatcggcttcgccagctgcgtggtgtgctacttcgtggccctgtactacaacgtgatcatcggctggagcctgttctacttcagccagagcttccagcagcccctgccctgggaccagtgccccctggtgaagaacgccagccacaccttcgtggagcccgagtgcgagcagagcagcgccaccacctactactggtacagagaggccctgaacatcagcagcagcatcagcgagagcggcggcctgaactggaagatgaccatctgcctgctggccgcctgggtgatggtgtgcctggccatgatcaagggcatccagagcagcggcaaggtgagcatgctggagcccttcctgatcctgctgatcaccatcagcggcttcatccccctgagcaacagcgtgaccgacttctgcggccagatcacccacaacaccagcttctag

SEQ ID NO: 196391 - DNA, 291 bp, Artificial Sequence
  derived and/or modified sequence
atgcccaagaacagcaaggtggtgaagagagagctggacgacgacgtgaccgagagcgtgaaggacctgctgagcaacgaggacgccgccgacgacgccttcaagaccagcgagctgatcgtggacggccaggaggagaaggacaccgacgtggaggagggcagcgaggtggaggacgagagacccgcctggaacagcaagctgcagtacatcctggcccaggtgggcttcagcgtgggcctgggcaacgtgtggagattcccctacctgtgccagaagaacggcggctag

SEQ ID NO: 196392 - DNA, 870 bp, Artificial Sequence
  derived and/or modified sequence
atgcctaagaactccaaggtcgtaaagcgtgagttggacgatgatgtgacagagagtgtgaaagacctgctgagcaatgaggatgccgcagatgatgcctttaagacatcagagctcatcgtggacggccaagaagaaaaggatacagacgtggaagagggcagcgaggtggaggacgagagacctgcgtggaattctaaattgcagtatattctggcccaggtggggttcagcgtaggactaggaaacgtttggcggttcccctatctctgtcagaaaaacggcggtggagcttacctcctgccgtacctcattctgctcatggtaattggaatacctttgttcttcctggagcttagtgttggacaacggatcaggcgtggctcaatcggcgtatggaactacatttcccctaaactgggtggaatcgggtttgcgagctgcgtggtatgctatttcgtcgctttgtactacaatgtgataattggctggtctctgttttatttcagccagagtttccaacagcccttaccatgggatcagtgtcctttggttaagaatgcttcacacacctttgtggaaccagagtgtgagcagtccagcgcaactacgtactattggtatagagaggccttgaacatcagtagcagcatttccgagtcaggtgggttaaattggaaaatgactatatgcctactcgccgcctgggtcatggtgtgcttggccatgattaagggcatccagagtagcggaaaagtctctatgctcgagccatttcttatcctactgatcacaattagtggattcatcccactgtccaattctgtcactgacttctgcgggcagatcacacacaacacctccttctag

SEQ ID NO: 196393 - DNA, 291 bp, Artificial Sequence
  derived and/or modified sequence
atgcccaagaactctaaggttgtgaaacgcgagctggacgatgatgtgacggaatctgtgaaggatttactgagcaatgaggacgccgcggatgacgcgttcaaaacctccgagctgattgttgatggccaggaggagaaagatactgatgtggaagaggggtcggaggtggaggatgaacggccagcatggaacagtaagctccagtacattttagcccaggtgggcttttccgttggattgggtaacgtttggaggtttccttatctctgccaaaagaatggtggctag

SEQ ID NO: 196394 - DNA, 870 bp, Artificial Sequence
  derived and/or modified sequence
atgcccaagaacagcaaggtggtgaagcgggagctggatgatgatgtgacagaatctgtgaaggacctgctgagcaatgaagatgctgctgatgatgccttcaagaccagcgagctgattgtggatggccaggaggagaaggacacagatgtggaggagggcagcgaggtggaggatgagaggcctgcctggaacagcaagctgcagtacatcctggcccaggtgggcttctctgtgggcctgggcaatgtgtggaggttcccctacctgtgccagaagaatggaggaggagcctacctgctgccctacctgatcctgctgatggtgattggcatccccctcttcttcctggagctgtctgtgggccagaggatccggcggggcagcattggagtgtggaactacatcagccccaagctgggcggcattggatttgccagctgtgtggtgtgctactttgtggccctgtactacaacgtcatcatcggctggagcctcttctacttcagccagagcttccagcagcccctgccctgggaccagtgccccctggtgaagaatgccagccacacctttgtggagccagaatgtgagcagagcagcgccaccacctactactggtaccgggaggccctgaacatcagcagcagcatcagcgagagcggcggcctgaactggaagatgaccatctgcctgctggccgcctgggtgatggtgtgcctggccatgatcaagggcatccagagcagcggcaaggtgtccatgctggagcccttcctgatcctgctgatcaccatcagcggcttcatccccctgagcaacagcgtgacagacttctgtggccagatcacccacaacaccagcttctag

SEQ ID NO: 196395 - DNA, 291 bp, Artificial Sequence
  derived and/or modified sequence
atgcccaagaacagcaaggtggtgaagcgggagctggatgatgatgtgacagaatctgtgaaggacctgctgagcaatgaagatgctgctgatgatgccttcaagaccagcgagctgattgtggatggccaggaggagaaggacacagatgtggaggagggcagcgaggtggaggatgagaggcctgcctggaacagcaagctgcagtacatcctggcccaggtgggcttctctgtgggcctgggcaatgtgtggaggttcccctacctgtgccagaagaatggaggatag

SEQ ID NO: 196396 - DNA, 870 bp, Artificial Sequence
  derived and/or modified sequence
atgcccaagaacagcaaggtggtgaagcgggagctggacgacgacgtcactgagagcgtaaaggacttactctccaatgaagacgctgcagatgatgccttcaaaacatctgagctaatcgtggatggacaagaggagaaagatactgatgtggaagaaggaagtgaagtcgaagatgagagaccagcttggaacagcaaactccaatatattttggctcaggttggttttagcgttggcttgggaaatgtgtggcgctttccttacctctgccagaaaaatgggggcggagcctatctacttccttacctgatactgctgatggtgatcgggataccactgttttttctcgagctttcagttggacagcgaatccgccgcggatcgatcggtgtttggaattacatctcccccaagctgggaggaatcggatttgcctcctgcgtggtttgttatttcgtcgccctttactacaacgttatcattgggtggtcactgttctatttctcccagtcattccagcaacctctaccctgggatcagtgtccgctcgtgaagaacgcgagtcacacgtttgtggagcccgagtgcgaacaatcatccgctactacttactattggtatcgcgaagcattaaatatctcttcatcaatttccgaatccggaggtctgaattggaaaatgacgatttgtcttctcgctgcatgggttatggtctgtcttgctatgattaaaggaatccaaagctctgggaaagtcagcatgctggaacccttccttatcctactgatcaccattagtggattcattcccttatccaactctgtgacagacttttgtggccaaatcacccacaacactagcttttag

SEQ ID NO: 196397 - DNA, 291 bp, Artificial Sequence
  derived and/or modified sequence
atgcccaagaacagcaaggtggtgaagcgggagctggacgacgacgtgacagagtccgtaaaggaccttctgagcaacgaggacgctgcagacgatgcctttaagacaagcgagctcattgtggacgggcaggaagagaaagacacagatgtcgaggaaggctccgaggtcgaagatgagcgacccgcctggaactcaaaattgcagtatatcctagctcaggttgggttttctgtgggcctgggaaatgtgtggaggttcccttacctatgtcagaagaatggtgggtag

SEQ ID NO: 196398 - DNA, 870 bp, Artificial Sequence
  derived and/or modified sequence
atgccaaagaacagcaaggtagtgaagagggagctggatgacgacgtcacagaaagcgtgaaagacctgttgtctaatgaagacgctgcagatgatgcgtttaagacatctgaattaattgttgacggccaggaagagaaggacacagacgtggaagagggtagtgaggttgaagatgaacgccctgcttggaattcgaaactgcaatacatcctggcccaggtaggcttcagcgttgggctgggaaatgtctggaggttcccttatctctgccagaagaacggtggcggagcctacttgctgccctatctcattctcctaatggtaattggaattccgcttttctttctagagctctcggtggggcaacgtatccgaagaggatcgataggcgtctggaattatatctcacccaagctcggcggaatcggcttcgcttcgtgcgtagtgtgctacttcgtggccctgtattacaacgtgatcattggatggagcttgttttacttcagccagtctttccagcagccactgccctgggaccaatgcccattggtgaagaacgcaagccacacatttgtcgagcccgagtgcgagcagagttctgccactacctattattggtaccgcgaagcgctcaacatttcttcttccatctctgaaagcggtggccttaattggaagatgacaatctgtctcttggccgcatgggtcatggtgtgcctggccatgatcaagggaatccagtcgtctggaaaagtatctatgttggaaccatttcttattctgttaattacaattagcggttttatccctctttcaaactcagtcaccgatttctgtggccaaatcactcacaataccagcttttag

SEQ ID NO: 196399 - DNA, 291 bp, Artificial Sequence
  derived and/or modified sequence
atgcctaaaaatagtaaggtggtaaaaagggaattggatgacgatgtcaccgagtccgtcaaagatctgctctctaatgaagatgccgcagacgatgcatttaagactagtgaactaatcgtggacgggcaggaagaaaaagacaccgacgtcgaagagggctctgaggttgaggatgagaggccagcttggaattccaagctgcagtacatcctggcgcaagtgggattcagcgtgggccttgggaatgtgtggagatttccatacttatgtcaaaagaatggcggttag

SEQ ID NO: 196400 - DNA, 4168 bp, Artificial Sequence
  derived and/or modified sequence
atgtacacgcgcacccgcacccgcgcgcctgtatcccgtgctgtttccctggcagacacacaggcgctcacgagtctctccttgccagcctgcagggcggcgacccccaaaacccagctccgggtcccaacctaggcaagaagctgcttctctgccaacagctcctcttcggcctccgtcacagccacctggaccctaccctttcgcgactgctgctgctgctgcccggacgtggaagcagcaagaggcgcttggtcaagacacactgacggtacctacagaatactggacatacggattcagaatccataaggctttatcaccttgaatcaaggatttatttgatatcatcctcggtctttacttcctatcaagtaacattgttttgaaaaatagagttaacacatttgccataagggagtttttttttttttttttaaatacttcgcatactctccaatgcccaaaaatagcaaggtggtaaaaagagaattagatgatgatgttactgagtctgtcaaagaccttctttccaatgaagacgcagctgatgatgcttttaagacaagtgaactaattgttgatggccaggaagagaaagatacagatgttgaagaaggatctgaagtcgaagatgaaagaccagcttggaacagtaaactacaatacatcctggcccaagttggattttctgtaggtttaggaaatgtgtggcgatttccatacctatgtcagaagaatgggggcggtgcatatcttttaccatatttaatactacttatggtaataggtattcccctttttttcttggaactctctgtgggtcaaagaattcggcgaggcagcattggtgtatggaattacataagccctaaactgggcgggattggatttgcaagttgtgtagtgtgctattttgtagctctctactacaacgtcatcattggctggagtttgttttatttttctcagtcttttcagcaacccctgccttgggatcagtgtcctttggtgaaaaatgcttcacacacttttgtagaaccagaatgtgaacaaagttctgccaccacctattactggtacagggaagcactgaatatttcaagttccatttctgaaagtgggggcttaaactggaagatgaccatctgcttgttggctgcctgggtcatggtttgcttggctatgatcaaaggcattcagtcttctggaaaagttagtatgttagagcccttcctcattctgctaatcaccatttctggattcatccctctctcaaattctgttacagatttctgtgggcaaatcacacataacacttcattctaggtagttaaatattagtgaaaagtgacacttcaaaagtgtgcttacatttttaaaaagacaaataaaaacagtgttttatagtgaaatctaaggttaattataatctttccttatttcaacaagatctttaaaatttttgtgaatacttaaaagtcctttctttttgccctttattcaattagtcctaatgtttcagttctctaattaccaattagttaaattatggaaattggggaaagtggtaaaatgagtaattcattcattttgtttgtttgatatcatttgtttctctctgctgtaggtgttctaaggaatagctgcataagacattttgaaataatgtaatgtgaagtgtttcttaaagctctgaacatcattaagtagttaataataattccaacaaggaattcagagtaatgtaaaagactaaatatcattccttctaaggcaaattgaaaattagaatggttgtggtttaaaaagacattaagtgaattctaggtagcttgtttgttattatttttaaaggacgctctaggaaagtaattgctattcactattttgctttcgtattactttttttttttttttttcattatcacagccattgttctaaagctctccacatctcttggctggatcatagcaagaatttactgttggctcttctctctgccgtttaactgtccagctgtgctattttccttttcaaagtataactgatttcaggctaacttattaccactcatcatcatatactagcaggaatggcaatagtagtagtagtagcagcagcaatagtagaagtagtcataataacaataataataaatgatgataaagatgtttctgacaagaattagggtaagaacagtaattgaagccaattatttattacaaatgtattttgctttgggtactgtgataactactttttatactttatcccatttaattataaaaaccactcttgagaagtaatttttattttcagaaccattttacagatttaaaataaacaggtttgaggaattagtttaacttatccaaagtttcgtggctattaagttctagtatttggagtcaaatgcaagtctgtctaaatctagagcccatgttctttaactgcaacactataatgtctcaccccgtcctagtcccaccaattagtcaactcttttagggcagaagtctgtctaattcatctttgcttcctgttactttatatttaattaaaaattttagtgactttttaacttgtaaattgtagctgattttacatttatcttcctgaaggaaactctgtatcattttgtcttttgaatttgtgaatatacttgttaacacatctaaatatctttaagtctttggcaatgttattgtattatatgactaaataacttcgaattgttcaattgtgtatgtcttccactatgtcagagccacattcccgtcacattataaatgaaggagtggattcttaaataagacctaaccatatttatatgattcctaacataatatcatttggtagaaagaaaaccaactgtggtcatccagagaagctcaaaaactcttgtactcaggttctcttactaccacgttttgtttctgtttcttcttagtctgtgtcttagcatcacttaaagaactattcatccttttcttatcacagaatcttggggttgttcttctcatgtcatgtagtgtaaatttatatagaaaatgtaatacaatttatttagtacatacatttattattttaatgagaatgcctcaggaaaagactagtatttgggcaatatttgaagaaagaatttaacaggcactgatggggagaaagctagctgtaggtaatgtgagcaaagatgtggaagccaaaattgtcacaattcctcaatctgaaacaatgagttaaatataataacaatgactttatgaggaattaaaggttaagctttgtgtttacctactaaacagaaaatgcctccaaataaacagtgtcacaagtacagaagagagaaatattgtttaaggctagcacatggaaaaacaacttagaggatttagcagctaaaagaagaatgagtcagctggtgatgtgcttggtcaaaacacacagtcatacatgcatatacatataccccaaaatgctaagtggaaactgcatgaattaaaagaggggtatgatagggacattgtcctttgggctaggtaggcacatatcagttggaccacatctgcaatactggattttactgaaatcttgtattttcctttttattatgagaaatttcagctcagtgatcaaagtcttcaaatagttaaaccaaaagaagaatagggctgctttgtgtggccatagagagcaaaactatgatcaaatagtgggtattatggaggaggttgtgatggtggtaagccttcaaagaaagaaaggcctttcaagaatcaaacttgataataatgaaatcagttgcctcaatggtagagagctcagcatcactggaggtggtcacacagaggtagcatgtgccctagttacagaatctattaaggggatgactgtctcaaatatgtaggacagaaatgagaagccccaagcttgcttttaactctaaggtagtattttctactctgactactttcctgttgttactactactatgctaaatactatgcatacattatcttgtttattctttctatcagctagataatttgcatattttatccccattttactgcaaagttgacaagctcagggaaaataaatagttggccagaattaagcaaccaatacatgatagacagggctaaaactgggctacagaatttt

SEQ ID NO: 196401 - DNA, 563 bp, Artificial Sequence
  derived and/or modified sequence
attcgcttccgttcgctttagcaaaggcagaaggcgactaccgaggacagagtgttttcacgtgaccacagttcccctttgcttgaggtacctacagaatactggacatacggattcagaatccataaggctttatcaccttgaatcaaggatttatttgatatcatcctcggtctttacttcctatcaagtaacattgttttgaaaaatagagttaacacatttgccataagggagtttttttttttttttttaaatacttcgcatactctccaatgcccaaaaatagcaaggtggtaaaaagagaattagatgatgatgttactgagtctgtcaaagaccttctttccaatgaagacgcagctgatgatgcttttaagacaagtgaactaattgttgatggccaggaagagaaagatacagatgttgaagaaggatctgaagtcgaagatgaaagaccagcttggaacagtaaactacaatacatcctggcccaagttggattttctgtaggtttaggaaatgtgtggcgatttccatacctatgtcagaagaatgggggc

SEQ ID NO: 196402 - protein, 628 aa, Artificial Sequence
  derived and/or modified sequence
MAPSADPGMSRMLPFLLLLWFLPITEGSQRAEPMFTAVTNSVLPPDYDSNPTQLNYGVAVTDVDHDGDFEIVVAGYNGPNLVLKYDRAQKRLVNIAVDERSSPYYALRDRQGNAIGVTACDIDGDGREEIYFLNTNNAFSGVATYTDKLFKFRNNRWEDILSDEVNVARGVASLFAGRSVACVDRKGSGRYSIYIANYAYGNVGPDALIEMDPEASDLSRGILALRDVAAEAGVSKYTGGRGVSVGPILSSSASDIFCDNENGPNFLFHNRGDGTFVDAAASAGVDDPHQHGRGVALADFNRDGKVDIVYGNWNGPHRLYLQMSTHGKVRFRDIASPKFSMPSPVRTVITADFDNDQELEIFFNNIAYRSSSANRLFRVIRREHGDPLIEELNPGDALEPEGRGTGGVVTDFDGDGMLDLILSHGESMAQPLSVFRGNQGFNNNWLRVVPRTRFGAFARGAKVVLYTKKSGAHLRIIDGGSGYLCEMEPVAHFGLGKDEASSVEVTWPDGKMVSRNVASGEMNSVLEILYPRDEDTLQDPAPLETPMNASSSHSCALETSPYVSTPMEATGAGPTRSAVGATSPTRMAQPAWGLSASHRAPAPPPPPLLLPLPLLLPLLELPLLHRSS

SEQ ID NO: 196403 - protein, 661 aa, Artificial Sequence
  derived and/or modified sequence
MAPSADPGMSRMLPFLLLLWFLPITEGSQRAEPMFTAVTNSVLPPDYDSNPTQLNYGVAVTDVDHDGDFEIVVAGYNGPNLVLKYDRAQKRLVNIAVDERSSPYYALRDRQGNAIGVTACDIDGDGREEIYFLNTNNAFSGVATYTDKLFKFRNNRWEDILSDEVNVARGVASLFAGRSVACVDRKGSGRYSIYIANYAYGNVGPDALIEMDPEASDLSRGILALRDVAAEAGVSKYTGGRGVSVGPILSSSASDIFCDNENGPNFLFHNRGDGTFVDAAASAGVDDPHQHGRGVALADFNRDGKVDIVYGNWNGPHRLYLQMSTHGKVRFRDIASPKFSMPSPVRTVITADFDNDQELEIFFNNIAYRSSSANRLFRVIRREHGDPLIEELNPGDALEPEGRGTGGVVTDFDGDGMLDLILSHGESMAQPLSVFRGNQGFNNNWLRVVPRTRFGAFARGAKVVLYTKKSGAHLRIIDGGSGYLCEMEPVAHFGLGKDEASSVEVTWPDGKMVSRNVASGEMNSVLEILYPRDEDTLQDPAPLECGQGFSQQENGHCMDTNECIQFPFVCPRDKPVCVNTYGSYRCRTNKKCSRGYEPNEDGTACVGTLGQSPGPRPTTPTAAAATAAAAAAAGAATAAPVLVDGDLNLGSVVKESCEPSC

SEQ ID NO: 196404 - DNA, 1986 bp, Artificial Sequence
  derived and/or modified sequence
atggctcctagcgccgatcccggaatgtctagaatgctgccctttcttctcctactctggttcctgcctattacagagggatcccagcgcgcagaacctatgtttaccgcggtgacaaactccgtactcccacctgactacgatagcaatcccacacagctcaattatggggtggccgtgacggatgtcgatcacgatggagactttgagattgtagtcgctggttacaatggccctaacctcgtactgaaatatgaccgagctcagaagaggctggtcaatattgctgtagatgaacgatccagcccatactacgctttacgcgataggcaggggaacgccattggagtgacagcctgtgacattgatggggatggtcgtgaggaaatctatttcttgaataccaacaacgcatttagcggcgtcgcaacctacacggacaagcttttcaaattccgcaacaacagatgggaagatatcctgtccgatgaggtgaacgtagcaaggggcgtggcctctctgttcgctggcaggtccgtagcatgcgttgatcggaagggaagcggtaggtatagtatctacatagcgaattatgcctacgggaacgtgggaccagacgcccttatcgaaatggatcccgaggcttccgacttgtcgcgcggtattctggcccttcgtgatgttgccgcagaagctggggttagtaagtatacgggaggtcgcggagtctccgtcggtccaatccttagttcctcagcgagtgatattttctgcgataacgagaacgggcctaacttcttatttcacaatcgaggtgatggcactttcgtcgatgccgcagcctcggctggcgtggacgatccacaccagcatggccgaggtgtcgcactggctgatttcaatagagacggtaaggttgatatcgtgtatggcaattggaatggaccccacaggctgtatcttcagatgtctacccatgggaaggtgaggtttcgtgacatagcatcaccgaaattttctatgccgtcccccgttcgaactgtgattactgccgacttcgataacgaccaagaacttgagatttttttcaataatatagcataccggtctagcagcgcaaaccgcctgttccgggtaatacggagggaacatggcgaccctcttatagaagaactgaacccaggcgacgccttggaacctgaaggacgcggaaccggaggagtagtgacagatttcgacggggacgggatgcttgacttgattctttcacatggagaatccatggcgcagccactatcagttttccgcggaaaccaggggtttaacaacaattggttacgagtggtgcccaggaccaggtttggggctttcgctagaggcgctaaggtcgttctttatacaaaaaaatccggcgcacacctgcgcatcatcgatggcggttccgggtacctgtgcgagatggaaccagtcgcccatttcggcttgggcaaggacgaagcgagttccgtcgaggtcacttggccagatggaaagatggtcagtaggaacgtggcttctggggagatgaattctgtgcttgaaattttataccctcgcgacgaggacacactccaggaccccgcaccgctggagtgtggccaggggttctcgcaacaagagaatggccattgtatggacacaaacgagtgcatacagtttcccttcgtctgccctagggataagcctgtgtgcgtgaacacctacggcagttatcgctgtcggacaaacaaaaaatgttctagaggatatgaacccaatgaggatgggactgcctgcgtcggcaccctcggacaatcaccgggaccaaggcctaccactcccaccgccgctgccgcaaccgcggctgcagcagctgctgccggtgcagccactgccgctcccgtgcttgtcgacggcgacttaaatcttggttccgtagtgaaggagagttgcgagcccagttgttag

SEQ ID NO: 196405 - DNA, 1986 bp, Artificial Sequence
  derived and/or modified sequence
atggctccttccgccgaccccggcatgagccgaatgctcccgttcctgctgcttctctggtttcttcccattacggagggctctcagcgcgccgaaccaatgtttactgcagtcactaactcagtcctgccaccagactatgattctaaccccacacaactgaactatggcgtggctgtgacagatgtggatcacgacggggatttcgagattgtcgttgctgggtacaacggtcccaatcttgttctcaaatacgaccgcgcccagaagcgtctagtgaacatcgcagtggatgagaggtctagtccttactatgctctaagagaccgccaggggaatgcaattggtgttaccgcatgcgacatagatggcgacggaagggaggaaatctactttcttaatacaaacaatgcctttagtggggttgccacatacaccgataaactgttcaaatttagaaataataggtgggaagatattctaagcgatgaggtaaatgttgcccggggcgtggcgtcactatttgccggcaggtctgtggcctgcgtcgacagaaaaggctcgggccggtacagcatctatatcgctaattacgcctatggcaatgtaggaccagacgccctgattgaaatggatcctgaagcctccgacctgtcacggggaattttagccctgcgcgatgtggcggccgaggctggtgtctctaagtatacggggggcaggggtgtatctgttgggcctattctgtcatcaagcgcttcggatattttctgtgacaacgaaaacggaccgaattttctctttcacaatcgtggtgatggcaccttcgtagatgccgccgcctccgccggcgttgacgacccccaccagcatggcaggggagtggcacttgcggactttaatcgtgacggcaaggtggatattgtctacggcaattggaacggtcctcatcgcctgtacctccagatgagcacccatgggaaagtgcgcttcagggacatcgcaagtcccaaattcagcatgcctagccctgtgaggactgtgatcacagctgactttgacaacgaccaagagttagaaatttttttcaataacatcgcatataggagctcgagcgcaaaccggttattccgtgtgatccgccgggaacacggggaccccctaatcgaggaacttaatcccggagatgctctggagcccgaagggcgaggaacgggtggtgtggtaaccgacttcgatggcgatgggatgctggacttaatcctgtcccatggagagagtatggcccagcccctctccgtcttccgcggcaaccagggctttaacaacaactggctccgggttgtccctagaacgcggttcggtgcgtttgctcgcggggccaaggttgtgctgtacactaaaaagtcaggggcccacctccgtataattgatggcgggtcaggctatctgtgcgagatggagcccgtcgcacatttcggcttagggaaggacgaagccagttcagttgaggtcacatggcctgatggcaaaatggttagtagaaatgttgcgagtggggaaatgaatagcgttctggaaatcctgtacccgcgagacgaagacactctgcaagaccccgcccctctcgagtgcggccaagggttctctcagcaggaaaacggacactgcatggacactaacgaatgcattcagttcccttttgtatgcccgcgagataaacctgtttgcgttaatacctacggatcctacagatgtagaactaacaagaagtgctcgagaggttacgaacccaatgaagacggtaccgcgtgtgtaggaaccctcggacagtcaccaggtccccggcccactacccccactgctgccgccgccactgccgccgctgctgccgccgccggagccgcgactgctgcccctgtgttggtggacggagacttaaatcttggaagtgtggttaaagaaagctgcgagccaagttgctag

SEQ ID NO: 196406 - DNA, 1986 bp, Artificial Sequence
  derived and/or modified sequence
atggctccctccgccgaccctgggatgtcaagaatgctgccattcctgctgttgctctggttcttacccattaccgagggttcccaaagggccgaacctatgtttacagcggttaccaatagtgtgcttcctcctgactacgactctaaccctacccagctaaattacggagttgccgttaccgacgtagaccacgacggagattttgaaatcgtggtggctggatacaatggacccaatctcgttctgaaatatgaccgcgcccagaagaggttagttaatatcgcggttgatgaaagatcttccccttactacgcactccgggaccgtcaggggaatgccattggagtgaccgcatgcgatatcgatggagacggaagggaggagatctattttctcaatactaataatgcattttcaggcgtcgcaacttataccgacaaactattcaagttccgaaacaatagatgggaagacattctgtctgacgaggtgaacgtggcacgaggggttgctagcctctttgctggaagatccgtggcttgcgtggacagaaaggggagcggtaggtattctatttacattgcaaattacgcgtacggaaacgtaggacccgatgcactcatcgaaatggacccagaagcctcagacctatcacgcggtattctggcgttaagagacgtggctgccgaagccggtgtgagcaagtatacgggaggccggggcgtttctgtggggcccattctcagctcctccgcctccgatattttctgcgataacgagaacgggccaaatttcctatttcacaacagaggggacggaacattcgtcgatgcagccgccagcgctggggttgacgatcctcatcagcacggaaggggtgtcgcgctcgccgacttcaacagagacggtaaggtagacattgtctatgggaactggaatggtccgcatagattgtatttacaaatgtccacccatgggaaagtccgcttccgggacatcgccagccctaaattcagcatgccctcccctgttcgaactgtaataacggccgatttcgataatgatcaagaactcgagattttctttaacaatatcgcatatcgatcttcttctgctaatcgactttttcgcgtgattcggcgcgaacatggcgaccctctgatcgaagagctgaatccaggcgacgcactggaacccgagggcagaggaactggaggcgtggtcaccgattttgatggcgatggcatgctggaccttatattgtctcatggcgagagcatggctcagccattatccgtttttagaggcaaccagggttttaacaacaactggttacgagtcgttcctagaacgagattcggggctttcgccagaggtgccaaggtcgttctgtacaccaaaaagagcggggcccatctgagaatcattgacggcggcagcggctacttatgcgagatggaacccgtggctcacttcggcttagggaaggatgaggcttccagcgtcgaggtgacctggccagacggaaagatggtcagccggaacgtggcatccggggaaatgaacagcgtactcgaaatcctgtatccaagggatgaggacacgctccaagaccccgctccccttgaatgtggacagggcttttctcagcaagagaacggacactgtatggatactaatgaatgcattcaattcccttttgtttgcccgagagacaagcctgtgtgtgtgaatacttatggatcttataggtgtaggactaacaaaaagtgctccagagggtatgagccaaacgaagacggtaccgcgtgtgtaggaaccctcggacagtcaccaggtccccggcccactacccccactgctgccgccgccactgccgccgctgctgccgccgccggagccgcgactgctgcccctgtgttggtggacggagacttaaatcttggaagtgtggttaaagaaagctgcgagccaagttgctag

SEQ ID NO: 196407 - DNA, 1986 bp, Artificial Sequence
  derived and/or modified sequence
atggcccccagcgccgaccccggcatgagcagaatgctgcccttcctgctgctgctgtggttcctgcccatcaccgagggcagccagagagccgagcccatgttcaccgccgtgaccaacagcgtgctgccccccgactacgacagcaaccccacccagctgaactacggcgtggccgtgaccgacgtggaccacgacggcgacttcgagatcgtggtggccggctacaacggccccaacctggtgctgaagtacgacagagcccagaagagactggtgaacatcgccgtggacgagagaagcagcccctactacgccctgagagacagacagggcaacgccatcggcgtgaccgcctgcgacatcgacggcgacggcagagaggagatctacttcctgaacaccaacaacgccttcagcggcgtggccacctacaccgacaagctgttcaagttcagaaacaacagatgggaggacatcctgagcgacgaggtgaacgtggccagaggcgtggccagcctgttcgccggcagaagcgtggcctgcgtggacagaaagggcagcggcagatacagcatctacatcgccaactacgcctacggcaacgtgggccccgacgccctgatcgagatggaccccgaggccagcgacctgagcagaggcatcctggccctgagagacgtggccgccgaggccggcgtgagcaagtacaccggcggcagaggcgtgagcgtgggccccatcctgagcagcagcgccagcgacatcttctgcgacaacgagaacggccccaacttcctgttccacaacagaggcgacggcaccttcgtggacgccgccgccagcgccggcgtggacgacccccaccagcacggcagaggcgtggccctggccgacttcaacagagacggcaaggtggacatcgtgtacggcaactggaacggcccccacagactgtacctgcagatgagcacccacggcaaggtgagattcagagacatcgccagccccaagttcagcatgcccagccccgtgagaaccgtgatcaccgccgacttcgacaacgaccaggagctggagatcttcttcaacaacatcgcctacagaagcagcagcgccaacagactgttcagagtgatcagaagagagcacggcgaccccctgatcgaggagctgaaccccggcgacgccctggagcccgagggcagaggcaccggcggcgtggtgaccgacttcgacggcgacggcatgctggacctgatcctgagccacggcgagagcatggcccagcccctgagcgtgttcagaggcaaccagggcttcaacaacaactggctgagagtggtgcccagaaccagattcggcgccttcgccagaggcgccaaggtggtgctgtacaccaagaagagcggcgcccacctgagaatcatcgacggcggcagcggctacctgtgcgagatggagcccgtggcccacttcggcctgggcaaggacgaggccagcagcgtggaggtgacctggcccgacggcaagatggtgagcagaaacgtggccagcggcgagatgaacagcgtgctggagatcctgtaccccagagacgaggacaccctgcaggaccccgcccccctggagtgcggccagggcttcagccagcaggagaacggccactgcatggacaccaacgagtgcatccagttccccttcgtgtgccccagagacaagcccgtgtgcgtgaacacctacggcagctacagatgcagaaccaacaagaagtgcagcagaggctacgagcccaacgaggacggcaccgcctgcgtgggcaccctgggccagagccccggccccagacccaccacccccaccgccgccgccgccaccgccgccgccgccgccgccgccggcgccgccaccgccgcccccgtgctggtggacggcgacctgaacctgggcagcgtggtgaaggagagctgcgagcccagctgctag

SEQ ID NO: 196408 - DNA, 1986 bp, Artificial Sequence
  derived and/or modified sequence
atggcccccagtgcagaccccgggatgagccgcatgctgccttttctgctgttactatggtttcttcccatcaccgaggggtcccagagagccgagccaatgttcaccgctgtgactaattctgtccttcccccagattacgacagcaaccctacccagctgaattacggtgtggctgtcactgacgtagatcacgacggggacttcgagattgtggtggctggctacaacgggcccaacttggtgttaaaatacgaccgcgcccagaagagattggtgaatatcgccgttgatgaacgcagctctccatattatgccctaagagatcggcaaggaaacgccatcggcgtaactgcatgcgacatagatggcgatggccgtgaagagatatacttcctgaatactaacaatgctttcagcggagtggcgacgtacaccgataagctctttaaattccgaaataaccgctgggaagacatcctgtcagatgaggtaaacgtggctagaggcgtggcctctcttttcgccggacggagcgtagcatgtgtcgacagaaaaggctctggtcggtacagtatatacattgccaactatgcgtatggtaatgtagggcccgatgctctcatcgaaatggatcctgaagccagcgatttgtcccggggcatcctcgcgttgcgagacgtcgccgccgaggccggcgtaagtaaatacactgggggcagaggagtatccgtcggccccatcctctcgagcagcgcgtctgacatcttctgcgataacgagaatgggcccaacttcctgttccacaatcgtggcgatgggacctttgtggatgcggccgcgtcagcaggggttgatgatccccaccaacatggtcgaggcgtggccttagcagactttaatagggacggcaaggtggacattgtgtacggcaactggaacggtcctcatagactttaccttcagatgagtactcacggcaaagtacgcttcagggacattgcatcacctaagttttccatgccctctcccgtgaggaccgtcatcaccgctgactttgataatgatcaggagttagagatatttttcaataacatcgcctaccgatcgagctcagctaaccgacttttccgggttatcaggcgtgaacatggcgatcccctgattgaagagctgaatccaggcgacgcgctggagcctgaggggaggggcacgggaggcgtggtcaccgacttcgacggtgacggaatgctcgacctgattctttctcatggcgaatctatggcccagcccttatcagtgttccggggaaaccaggggttcaataataactggttaagagtcgtcccaagaacgcgcttcggagctttcgctcgaggggcaaaggtcgtcctttacaccaaaaaatctggagctcacctcagaattatcgacggtggcagtggttatctctgtgagatggagcctgtggctcactttggcctcgggaaggacgaggcttcttccgtggaggtcacttggccagacgggaagatggtgtcccggaacgtggctagcggcgagatgaattcagtgctggaaattctttatccacgggatgaagatacgttgcaggacccagccccactggagtgcggccagggcttttcacaacaggagaatggccactgcatggacacgaacgaatgcattcaatttccttttgtctgtcctcgggataagcctgtctgtgtcaacacatacggcagctacagatgtaggaccaataagaagtgcagccgcggctacgaacctaatgaagacggcacggcgtgcgtggggactttagggcaatccccgggaccgagaccaacgacacccacagcagctgctgctactgccgcggctgctgccgctgccggggccgccactgccgctcccgtcctcgtggacggggatctgaacctggggagcgtggtcaaggaaagctgtgagccctcctgctag

SEQ ID NO: 196409 - DNA, 2890 bp, Artificial Sequence
  derived and/or modified sequence
ctggctgccggctgctgccaccgcaatcccggctcctaaatcagcgcggggaggcgctccctccccacgcccggctctccgggctctcggggccgcgattggccgcgccggcgccccccaccccgggcccccggctccagctgccgcgccattggctgcgggcctccgccagcctttacataagaccgggcgcgctcgagtggagttgtataaagcgagcgcgcggcgtcggggcgggaggctcgaggccagcccgggaccggggctgggagcaagcaggcggcggcgccggcggcagaggcggcagcgagcgcccgcttcccacgcccctaggcggcggggccgagagcgggaggatggctccgagcgctgaccccggcatgtccaggatgttaccgttcctgctgctgctctggtttctgcccatcactgaggggtcccagcgggctgaacccatgttcactgcagtcaccaactcagttctgcctcctgactatgacagtaatcccacccagctcaactatggtgtggcagttactgatgtggaccatgatggggactttgagatcgtcgtggcggggtacaatggacccaacctggttctgaagtatgaccgggcccagaagcggctggtgaacatcgcggtcgatgagcgcagctcaccctactacgcgctgcgggaccggcaggggaacgccatcggggtcacagcctgcgacatcgacggggacggccgggaggagatctacttcctcaacaccaataatgccttctcgggggtggccacgtacaccgacaagttgttcaagttccgcaataaccggtgggaagacatcctgagcgatgaggtcaacgtggcccgtggtgtggccagcctctttgccggacgctctgtggcctgtgtggacagaaagggctctggacgctactctatctacattgccaattacgcctacggtaatgtgggccctgatgccctcattgaaatggaccctgaggccagtgacctctcccggggcattctggcgctcagagatgtggctgctgaggctggggtcagcaaatatacagggggccgaggcgtcagcgtgggccccatcctcagcagcagtgcctcggatatcttctgcgacaatgagaatgggcctaacttccttttccacaaccggggcgatggcacctttgtggacgctgcggccagtgctggtgtggacgacccccaccagcatgggcgaggtgtcgccctggctgacttcaaccgtgatggcaaagtggacatcgtctatggcaactggaatggcccccaccgcctctatctgcaaatgagcacccatgggaaggtccgcttccgggacatcgcctcacccaagttctccatgccctcccctgtccgcacggtcatcaccgccgactttgacaatgaccaggagctggagatcttcttcaacaacattgcctaccgcagctcctcagccaaccgcctcttccgcgtcatccgtagagagcacggagaccccctcatcgaggagctcaatcccggcgacgccttggagcctgagggccggggcacagggggtgtggtgaccgacttcgacggagacgggatgctggacctcatcttgtcccatggagagtccatggctcagccgctgtccgtcttccggggcaatcagggcttcaacaacaactggctgcgagtggtgccacgcacccggtttggggcctttgccaggggagctaaggtcgtgctctacaccaagaagagtggggcccacctgaggatcatcgacgggggctcaggctacctgtgtgagatggagcccgtggcacactttggcctggggaaggatgaagccagcagtgtggaggtgacgtggccagatggcaagatggtgagccggaacgtggccagcggggagatgaactcagtgctggagatcctctacccccgggatgaggacacacttcaggacccagccccactggagtgtggccaaggattctcccagcaggaaaatggccattgcatggacaccaatgaatgcatccagttcccattcgtgtgccctcgagacaagcccgtatgtgtcaacacctatggaagctacaggtgccggaccaacaagaagtgcagtcggggctacgagcccaacgaggatggcacagcctgcgtggggactctcggccagtcaccgggcccccgccccaccacccccaccgctgctgctgccactgccgctgctgctgccgctgctggagctgccactgctgcaccggtcctcgtagatggagatctcaatctggggtcggtggttaaggagagctgcgagcccagctgctgagcaggggtgggacatgaaccagcggatggagtccagcaggggagtgggaaagtgggcttgtgctgctgcctagacagtagggatgtaaaggcctgggagctagaccctccccaagcccatccatgcacattacttagctaacaattagggagactcgtaaggccaggccctgtgctgggcacatagctgtgatcacagcagacagggtcgctgccctgatggcgcttacattccagtgggtctaatgaccatatcttaggacacagatgtgcccagggaggtggtgtcactgcacaggaagtatgaggactttagtgtcctgagttcaaatcctgattcaggaactcacaaagctatgtgaccttacaccagtcacttaacttgttagccatccattatcgcatctgcaaaatggggattaagaatagaatcttggggttagtgtggagattagattaaatgtatgtaagacacttggcacaaaacctggcacatagtaaaggctcaataaaaacaagtgcctctcactgggctttgtcaacacgtga

SEQ ID NO: 196410 - DNA, 1986 bp, Artificial Sequence
  derived and/or modified sequence
atggcccccagcgctgaccccggcatgagcaggatgctgcccttcctgctgctgctgtggttcctgcccatcacagagggcagccagagagctgagcccatgttcaccgctgtgaccaacagcgtgctgcccccagactatgacagcaaccccacccagctgaactacggcgtggccgtgacagatgtggaccatgatggagactttgaaattgtggtggccggctacaacggccccaacctggtgctgaagtatgaccgggcccagaagaggctggtgaacattgctgtggatgagaggagcagcccctactatgccctgcgggaccggcagggcaatgccatcggcgtgacagcctgtgacattgatggagatggccgggaggagatctacttcctgaacaccaacaatgccttcagcggcgtggccacctacacagacaagctgttcaagttcaggaacaaccgctgggaggacatcctgagtgatgaggtgaatgtggcccggggcgtggccagcctgtttgctggccgctctgtggcctgtgtggacaggaagggcagcggccgctacagcatctacatcgccaactatgcctatggaaatgtgggcccagatgccctgattgagatggaccctgaggccagtgacctgagccggggcatcctggccctgagagatgtggccgctgaggccggcgtgtccaagtacacaggaggccggggcgtgtctgtgggccccatcctgagcagcagcgccagtgacatcttctgtgacaatgaaaatggccccaacttcctgttccacaacagaggagatggcacctttgtggatgctgctgccagcgctggggtggatgacccccaccagcacggccggggcgtggccctggccgacttcaacagagatggcaaggtggacatcgtgtatggcaactggaatggcccccaccggctgtacctgcagatgagcacccacggcaaggtgcgcttccgggacatcgccagccccaagttctccatgcccagccctgtgaggacagtcatcacagctgactttgacaatgaccaggagctggagatcttcttcaacaacatcgcctaccgcagcagcagcgccaacagactcttccgggtcatcagaagagagcacggggaccccctgattgaggagctgaaccctggagatgccctggagcctgagggccggggcactggaggagtggtgacagactttgatggagatggcatgctggacctgatcctgagccacggggagagcatggcccagcccctgtctgtgttccggggcaaccagggcttcaacaacaactggctgcgggtggtgcccaggaccaggtttggagcctttgcccggggggccaaggtggtgctgtacaccaagaagagcggggcccacctgcgcatcattgatggcggcagcggctacctgtgtgagatggagcctgtggcccacttcggcctgggcaaggatgaggccagctctgtggaggtgacctggccagatggcaagatggtgtccagaaatgtggccagcggggagatgaacagcgtgctggagatcctgtaccccagagatgaggacaccctgcaggaccctgcccccctggagtgtggccagggcttcagccagcaggagaatggccactgcatggacaccaatgaatgcatccagttcccctttgtgtgcccccgggacaagcctgtgtgtgtgaacacctacggcagctaccgctgcaggaccaacaagaagtgcagccggggctatgagcccaatgaagatggaacagcctgtgtgggcaccctgggccagagccctggcccccggcccaccacccccacagctgctgctgccacagctgctgctgctgctgctgctggagctgccacagctgcccctgtgctggtggatggagacctgaacctgggctctgtggtgaaggagagctgtgagcccagctgctag

SEQ ID NO: 196411 - DNA, 1986 bp, Artificial Sequence
  derived and/or modified sequence
atggcccccagcgccgaccccggcatgagccggatgctgcccttcctgttacttctgtggtttttacccatcactgagggatcgcagcgtgccgaacctatgtttaccgcagtcactaactccgtgttgccccccgattatgattctaatccaacacagttgaattatggggtggcagtgacagatgtggatcatgatggagacttcgaaatcgtcgtggcagggtacaacggccctaacctggtgcttaagtacgatagggctcaaaagcggctcgtaaacatcgcagtggatgagcgtagctctccttactatgcgttacgcgaccgccagggtaacgctattggcgtgacagcgtgcgacattgacggcgacggaagggaagaaatctatttcctcaatacgaacaatgccttcagcggggtggccacatacactgacaagctgttcaaattcaggaataaccggtgggaggacatcctgtccgacgaagtgaacgtagctcgtggagtcgcctcactgtttgctggccgaagtgtggcttgcgtcgacaggaagggttccgggagatatagcatttatatcgcgaattatgcttacggtaacgtaggcccagacgcccttatagagatggacccagaagcttcagaccttagcagaggcatcctcgcactccgcgatgtggcagcagaagccggcgtctccaaatatacggggggtaggggcgtctcagtgggacctatccttagcagtagcgcatccgacatattctgtgacaatgagaacggtcctaactttttatttcacaacaggggggatggaaccttcgtggacgccgccgcttccgcgggggtcgacgatccgcatcaacacggtcgcggcgtggctctggcagattttaatcgagacggaaaagtcgacattgtatacggcaattggaatggacctcataggctgtatctgcaaatgagcacccatggcaaggtgaggttccgggacatcgcaagtcctaaattctccatgccctcccctgtgaggacagttatcactgccgacttcgacaacgatcaggagctggaaatcttcttcaacaacatcgcatacaggtcatctagcgcgaacaggctgttccgggtgatcaggcgcgaacacggcgatccgttgattgaagagctgaatcccggtgacgctctggaacctgagggtaggggtactgggggggtagtgacagactttgacggagacggtatgcttgatctgattctctcccacggggaatccatggcgcaacccctgtcggtgttcagaggaaatcagggatttaataataactggttgcgcgttgtccccaggacacggtttggggcatttgctagaggtgccaaggtggtgttgtataccaagaaaagtggcgcacatctcaggattattgatggcggaagcggatatctctgcgagatggaacctgtcgctcatttcggcctcggaaaggacgaggcttctagcgtggaagtgacttggcctgacggcaaaatggtatcacggaacgtggcctctggggaaatgaattccgtgcttgaaatactttatcctagggatgaggacacacttcaagatccagctccacttgagtgtgggcaaggcttttcccagcaagaaaacggtcactgcatggacaccaatgaatgcatccagttcccatttgtctgccctcgcgacaagccagtgtgtgttaacacttacgggtcctataggtgccgcacgaataaaaagtgttcaagaggatacgagccgaatgaggacggaactgcatgtgtagggacacttggtcaatcgcccgggccacgccccactactccgaccgccgcggccgcaacagctgccgctgccgctgccgcaggcgccgccactgccgcccccgtgctggttgatggagacctgaatctcggctcggtcgttaaggagtcctgcgagccctcctgttag

SEQ ID NO: 196412 - RNA, 1986 nt, Artificial Sequence
  derived and/or modified sequence
auggcuccuuccgccgaccccggcaugagccgaaugcucccguuccugcugcuucucugguuucuucccauuacggagggcucucagcgcgccgaaccaauguuuacugcagucacuaacucaguccugccaccagacuaugauucuaaccccacacaacugaacuauggcguggcugugacagauguggaucacgacggggauuucgagauugucguugcuggguacaacggucccaaucuuguucucaaauacgaccgcgcccagaagcgucuagugaacaucgcaguggaugagaggucuaguccuuacuaugcucuaagagaccgccaggggaaugcaauugguguuaccgcaugcgacauagauggcgacggaagggaggaaaucuacuuucuuaauacaaacaaugccuuuagugggguugccacauacaccgauaaacuguucaaauuuagaaauaauaggugggaagauauucuaagcgaugagguaaauguugcccggggcguggcgucacuauuugccggcaggucuguggccugcgucgacagaaaaggcucgggccgguacagcaucuauaucgcuaauuacgccuauggcaauguaggaccagacgcccugauugaaauggauccugaagccuccgaccugucacggggaauuuuagcccugcgcgauguggcggccgaggcuggugucucuaaguauacggggggcagggguguaucuguugggccuauucugucaucaagcgcuucggauauuuucugugacaacgaaaacggaccgaauuuucucuuucacaaucguggugauggcaccuucguagaugccgccgccuccgccggcguugacgacccccaccagcauggcaggggaguggcacuugcggacuuuaaucgugacggcaagguggauauugucuacggcaauuggaacgguccucaucgccuguaccuccagaugagcacccaugggaaagugcgcuucagggacaucgcaagucccaaauucagcaugccuagcccugugaggacugugaucacagcugacuuugacaacgaccaagaguuagaaauuuuuuucaauaacaucgcauauaggagcucgagcgcaaaccgguuauuccgugugauccgccgggaacacggggacccccuaaucgaggaacuuaaucccggagaugcucuggagcccgaagggcgaggaacggguggugugguaaccgacuucgauggcgaugggaugcuggacuuaauccugucccauggagagaguauggcccagccccucuccgucuuccgcggcaaccagggcuuuaacaacaacuggcuccggguugucccuagaacgcgguucggugcguuugcucgcggggccaagguugugcuguacacuaaaaagucaggggcccaccuccguauaauugauggcgggucaggcuaucugugcgagauggagcccgucgcacauuucggcuuagggaaggacgaagccaguucaguugaggucacauggccugauggcaaaaugguuaguagaaauguugcgaguggggaaaugaauagcguucuggaaauccuguacccgcgagacgaagacacucugcaagaccccgccccucucgagugcggccaaggguucucucagcaggaaaacggacacugcauggacacuaacgaaugcauucaguucccuuuuguaugcccgcgagauaaaccuguuugcguuaauaccuacggauccuacagauguagaacuaacaagaagugcucgagagguuacgaacccaaugaagacgguaccgcguguguaggaacccucggacagucaccagguccccggcccacuacccccacugcugccgccgccacugccgccgcugcugccgccgccggagccgcgacugcugccccuguguugguggacggagacuuaaaucuuggaagugugguuaaagaaagcugcgagccaaguugcuag

SEQ ID NO: 196413 - RNA, 1986 nt, Artificial Sequence
  derived and/or modified sequence
auggcucccuccgccgacccugggaugucaagaaugcugccauuccugcuguugcucugguucuuacccauuaccgaggguucccaaagggccgaaccuauguuuacagcgguuaccaauagugugcuuccuccugacuacgacucuaacccuacccagcuaaauuacggaguugccguuaccgacguagaccacgacggagauuuugaaaucgugguggcuggauacaauggacccaaucucguucugaaauaugaccgcgcccagaagagguuaguuaauaucgcgguugaugaaagaucuuccccuuacuacgcacuccgggaccgucaggggaaugccauuggagugaccgcaugcgauaucgauggagacggaagggaggagaucuauuuucucaauacuaauaaugcauuuucaggcgucgcaacuuauaccgacaaacuauucaaguuccgaaacaauagaugggaagacauucugucugacgaggugaacguggcacgagggguugcuagccucuuugcuggaagauccguggcuugcguggacagaaaggggagcgguagguauucuauuuacauugcaaauuacgcguacggaaacguaggacccgaugcacucaucgaaauggacccagaagccucagaccuaucacgcgguauucuggcguuaagagacguggcugccgaagccggugugagcaaguauacgggaggccggggcguuucuguggggcccauucucagcuccuccgccuccgauauuuucugcgauaacgagaacgggccaaauuuccuauuucacaacagaggggacggaacauucgucgaugcagccgccagcgcugggguugacgauccucaucagcacggaaggggugucgcgcucgccgacuucaacagagacgguaagguagacauugucuaugggaacuggaaugguccgcauagauuguauuuacaaauguccacccaugggaaaguccgcuuccgggacaucgccagcccuaaauucagcaugcccuccccuguucgaacuguaauaacggccgauuucgauaaugaucaagaacucgagauuuucuuuaacaauaucgcauaucgaucuucuucugcuaaucgacuuuuucgcgugauucggcgcgaacauggcgacccucugaucgaagagcugaauccaggcgacgcacuggaacccgagggcagaggaacuggaggcguggucaccgauuuugauggcgauggcaugcuggaccuuauauugucucauggcgagagcauggcucagccauuauccguuuuuagaggcaaccaggguuuuaacaacaacugguuacgagucguuccuagaacgagauucggggcuuucgccagaggugccaaggucguucuguacaccaaaaagagcggggcccaucugagaaucauugacggcggcagcggcuacuuaugcgagauggaacccguggcucacuucggcuuagggaaggaugaggcuuccagcgucgaggugaccuggccagacggaaagauggucagccggaacguggcauccggggaaaugaacagcguacucgaaauccuguauccaagggaugaggacacgcuccaagaccccgcuccccuugaauguggacagggcuuuucucagcaagagaacggacacuguauggauacuaaugaaugcauucaauucccuuuuguuugcccgagagacaagccugugugugugaauacuuauggaucuuauagguguaggacuaacaaaaagugcuccagaggguaugagccaaacgaagacgguaccgcguguguaggaacccucggacagucaccagguccccggcccacuacccccacugcugccgccgccacugccgccgcugcugccgccgccggagccgcgacugcugccccuguguugguggacggagacuuaaaucuuggaagugugguuaaagaaagcugcgagccaaguugcuag

SEQ ID NO: 196414 - protein, 1012 aa, Artificial Sequence
  derived and/or modified sequence
MRWGLRPRGPGAAALATARSLWGTPRLPCSPGWQGATKRLLVRSVSGASNHQPNSNSGRYRDTVLLPQTSFPMKLLGRQQPDTELEIQQKCGFSELYSWQRERKVKTEFCLHDGPPYANGDPHVGHALNKILKDIANRFHMMNGSKIHFVPGWDCHGLPIEIKVLSELGREAQNLSAMEIRKKARSFAKAAIEKQKSAFIRWGIMADWNNCYYTFDGKYEAKQLRTFYQMYDKGLVYRSYKPVFWSPSSRTALAEAELEYNPEHVSRSIYVKFPLLKPSPKLASLIDGSSPVSILVWTTQPWTIPANEAVCYMPESKYAVVKCSKSGDLYVLAADKVASVASTLETTFETISTLSGVDLENGTCSHPLIPDKASPLLPANHVTMAKGTGLVHTAPAHGMEDYGVASQHNLPMDCLVDEDGVFTDVAGPELQNKAVLEEGTDVVIKMLQTAKNLLKEEKLVHSYPYDWRTKKPVVIRASKQWFINITDIKTAAKELLKKVKFIPGSALNGMVEMMDRRPYWCISRQRVWGVPIPVFHHKTKDEYLINSQTTEHIVKLVEQHGSDIWWTLPPEQLLPKEVLSEVGGPDALEYVPGQDILDIWFDSGTSWSYVLPGPDQRADLYLEGKDQLGGWFQSSLLTSVAARKRAPYKTVIVHGFTLGEKGEKMSKSLGNVIHPDVVVNGGQDQSKEPPYGADVLRWWVADSNVFTEVAIGPSVLNAARDDISKLRNTLRFLLGNVADFNPETDSIPVNDMYVIDQYMLHLLQDLANKITELYKQYDFGKVVRLLRTFYTRELSNFYFSIIKDRLYCEKENDPKRRSCQTALVEILDVIVRSFAPILPHLAEEVFQHIPYIKEPKSVFRTGWISTSSIWKKPGLEEAVESACAMRDSFLGSIPGKNAAEYKVITVIEPGLLFEIIEMLQSEETSSTSQLNELMMASESTLLAQEPREMTADVIELKGKFLINLEGGDIREESSYKVIVMPTTKEKCPRCWKYTAESSDTLCPRCAEVVSGK

SEQ ID NO: 196415 - protein, 940 aa, Artificial Sequence
  derived and/or modified sequence
MKLLGRQQPDTELEIQQKCGFSELYSWQRERKVKTEFCLHDGPPYANGDPHVGHALNKILKDIANRFHMMNGSKIHFVPGWDCHGLPIEIKVLSELGREAQNLSAMEIRKKARSFAKAAIEKQKSAFIRWGIMADWNNCYYTFDGKYEAKQLRTFYQMYDKGLVYRSYKPVFWSPSSRTALAEAELEYNPEHVSRSIYVKFPLLKPSPKLASLIDGSSPVSILVWTTQPWTIPANEAVCYMPESKYAVVKCSKSGDLYVLAADKVASVASTLETTFETISTLSGVDLENGTCSHPLIPDKASPLLPANHVTMAKGTGLVHTAPAHGMEDYGVASQHNLPMDCLVDEDGVFTDVAGPELQNKAVLEEGTDVVIKMLQTAKNLLKEEKLVHSYPYDWRTKKPVVIRASKQWFINITDIKTAAKELLKKVKFIPGSALNGMVEMMDRRPYWCISRQRVWGVPIPVFHHKTKDEYLINSQTTEHIVKLVEQHGSDIWWTLPPEQLLPKEVLSEVGGPDALEYVPGQDILDIWFDSGTSWSYVLPGPDQRADLYLEGKDQLGGWFQSSLLTSVAARKRAPYKTVIVHGFTLGEKGEKMSKSLGNVIHPDVVVNGGQDQSKEPPYGADVLRWWVADSNVFTEVAIGPSVLNAARDDISKLRNTLRFLLGNVADFNPETDSIPVNDMYVIDQYMLHLLQDLANKITELYKQYDFGKVVRLLRTFYTRELSNFYFSIIKDRLYCEKENDPKRRSCQTALVEILDVIVRSFAPILPHLAEEVFQHIPYIKEPKSVFRTGWISTSSIWKKPGLEEAVESACAMRDSFLGSIPGKNAAEYKVITVIEPGLLFEIIEMLQSEETSSTSQLNELMMASESTLLAQEPREMTADVIELKGKFLINLEGGDIREESSYKVIVMPTTKEKCPRCWKYTAESSDTLCPRCAEVVSGK

SEQ ID NO: 196416 - DNA, 3039 bp, Artificial Sequence
  derived and/or modified sequence
atgcgatggggattacggccacgcggaccaggggccgctgctctggctacagccaggtccctttggggaacaccaaggctaccatgcagccccggttggcagggggctacgaagaggctgctggtcagaagcgttagcggtgcaagtaatcaccagcccaacagcaactcaggacgctaccgcgacaccgtgctgctgcctcaaacttctttccctatgaagcttctcggccggcagcagcccgacacagaactcgagattcagcaaaagtgtggcttctctgaattatattcttggcagcgggaaagaaaggtaaaaaccgaattctgcttgcatgatgggccaccctacgccaacggtgacccacatgtgggtcacgcattgaacaaaatcttgaaagatatagccaaccgttttcacatgatgaacgggtctaaaatccattttgtgccagggtgggactgccacggactgcccatcgaaatcaaagtgttgagtgagctgggcagagaggcccagaatctctcagcaatggaaatccgaaagaaggccagatcctttgctaaggccgctattgaaaaacagaaatctgccttcatcagatggggcatcatggccgattggaataattgctactatacattcgacggtaaatacgaggctaagcagctgcgcactttttaccaaatgtacgacaaaggcctcgtttatagatcttataagccggtcttttggagcccttcttctcgtaccgcattggccgaagcagagctggagtataaccccgaacacgtgagtagaagtatatacgtcaaattcccgctgcttaaaccttctcccaaacttgccagccttatcgacggatcatcccccgtaagcatactagtgtggactactcagccatggacgatacctgcaaacgaagccgtgtgttatatgcctgagtcaaaatatgcagtggtgaaatgttctaaatctggcgacctatatgttctcgctgctgacaaggtagcgagcgtggcgtcaaccctggagaccacctttgaaaccatctccactctcagtggagttgatttagagaatggcacatgtagtcaccctctcatccccgacaaagcatcacccttgctgccagccaaccatgtcactatggccaaaggcactggactcgtccacacggccccagctcacggcatggaggattatggcgttgcgagccagcacaatctgcctatggactgccttgtagacgaagacggtgtgttcaccgacgttgctggacctgaactccagaacaaggctgtgcttgaggagggcacagacgtagtgatcaaaatgttacaaacggccaagaatctacttaaggaggaaaagttggtgcactcatatccttatgactggaggactaagaagccagttgttattcgtgcaagcaagcaatggtttattaacattaccgacataaagactgcagccaaagaactgctgaaaaaggttaaattcatcccaggtagcgctctaaatggcatggtagaaatgatggatcgccgtccctattggtgcatctcccgacaacgcgtgtggggtgtgccaatcccagtgtttcaccacaaaactaaggacgaatatctgatcaattcacagaccacagaacacatcgtgaaactcgttgagcaacatggtagtgatatctggtggactttgccaccggagcagctgctccccaaggaggttttatccgaagttgggggcccagatgcactggagtacgttcctggccaggacatccttgacatttggttcgactcgggcacaagctggtcctacgtgctgccggggcctgaccagagggccgatctttacctggagggcaaagatcagctgggcgggtggtttcaaagtagcttgttgacctcagtggcggccagaaaaagggcgccatataaaacagtcattgtgcacgggttcactctcggcgagaaaggcgaaaagatgagcaagagcctcggaaatgtgatccacccagacgttgtcgtgaacggcggtcaggatcagtccaaggagcccccatacggggccgacgtcctccggtggtgggtggcagattctaacgtctttactgaggtggccatcgggcccagcgtgttgaatgccgctagagatgacattagtaaactgcggaacacactcaggtttttgctgggaaatgtcgctgactttaatcctgagactgattctattcctgttaacgatatgtatgttattgatcagtacatgctccatctgcttcaggatctggccaacaagatcacagagctctacaagcagtacgatttcggtaaggtggtgagactgctgcgaactttctatacccgggaactgagcaatttctatttctccatcatcaaggataggttgtactgcgaaaaggagaatgatccaaaaaggcgcagctgccagacggctctggtcgaaatcctggacgtgatcgtacggtcattcgccccaattctgccgcacctggctgaagaggtgttccagcacatcccttatatcaaggagcccaaaagcgtatttcgtacagggtggatttccacctcgtccatctggaagaaacctggtttagaagaagcagtagagagtgcatgcgccatgcgggactcttttctggggtcaattcccgggaagaacgccgccgagtacaaagtgatcaccgtgatcgaaccaggtctgctgtttgaaatcattgagatgctccagagcgaggaaactagtagcactagccagctgaacgagctgatgatggcatctgagtctactctactcgcccaggagccaagggaaatgaccgcggacgtgattgagctgaaggggaagttcctcatcaacctggaggggggcgatatccgtgaggaatccagctacaaagtgatagtaatgcctaccaccaaggaaaaatgccccagatgttggaaatacactgccgagtccagcgatactttgtgtcctcggtgtgccgaggtagtgagcggcaaatag

SEQ ID NO: 196417 - DNA, 2823 bp, Artificial Sequence
  derived and/or modified sequence
atgaagctgctcggacgacaacagcccgacaccgagctggaaattcagcagaagtgcggcttttccgagttatattcatggcagagagagcgtaaggtgaaaaccgaattttgcctgcacgatggacctccctatgccaacggggacccgcatgttgggcacgctctgaataagatactcaaagatatagcaaatcgatttcacatgatgaatggatccaagatccacttcgttccaggctgggattgccacgggctgcctattgagatcaaggtcctgtctgagctgggtagggaggcccaaaacctgagcgctatggagattaggaaaaaagcccgatccttcgcaaaggctgctatcgaaaaacagaaatcagcattcatacgttggggaattatggctgactggaacaactgctattacaccttcgatggtaagtacgaggcaaaacagctgcgcaccttctatcaaatgtatgataagggactcgtgtatcgttcatacaagcctgtgttttggtcacctagttcaagaactgcacttgcagaagctgaactcgaatacaaccccgagcatgtgagtcggagcatctatgtgaagtttccactgttaaagcccagtccgaagctggcctccctgattgacggatcctctcccgtgagcatcctggtgtggaccacccagccctggacaattcctgctaatgaagccgtgtgctacatgccggagtccaagtatgcagtcgtcaagtgctcgaaaagtggtgatctgtacgttctcgccgcggacaaggtggcctcggtcgcatcaacgctggagacaaccttcgagactatctcaacactcagtggcgtagatctggagaacggaacgtgctcgcatcccctgataccagacaaagcctccccacttctcccagccaatcatgtgacaatggcaaagggcacgggtctggttcataccgccccagcccatgggatggaagactacggtgttgcttcccaacataatctgcccatggattgtctggtagacgaagacggggttttcaccgatgtcgctgggcccgaactccaaaataaagcagtgctggaggagggcaccgacgttgttataaaaatgttgcaaaccgctaagaacctgctgaaggaagagaagctggtgcacagttacccatacgactggagaacaaaaaaacctgttgtcatcagagcttccaaacaatggtttataaatattaccgacatcaaaacagcggccaaagaactcctcaaaaaggtgaaatttatcccaggctctgccctaaatggcatggtggaaatgatggaccgccgtccctactggtgcatatcccgccaacgtgtttggggcgtcccaatccccgtctttcaccacaaaactaaagatgaataccttatcaacagtcagactacagaacacatagttaagctggtggaacagcatggaagcgatatttggtggactttgcctcccgagcagctgctcccgaaggaagtattgagcgaggttgggggaccagacgctcttgagtacgtgcccggtcaagatatattggacatatggtttgactcaggtacctcttggagctacgttttaccaggacctgatcagcgggctgatctctatctggagggcaaggaccagctgggaggttggttccagagcagtcttctcactagcgtcgcagcccgaaagcgggctccttacaagaccgtgatcgtgcacggctttaccctcggggaaaagggagagaaaatgagcaagagtctcggaaatgtgatacaccctgatgtagtagtcaatggcgggcaggaccagtctaaggagcccccctacggggctgacgtactcagatggtgggttgccgattcaaacgtctttacagaggtggcaatcggccccagtgtgcttaatgcggctcgggatgatatctctaaactacggaataccctgagattcttactaggtaatgtggctgatttcaatcctgaaaccgattcaatccccgtcaatgacatgtatgttatcgaccagtacatgctacatctgttgcaagacctggctaataagataaccgaattgtataagcaatacgactttggaaaggtggttagattactgaggaccttttacactagggaactttccaacttttatttttccatcataaaagacagactgtattgtgagaaagaaaatgatccaaaacgcaggagttgtcaaacagccctggtggaaatcctggacgtgatcgtgcggagcttcgctccgattctgccgcatttggctgaagaagtgtttcagcatataccttacatcaaagagcctaagtcagtttttcgtactggctggatttccacatcttcgatctggaaaaaacctggcttagaagaagccgtcgagagcgcctgcgccatgagggattcctttctcggctcaatcccaggcaagaatgctgctgagtataaggttatcacagtcattgaaccgggtcttcttttcgaaataatcgaaatgcttcaatcagaagagacttcatccacctcccagctgaacgagctgatgatggcctctgaatccacacttcttgcccaagagccccgtgaaatgaccgccgacgtgattgaactgaagggaaagttcctcatcaatctggagggaggagacatcagagaagagtcttcatataaagtgatagtcatgcccacaaccaaggaaaagtgtccacgttgttggaaatatacagcagagtcaagcgataccttgtgcccacgttgcgctgaggttgtgagtggtaaatag

SEQ ID NO: 196418 - DNA, 3542 bp, Artificial Sequence
  derived and/or modified sequence
ggagcgcgtgcgccctcttactcggctccccttggtttcctggggtcctgccccttcaagctggggcgggagcggaggaccccgctctcaggggttgccggaccatgcgttgggggctgcgccctcgcgggccgggcgcggccgccctggccactgcccgaagtttgtgggggacgccccgccttccctgcagcccgggatggcaaggggcgacgaagaggcttctggtgcggtcggtctccggggccagtaaccaccagccgaactcgaatagtggcagataccgggacacggtgctgctgccgcagacgagcttccccatgaagctgctgggccgccagcagccggacacggagctggagatccagcagaaatgtggattttcagaactttattcatggcaaagagaaagaaaagtaaagacagaattttgccttcatgatggacctccttatgcaaacggtgaccctcatgttggacatgctttaaataagattttgaaagacatagccaatcgattccatatgatgaatggctccaaaatacattttgtgcccggctgggattgtcatgggttgcccattgaaataaaagtattatcagaacttggtagagaagctcagaatctttcagctatggaaattagaaagaaagctagatcatttgctaaagcagccattgagaaacagaaatcagcatttattcgttggggaataatggcagattggaataattgctactatacatttgatgggaagtatgaagccaaacagttgagaactttttaccaaatgtatgataagggcttggtttatcgatcttacaaacctgtgttttggtctccgtcatctaggactgcattggctgaagcagaacttgaatataatcctgagcatgtcagtcgttcaatatatgtaaaatttcctctcttaaagccttctccaaaattggcatctcttatagatggttcatctcctgttagtattttggtctggaccacacaaccttggacgattccagccaatgaagctgtttgctatatgcctgaatcaaagtatgctgttgtgaaatgttctaagtctggagacctctacgtactggcggcagataaagtagcatctgttgcttctactttggaaacaacatttgagactatttcaacactttcaggtgtagatttggaaaatggtacttgcagtcatccattaattcctgataaagcctctcctcttttacctgcaaatcatgtgaccatggcaaaaggaacgggattggttcacacagccccagctcatggtatggaagactacggtgtagcgtctcagcacaacctgcccatggattgtctagtggacgaagatggagttttcacagatgttgcaggtcctgaacttcaaaacaaggctgtccttgaagagggaactgatgtggttataaagatgcttcagactgcaaagaatttgttgaaagaggagaaattggtgcatagctatccgtatgactggaggaccaagaaacctgtggttattcgtgccagcaagcagtggtttataaacatcacggatattaagactgcagccaaggaattgttaaaaaaggtgaaatttattcctggatcagcactgaatggcatggttgaaatgatggacaggcggccatattggtgtatatcaaggcaaagagtttggggtgttccaattcctgtgtttcatcataagaccaaggatgaatacttgatcaacagccaaaccactgagcatattgttaaactagtggaacaacacggcagtgatatctggtggactcttccccctgaacaacttcttccaaaagaagtcttatctgaggttggtggccctgatgccttggaatatgtgccaggtcaggatattttggacatctggtttgatagcggaacttcatggtcttatgttcttccaggtcctgaccaaagagcagatttgtacttggaaggaaaagaccagctcgggggttggtttcagtcatccttattaacaagtgtggcagcaaggaagagagcaccttataagacagtgattgttcatggatttacccttggagaaaagggagaaaagatgtccaagtctcttgggaatgtcattcatcctgatgttgtcgttaatggaggacaagatcaaagcaaagagcctccgtatggtgctgatgtccttcgctggtgggtagctgattccaatgtcttcaccgaagttgcaattggcccatccgtgctcaatgctgccagagatgatattagcaagcttaggaatacacttcgctttcttttgggaaatgtggctgatttcaacccagaaacagattccatccctgtaaacgatatgtatgtcatagaccagtacatgctacacttactgcaggatttggcaaacaagattaccgaattatacaaacaatatgattttggaaaagttgttcggctgttacggacgttttataccagagagctctctaacttttatttcagtataatcaaagataggctctattgtgaaaaggaaaatgaccccaaacgacgctcttgtcagactgcattagttgaaattttggatgtaatagttcgttcttttgctcccattcttcctcacctggctgaagaggtgttccagcacataccttatattaaagagcccaagagtgttttccgtactgggtggattagtactagttctatctggaaaaagcccgggttggaagaagctgtggagagtgcgtgtgcaatgcgagactcatttcttggaagcatccctggcaaaaatgcagctgagtacaaggttatcactgtgatagaacctggactgctttttgagataatagagatgctgcagtctgaagagacttccagcacctctcagttgaatgaattaatgatggcttctgagtcaactttactggctcaggaaccacgagagatgactgcagatgtaatcgagcttaaagggaaattcctcatcaacttagaaggtggtgatattcgtgaagagtcttcctataaagtaattgtcatgccgactacgaaagaaaaatgcccccgttgttggaagtatacagcggagtcttcagatacactgtgtcctcgatgtgcagaagttgtcagtggaaaatagtattaacagctcactcgagcaagaaccctcctgacagtactggctagaagtttggatggattatttacaatataggaaagaaagccaagatttaggtaatgagtggatgagtaaatggtggaggatgggagtcaaaatcagaattatagaagaagtatttcctgtaactatagaaagaattatgtatatatacatgcagaaatatatatgtgtgtgtgtatctgtggatggatatatgtatatctcttcctatatatatccatagtggacttattcagaacatagatatgtattcagcttgtcttcaaatacggccaagcagaaaatgttttatattttataaatcatcttttgactctgtatttaaattctatgatactgaaaataaaggcattctgg

SEQ ID NO: 196419 - DNA, 3557 bp, Artificial Sequence
  derived and/or modified sequence
cttccgctcccggagcgcgtgcgccctcttactcggctccccttggtttcctggggtcctgccccttcaagctggggcgggagcggaggaccccgctctcaggggttgccggaccatgcgttgggggctgcgccctcgcgggccgggcgcggccgccctggccactgcccgaagtttgtgggggacgccccgccttccctgcagcccgggatggcaaggggcgacgaagaggcttctggtgcggtcggtctccggggccagtaaccaccagccgaactcgaatagtggcagataccgggacacggtgctgctgccgcagacgagcttccccatgaagctgctgggccgccagcagccggacacggagctggagatccagcagaaatgtggattttcagaactttattcatggcaaagagaaagaaaagtaaagacagaattttgccttcatgatggacctccttatgcaaacggtgaccctcatgttggacatgctttaaataagattttgaaagacatagccaatcgattccatatgatgaatggctccaaaatacattttgtgcccggctgggattgtcatgggttgcccattgaaataaaagtattatcagaacttggtagagaagctcagaatctttcagctatggaaattagaaagaaagctagatcatttgctaaagcagccattgagaaacagaaatcagcatttattcgttggggaataatggcagattggaataattgctactatacatttgatgggaagtatgaagccaaacagttgagaactttttaccaaatgtatgataagggcttggtttatcgatcttacaaacctgtgttttggtctccgtcatctaggactgcattggctgaagcagaacttgaatataatcctgagcatgtcagtcgttcaatatatgtaaaatttcctctcttaaagccttctccaaaattggcatctcttatagatggttcatctcctgttagtattttggtctggaccacacaaccttggacgattccagccaatgaagctgtttgctatatgcctgaatcaaagtatgctgttgtgaaatgttctaagtctggagacctctacgtactggcggcagataaagtagcatctgttgcttctactttggaaacaacatttgagactatttcaacactttcaggtgtagatttggaaaatggtacttgcagtcatccattaattcctgataaagcctctcctcttttacctgcaaatcatgtgaccatggcaaaaggaacgggattggttcacacagccccagctcatggtatggaagactacggtgtagcgtctcagcacaacctgcccatggattgtctagtggacgaagatggagttttcacagatgttgcaggtcctgaacttcaaaacaaggctgtccttgaagagggaactgatgtggttataaagatgcttcagactgcaaagaatttgttgaaagaggagaaattggtgcatagctatccgtatgactggaggaccaagaaacctgtggttattcgtgccagcaagcagtggtttataaacatcacggatattaagactgcagccaaggaattgttaaaaaaggtgaaatttattcctggatcagcactgaatggcatggttgaaatgatggacaggcggccatattggtgtatatcaaggcaaagagtttggggtgttccaattcctgtgtttcatcataagaccaaggatgaatacttgatcaacagccaaaccactgagcatattgttaaactagtggaacaacacggcagtgatatctggtggactcttccccctgaacaacttcttccaaaagaagtcttatctgaggttggtggccctgatgccttggaatatgtgccaggtcaggatattttggacatctggtttgatagcggaacttcatggtcttatgttcttccaggtcctgaccaaagagcagatttgtacttggaaggaaaagaccagctcgggggttggtttcagtcatccttattaacaagtgtggcagcaaggaagagagcaccttataagacagtgattgttcatggatttacccttggagaaaagggagaaaagatgtccaagtctcttgggaatgtcattcatcctgatgttgtcgttaatggaggacaagatcaaagcaaagagcctccgtatggtgctgatgtccttcgctggtgggtagctgattccaatgtcttcaccgaagttgcaattggcccatccgtgctcaatgctgccagagatgatattagcaagcttaggaatacacttcgctttcttttgggaaatgtggctgatttcaacccagaaacagattccatccctgtaaacgatatgtatgtcatagaccagtacatgctacacttactgcaggatttggcaaacaagattaccgaattatacaaacaatatgattttggaaaagttgttcggctgttacggacgttttataccagagagctctctaacttttatttcagtataatcaaagataggctctattgtgaaaaggaaaatgaccccaaacgacgctcttgtcagactgcattagttgaaattttggatgtaatagttcgttcttttgctcccattcttcctcacctggctgaagaggtgttccagcacataccttatattaaagagcccaagagtgttttccgtactgggtggattagtactagttctatctggaaaaagcccgggttggaagaagctgtggagagtgcgtgtgcaatgcgagactcatttcttggaagcatccctggcaaaaatgcagctgagtacaaggttatcactgtgatagaacctggactgctttttgagataatagagatgctgcagtctgaagagacttccagcacctctcagttgaatgaattaatgatggcttctgagtcaactttactggctcaggaaccacgagagatgactgcagatgtaatcgagcttaaagggaaattcctcatcaacttagaaggtggtgatattcgtgaagagtcttcctataaagtaattgtcatgccgactacgaaagaaaaatgcccccgttgttggaagtatacagcggagtcttcagatacactgtgtcctcgatgtgcagaagttgtcagtggaaaatagtattaacagctcactcgagcaagaaccctcctgacagtactggctagaagtttggatggattatttacaatataggaaagaaagccaagatttaggtaatgagtggatgagtaaatggtggaggatgggagtcaaaatcagaattatagaagaagtatttcctgtaactatagaaagaattatgtatatatacatgcagaaatatatatgtgtgtgtgtatctgtggatggatatatgtatatctcttcctatatatatccatagtggacttattcagaacatagatatgtattcagcttgtcttcaaatacggccaagcagaaaatgttttatattttataaatcatcttttgactctgtatttaaattctatgatactgaaaataaaggcattctggaaaa

SEQ ID NO: 196420 - DNA, 3039 bp, Artificial Sequence
  derived and/or modified sequence
atgcgctggggcctgcggccccggggccctggagctgctgccctggccacagcccggagcctgtggggcaccccccggctgccctgcagccctggctggcagggcgccaccaagaggctgctggtgcgctctgtgtctggggccagcaaccaccagcccaacagcaacagcggccgctacagagacacagtgctgctgccccagaccagcttccccatgaagctgctgggccggcagcagcctgacacagagctggagatccagcagaagtgtggcttcagcgagctgtacagctggcagcgggagaggaaggtgaagacagagttctgcctgcatgatggccccccctatgccaatggagacccccacgtgggccacgccctgaacaagatcctgaaggacatcgccaaccgcttccacatgatgaatggcagcaagatccactttgtgcccggctgggactgccacggcctgcccatcgagatcaaggtgctgtctgagctgggccgggaggcccagaacctgagcgccatggagatcaggaagaaggcccggagctttgccaaggccgccatcgagaagcagaagagcgccttcatccgctggggcatcatggctgactggaacaactgctactacacctttgatggcaagtatgaggccaagcagctgcggaccttctaccagatgtatgacaagggcctggtgtaccgcagctacaagcctgtgttctggagccccagcagcaggacagccctggccgaggccgagctggagtacaaccctgagcacgtgagccgcagcatctacgtgaagttccccctgctgaagcccagccccaagctggccagcctgattgatggcagcagccctgtgtccatcctggtgtggaccacccagccctggaccatcccagccaatgaagctgtgtgctacatgcctgagagcaaatatgctgtggtgaagtgcagcaagagcggggacctgtatgtgctggccgctgacaaggtggcctctgtggccagcaccctggagaccacctttgagaccatcagcaccctgtctggagtggacctggagaatggcacctgcagccaccccctcatcccagacaaggccagccccctgctgcctgccaaccacgtgaccatggccaagggcaccggcctggtgcacacagccccagcccacggcatggaggactatggagtggccagccagcacaacctgcccatggactgcctggtggatgaagatggagtcttcacagatgtggccggccctgagctgcagaacaaggctgtgctggaggagggcacagatgtggtgatcaagatgctgcagacagccaagaacctgctgaaggaggagaagctggtgcacagctacccctatgactggaggaccaagaagcctgtggtgatccgggccagcaagcagtggttcatcaacatcacagacatcaagacagctgccaaggagctgctgaagaaggtgaagttcatccctggcagcgccctgaatggcatggtggagatgatggaccggcggccctactggtgcatcagccggcagagggtgtggggcgtgcccatccctgtgttccaccacaagaccaaggatgagtacctgatcaacagccagaccacagagcacatcgtgaagctggtggagcagcacggcagtgacatctggtggaccctgcccccagagcagctgctgcccaaggaggtgctgtctgaggtgggcggcccagatgccctggagtatgtgcccggccaggacatcctggacatctggtttgattctggcacctcctggagctatgtgctgcccggccctgaccagagagctgacctgtacctggagggcaaggaccagctgggcggctggttccagagcagcctgctgacctctgtggccgccaggaagagggccccctacaagacagtcatcgtgcacggcttcaccctgggggagaagggggagaagatgagcaagagcctgggcaatgtcatccacccagatgtggtggtgaatggaggccaggaccagagcaaggagcccccctatggagcagatgtgctgcgctggtgggtggccgacagcaatgtgttcacagaggtggccatcggccccagcgtgctgaatgctgccagagatgacatcagcaagctgaggaacaccctgcgcttcctgctgggcaatgtggccgacttcaaccctgagacagacagcatccctgtgaatgacatgtatgtgattgaccagtacatgctgcacctgctgcaggacctggccaacaagatcacagagctgtacaagcagtatgactttgggaaggtggtgcggctgctgcggaccttctacacccgggagctgagcaacttctacttcagcatcatcaaggaccggctgtactgtgagaaggaaaatgaccccaagaggaggagctgccagacagccctggtggagatcctggatgtgattgtgcgcagctttgcccccatcctgccccacctggccgaggaggtgttccagcacatcccctacatcaaggagcccaagtctgtgttcagaacaggctggatcagcaccagcagcatctggaagaagccaggcctggaggaggccgtggagagcgcctgtgccatgagggacagcttcctgggcagcatccctgggaagaatgctgctgagtacaaggtgatcaccgtgattgagcccggcctgctgtttgagatcatcgagatgctgcagagcgaggagaccagcagcaccagccagctgaatgagctgatgatggccagcgagagcaccctgctggcccaggagccccgggagatgacagcagatgtgattgagctgaagggcaagttcctgatcaacctggagggcggggacatccgggaggagagcagctacaaggtgattgtgatgcccaccaccaaggagaagtgcccccgctgctggaagtacacagctgagagcagtgacaccctgtgcccccgctgtgccgaggtggtgtctgggaagtag

SEQ ID NO: 196421 - DNA, 2823 bp, Artificial Sequence
  derived and/or modified sequence
atgaagctgctgggccggcagcagcctgacacagagctggagatccagcagaagtgtggcttcagcgagctgtacagctggcagcgggagaggaaggtgaagacagagttctgcctgcatgatggccccccctatgccaatggagacccccacgtgggccacgccctgaacaagatcctgaaggacatcgccaaccgcttccacatgatgaatggcagcaagatccactttgtgcccggctgggactgccacggcctgcccatcgagatcaaggtgctgtctgagctgggccgggaggcccagaacctgagcgccatggagatcaggaagaaggcccggagctttgccaaggccgccatcgagaagcagaagagcgccttcatccgctggggcatcatggctgactggaacaactgctactacacctttgatggcaagtatgaggccaagcagctgcggaccttctaccagatgtatgacaagggcctggtgtaccgcagctacaagcctgtgttctggagccccagcagcaggacagccctggccgaggccgagctggagtacaaccctgagcacgtgagccgcagcatctacgtgaagttccccctgctgaagcccagccccaagctggccagcctgattgatggcagcagccctgtgtccatcctggtgtggaccacccagccctggaccatcccagccaatgaagctgtgtgctacatgcctgagagcaaatatgctgtggtgaagtgcagcaagagcggggacctgtatgtgctggccgctgacaaggtggcctctgtggccagcaccctggagaccacctttgagaccatcagcaccctgtctggagtggacctggagaatggcacctgcagccaccccctcatcccagacaaggccagccccctgctgcctgccaaccacgtgaccatggccaagggcaccggcctggtgcacacagccccagcccacggcatggaggactatggagtggccagccagcacaacctgcccatggactgcctggtggatgaagatggagtcttcacagatgtggccggccctgagctgcagaacaaggctgtgctggaggagggcacagatgtggtgatcaagatgctgcagacagccaagaacctgctgaaggaggagaagctggtgcacagctacccctatgactggaggaccaagaagcctgtggtgatccgggccagcaagcagtggttcatcaacatcacagacatcaagacagctgccaaggagctgctgaagaaggtgaagttcatccctggcagcgccctgaatggcatggtggagatgatggaccggcggccctactggtgcatcagccggcagagggtgtggggcgtgcccatccctgtgttccaccacaagaccaaggatgagtacctgatcaacagccagaccacagagcacatcgtgaagctggtggagcagcacggcagtgacatctggtggaccctgcccccagagcagctgctgcccaaggaggtgctgtctgaggtgggcggcccagatgccctggagtatgtgcccggccaggacatcctggacatctggtttgattctggcacctcctggagctatgtgctgcccggccctgaccagagagctgacctgtacctggagggcaaggaccagctgggcggctggttccagagcagcctgctgacctctgtggccgccaggaagagggccccctacaagacagtcatcgtgcacggcttcaccctgggggagaagggggagaagatgagcaagagcctgggcaatgtcatccacccagatgtggtggtgaatggaggccaggaccagagcaaggagcccccctatggagcagatgtgctgcgctggtgggtggccgacagcaatgtgttcacagaggtggccatcggccccagcgtgctgaatgctgccagagatgacatcagcaagctgaggaacaccctgcgcttcctgctgggcaatgtggccgacttcaaccctgagacagacagcatccctgtgaatgacatgtatgtgattgaccagtacatgctgcacctgctgcaggacctggccaacaagatcacagagctgtacaagcagtatgactttgggaaggtggtgcggctgctgcggaccttctacacccgggagctgagcaacttctacttcagcatcatcaaggaccggctgtactgtgagaaggaaaatgaccccaagaggaggagctgccagacagccctggtggagatcctggatgtgattgtgcgcagctttgcccccatcctgccccacctggccgaggaggtgttccagcacatcccctacatcaaggagcccaagtctgtgttcagaacaggctggatcagcaccagcagcatctggaagaagccaggcctggaggaggccgtggagagcgcctgtgccatgagggacagcttcctgggcagcatccctgggaagaatgctgctgagtacaaggtgatcaccgtgattgagcccggcctgctgtttgagatcatcgagatgctgcagagcgaggagaccagcagcaccagccagctgaatgagctgatgatggccagcgagagcaccctgctggcccaggagccccgggagatgacagcagatgtgattgagctgaagggcaagttcctgatcaacctggagggcggggacatccgggaggagagcagctacaaggtgattgtgatgcccaccaccaaggagaagtgcccccgctgctggaagtacacagctgagagcagtgacaccctgtgcccccgctgtgccgaggtggtgtctgggaagtag

SEQ ID NO: 196422 - DNA, 3039 bp, Artificial Sequence
  derived and/or modified sequence
atgcggtggggcctgcggccccggggccccggcgccgccgccctggccactgcccgctccctttggggcacgccacgactgccttgcagtcctgggtggcagggcgctacaaagagactgctggttcggagcgttagcggcgcctcgaatcatcagcccaactccaattccggaagataccgcgatacagtgctgcttccacagacctcttttccaatgaagttgttaggacgccaacagccagataccgaactggagatccagcaaaagtgtggcttcagcgagctgtactcctggcagcgtgaaagaaaagtgaagacagagttctgtttgcacgacggtcccccctatgccaatggtgaccctcacgttggccacgcactgaacaagattctcaaggacatagccaacagattccacatgatgaacggcagcaaaatccacttcgttccaggctgggactgccacggcctgccaatcgagattaaagtcctcagcgaactcggccgcgaggctcagaatctgtctgccatggaaatccggaaaaaggcacgtagctttgcaaaggccgccatcgagaaacagaagagcgcgtttataagatggggcatcatggcagactggaataactgttactacaccttcgacggtaagtacgaagccaagcagctccgcacattttatcaaatgtacgataaaggtctggtatacagatcgtataagcctgtgttctggtctccatcctctcgcacagcccttgctgaggctgaactagaatacaatcctgagcacgtaagccggtctatatatgtgaagtttccattgcttaagccatctccaaaactggcgtcactgatcgacggtagctcccccgtgagcatattagtttggaccacccagccttggactattcccgcgaatgaagcagtgtgctacatgcccgagtccaagtacgccgtcgtgaaatgctccaagtcaggggacctttatgtcctggccgccgataaagtcgccagtgtagcttccaccctggaaaccacctttgagacaattagtacccttagtggcgtggacttggaaaacggaacctgttctcatccacttatccctgacaaagcgtcgccactgctgcctgccaatcatgtaaccatggctaagggtacaggtctggtccacacagccccagcccacgggatggaggactacggcgtggccagtcagcataacctacccatggattgcctggtggatgaggacggagtgttcactgatgtcgccgggcccgaactgcagaataaggccgtcctggaggagggcacagacgtggtcattaagatgctgcagaccgctaaaaacctgctcaaggaagaaaaactggtccatagctatccgtatgattggaggaccaaaaaaccagtggtgatcagggcatcaaagcagtggtttataaacatcacggacatcaaaacagctgccaaggagttgctaaagaaggtcaagttcataccggggagtgccttgaatggtatggtcgagatgatggatcgccggccctattggtgcatcagccgccagcgcgtgtggggagtgcccatccccgtttttcatcacaagacaaaggatgaatatctgataaacagccaaactaccgagcacatagtgaagttggtggagcagcacggctctgacatttggtggactctcccacctgaacagctgctccctaaagaagtgctgagtgaggtaggcggtcctgatgccctggagtatgttccggggcaagacattctggatatttggtttgattccgggacatcctggtcttatgtgctcccaggcccggaccagcgggcagatctgtacttagagggcaaggaccaacttggtgggtggtttcagagctcattgctgacgtctgtagctgcacgaaagagagctccctacaaaaccgtcatcgtccatggtttcacactgggagagaagggagaaaagatgagtaaatccctcggaaatgtgatccacccggacgtggtcgtgaacgggggccaggatcaatcaaaagagccaccctacggcgctgatgtgcttcgttggtgggtggcggattccaacgtctttactgaggtcgcaattggccccagcgtcttaaacgccgctcgggatgacatatctaagctgcgtaacacactcaggtttttgttgggaaatgttgcagacttcaacccagaaacagacagcatcccagtgaatgatatgtacgtgatagatcagtatatgctccatctcctgcaggacttagctaacaagataactgagctgtacaaacaatacgattttgggaaagtagtgcgacttttgcgcacgttttatacccgggaacttagtaacttttatttttccatcattaaagacaggctgtactgtgaaaaggagaatgatcctaaaagaagatcttgtcagactgccctagtggagattctagatgtgatcgtgaggagctttgcccccattttaccccacctcgcggaagaagtctttcaacatatcccgtatattaaggaaccgaagtctgtgtttaggaccggctggatatcaacgtcttccatatggaagaaacccggcctggaagaagccgtcgagtctgcctgcgcgatgagggactctttcctcggatcaattcctggcaagaacgccgccgaatacaaggtcattaccgtgattgaacctggcctgcttttcgagatcatcgaaatgctgcaatcagaggagacaagctccacttcccagctcaacgaattgatgatggcctccgagagcaccttactcgcacaggaaccccgggaaatgactgcagatgtcatcgaactcaagggtaaattccttatcaatctggaggggggtgacatcagagaagagagttcatataaggtgatcgtgatgcccaccaccaaggaaaagtgccccaggtgctggaaatacaccgccgagtcatctgataccctgtgtccacgttgcgccgaagtggtctccggtaaatag

SEQ ID NO: 196423 - DNA, 2823 bp, Artificial Sequence
  derived and/or modified sequence
atgaagctgctgggccggcagcagcccgacaccgagctggagatccagcagaaatgcggattctcggagctgtattcatggcagagggaacgtaaggtgaagacagaattctgtctacatgatggccctccatatgctaacggagatccacatgtggggcacgcattgaataagatccttaaagacattgcaaaccgcttccacatgatgaatgggagcaagatccatttcgttcccggctgggactgtcatggcctacccatcgaaatcaaggtactgtctgaactggggagagaggcccagaatttaagtgctatggagatcagaaagaaggccagatctttcgccaaagctgcaatcgagaagcaaaagagcgcattcatccggtgggggatcatggccgattggaacaattgttactacacttttgatggaaagtacgaggccaagcagctgaggacattctatcagatgtacgataaggggctggtataccggtcctataagcccgttttttggtctccttcatctcggactgccctagccgaagccgagcttgaatataaccccgagcatgtaagtcgttctatctacgtaaaattccctctcttaaagccctcccctaagctggcctcgcttattgacggttccagccctgtgagcatactcgtgtggaccacacagccctggactatcccggcaaacgaagccgtctgttacatgccagaatcaaagtacgctgtagtcaagtgtagcaaatccggtgatctgtatgttctggccgccgataaggtcgccagtgtggccagcactctggagacaacgtttgaaacaatttcaacgcttagcggagtggacttggagaacggcacatgcagtcatcctctgatccctgataaggctagtcctctcttgcccgctaatcatgtcaccatggcgaagggcaccgggcttgtgcacaccgcaccagctcatggaatggaggactatggggtggcgtctcagcataacctgcccatggactgccttgttgatgaggacggggtgttcaccgacgtagctgggcccgaattgcaaaataaagcagtcctggaagaggggaccgacgtagtcattaaaatgttgcaaaccgccaagaacctacttaaggaggagaaactggtgcatagctacccatacgattggagaacgaagaagccagtggttattcgcgcttcgaagcagtggtttattaatattacagacatcaaaactgcagccaaagagctgttaaaaaaagtcaaattcattcctggctctgctctgaatggaatggttgagatgatggacagacggccctactggtgcattagtaggcagcgggtgtggggtgtacctatccctgtgttccaccacaagactaaagacgagtatctgatcaattcccagactaccgaacatatagtaaagttggtggaacagcatggctctgacatttggtggacacttccacctgaacagctcctgcctaaagaggtgctgtctgaagtaggcggacccgatgccctggaatacgtgcctggtcaggatattctcgatatctggtttgacagcggcacgagttggtcttatgttcttcccgggcccgatcagagagccgacctgtacctggagggcaaggatcagttgggcgggtggttccagtcatccttactgaccagcgtagcggcccggaaaagagcgccctataaaactgtgattgtgcacggctttactttgggcgagaagggagagaagatgtcaaaatccctgggaaacgtgattcaccccgacgtcgtggtcaacggcggccaagatcagtccaaggaaccgccatatggcgcagacgtgcttagatggtgggtagctgattctaatgtttttactgaggttgcaatcggtccgtccgtcttgaatgctgccagagacgatattagcaagctgcggaatactcttcggttcctgctcggaaatgtggcagattttaacccagagaccgactctatacccgttaatgatatgtacgtgatagaccagtacatgctccacctcctgcaagatctcgccaacaaaatcacggagctctataagcagtacgatttcggtaaagttgtgcggttattgcgcaccttctatacacgcgagctttccaacttttatttttctattatcaaggatagactgtactgtgagaaagaaaacgaccctaagagacgaagctgtcagacagcacttgtcgagatcctggacgttatagtccggtcatttgctccgatactcccacacctggctgaggaggttttccaacacatcccgtatattaaggaaccaaagagtgttttcagaaccggttggatttcaacttcttctatttggaagaagcctggcttggaggaggcagtagagtctgcatgtgccatgagagacagcttccttggatcaattcctggcaagaacgccgctgaatataaggttatcactgttatcgaacctggactgttattcgagattatcgagatgcttcagagtgaagagacctcctccacgtcacagctgaacgagctgatgatggcctcagaatccacactcttggcccaggaaccccgcgagatgaccgctgacgtgattgagctaaagggaaagttcttaatcaatctggagggaggcgatatccgggaggagtccagttataaggttatcgttatgcctaccaccaaggaaaagtgcccccgctgttggaagtatacagcagagagcagtgacacactttgccccaggtgcgccgaagtagtctctggtaaatag

SEQ ID NO: 196424 - DNA, 3039 bp, Artificial Sequence
  derived and/or modified sequence
atgcgttgggggctgcggccacgcggacctggtgcagccgctctcgccactgcacgttctctgtgggggactcctaggcttccctgcagcccgggatggcaaggtgcaaccaagaggctccttgttcggtcagtgtccggagcatccaaccatcaacctaattccaatagcggtagatatagggataccgtccttttgccgcagacgtctttccccatgaagttgctggggaggcagcaaccagacacagagttggaaattcagcagaagtgcggcttctccgagctgtattcttggcagcgcgagagaaaagttaagactgagttttgtttgcacgacgggccaccatatgcaaatggagacccacacgtcggccacgcccttaacaagattctgaaggatattgcgaacaggtttcatatgatgaatggcagtaagattcattttgttcccggatgggactgccacggattgcccattgagataaaggtgttgtctgagttaggcagagaagcacagaatctgtctgcaatggagatacggaaaaaggcgagatctttcgctaaggctgctattgagaagcagaaatctgcctttatcaggtggggcatcatggcggattggaacaactgttattacacattcgatggaaagtacgaggctaaacaactcaggaccttctatcagatgtacgataaagggctggtttatcgaagctataaacccgtgttttggagtccgtcgtctcgcactgccctggccgaagctgagctggagtacaatccagagcatgtgagccgctccatctatgtgaagttcccgctgcttaagccaagcccgaaactggcatctctgattgacggtagttcccccgtgtctattctagtgtggacaactcaaccgtggactattcccgctaatgaggccgtttgttatatgcccgagagcaaatatgcggttgtcaaatgttcaaagtccggggacctctacgtcctagctgcagacaaggtcgcatcagttgcttccacactggagaccacattcgagaccatcagcactctgagcggcgttgacctggaaaatggcacatgttcccatccactaataccagataaggcttcaccattgctacctgccaaccatgtcaccatggctaagggaactggactcgtccacaccgccccagcacacggcatggaggattatggtgtggcctctcaacataatctacccatggactgcctggtcgacgaagacggcgtcttcaccgatgtcgctggtccagaactccagaacaaggccgtgctcgaggaagggaccgatgttgtgattaagatgctgcagactgctaaaaatctcctgaaggaggagaagcttgtgcatagctatccttacgattggagaacgaaaaaaccagtggttatccgcgcatccaagcagtggttcatcaacataaccgatattaagaccgccgctaaagaactattaaagaaagtgaagttcattcccggatccgcactcaacggtatggtggagatgatggacagaagaccgtattggtgtatttcaaggcaacgggtatggggtgtcccaattccagtcttccaccacaaaacaaaggatgagtacttgattaattctcagacaaccgagcacatagtgaagttggtggagcaacacgggtcggatatctggtggacattgccaccagagcagctcttgcctaaggaggtattaagtgaagtcggcggtccagatgccctggaatatgtgcctgggcaagatatactcgacatctggtttgattcaggaacctcctggagctacgtgctcccaggtcccgaccagcgggctgatctgtatctggaggggaaggatcagctgggcggttggtttcaaagtagcctgcttacatccgttgctgctcggaagcgagcaccttacaaaacagtaatagtacacgggtttactctcggcgagaagggcgaaaaaatgagcaaatccctggggaatgttattcatcccgatgtggtcgttaacggaggccaggatcagagcaaagaacccccttatggtgcagacgtgctcaggtggtgggtggcagactctaacgtgttcacggaggttgcgattggacccagtgttctcaacgctgcaagggatgacatttcgaaactgagaaatacactgcgatttctgctcgggaacgtcgcagatttcaaccctgagacagactccatccctgtcaacgacatgtacgtaatcgaccagtacatgctgcacctcctgcaggacctggctaacaaaatcacagagctgtataagcagtatgatttcggcaaggtcgttaggttgctgagaacgttttacactcgcgagctttctaacttttacttttcaatcattaaggatcgcctgtattgtgaaaaagaaaatgatcctaaaagacgtagctgccagaccgccctggtggagattctggacgtcatcgtgcgctcattcgcaccaatcctgcctcacctggcagaagaggtgttccagcatataccctacatcaaagagccaaagagcgtgttcagaacgggttggatttcaacttcttccatttggaagaagccaggcctcgaagaagccgtggaaagtgcttgcgctatgagagattcgttcctgggttccatacccggtaaaaatgctgcggagtataaagtcattacagtgatagaacctggtctcctcttcgagatcatcgagatgctccagtcagaagagacttcaagtactagtcagctgaacgagcttatgatggcctcagagagcactcttctcgcacaggagccacgtgaaatgacggccgatgttatcgaacttaaggggaaattcctcatcaatctggagggaggagatattcgcgaagaatcttcatataaggtgatcgtgatgccaactacgaaagaaaagtgtccacgctgttggaaatatacagccgagagcagtgacacattgtgccctcggtgtgcggaggtggtttcagggaagtag

SEQ ID NO: 196425 - DNA, 2823 bp, Artificial Sequence
  derived and/or modified sequence
atgaagttacttggtaggcagcagccagacaccgaactggagatccagcagaaatgcggctttagcgaactttatagctggcagagggagcgcaaagtgaagaccgagttttgtctgcacgatggcccaccatacgctaacggggacccacatgtggggcatgctttaaataagatattaaaagacatcgcgaaccgatttcacatgatgaacggctccaagatacacttcgtgcccggatgggattgccacggtctgcctattgagatcaaggtgctcagcgagctcggaagggaagcccagaatttatcggctatggagataaggaaaaaggcaagaagctttgccaaggcggctattgaaaagcaaaagtctgctttcattaggtggggaataatggcggattggaacaattgttactatacttttgacggaaagtacgaggcgaagcagttaagaactttctaccagatgtatgataagggcctggtgtatcgcagttacaagcctgtgttctggtctccatcaagcaggacagctctggctgaggcagaactggagtacaaccctgagcatgtgtcccgtagtatctatgttaagtttcccctgctcaaaccatccccaaagctggctagtctgatcgacggaagtagccctgtgtccattttagtgtggaccacccaaccttggaccatcccagcgaacgaagccgtatgctatatgcctgaaagcaagtatgccgttgttaagtgtagcaaatccggggacctgtacgtccttgctgcagataaagttgcctcagtggctagcactttagaaaccacttttgagacaatcagcactttgagtggcgtagatctggagaatgggacatgcagtcaccccttgatcccggacaaggcctcccctctgctgcccgctaaccacgtgacaatggcgaagggcaccgggttagtccacactgccccagctcatggcatggaggactatggcgtggctagccaacacaacctcccaatggattgcctggtcgatgaagatggtgtttttaccgatgttgcgggacctgaactgcagaacaaagcagttcttgaggaaggcaccgatgtcgtgataaagatgctccagaccgcaaaaaaccttctgaaggaggagaaattggtgcactcctatccctacgactggcgcaccaaaaagcctgtggttattcgggctagcaaacagtggttcatcaacattactgacatcaaaacagccgctaaagaactgctgaagaaggttaagtttatccccggatccgctctcaacggcatggtggaaatgatggatcgcaggccttattggtgcataagtagacagcgagtgtggggtgttcctatccccgtctttcatcataagactaaagacgagtacctgattaactctcaaacaactgagcatattgttaagcttgtagagcagcatggttcagacatatggtggactctccccccagagcaactattacctaaagaagtactgagcgaagtggggggtcctgatgccttagagtatgtaccaggacaggacatcctggacatctggttcgattctggcacgagctggtcgtacgtgctccccggacccgatcagcgcgcagacctctacctggaaggaaaggatcagctcggcggatggtttcagagcagtctcctgaccagcgtggctgctagaaaacgggctccgtacaagaccgttatcgtccacgggttcacgctgggcgagaaaggcgagaagatgagcaaatccctgggtaatgtgatacatcctgacgtagtggtcaacggtggtcaggaccaatctaaggagcctccatacggggcagacgtcttacgctggtgggtcgccgactcaaacgtctttacagaggtcgctataggacccagcgttctgaacgccgctcgcgacgacatctccaaacttaggaatacactccggtttctcctgggcaatgtcgcagactttaaccctgaaactgacagcatacctgtcaacgacatgtatgtgatcgaccagtacatgctgcatctcctgcaagacctggccaataaaatcaccgaactctacaaacagtacgatttcggcaaggtcgtccggctgctgagaaccttctacactagagagttatcaaacttctacttctccataatcaaggacaggttgtattgcgagaaagagaatgatcctaaacggagatcctgccagacggccctggtcgaaattctcgacgtgatagttaggtcgtttgctccaatccttccacacttggcagaggaggtttttcaacacatcccttatataaaagaacctaagagcgtctttaggacaggatggatctccactagtagcatctggaagaagcccggacttgaagaggccgtagagtcagcctgtgcgatgagagacagcttcctggggagcattcctggcaagaatgcagccgagtacaaggtgatcaccgtgatcgagcccggactgctgtttgagatcattgaaatgctccagtctgaagagactagtagtacctcccagttaaacgagctgatgatggcatcagagagcactctgctggcccaggagcctagggaaatgacagcagacgtgatcgagttaaagggtaaattcctcatcaaccttgagggcggtgacatccgcgaagagagctcttacaaggtcatcgtgatgcctactactaaagaaaaatgccctagatgttggaaatacacagccgagagcagcgacaccctgtgtccgcgatgtgcggaggtagtgtccgggaagtag

SEQ ID NO: 196426 - DNA, 3039 bp, Artificial Sequence
  derived and/or modified sequence
atgagatggggcctgagacccagaggccccggcgccgccgccctggccaccgccagaagcctgtggggcacccccagactgccctgcagccccggctggcagggcgccaccaagagactgctggtgagaagcgtgagcggcgccagcaaccaccagcccaacagcaacagcggcagatacagagacaccgtgctgctgccccagaccagcttccccatgaagctgctgggcagacagcagcccgacaccgagctggagatccagcagaagtgcggcttcagcgagctgtacagctggcagagagagagaaaggtgaagaccgagttctgcctgcacgacggccccccctacgccaacggcgacccccacgtgggccacgccctgaacaagatcctgaaggacatcgccaacagattccacatgatgaacggcagcaagatccacttcgtgcccggctgggactgccacggcctgcccatcgagatcaaggtgctgagcgagctgggcagagaggcccagaacctgagcgccatggagatcagaaagaaggccagaagcttcgccaaggccgccatcgagaagcagaagagcgccttcatcagatggggcatcatggccgactggaacaactgctactacaccttcgacggcaagtacgaggccaagcagctgagaaccttctaccagatgtacgacaagggcctggtgtacagaagctacaagcccgtgttctggagccccagcagcagaaccgccctggccgaggccgagctggagtacaaccccgagcacgtgagcagaagcatctacgtgaagttccccctgctgaagcccagccccaagctggccagcctgatcgacggcagcagccccgtgagcatcctggtgtggaccacccagccctggaccatccccgccaacgaggccgtgtgctacatgcccgagagcaagtacgccgtggtgaagtgcagcaagagcggcgacctgtacgtgctggccgccgacaaggtggccagcgtggccagcaccctggagaccaccttcgagaccatcagcaccctgagcggcgtggacctggagaacggcacctgcagccaccccctgatccccgacaaggccagccccctgctgcccgccaaccacgtgaccatggccaagggcaccggcctggtgcacaccgcccccgcccacggcatggaggactacggcgtggccagccagcacaacctgcccatggactgcctggtggacgaggacggcgtgttcaccgacgtggccggccccgagctgcagaacaaggccgtgctggaggagggcaccgacgtggtgatcaagatgctgcagaccgccaagaacctgctgaaggaggagaagctggtgcacagctacccctacgactggagaaccaagaagcccgtggtgatcagagccagcaagcagtggttcatcaacatcaccgacatcaagaccgccgccaaggagctgctgaagaaggtgaagttcatccccggcagcgccctgaacggcatggtggagatgatggacagaagaccctactggtgcatcagcagacagagagtgtggggcgtgcccatccccgtgttccaccacaagaccaaggacgagtacctgatcaacagccagaccaccgagcacatcgtgaagctggtggagcagcacggcagcgacatctggtggaccctgccccccgagcagctgctgcccaaggaggtgctgagcgaggtgggcggccccgacgccctggagtacgtgcccggccaggacatcctggacatctggttcgacagcggcaccagctggagctacgtgctgcccggccccgaccagagagccgacctgtacctggagggcaaggaccagctgggcggctggttccagagcagcctgctgaccagcgtggccgccagaaagagagccccctacaagaccgtgatcgtgcacggcttcaccctgggcgagaagggcgagaagatgagcaagagcctgggcaacgtgatccaccccgacgtggtggtgaacggcggccaggaccagagcaaggagcccccctacggcgccgacgtgctgagatggtgggtggccgacagcaacgtgttcaccgaggtggccatcggccccagcgtgctgaacgccgccagagacgacatcagcaagctgagaaacaccctgagattcctgctgggcaacgtggccgacttcaaccccgagaccgacagcatccccgtgaacgacatgtacgtgatcgaccagtacatgctgcacctgctgcaggacctggccaacaagatcaccgagctgtacaagcagtacgacttcggcaaggtggtgagactgctgagaaccttctacaccagagagctgagcaacttctacttcagcatcatcaaggacagactgtactgcgagaaggagaacgaccccaagagaagaagctgccagaccgccctggtggagatcctggacgtgatcgtgagaagcttcgcccccatcctgccccacctggccgaggaggtgttccagcacatcccctacatcaaggagcccaagagcgtgttcagaaccggctggatcagcaccagcagcatctggaagaagcccggcctggaggaggccgtggagagcgcctgcgccatgagagacagcttcctgggcagcatccccggcaagaacgccgccgagtacaaggtgatcaccgtgatcgagcccggcctgctgttcgagatcatcgagatgctgcagagcgaggagaccagcagcaccagccagctgaacgagctgatgatggccagcgagagcaccctgctggcccaggagcccagagagatgaccgccgacgtgatcgagctgaagggcaagttcctgatcaacctggagggcggcgacatcagagaggagagcagctacaaggtgatcgtgatgcccaccaccaaggagaagtgccccagatgctggaagtacaccgccgagagcagcgacaccctgtgccccagatgcgccgaggtggtgagcggcaagtag

SEQ ID NO: 196427 - DNA, 2823 bp, Artificial Sequence
  derived and/or modified sequence
atgaagctgctgggcagacagcagcccgacaccgagctggagatccagcagaagtgcggcttcagcgagctgtacagctggcagagagagagaaaggtgaagaccgagttctgcctgcacgacggccccccctacgccaacggcgacccccacgtgggccacgccctgaacaagatcctgaaggacatcgccaacagattccacatgatgaacggcagcaagatccacttcgtgcccggctgggactgccacggcctgcccatcgagatcaaggtgctgagcgagctgggcagagaggcccagaacctgagcgccatggagatcagaaagaaggccagaagcttcgccaaggccgccatcgagaagcagaagagcgccttcatcagatggggcatcatggccgactggaacaactgctactacaccttcgacggcaagtacgaggccaagcagctgagaaccttctaccagatgtacgacaagggcctggtgtacagaagctacaagcccgtgttctggagccccagcagcagaaccgccctggccgaggccgagctggagtacaaccccgagcacgtgagcagaagcatctacgtgaagttccccctgctgaagcccagccccaagctggccagcctgatcgacggcagcagccccgtgagcatcctggtgtggaccacccagccctggaccatccccgccaacgaggccgtgtgctacatgcccgagagcaagtacgccgtggtgaagtgcagcaagagcggcgacctgtacgtgctggccgccgacaaggtggccagcgtggccagcaccctggagaccaccttcgagaccatcagcaccctgagcggcgtggacctggagaacggcacctgcagccaccccctgatccccgacaaggccagccccctgctgcccgccaaccacgtgaccatggccaagggcaccggcctggtgcacaccgcccccgcccacggcatggaggactacggcgtggccagccagcacaacctgcccatggactgcctggtggacgaggacggcgtgttcaccgacgtggccggccccgagctgcagaacaaggccgtgctggaggagggcaccgacgtggtgatcaagatgctgcagaccgccaagaacctgctgaaggaggagaagctggtgcacagctacccctacgactggagaaccaagaagcccgtggtgatcagagccagcaagcagtggttcatcaacatcaccgacatcaagaccgccgccaaggagctgctgaagaaggtgaagttcatccccggcagcgccctgaacggcatggtggagatgatggacagaagaccctactggtgcatcagcagacagagagtgtggggcgtgcccatccccgtgttccaccacaagaccaaggacgagtacctgatcaacagccagaccaccgagcacatcgtgaagctggtggagcagcacggcagcgacatctggtggaccctgccccccgagcagctgctgcccaaggaggtgctgagcgaggtgggcggccccgacgccctggagtacgtgcccggccaggacatcctggacatctggttcgacagcggcaccagctggagctacgtgctgcccggccccgaccagagagccgacctgtacctggagggcaaggaccagctgggcggctggttccagagcagcctgctgaccagcgtggccgccagaaagagagccccctacaagaccgtgatcgtgcacggcttcaccctgggcgagaagggcgagaagatgagcaagagcctgggcaacgtgatccaccccgacgtggtggtgaacggcggccaggaccagagcaaggagcccccctacggcgccgacgtgctgagatggtgggtggccgacagcaacgtgttcaccgaggtggccatcggccccagcgtgctgaacgccgccagagacgacatcagcaagctgagaaacaccctgagattcctgctgggcaacgtggccgacttcaaccccgagaccgacagcatccccgtgaacgacatgtacgtgatcgaccagtacatgctgcacctgctgcaggacctggccaacaagatcaccgagctgtacaagcagtacgacttcggcaaggtggtgagactgctgagaaccttctacaccagagagctgagcaacttctacttcagcatcatcaaggacagactgtactgcgagaaggagaacgaccccaagagaagaagctgccagaccgccctggtggagatcctggacgtgatcgtgagaagcttcgcccccatcctgccccacctggccgaggaggtgttccagcacatcccctacatcaaggagcccaagagcgtgttcagaaccggctggatcagcaccagcagcatctggaagaagcccggcctggaggaggccgtggagagcgcctgcgccatgagagacagcttcctgggcagcatccccggcaagaacgccgccgagtacaaggtgatcaccgtgatcgagcccggcctgctgttcgagatcatcgagatgctgcagagcgaggagaccagcagcaccagccagctgaacgagctgatgatggccagcgagagcaccctgctggcccaggagcccagagagatgaccgccgacgtgatcgagctgaagggcaagttcctgatcaacctggagggcggcgacatcagagaggagagcagctacaaggtgatcgtgatgcccaccaccaaggagaagtgccccagatgctggaagtacaccgccgagagcagcgacaccctgtgccccagatgcgccgaggtggtgagcggcaagtag

SEQ ID NO: 196428 - protein, 375 aa, Artificial Sequence
  derived and/or modified sequence
MAVTEASLLRQCPLLLPQNRSKTVYEGFISAQGRDFHLRIVLPEDLQLKNARLLCSWQLRTILSGYHRIVQQRMQHSPDLMSFMMELKMLLEVALKNRQELYALPPPPQFYSSLIEEIGTLGWDKLVYADTCFSTIKLKAEDASGREHLITLKLKAKYPAESPDYFVDFPVPFCASWTPQSSLISIYSQFLAAIESLKAFWDVMDEIDEKTWVLEPEKPPRSATARRIALGNNVSINIEVDPRHPTMLPECFFLGADHVVKPLGIKLSRNIHLWDPENSVLQNLKDVLEIDFPARAILEKSDFTMDCGICYAYQLDGTIPDQVCDNSQCGQPFHQICLYEWLRGLLTSRQSFNIIFGECPYCSKPITLKMSGRKH

SEQ ID NO: 196429 - DNA, 1128 bp, Artificial Sequence
  derived and/or modified sequence
atggccgtgaccgaggccagcctgctgagacagtgccccctgctgctgccccagaacagaagcaagaccgtgtacgagggcttcatcagcgcccagggcagagacttccacctgagaatcgtgctgcccgaggacctgcagctgaagaacgccagactgctgtgcagctggcagctgagaaccatcctgagcggctaccacagaatcgtgcagcagagaatgcagcacagccccgacctgatgagcttcatgatggagctgaagatgctgctggaggtggccctgaagaacagacaggagctgtacgccctgcccccccccccccagttctacagcagcctgatcgaggagatcggcaccctgggctgggacaagctggtgtacgccgacacctgcttcagcaccatcaagctgaaggccgaggacgccagcggcagagagcacctgatcaccctgaagctgaaggccaagtaccccgccgagagccccgactacttcgtggacttccccgtgcccttctgcgccagctggaccccccagagcagcctgatcagcatctacagccagttcctggccgccatcgagagcctgaaggccttctgggacgtgatggacgagatcgacgagaagacctgggtgctggagcccgagaagccccccagaagcgccaccgccagaagaatcgccctgggcaacaacgtgagcatcaacatcgaggtggaccccagacaccccaccatgctgcccgagtgcttcttcctgggcgccgaccacgtggtgaagcccctgggcatcaagctgagcagaaacatccacctgtgggaccccgagaacagcgtgctgcagaacctgaaggacgtgctggagatcgacttccccgccagagccatcctggagaagagcgacttcaccatggactgcggcatctgctacgcctaccagctggacggcaccatccccgaccaggtgtgcgacaacagccagtgcggccagcccttccaccagatctgcctgtacgagtggctgagaggcctgctgaccagcagacagagcttcaacatcatcttcggcgagtgcccctactgcagcaagcccatcaccctgaagatgagcggcagaaagcactag

SEQ ID NO: 196430 - DNA, 1128 bp, Artificial Sequence
  derived and/or modified sequence
atggctgtgaccgaagcaagtctgctgagacagtgccccctcctgttgccccagaaccgttcaaaaactgtgtatgaaggattcatctccgcccagggccgagactttcatttgaggattgtgctgccagaggatctccaactcaagaatgccaggctcctttgctcctggcagctccgaacaatcttgtctggttatcaccggatcgtgcaacagcggatgcaacactcacctgacctcatgagttttatgatggaactgaagatgctgctggaagtcgctctgaagaataggcaagagctctacgccctcccacctcccccccagttttactccagcctgattgaagaaattggcaccctcggctgggataaattggtgtatgcggatacatgcttctcgacgatcaagctgaaggcggaagatgcttccggccgagagcacctcatcaccctgaaactcaaggccaaatatcccgctgaatccccagactacttcgtggatttcccagtacccttctgcgcatcctggacacctcagtcttcccttatcagcatatattcccagtttttagccgctatagaaagtctgaaagctttttgggacgtgatggacgaaatcgacgaaaagacttgggtgctggagccagagaagccacctaggagtgcgactgcccgtcgcatcgccctcggaaataacgtttctatcaatatcgaggttgatccgcgccatcccactatgctgcctgagtgcttctttttgggcgctgatcatgtggtgaagcctttaggcattaaattgtcccgtaacatccatctgtgggaccctgagaatagcgtactgcagaacctaaaagatgttctggaaatcgattttcccgccagagccatcttagagaagtctgatttcactatggattgcggaatttgttacgcctatcaactcgacggtacaatccccgatcaggtgtgtgataacagccaatgcgggcagccatttcatcagatctgcctgtacgagtggctgcgcggcctccttaccagccgccagtcatttaatattattttcggcgaatgtccttattgtagtaagccaatcactctgaagatgtctggtcggaagcactag

SEQ ID NO: 196431 - DNA, 1128 bp, Artificial Sequence
  derived and/or modified sequence
atggctgtgacagaggccagcctgctgcggcagtgccccctgctgctgccccagaacagaagcaagacagtgtatgagggcttcatcagcgcccagggccgggacttccacctgcgcatcgtgctgcctgaggacctgcagctgaagaatgcccggctgctgtgctcctggcagctgcggaccatcctgagcggctaccacagaattgtgcagcagaggatgcagcacagcccagacctgatgtccttcatgatggagctgaagatgctgctggaggtggccctgaagaaccggcaggagctgtatgccctgcccccaccaccccagttctacagcagcctgattgaggagatcggcaccctgggctgggacaagctggtgtatgctgacacctgcttcagcaccatcaagctgaaggcagaagatgccagcggccgggagcacctgatcaccctgaagctgaaggccaagtacccagctgagagcccagactactttgtggacttccctgtgcccttctgtgcctcctggaccccccagagcagcctcatcagcatctacagccagttcctggccgccatcgagagcctgaaggccttctgggatgtgatggatgaaattgatgagaagacctgggtgctggagcctgagaagcccccaagaagtgccacagcccggcgcatcgccctgggcaacaacgtgtccatcaacatcgaggtggaccccaggcaccccaccatgctgcctgagtgcttcttcctgggcgctgaccacgtggtgaagcccctgggcatcaagctgagcaggaacatccacctgtgggaccctgaaaattctgtgctgcagaacctgaaggatgtgctggagattgacttccctgcccgggccatcctggagaagagtgacttcaccatggactgtggcatctgctacgcctaccagctggatggcaccatcccagaccaggtgtgtgacaacagccagtgtggccagcccttccaccagatctgcctgtatgagtggctgcggggcctgctgaccagccggcagagcttcaacatcatctttggagagtgcccctactgcagcaagcccatcaccctgaagatgagcggcaggaagcactag

SEQ ID NO: 196432 - DNA, 1128 bp, Artificial Sequence
  derived and/or modified sequence
atggccgtgaccgaggccagcctgctgcggcagtgccccctgctgcttccccagaatagatctaagaccgtttacgagggctttataagtgcacagggacgggactttcacctccggatagtgctgcctgaagatctgcagctgaagaacgcacggctactctgcagctggcaattacgcaccattctcagcggctatcacagaatcgtgcaacaacgaatgcagcacagtcctgacctgatgagctttatgatggaattaaagatgctgcttgaggtggcccttaagaacagacaagagctatacgctttacccccccctccccagttctattctagcctgatcgaggaaattggaactctcggatgggataagctggtgtacgcagacacctgtttttctaccattaagttgaaggccgaggatgcatccggaagagagcatcttataaccctcaagctgaaggctaagtatcccgcagagtcaccagactacttcgtcgactttccagtccctttttgcgcctcctggacaccacagagctctctgatcagcatctattcccagttcttggcggcaatcgagtccctcaaggcgttttgggatgttatggatgaaattgatgaaaagacctgggtcttggaacctgagaagccaccgaggtccgctaccgctaggcgcattgcgctgggaaataatgtaagtattaatatagaggtggaccctagacaccccaccatgctccccgagtgcttcttccttggcgctgatcatgtggtcaagcccttgggcataaagctgtcccgaaacatccacttatgggaccccgagaacagtgtgctacaaaacctaaaagatgttcttgagatcgacttccccgctcgcgcgatattagagaagtccgacttcacaatggactgcggcatctgttacgcctatcagttggatggcacaattcccgatcaggtttgtgataactctcagtgcggacagcctttccaccaaatctgtttatatgaatggctgcgcggactgttgacttcacgtcagtcctttaacatcatcttcggcgagtgcccctactgctctaaacctatcacccttaagatgtccggccgcaagcactag

SEQ ID NO: 196433 - DNA, 1128 bp, Artificial Sequence
  derived and/or modified sequence
atggctgtgaccgaagcctctcttctgcgccaatgcccacttctgttgccccaaaatagaagcaagactgtatatgagggttttatctccgcacagggcagggattttcatttgcgtattgttctgcctgaagacttgcaactgaaaaatgccaggctactgtgtagctggcaactgagaaccatcctgtctggctaccataggattgtgcaacaaagaatgcagcattctcccgacctgatgtcattcatgatggagctcaaaatgctcctggaagtggcactcaaaaaccgtcaggaactgtatgcgctgcctcccccacctcagttctacagtagcctcattgaggaaattgggacccttggctgggataaattggtctatgccgatacctgttttagcactataaaattgaaggctgaggacgcgtccggtcgggagcacctgataactctgaagttgaaagctaagtaccccgcagagtcacccgattattttgtggacttccccgtaccattttgtgcgagctggaccccgcaatcaagtctcatctccatctactcccagtttctagccgctattgagagtctgaaggccttttgggacgtgatggacgaaatcgatgaaaagacctgggtgctagaacctgaaaaaccacccaggagtgctacggcgaggagaattgcgctggggaacaatgtcagcatcaatattgaagttgacccgagacaccctactatgctccctgaatgcttttttctgggggctgatcatgtggtgaaacccttggggatcaagctctccaggaatattcatctatgggaccccgagaattccgtcctgcagaacttgaaagatgtgctggagatagatttccctgcacgggctatcttggagaagtcagatttcacaatggattgtgggatctgttacgcatatcagttggatggaacgatccccgatcaagtatgcgacaactctcagtgtggacagccctttcaccaaatctgcttatatgagtggttacgtggactactcacctcccgccagtctttcaacataatcttcggcgaatgtccctactgctccaagcccatcaccctgaagatgagcgggcgaaagcactag

SEQ ID NO: 196434 - DNA, 1683 bp, Artificial Sequence
  derived and/or modified sequence
gtctagagcttttctgtgtttctccggacttcgagccatggcggtgacggaagcgagcctgttgcgccagtgccccctgcttctgccccagaaccggtcgaaaaccgtgtatgagggattcatctcggctcagggaagagacttccaccttaggatagtgttgcctgaagatttacaactgaagaatgcaagattattatgtagttggcagctgagaacaatacttagtggataccatcgaatagtacaacagagaatgcagcactctcctgatctaatgagctttatgatggagttgaagatgcttttggaagttgccttaaagaatagacaagagctgtatgcactacctcctcctccccagttctactcaagccttattgaagagataggaactcttggttgggataaacttgtgtatgcggatacctgcttcagtaccatcaagttaaaagcagaagatgcttctggtagagagcatttaatcactctcaagttgaaggcaaagtatcctgcagaatcaccagattattttgtggattttcctgttccattttgtgcctcctggacacctcagagctccttaataagcatttatagtcagtttttggcagcaatagaatcactaaaggcattctgggatgttatggatgaaatcgatgagaagacctgggtacttgagccagaaaaacctccacggagtgcaacagcacgcagaattgcattaggtaataatgtttccataaatatagaggtagaccccaggcatcctactatgcttcctgagtgcttctttcttggagctgaccatgtggtaaaacccctgggaattaagctgagcaggaacatacatttgtgggatccagaaaatagtgtgttacaaaatttgaaagatgttttagaaattgattttccagctcgtgctatcctggaaaaatctgattttactatggattgtggaatttgttatgcttatcaacttgacggtaccattcctgatcaagtgtgtgataattctcagtgtggacaacctttccatcaaatatgcttatatgagtggctgagaggactactaactagtagacagagttttaacatcatatttggtgaatgtccatattgtagtaagccaattaccttaaaaatgtctggaaggaaacactgaaataagaatacaacatttcggtgaagagctggaaacttaaaaaattatcaaaaggaattttggtatcatcttcagagaaaaaataaagcaagaaatactaacatcaaaaggacaggtatgatgatgcgataataataaacatctgcgtttgtctcttcactaagagtaaactgggaaattgtaggccaaagtccagttgaactttctaagtctgtgatccccgtgctgactgtggaagtgtatttataccaagatggagatcttgacttcttgaatatatctggactggtaaaatcttgatgaggctcataaaatgagtttgggaattgtgtatagctgattttttgtgggaaactgtttacttcattcaaaggttcttgagactcttgatatttctgtcttctccttgtgctttcctatggaaaaaatacatatatagtttagtttgttagacgtgagttatccaagtatttattttgtgtagtgtgtaagaatgctaaataaaatgttatacaaga

SEQ ID NO: 196435 - DNA, 906 bp, Artificial Sequence
  derived and/or modified sequence
agcaggtctagagcttttctgtgtttctccggacttcgagccatggcggtgacggaagcgagcctgttgcgccagtgccccctgcttctgccccagaaccggtcgaaaaccgtgtatgagggattcatctcggctcagggaagagacttccaccttaggatagtgttgcctgaagatttacaactgaagaatgcaagattattatgtagttggcagctgagaacaatacttagtggataccatcgaatagtacaacagagaatgcagcactctcctgatctaatgagctttatgatggagttgaagatgcttttggaagttgccttaaagaatagacaagagctgtatgcactacctcctcctccccagttctactcaagccttattgaagagataggaactcttggttgggataaagctccttaataagcatttatagtcagtttttggcagcaatagaatcactaaaggcattctgggatgttatggatgaaatcgatgagaagacctgggtacttgagccagaaaaacctccacggagtgcaacagcacgcagaattgcattaggtaataatgtttccataaatatagaggtagaccccaggcatcctactatgcttcctgagtgcttctttcttggagctgaccatggtatgacatctgagatttaaacgttttttaatagagtcataaaatccttgcctagcattgttaaattattagacaatattagtatattaatggtagtttttattttttgtctgagacggagttttgctcttgttgcccagtatgtagtgtaatggcgcgatctcggttcaccgcaataatgatagttattttaaatgacaatgtctcagcattctgaactgtataattttgttttttaacataatacatataatt

SEQ ID NO: 196436 - DNA, 384 bp, Artificial Sequence
  derived and/or modified sequence
atggctgtcactgaagcctctctcctccggcagtgccctctccttctgccacaaaaccgctcaaaaaccgtgtatgagggcttcatttctgctcagggacgggatttccatctgcggatcgtcttgccggaagatctgcagctgaagaatgctagactcttatgcagctggcagttacggaccattttgtcgggctatcaccgcatcgtacagcagcgcatgcagcactctccggacctgatgagtttcatgatggagctcaaaatgctgctggaagttgcactcaagaatagacaggagctgtatgcattgccaccacctccgcagttttattccagtctgatagaagagattggtacactcgggtgggacaaggccccctag

SEQ ID NO: 196437 - DNA, 384 bp, Artificial Sequence
  derived and/or modified sequence
atggctgtgacagaggccagcctgctgcggcagtgccccctgctgctgccccagaacagaagcaagacagtgtatgagggcttcatcagcgcccagggccgggacttccacctgcgcatcgtgctgcctgaggacctgcagctgaagaatgcccggctgctgtgctcctggcagctgcggaccatcctgagcggctaccacagaattgtgcagcagaggatgcagcacagcccagacctgatgtccttcatgatggagctgaagatgctgctggaggtggccctgaagaaccggcaggagctgtatgccctgcccccaccaccccagttctacagcagcctgattgaggagatcggcaccctgggctgggacaaggccccctag

SEQ ID NO: 196438 - DNA, 384 bp, Artificial Sequence
  derived and/or modified sequence
atggccgtgaccgaggccagcctgctgcggcagtgccccctgctgctgcctcagaaccggagcaaaaccgtttacgagggattcatctcagcccagggtcgcgatttccacctcagaatcgttctgcccgaggacctgcagctgaagaacgctaggttactgtgcagctggcagctgcgcaccattctgtccggctaccatcggatcgtgcagcagcgaatgcagcactcccccgatctcatgagttttatgatggaactcaagatgttgctggaagtcgccctcaagaatcgccaggagctgtacgcactaccaccacctccccaattctatagttccctgattgaagagatcggtacactgggatgggacaaagcaccttag

SEQ ID NO: 196439 - DNA, 384 bp, Artificial Sequence
  derived and/or modified sequence
atggcggtaacagaggctagcctattaaggcagtgccctctgctgctaccacagaaccgcagcaagaccgtgtacgaggggttcatctcagcacagggcagagacttccacctgaggatcgtactccctgaggatcttcagctgaaaaacgcccgactcctatgcagttggcagctccggacaatcctgtcagggtaccatcggatcgtccaacagcgcatgcagcactcccctgatctgatgagctttatgatggaactcaagatgttgttagaggtggcactgaaaaatagacaggagctatacgcacttccccctccccctcagttctactcctccctaattgaggaaatcggtacactcggctgggacaaggcaccctag

SEQ ID NO: 196440 - DNA, 384 bp, Artificial Sequence
  derived and/or modified sequence
atggccgtgaccgaggccagcctgctgagacagtgccccctgctgctgccccagaacagaagcaagaccgtgtacgagggcttcatcagcgcccagggcagagacttccacctgagaatcgtgctgcccgaggacctgcagctgaagaacgccagactgctgtgcagctggcagctgagaaccatcctgagcggctaccacagaatcgtgcagcagagaatgcagcacagccccgacctgatgagcttcatgatggagctgaagatgctgctggaggtggccctgaagaacagacaggagctgtacgccctgcccccccccccccagttctacagcagcctgatcgaggagatcggcaccctgggctgggacaaggccccctag

SEQ ID NO: 196441 - protein, 838 aa, Artificial Sequence
  derived and/or modified sequence
MPAERPAGSGGSEAPAMVEQLDTAVITPAMLEEEEQLEAAGLERERKMLEKARMSWDRESTEIRYRRLQHLLEKSNIYSKFLLTKMEQQQLEEQKKKEKLERKKESLKVKKGKNSIDASEEKPVMRKKRGREDESYNISEVMSKEEILSVAKKNKKENEDENSSSTNLCVEDLQKNKDSNSIIKDRLSETVRQNTKFFFDPVRKCNGQPVPFQQPKHFTGGVMRWYQVEGMEWLRMLWENGINGILADEMGLGKTVQCIATIALMIQRGVPGPFLVCGPLSTLPNWMAEFKRFTPDIPTMLYHGTQEERQKLVRNIYKRKGTLQIHPVVITSFEIAMRDRNALQHCYWKYLIVDEGHRIKNMKCRLIRELKRFNADNKLLLTGTPLQNNLSELWSLLNFLLPDVFDDLKSFESWFDITSLSETAEDIIAKEREQNVLHMLHQILTPFLLRRLKSDVALEVPPKREVVVYAPLSKKQEIFYTAIVNRTIANMFGSSEKETIELSPTGRPKRRTRKSINYSKIDDFPNELEKLISQIQPEVDRERAVVEVNIPVESEVNLKLQNIMMLLRKCCNHPYLIEYPIDPVTQEFKIDEELVTNSGKFLILDRMLPELKKRGHKVLLFSQMTSMLDILMDYCHLRDFNFSRLDGSMSYSEREKNMHSFNTDPEVFIFLVSTRAGGLGINLTAADTVIIYDSDWNPQSDLQAQDRCHRIGQTKPVVVYRLVTANTIDQKIVERAAAKRKLEKLIIHKNHFKGGQSGLNLSKNFLDPKELMELLKSRDYEREIKGSREKVISDKDLELLLDRSDLIDQMNASGPIKEKMGIFKILENSEDSSPECLF

SEQ ID NO: 196442 - DNA, 2517 bp, Artificial Sequence
  derived and/or modified sequence
atgcccgcggaaaggcctgctggttccggggggtccgaggcccccgccatggtggagcagctggatacagctgtgatcacccccgcaatgctagaggaagaggagcaactggaggcggcaggcttagaacgagagcggaagatgctggagaaagccaggatgtcctgggatagagagtctaccgaaataagatatcggagactccagcatctacttgaaaagagcaacatttattctaagtttctcttgaccaaaatggagcagcaacagctggaagagcagaagaagaaagagaagcttgaacgaaagaaagaatcattaaaagtgaagaagggcaagaattcgatcgacgccagtgaagaaaagccagtgatgagaaaaaagcgcggaagagaggacgagagttataacatttccgaggtcatgtctaaagaagagatcttgtccgtggccaagaagaataaaaaagagaacgaagatgaaaacagttcatctaccaatctctgtgtggaagatctgcagaaaaacaaggacagcaacagtatcatcaaggataggctaagcgaaaccgtgagacagaataccaaattcttttttgacccagttcggaagtgcaacggccaacctgtcccatttcagcaacccaagcactttacagggggggtgatgaggtggtaccaggtggaaggcatggagtggctcaggatgctgtgggagaatggtataaacggcatccttgctgacgagatgggtctaggcaagaccgtgcagtgtatcgcaacgatcgccttaatgatccagagaggggttccaggtccctttcttgtgtgcggtcccctcagcacactaccaaattggatggccgagtttaaacggttcacccccgacattccaactatgctgtatcatggaactcaggaagaacgacagaagctggtgcgtaatatctacaagcgcaagggtaccctgcagattcatccagtcgtcataacttccttcgaaattgcaatgcgcgaccggaatgcccttcagcactgctattggaagtacctcattgtggacgagggacacaggatcaagaatatgaaatgcagacttattagagagcttaagcgttttaatgctgataacaaactgctcctgaccggcacccccctgcagaataatctgtcggagctttggtcattactcaattttctgctacctgacgtatttgacgacctcaaaagcttcgagagctggtttgacattacctctttgtctgaaaccgctgaggacataattgcgaaagagcgagagcagaatgtgcttcatatgttgcatcagatcctcaccccctttctgctccgccggctgaagagtgatgttgccctggaagtgcccccaaagcgggaagttgtagtctatgctcccctgtccaagaagcaggaaatattttacaccgcgatcgtaaatcggacgatagcgaatatgttcggctcttctgaaaaggaaaccatcgaactgagccctaccggtagaccaaaacggaggacacgcaagagtatcaattattccaagatagacgacttccccaacgagctggaaaagttaatctcccagatacaacctgaggtagaccgggagcgggcagttgtcgaagtgaacatacccgtggaaagtgaagtgaatctgaagctccagaacatcatgatgctgctacgcaaatgttgcaaccatccttacttgatagaataccccattgatcccgtgactcaagagtttaagattgacgaagaactggttaccaactccggcaagtttctgattctcgataggatgttaccagagcttaaaaaacgcggacacaaggtccttctcttctcacagatgaccagcatgctcgatattctcatggactactgccatctcagggacttcaacttctctcgattggacgggagtatgtcctactccgagcgggaaaagaacatgcacagtttcaataccgatcccgaggtgtttatctttctggtgtccactagggctggcgggctggggatcaacctaactgctgccgacaccgtcataatctatgactctgactggaacccccagtctgacctccaggcccaagacagatgccacagaattggccagacaaagcccgtggtggtttaccgacttgtcactgcaaatacaatcgatcagaaaatagtggaaagagctgcggctaagaggaagcttgaaaagcttattatccacaaaaaccattttaagggaggtcagagcggcttgaatttgagcaagaatttcttggatcctaaggagctgatggagctcttgaagtccagggactatgaacgtgagattaaaggcagtcgcgagaaagttattagcgacaaggacctcgaacttttactggaccgttccgacctcatcgatcagatgaacgctagcggtcctatcaaggaaaaaatggggatctttaaaatattggagaattccgaagacagtagcccagaatgcctcttttag

SEQ ID NO: 196443 - DNA, 3099 bp, Artificial Sequence
  derived and/or modified sequence
ggggatttggctagaaggctgggccggcagcggttgtgaggagttagctcgcggcattgcaggctctgagaggaggggacccggttcccgggtgagtgtccaggcatgccagcggaacggcccgcgggcagcggcggctcggaggctccagcaatggttgaacaactggacactgctgtgattaccccggccatgctagaagaggaagaacagcttgaagctgctggactagagagagagcggaagatgctggaaaaggctcgcatgtcttgggatagagagtcgacagaaattcggtaccgtagacttcaacatttgcttgaaaaaagcaatatatactccaaatttttattgacgaaaatggaacagcaacaattagaggaacagaagaagaaagaaaaattggagagaaaaaaggagtctttaaaagttaaaaagggtaaaaattcaattgatgcaagtgaagagaagccagttatgaggaaaaaaagaggaagagaagatgaatcatacaatatttcagaggtcatgtcaaaagaggaaattttgtctgtggctaaaaaaaataaaaaggagaatgaggatgaaaactcctcctctactaatctctgtgtggaagatcttcagaaaaataaagattcgaatagtataattaaagatagattgtctgaaacggttaggcagaatactaaattcttttttgacccagtccggaagtgtaatggtcagccagtaccttttcaacaaccaaagcacttcactggaggagtgatgcgatggtaccaagtagaaggcatggaatggcttaggatgctttgggaaaatggaattaatggcattttagcagatgaaatgggattgggtaagacagttcagtgcattgctactattgcattgatgattcagagaggagtaccaggaccttttcttgtctgtggccctttgtctacacttcctaactggatggctgaattcaaaagatttacaccagatatccctacaatgttatatcatggaacccaggaggaacgtcaaaaattggtaagaaatatttacaaacggaaagggactttgcagattcatcctgtggtaatcacgtcatttgaaatagccatgagagaccgaaatgcgttacagcattgctattggaaatacttaatagtagatgaaggacacaggattaagaatatgaagtgccgtctaatcagggagttaaaacgattcaatgctgataacaaacttcttttgactggtactcccttgcaaaacaatttatcagaactttggtcattgctaaactttttgttgccagatgtatttgatgacttgaaaagctttgagtcttggtttgacatcactagtctttctgaaactgctgaagatattattgctaaagaaagagaacagaatgtattgcatatgctgcaccagattttaacacctttcttattgagaagactgaagtctgatgttgctcttgaagttcctcctaaacgagaagtagtcgtttatgctccactttcaaagaagcaggagatcttttatacagccattgtgaaccgtacaattgcaaacatgtttggatccagtgagaaagaaacaattgagttaagtcctactggtcgaccaaaacgacgaactagaaaatcaataaattacagcaaaatagatgatttccctaatgaattggaaaaactgatcagtcaaatacagccagaggtggaccgagaaagagctgttgtggaagtgaatatccctgtagaatctgaagttaatctgaagctgcagaatataatgatgctacttcgtaaatgttgtaatcatccatatttgattgaatatcctatagaccctgttacacaagaatttaagatcgatgaagaattggtaacaaattctgggaagttcttgattttggatcgaatgctgccagaactaaaaaaaagaggtcacaaggtgctgcttttttcacaaatgacaagcatgttggacattttgatggattactgccatctcagagatttcaacttcagcaggcttgatgggtccatgtcttactcagagagagaaaaaaacatgcacagcttcaacacggatccagaggtgtttatcttcttagtgagtacacgagctggtggcctgggcattaatctgactgcagcagatacagttatcatttatgatagtgattggaacccccagtcggatcttcaggcccaggatagatgtcatagaattggtcagacaaagccagttgttgtttatcgccttgttacagcaaatactatcgatcagaaaattgtggaaagagcagctgctaaaaggaaactggaaaagttgatcatccataaaaatcatttcaaaggtggtcagtctggattaaatctgtctaagaatttcttagatcctaaggaattaatggaattattaaaatctagagattatgaaagggaaataaaaggatcaagagagaaggtcattagtgataaagatctagagttgttgttagatcgaagtgatcttattgatcaaatgaatgcttcaggaccaattaaagagaagatggggatattcaagatattagaaaattctgaagattccagtcctgaatgtttgttttaaagtggagctcaagaatagcttttaaaagttcttatttacatctagtgatttccctgtattgggtttgaaatactgattgtccacttcaccttttttattatatcagttgacatgtaactagtaccatgcgtacttaaatagatggtaattttctgagccttaccaagaacaaagaagtatccatattaagtttagattttcagttaatttttgagactgagtagtattcttggatacaggctgatgtgtacttaaccacttccagatttatacagtcttcctgtggaagtttagtaaatgtctttttccctcctttcttctagtaatgcagttcatgggctttaggtacttcagttatgaagtaggcttttcatggggagagattgggattatgctctctgttgtttaagaaactgtttgattttagagtctatttctatgagatagtttaccaaataaatgttccttataagatga

SEQ ID NO: 196444 - DNA, 2517 bp, Artificial Sequence
  derived and/or modified sequence
atgcctgctgagaggcctgctggcagcggcggcagcgaggccccagccatggtggagcagctggacacagctgtgatcaccccagccatgctggaggaggaggagcagctggaggccgccggcctggagcgggagaggaagatgctggagaaggccaggatgtcctgggaccgggagagcacagagatccgctaccgccgcctgcagcacctgctggagaagagcaacatctacagcaagttcctgctgaccaagatggagcagcagcagctggaggagcagaagaagaaggagaagctggagaggaagaaggagagcctgaaggtgaagaagggcaagaacagcattgatgccagcgaggagaagcctgtgatgaggaagaagaggggccgggaggatgagagctacaacatcagcgaggtgatgagcaaggaggagatcctgtctgtggccaagaagaacaagaaggaaaatgaagatgagaacagcagcagcaccaacctgtgtgtggaggacctgcagaagaacaaggacagcaacagcatcatcaaggaccggctgtctgagaccgtgcggcagaacaccaagttcttctttgatcctgtgaggaagtgcaatggccagcctgtgcccttccagcagcccaagcacttcaccggaggagtgatgcgctggtaccaggtggagggcatggagtggctgaggatgctgtgggagaatggcatcaatggcatcctggctgatgagatgggcctgggcaagacagtgcagtgcatcgccaccatcgccctgatgatccagaggggcgtgcccggccccttcctggtgtgtggccccctgagcaccctgcccaactggatggccgagttcaagcgcttcaccccagacatccccaccatgctgtaccacggcacccaggaggagcggcagaagctggtgaggaacatctacaagaggaagggcaccctgcagatccaccctgtggtgatcaccagctttgaaattgccatgagggacagaaatgccctgcagcactgctactggaagtacctgattgtggatgagggccaccgcatcaagaacatgaagtgccgcctcatccgggagctgaagcgcttcaatgctgacaacaagctgctgctgaccggcacccccctgcagaacaacctgtctgagctgtggagcctgctgaacttcctgctgcctgatgtgtttgatgacctgaagagctttgagagctggtttgacatcaccagcctgtctgaaacagctgaggacatcatcgccaaggagcgggagcagaatgtgctgcacatgctgcaccagatcctgacccccttcctgctgcggcggctgaagagtgatgtggccctggaggtgccccccaagcgggaggtggtggtgtatgcccccctgagcaagaagcaggagatcttctacacagccatcgtgaacagaaccatcgccaacatgtttggcagcagcgagaaggagaccatcgagctgagccccaccggccggcccaagaggaggaccaggaagagcatcaactacagcaagattgatgacttccccaatgagctggagaagctgatcagccagatccagcctgaggtggaccgggagagagctgtggtggaggtgaacatccctgtggagagcgaggtgaacctgaagctgcagaacatcatgatgctgctgaggaagtgctgcaaccacccctacctgattgagtaccccattgatcctgtgacccaggagttcaagattgatgaggagctggtgaccaacagcggcaagttcctgatcctggacaggatgctgcctgagctgaagaagaggggccacaaggtgctgctcttcagccagatgacctccatgctggacatcctgatggactactgccacctgcgggacttcaacttcagccggctggatggctccatgagctacagcgagcgggagaagaacatgcacagcttcaacacagatcctgaggtgttcatcttcctggtgtccacccgggccggcggcctgggcatcaacctgacagctgctgacaccgtcatcatctatgacagcgactggaacccccagagcgacctgcaggcccaggaccgctgccacagaattggccagaccaagcctgtggtggtgtaccgcctggtgacagccaacaccatcgaccagaagatcgtggagagagctgctgccaagaggaagctggagaagctgatcatccacaagaaccacttcaagggcggccagagcggcctgaacctgagcaagaacttcctggaccccaaggagctgatggagctgctgaagagccgggactatgaaagagagatcaagggcagccgggagaaggtgatcagtgacaaggacctggagctgctgctggacagaagtgacctgattgaccagatgaatgccagcggccccatcaaggagaagatgggcatcttcaagatcctggagaacagcgaggacagcagcccagaatgtctcttctag

SEQ ID NO: 196445 - DNA, 2517 bp, Artificial Sequence
  derived and/or modified sequence
atgcccgccgagcggcccgccggcagcggcggcagcgaggcccccgctatggttgaacagctcgataccgccgtcatcaccccagcaatgctcgaggaagaggaacagctggaagccgctggactggaaagggagaggaagatgctggagaaggcacggatgagctgggatcgggagagcacagagattcgttatcggcggttgcagcacctgctcgagaagagcaacatttatagcaagttccttctaaccaagatggagcagcagcagttggaggagcagaagaagaaggagaagttagagagaaagaaggagagtctcaaagtgaagaaaggcaagaattctatcgacgcctcagaggaaaagccagtgatgagaaagaaacgtgggcgcgaagatgagagctataacatctctgaagtgatgtctaaggaggagattctaagcgtggcaaagaagaacaagaaggaaaacgaagatgagaactcttcctctacgaacctatgtgtagaggacctccagaagaataaggattcgaactccatcatcaaggatagactctccgagaccgtgcgccaaaatacgaagttttttttcgaccctgtgaggaaatgcaatgggcagccagtcccatttcagcaacccaagcacttcaccgggggcgtgatgagatggtatcaagtggaggggatggagtggctgaggatgctatgggaaaacggcatcaatggcattctggcagacgaaatgggtctcggcaagaccgtgcaatgcatcgccactatagccctcatgattcagaggggggtgccgggtccatttttagtgtgtggacccctttctactctccccaactggatggcggagttcaagagattcaccccagacatcccaacaatgttgtatcatggtactcaggaggaaagacaaaaactggtgcggaacatatacaaaagaaagggaacgctccaaattcaccccgtcgtgatcacaagcttcgagattgctatgagagacagaaatgcactccaacattgttactggaagtaccttattgttgacgagggacacagaatcaaaaatatgaagtgtcggctgattagggagctcaagcgcttcaatgccgataataagctactgctgacgggaacgcctttacaaaacaaccttagcgaactctggtctttgttaaattttttgcttcccgatgtcttcgacgatctcaagagctttgaaagctggttcgatatcacatctctgagcgaaaccgccgaagatatcattgccaaggagcgggagcagaatgttttgcatatgctccatcagattctcaccccttttctcctgaggagactgaagagcgacgtggcattagaagtcccacctaaacgggaggtggtggtgtatgcacccctgagtaagaagcaggaaattttctacacagccattgtcaacaggaccatcgctaacatgttcggctctagcgagaaggaaaccatcgagttgagtcccaccgggcgacctaagcgccgtactcgtaagtcgataaactattccaaaatcgacgactttcccaatgagctcgaaaaactgatatctcaaatccagccagaagtggatcgcgagcgtgccgttgtcgaggttaacatacctgtcgaaagtgaggtcaatctcaagctgcagaatatcatgatgcttttacgcaaatgctgcaatcacccttatctgattgagtacccgatcgacccagttacgcaggagttcaaaattgatgaagaattggtaacaaatagcggaaagttcttgatactcgatcgcatgctccctgaactcaagaaaagggggcacaaagttctgctgttttctcagatgactagcatgctagatatcctaatggactattgccacttgagggacttcaacttctctcgccttgatggctccatgagttacagtgagcgggaaaaaaatatgcatagttttaatactgaccctgaagtattcatcttcctggtgtctaccagagccgggggattgggaataaacctgactgctgctgacacagtgataatctacgattcagattggaacccccagtctgacttgcaggcccaggaccgctgtcatcgaattgggcagacaaaacctgtggtggtctaccggctagtgacagctaacactatagaccagaaaatcgtagagagggccgccgcaaagcggaagctcgaaaagctgattatccataagaaccactttaagggcggccaatctgggttaaacctctccaagaattttctcgatcccaaagaactgatggaactgcttaaatcccgggactacgagcgcgagataaaaggttctagagagaaggtcattagtgacaaagaccttgagcttcttctggaccgttccgatttaatcgatcagatgaatgcctcaggacccataaaagaaaaaatgggaatttttaaaatcttggaaaacagcgaagattccagtcctgaatgtctgttctag

SEQ ID NO: 196446 - DNA, 2517 bp, Artificial Sequence
  derived and/or modified sequence
atgcctgccgagcgtccagctgggtctggcggaagcgaggcccctgcgatggtcgagcagctggataccgccgtcatcacacctgctatgttggaagaagaggaacaattggaggcagctgggctcgagagagaacgcaaaatgctggagaaggcacgcatgagctgggatagagagagcacagagattagatacagacggctccagcatcttctggaaaaatccaatatttactccaagtttttattgaccaagatggagcagcagcagctggaggagcagaagaagaaggaaaagctcgagcgaaagaaagagagcctgaaggtgaagaagggaaagaacagtattgatgctagcgaagaaaaacctgtcatgcgcaaaaaacggggacgagaggacgagtcttacaacatcagcgaagtgatgagcaaggaagagatcctgagcgtcgccaagaaaaataaaaaggagaacgaggacgagaattcgtctagtaccaatttgtgcgttgaggaccttcagaaaaataaggactccaattccatcattaaggacagactatccgagaccgtgagacagaataccaagttttttttcgacccggtgcgcaagtgtaacgggcagcccgtccctttccagcagcccaagcatttcacaggaggggtgatgcgctggtatcaagtggagggaatggaatggctgaggatgctctgggagaacggcattaacggtatcctcgccgacgagatgggattggggaagacggtgcagtgtattgccactattgctctcatgattcagagaggagtaccagggcctttcctggtgtgtggacccctgagtacgctgcctaactggatggccgagttcaagcggttcacacctgacatccctactatgctgtaccacggaacacaggaagaaaggcagaaattggtgcgaaacatttacaaacgcaaggggacgttgcagatccatcctgtggtcattacgagcttcgaaatcgcgatgagggatcggaacgctctgcagcactgttactggaagtatctaatcgtcgacgaaggacatagaatcaaaaacatgaagtgcagactgattagagagttgaaaagatttaatgccgataacaagctcctgctgacaggaaccccgttgcaaaacaatttgtccgaattgtggtcccttctcaatttcctgttacctgacgtttttgatgatctcaaaagcttcgaatcttggttcgatatcacatccctgagcgaaactgctgaagatattatcgcgaaggagcgtgagcaaaacgtgctgcacatgctccatcagattttgacaccctttttactaaggcgtctcaaatcagacgttgcattggaagttcccccaaaacgcgaagtggtggtctacgcacccctcagcaagaaacaggagattttttacaccgccatcgtcaataggactattgccaatatgtttgggtctagtgaaaaagaaactatcgagctgtcaccaactggacgcccaaagagacgaacgcggaaaagtatcaattactcaaaaattgacgacttccctaatgaactggagaaactcatcagccagattcagccagaagtggatcgcgagagagcagttgtagaggtcaacatccctgtggaaagcgaagttaatctgaaattgcagaacattatgatgttgctccgcaaatgctgtaaccacccatacctgatcgaatatcccatagatcctgtcacacaggaattcaagattgacgaggagctcgtgacgaacagcggaaagtttctgattcttgacagaatgctgccagagctcaagaaacgcggacacaaagttctcctcttctcacaaatgactagtatgttagacatattaatggactactgccatctccgcgattttaattttagtcgtctagatggcagcatgagctattcagaaagagaaaagaatatgcactccttcaacaccgaccccgaggtgttcatattcttggttagcacccgcgcaggtggattaggcatcaatctcacggccgctgatacggtcatcatctacgactcagactggaatcctcagtccgatctccaggctcaggatcggtgccataggatcggtcagaccaagcccgtcgtcgtgtaccggttagtgaccgctaacactattgaccaaaagattgtggagcgcgctgccgcaaaacgtaagctcgagaagctaatcatccacaaaaaccactttaagggaggacaatctggcctgaacttgtcgaagaattttctggatccaaaggaacttatggagctactgaagtcccgagactatgaacgcgagataaaaggaagcagagaaaaggtgatctccgacaaagacctcgagctcctcttagaccggtccgaccttattgaccaaatgaatgcttccggaccaatcaaggaaaagatggggattttcaagattctagagaactccgaggactcctctcctgaatgccttttttag

SEQ ID NO: 196447 - DNA, 2517 bp, Artificial Sequence
  derived and/or modified sequence
atgcccgccgagagacccgccggcagcggcggcagcgaggcccccgccatggtggagcagctggacaccgccgtgatcacccccgccatgctggaggaggaggagcagctggaggccgccggcctggagagagagagaaagatgctggagaaggccagaatgagctgggacagagagagcaccgagatcagatacagaagactgcagcacctgctggagaagagcaacatctacagcaagttcctgctgaccaagatggagcagcagcagctggaggagcagaagaagaaggagaagctggagagaaagaaggagagcctgaaggtgaagaagggcaagaacagcatcgacgccagcgaggagaagcccgtgatgagaaagaagagaggcagagaggacgagagctacaacatcagcgaggtgatgagcaaggaggagatcctgagcgtggccaagaagaacaagaaggagaacgaggacgagaacagcagcagcaccaacctgtgcgtggaggacctgcagaagaacaaggacagcaacagcatcatcaaggacagactgagcgagaccgtgagacagaacaccaagttcttcttcgaccccgtgagaaagtgcaacggccagcccgtgcccttccagcagcccaagcacttcaccggcggcgtgatgagatggtaccaggtggagggcatggagtggctgagaatgctgtgggagaacggcatcaacggcatcctggccgacgagatgggcctgggcaagaccgtgcagtgcatcgccaccatcgccctgatgatccagagaggcgtgcccggccccttcctggtgtgcggccccctgagcaccctgcccaactggatggccgagttcaagagattcacccccgacatccccaccatgctgtaccacggcacccaggaggagagacagaagctggtgagaaacatctacaagagaaagggcaccctgcagatccaccccgtggtgatcaccagcttcgagatcgccatgagagacagaaacgccctgcagcactgctactggaagtacctgatcgtggacgagggccacagaatcaagaacatgaagtgcagactgatcagagagctgaagagattcaacgccgacaacaagctgctgctgaccggcacccccctgcagaacaacctgagcgagctgtggagcctgctgaacttcctgctgcccgacgtgttcgacgacctgaagagcttcgagagctggttcgacatcaccagcctgagcgagaccgccgaggacatcatcgccaaggagagagagcagaacgtgctgcacatgctgcaccagatcctgacccccttcctgctgagaagactgaagagcgacgtggccctggaggtgccccccaagagagaggtggtggtgtacgcccccctgagcaagaagcaggagatcttctacaccgccatcgtgaacagaaccatcgccaacatgttcggcagcagcgagaaggagaccatcgagctgagccccaccggcagacccaagagaagaaccagaaagagcatcaactacagcaagatcgacgacttccccaacgagctggagaagctgatcagccagatccagcccgaggtggacagagagagagccgtggtggaggtgaacatccccgtggagagcgaggtgaacctgaagctgcagaacatcatgatgctgctgagaaagtgctgcaaccacccctacctgatcgagtaccccatcgaccccgtgacccaggagttcaagatcgacgaggagctggtgaccaacagcggcaagttcctgatcctggacagaatgctgcccgagctgaagaagagaggccacaaggtgctgctgttcagccagatgaccagcatgctggacatcctgatggactactgccacctgagagacttcaacttcagcagactggacggcagcatgagctacagcgagagagagaagaacatgcacagcttcaacaccgaccccgaggtgttcatcttcctggtgagcaccagagccggcggcctgggcatcaacctgaccgccgccgacaccgtgatcatctacgacagcgactggaacccccagagcgacctgcaggcccaggacagatgccacagaatcggccagaccaagcccgtggtggtgtacagactggtgaccgccaacaccatcgaccagaagatcgtggagagagccgccgccaagagaaagctggagaagctgatcatccacaagaaccacttcaagggcggccagagcggcctgaacctgagcaagaacttcctggaccccaaggagctgatggagctgctgaagagcagagactacgagagagagatcaagggcagcagagagaaggtgatcagcgacaaggacctggagctgctgctggacagaagcgacctgatcgaccagatgaacgccagcggccccatcaaggagaagatgggcatcttcaagatcctggagaacagcgaggacagcagccccgagtgcctgttctag

SEQ ID NO: 196448 - protein, 203 aa, Artificial Sequence
  derived and/or modified sequence
MACGATLKRTLDFDPLLSPASPKRRRCAPLSAPTSAAASPLSAAAATAASFSAAAASPQKYLRMEPSPFGDVSSRLTTEQILYNIKQEYKRMQKRRHLETSFQQTDPCCTSDAQPHAFLLSGPASPGTSSAASSPLKKEQPLFTLRQVGMICERLLKEREEKVREEYEEILNTKLAEQYDAFVKFTHDQIMRRYGEQPASYVS

SEQ ID NO: 196449 - DNA, 612 bp, Artificial Sequence
  derived and/or modified sequence
atggcatgtggggcgacactcaagagaaccctcgacttcgaccctctcttgagcccagcttcacccaagagaagacgttgcgctccgctgtcagctcctacatcggccgccgcttctcccctgagcgctgcagctgccactgctgcctcattctcagccgcagctgccagcccgcagaaatacttaaggatggagccttctccctttggagacgtgagttcaaggctcaccacagagcagatcctctacaacattaagcaggagtacaaaagaatgcagaagagacgccatctggagacttcattccaacagactgacccctgctgcacctctgacgcacagccccacgcatttctcctgagcgggcccgcctccccagggacgagttcggccgcctctagtccgctgaagaaggagcagcccctttttacgctccgccaggtgggaatgatatgcgagaggctgctgaaggaacgcgaagagaaggtgcgggaagaatacgaggagatactaaatacaaaactggctgagcagtacgatgcctttgtaaaatttacccatgatcagatcatgaggagatatggagagcagcctgccagttacgtgtcctag

SEQ ID NO: 196450 - DNA, 612 bp, Artificial Sequence
  derived and/or modified sequence
atggcctgtggggccaccctgaagaggaccctggactttgaccccctgctgagccctgccagccccaagagaagaagatgtgcccccctgagcgcccccaccagcgctgctgccagccccctgtctgctgctgctgccacagctgccagcttctctgctgctgctgccagcccccagaagtacctgaggatggagcccagcccctttggagatgtgagcagccggctgaccacagagcagatcctgtacaacatcaagcaggagtacaagaggatgcagaagagaagacacctggagaccagcttccagcagacagacccctgctgcaccagtgatgcccagccccacgccttcctgctgagcggccctgccagccctggcaccagcagcgctgccagcagccccctgaagaaggagcagcccctcttcaccctgcggcaggtgggcatgatctgtgagcggctgctgaaggagcgggaggagaaggtgcgggaggagtatgaggagatcctgaacaccaagctggccgagcagtatgatgcctttgtgaagttcacccatgaccagatcatgaggcgctacggggagcagcctgccagctatgtgtcctag

SEQ ID NO: 196451 - DNA, 1662 bp, Artificial Sequence
  derived and/or modified sequence
ggttggacgtgttcgcttgggttcctgctgcggcagctacctcgcaatctctctgcatcgatcgccgctcgcaagctactgaccgtactcgggcgtattaggagccgcgttccagcctcacaccccacggtgctgttttcgacttcagaaaggatctagtctcagcacagaagcgcctcaggcgcggcgcaaagctcgagcggacggcgggggcggccggagcctctctcgggggagccgcgcctgaggaggcggaagaacccccctgacgcgactggcgtgtgcttctgcccgccaccgcccctcccgctctcacccgggccgtccctggccactgcccctgccgcggaggcagcggcggcagcggctctcctttccacagccggcgctccgcgacccgcttggctcctgagcccgtcgggtaggctctcctcgagttcccgctcttcaccccttccctcaccctcttctttcgtcacccgtccccgaccccacccgagcccggcgcctcagctgcccccggccatggcgtgcggagccactctgaaaaggactctggatttcgacccgctgttgagcccggcgtccccgaagcgcaggcgatgtgcgccattgtcggcgcccacctcggccgctgcctccccgttgtcggcggccgcggccaccgccgcctccttctccgctgcggccgcctcgccgcagaagtatctccgaatggagccatcccccttcggcgacgtctcctcccgcctcaccacagaacaaattctgtacaacataaaacaagagtataaacgaatgcagaagagaagacatttagaaacgagtttccaacagacagatccgtgttgtacttctgatgcacagccacatgcatttctcctcagtggaccagcttcaccagggacttcatctgcagcatcctcaccattaaaaaaagaacagcccttatttactctacggcaggttgggatgatctgtgaacgtttgttgaaagaacgtgaagagaaagttcgagaagaatatgaagaaatattgaacacaaaacttgcagaacaatatgatgcgtttgtgaagtttacgcatgatcaaataatgcgacgatatggagaacagcctgctagctatgtttcatgaatcacgtatcctgcatttgtgggctgccttgttccttgttgagttgttgcaagaggtcccaattatgacatgcagcaatgccaataccccttctgtgaatacaggttatttcaagctttcgtcagtggcaaccactcttaggcagcagcaactggttttggaaatttccctgatgtcagtaccacctggatgtggacctttgctacctgtattaataccagtggcctcattttgctgtatcattacaatttggcttcttatattaatgtttgaaaaggattaaagctggtattctagaacatgcccttcactggttgtgtaaataaaactgtagaatgacacttcagatgaagttagtgtgattttaattgtgcactacaaccgagctgtaaccagttactaattttagaatgtaatcccaggacaatattaagcaaatagcctgcagtgcttcctgtgaaatagtgaaggaggagggcatttctgtattccaggacttcttggggtttcagaatgggtttgtat

SEQ ID NO: 196452 - DNA, 612 bp, Artificial Sequence
  derived and/or modified sequence
atggcctgcggcgccaccctgaagcggaccctggacttcgaccccctgctttcccctgcttcccccaagaggcggcgatgtgcccccttatccgcccctacttctgcagccgcgagtcctctgtctgcggcggcagccacggcagcttccttttctgccgccgccgccagtccgcaaaagtacttgcggatggagcctagcccttttggtgacgtgtctagccgccttaccaccgaacaaatcctatacaacataaagcaggagtataaacggatgcagaaacgccgacatttggagacctcctttcagcagactgacccctgctgcactagcgacgctcagcctcacgccttcttgctaagtggacccgcatcccccggcacttctagcgcagcatccagccctctcaaaaaagaacagccccttttcacactgcgtcaggtgggcatgatctgtgaacggttgctcaaagaaagggaggaaaaggttcgagaggagtacgaagaaattctgaatacaaaactcgccgagcagtacgatgcattcgttaaattcacacacgaccagatcatgagaaggtacggagaacaacccgcctcctacgtatcttag

SEQ ID NO: 196453 - DNA, 612 bp, Artificial Sequence
  derived and/or modified sequence
atggcatgtggggcaacgctgaaaagaaccctggattttgacccactgctgtcaccggcatccccaaagcgaaggagatgcgcacctctttccgcaccaacctcggctgctgcctcccccctgtcggccgctgccgcaaccgcagctagctttagtgcagcagccgcaagcccacagaagtacttgagaatggaaccctcaccatttggcgacgtgtccagcagactcaccactgagcaaatactgtacaatatcaagcaggaatataaaagaatgcaaaaacgtaggcatctcgaaacctcttttcagcaaacggacccatgttgcactagcgacgcgcagccgcacgccttcctgttgagcggacctgcctctcctggtacctctagtgcggcttcatctcccctgaaaaaggaacagcccctttttacccttagacaagtgggtatgatatgtgagcgcctcctcaaagagcgcgaagagaaggtgagagaagaatacgaggagattctgaacacgaaattggcagaacagtacgacgcctttgtcaaattcactcacgatcagatcatgagacggtatggtgagcaaccagcatcgtacgtcagctag

SEQ ID NO: 196454 - DNA, 612 bp, Artificial Sequence
  derived and/or modified sequence
atggcctgcggcgccaccctgaagagaaccctggacttcgaccccctgctgagccccgccagccccaagagaagaagatgcgcccccctgagcgcccccaccagcgccgccgccagccccctgagcgccgccgccgccaccgccgccagcttcagcgccgccgccgccagcccccagaagtacctgagaatggagcccagccccttcggcgacgtgagcagcagactgaccaccgagcagatcctgtacaacatcaagcaggagtacaagagaatgcagaagagaagacacctggagaccagcttccagcagaccgacccctgctgcaccagcgacgcccagccccacgccttcctgctgagcggccccgccagccccggcaccagcagcgccgccagcagccccctgaagaaggagcagcccctgttcaccctgagacaggtgggcatgatctgcgagagactgctgaaggagagagaggagaaggtgagagaggagtacgaggagatcctgaacaccaagctggccgagcagtacgacgccttcgtgaagttcacccacgaccagatcatgagaagatacggcgagcagcccgccagctacgtgagctag

SEQ ID NO: 196455 - protein, 120 aa, Artificial Sequence
  derived and/or modified sequence
MTSLAQQLQRLALPQSDASLLSRDEVASLLFDPKEAATIDRDTAFAIGCTGLEELLGIDPSFEQFEAPLFSQLAKTLERSVQTKAVNKQLDENISLFLIHLSPYFLLKPAQKCLEWLIHR

SEQ ID NO: 196456 - protein, 2063 aa, Artificial Sequence
  derived and/or modified sequence
MTSLAQQLQRLALPQSDASLLSRDEVASLLFDPKEAATIDRDTAFAIGCTGLEELLGIDPSFEQFEAPLFSQLAKTLERSVQTKAVNKQLDENISLFLIHLSPYFLLKPAQKCLEWLIHRFHIHLYNQDSLIACVLPYHETRIFVRVIQLLKINNSKHRWFWLLPVKQSGVPLAKGTLITHCYKDLGFMDFICSLVTKSVKVFAEYPGSSAQLRVLLAFYASTIVSALVAAEDVSDNIIAKLFPYIQKGLKSSLPDYRAATYMIICQISVKVTMENTFVNSLASQIIKTLTKIPSLIKDGLSCLIVLLQRQKPESLGKKPFPHLCNVPDLITILHGISETYDVSPLLHYMLPHLVVSIIHHVTGEETEGMDGQIYKRHLEAILTKISLKNNLDHLLASLLFEEYISYSSQEEMDSNKVSLLNEQFLPLIRLLESKYPRTLDVVLEEHLKEIADLKKQELFHQFVSLSTSGGKYQFLADSDTSLMLSLNHPLAPVRILAMNHLKKIMKTSKEGVDESFIKEAVLARLGDDNIDVVLSAISAFEIFKEHFSSEVTISNLLNLFQRAELSKNGEWYEVLKIAADILIKEEILSENDQLSNQVVVCLLPFMVINNDDTESAEMKIAIYLSKSGICSLHPLLRGWEEALENVIKSTKPGKLIGVANQKMIELLADNINLGDPSSMLKMVEDLISVGEEESFNLKQKVTFHVILSVLVSCCSSLKETHFPFAIRVFSLLQKKIKKLESVITAVEIPSEWHIELMLDRGIPVELWAHYVEELNSTQRVAVEDSVFLVFSLKKFIYALKAPKSFPKGDIWWNPEQLKEDSRDYLHLLIGLFEMMLNGADAVHFRVLMKLFIKVHLEDVFQLFKFCSVLWTYGSSLSNPLNCSVKTVLQTQALYVGCAMLSSQKTQCKHQLASISSPVVTSLLINLGSPVKEVRRAAIQCLQALSGVASPFYLIIDHLISKAEEITSDAAYVIQDLATLFEELQREKKLKSHQKLSETLKNLLSCVYSCPSYIAKDLMKVLQGVNGEITKPFFAAISDEKVQQKLLRMLFDLLVNCKNSHCAQTVSSVFKGISVNAEQVRIELEPPDKAKPLGTVQQKRRQKMQQKKSQDLESVQEVGGSYWQRVTLILELLQHKKKLRSPQILVPTLFNLLSRCLEPLPQEQGNMEYTKQLILSCLLNICQKLSPDGGKIPKDILDEEKFNVELIVQCIRLSEMPQTHHHALLLLGTVAGIFPDKVLHNIMSIFTFMGANVMRLDDTYSFQVINKTVKMVIPALIQSDSGDSIEVSRNVEEIVVKIISVFVDALPHVPEHRRLPILVQLVDTLGAEKFLWILLILLFEQYVTKTVLAAAYGEKDAILEADTEFWFSVCCEFSVQHQIQSLMNILQYLLKLPEEKEETIPKAVSFNKSESQEEMLQVFNVETHTSKQLRHFKFLSVSFMSQLLSSNNFLKKVVESGGPEILKGLEERLLETVLGYISAVAQSMERNADKLTVKFWRALLSKAYDLLDKVNALLPTETFIPVIRGLVGNPLPSVRRKALDLLNNKLQQNISWKKTIVTRFLKLVPDLLAIVQRKKKEGEEEQAINRQTALYTLKLLCKNFGAENPDPFVPVLNTAVKLIAPERKEEKNVLGSALLCIAEVTSTLEALAIPQLPSLMPSLLTTMKNTSELVSSEVYLLSALAALQKVVETLPHFISPYLEGILSQVIHLEKITSEMGSASQANIRLTSLKKTLATTLAPRVLLPAIKKTYKQIEKNWKNHMGPFMSILQEHIGVMKKEELTSHQSQLTAFFLEALDFRAQHSENDLEEVGKTENCIIDCLVAMVVKLSEVTFRPLFFKLFDWAKTEDAPKDRLLTFYNLADCIAEKLKGLFTLFAGHLVKPFADTLNQVNISKTDEAFFDSENDPEKCCLLLQFILNCLYKIFLFDTQHFISKERAEALMMPLVDQLENRLGGEEKFQERVTKHLIPCIAQFSVAMADDSLWKPLNYQILLKTRDSSPKVRFAALITVLALAEKLKENYIVLLPESIPFLAELMEDECEEVEHQCQKTIQQLETVLGEPLQSYF

SEQ ID NO: 196457 - protein, 2144 aa, Artificial Sequence
  derived and/or modified sequence
MTSLAQQLQRLALPQSDASLLSRDEVASLLFDPKEAATIDRDTAFAIGCTGLEELLGIDPSFEQFEAPLFSQLAKTLERSVQTKAVNKQLDENISLFLIHLSPYFLLKPAQKCLEWLIHRFHIHLYNQDSLIACVLPYHETRIFVRVIQLLKINNSKHRWFWLLPVKQSGVPLAKGTLITHCYKDLGFMDFICSLVTKSVKVFAEYPGSSAQLRVLLAFYASTIVSALVAAEDVSDNIIAKLFPYIQKGLKSSLPDYRAATYMIICQISVKVTMENTFVNSLASQIIKTLTKIPSLIKDGLSCLIVLLQRQKPESLGKKPFPHLCNVPDLITILHGISETYDVSPLLHYMLPHLVVSIIHHVTGEETEGMDGQIYKRHLEAILTKISLKNNLDHLLASLLFEEYISYSSQEEMDSNKVSLLNEQFLPLIRLLESKYPRTLDVVLEEHLKEIADLKKQELFHQFVSLSTSGGKYQFLADSDTSLMLSLNHPLAPVRILAMNHLKKIMKTSKEGVDESFIKEAVLARLGDDNIDVVLSAISAFEIFKEHFSSEVTISNLLNLFQRAELSKNGEWYEVLKIAADILIKEEILSENDQLSNQVVVCLLPFMVINNDDTESAEMKIAIYLSKSGICSLHPLLRGWEEALENVIKSTKPGKLIGVANQKMIELLADNINLGDPSSMLKMVEDLISVGEEESFNLKQKVTFHVILSVLVSCCSSLKETHFPFAIRVFSLLQKKIKKLESVITAVEIPSEWHIELMLDRGIPVELWAHYVEELNSTQRVAVEDSVFLVFSLKKFIYALKAPKSFPKGDIWWNPEQLKEDSRDYLHLLIGLFEMMLNGADAVHFRVLMKLFIKVHLEDVFQLFKFCSVLWTYGSSLSNPLNCSVKTVLQTQALYVGCAMLSSQKTQCKHQLASISSPVVTSLLINLGSPVKEVRRAAIQCLQALSGVASPFYLIIDHLISKAEEITSDAAYVIQDLATLFEELQREKKLKSHQKLSETLKNLLSCVYSCPSYIAKDLMKVLQGVNGEMVLSQLLPMAEQLLEKIQKEPTAVLKDEAMVLHLTLGKYNEFSVSLLNEDPKSLDIFIKAVHTTKELYAGMPTIQITALEKITKPFFAAISDEKVQQKLLRMLFDLLVNCKNSHCAQTVSSVFKGISVNAEQVRIELEPPDKAKPLGTVQQKRRQKMQQKKSQDLESVQEVGGSYWQRVTLILELLQHKKKLRSPQILVPTLFNLLSRCLEPLPQEQGNMEYTKQLILSCLLNICQKLSPDGGKIPKDILDEEKFNVELIVQCIRLSEMPQTHHHALLLLGTVAGIFPDKVLHNIMSIFTFMGANVMRLDDTYSFQVINKTVKMVIPALIQSDSGDSIEVSRNVEEIVVKIISVFVDALPHVPEHRRLPILVQLVDTLGAEKFLWILLILLFEQYVTKTVLAAAYGEKDAILEADTEFWFSVCCEFSVQHQIQSLMNILQYLLKLPEEKEETIPKAVSFNKSESQEEMLQVFNVETHTSKQLRHFKFLSVSFMSQLLSSNNFLKKVVESGGPEILKGLEERLLETVLGYISAVAQSMERNADKLTVKFWRALLSKAYDLLDKVNALLPTETFIPVIRGLVGNPLPSVRRKALDLLNNKLQQNISWKKTIVTRFLKLVPDLLAIVQRKKKEGEEEQAINRQTALYTLKLLCKNFGAENPDPFVPVLNTAVKLIAPERKEEKNVLGSALLCIAEVTSTLEALAIPQLPSLMPSLLTTMKNTSELVSSEVYLLSALAALQKVVETLPHFISPYLEGILSQVIHLEKITSEMGSASQANIRLTSLKKTLATTLAPRVLLPAIKKTYKQIEKNWKNHMGPFMSILQEHIGVMKKEELTSHQSQLTAFFLEALDFRAQHSENDLEEVGKTENCIIDCLVAMVVKLSEVTFRPLFFKLFDWAKTEDAPKDRLLTFYNLADCIAEKLKGLFTLFAGHLVKPFADTLNQVNISKTDEAFFDSENDPEKCCLLLQFILNCLYKIFLFDTQHFISKERAEALMMPLVDQLENRLGGEEKFQERVTKHLIPCIAQFSVAMADDSLWKPLNYQILLKTRDSSPKVRFAALITVLALAEKLKENYIVLLPESIPFLAELMEDECEEVEHQCQKTIQQLETVLGEPLQSYF

SEQ ID NO: 196458 - DNA, 363 bp, Artificial Sequence
  derived and/or modified sequence
atgacttctttggcccagcagctccagaggctggctctgccacaatctgacgcttcactcttgtcgcgcgatgaagtggcgtccctactgtttgatcccaaggaagccgccacaatcgaccgggatactgcctttgcgatcggttgcacgggcttagaggaactcctgggaattgacccatctttcgagcagttcgaggcaccactcttctcacagctagctaaaaccctggaaagatccgttcagaccaaagctgtgaacaaacaactcgacgagaacattagtttgtttctgatccatcttagcccatacttcctgctgaagcctgcccagaagtgtctggaatggctgattcatagatag

SEQ ID NO: 196459 - DNA, 6192 bp, Artificial Sequence
  derived and/or modified sequence
atgaccagcctggcacagcagctgcagcggctggccttgcctcaatccgacgcctctcttctgtctagagatgaggtggctagcttactcttcgacccgaaagaagccgccactattgaccgcgatactgcctttgccattggatgtacaggattggaagagttgctgggtattgaccccagctttgagcagtttgaagcccctcttttttcccagctcgccaaaacattagagaggtcagttcagactaaagctgtaaacaagcagctggacgagaatatttcacttttcttgattcacctttcgccctatttcctgttgaaacccgctcagaagtgcttggagtggcttatccatcgctttcacatccatctttataatcaggatagcctgatcgcttgcgtgctaccctatcatgagacacgcattttcgtgcgggtgattcaactgcttaaaatcaacaacagtaaacatcgatggttctggctgctgcctgtaaagcaatccggggtgcctttggccaaggggaccctcataacacattgctataaagatctgggcttcatggacttcatttgcagcctggttaccaaatctgtaaaggtctttgcggagtacccagggtccagcgcacagcttcgggttctgctcgcgttttatgccagcacaatcgtaagcgctctggtggcagcggaggacgtgtcggataacataatcgctaagctgtttccctacatccaaaaaggactaaagtcaagcctgcctgattatcgggctgccacatatatgatcatctgtcagatatctgtgaaagtgacgatggagaatacattcgtgaattctcttgcttcccaaattatcaaaactcttactaaaatccctagtttgatcaaggatgggctgtcatgcctaatcgtgctgctgcaacgccagaaacctgaatcactcggcaagaaaccgtttccccatctttgtaatgtgcccgatctgataaccattctgcacggcataagcgaaacctatgacgttagtcctcttctgcactatatgctgccgcacctggtcgtgtccattattcaccatgttaccggagaagagacagaaggaatggatggtcaaatctacaagaggcatctggaagcgatcctcaccaaaatcagcctgaaaaataacctggaccatcttctcgcgtcgctcctgttcgaggagtacataagctattcttcacaggaagaaatggatagcaacaaggtgagtctgttgaacgagcagttccttcccctgattaggctgctggaatcaaagtaccctagaacactggatgtggtgctggaagagcacctgaaagaaattgcagacctgaagaagcaggagctgttccaccaatttgtgtctctgtccacctctggggggaagtaccagttccttgcggactccgacacatcgttaatgctgtccctgaaccatccactggctcctgttcgtatcttggcaatgaatcacctgaagaagataatgaagacgagtaaagaaggggtcgacgaatcatttataaaggaggcggtactcgcccgcctcggggatgacaatattgatgtcgttttgagcgccatctcagcgttcgagatctttaaggagcatttcagttcagaggtcactattagcaacctcctgaacctgtttcagcgcgccgaacttagtaagaacggtgagtggtacgaagtgttgaagatcgccgcagatattttgattaaagaggaaatcctgtccgagaacgaccaattatccaaccaggttgtggtgtgtctcctccctttcatggtcatcaacaacgatgacaccgagtctgccgagatgaagatcgccatctatttgtctaagtctggcatctgttctctgcaccctctgttgcgtgggtgggaagaggctctggaaaatgtgatcaagagcacgaaaccaggcaagttgattggcgtggctaatcaaaaaatgatcgaactcttggcagacaacataaatctgggggatccctcatctatgctgaagatggttgaagacctcatttccgttggtgaggaagaatcttttaatctcaagcaaaaagtgaccttccatgttatcctgtccgtacttgtctcctgttgttccagcctgaaggaaacccatttcccttttgctattcgagttttcagcctgctccagaagaagataaaaaagttggaatctgttatcactgccgtagagatccccagtgagtggcacattgagctcatgctagacaggggtatccctgtggaactatgggcacactatgtcgaggaacttaacagtacccagcgggtggccgtcgaggatagtgtcttcctggtcttttccctgaagaagtttatctatgcactgaaggcacctaaaagtttccccaagggcgatatctggtggaaccctgagcagctgaaagaagatagtcgcgattacctgcatctgctcatcgggctgtttgaaatgatgcttaatggcgccgacgcagtgcactttagagtgctgatgaagctgttcatcaaggtgcacctggaggatgtctttcagttgttcaagttctgctcagttctgtggacatatgggagctccttgtccaatcctctaaattgcagtgtaaaaacggtgttacaaacccaggccctgtatgtgggttgcgctatgttatcgagccaaaagacccagtgcaaacaccagctggcgtcgatcagctctccagtggtcacgagtctgctcatcaaccttggctctcccgtgaaggaggtgcgccgtgccgctatacaatgcctacaagcactgtcaggcgttgctagtccattttatctgatcattgaccacttgatatccaaggccgaggaaattacctccgatgccgcgtacgtgatccaggacctggcgactctgttcgaggaattgcagcgtgaaaagaagcttaaatctcatcagaagttatctgaaactcttaaaaatctgttgtcctgcgtctacagttgtccctcatatattgcgaaagatttgatgaaagtcctccagggagtgaacggagaaattaccaaacctttttttgccgccatttctgacgagaaggtccagcagaaactgttgcgcatgctttttgatcttctcgtaaattgcaagaatagccattgcgctcagacggtgtcgtccgtcttcaaggggattagtgtgaacgctgaacaggtgcgcattgagttagagccccctgacaaggctaagcctctggggacagtacagcaaaaacggaggcaaaaaatgcagcagaaaaagtcccaagatctggaaagtgtccaggaggtaggcggatcatattggcagcgagtgaccctgatactcgagctactgcaacataaaaagaagctccgaagccctcaaattctcgtccctacactgttcaacctgctgtcgagatgtttggaacctttaccccaggagcagggcaacatggagtacactaagcagcttattcttagctgtctcctcaacatatgccagaaactcagcccagatgggggaaagatccccaaagacattctcgacgaagagaaatttaatgtggagttgattgtccagtgcatcaggctgagcgaaatgccacagacacatcaccacgccctcctgctgcttggtacggtggctgggatttttccagataaggttttgcacaatatcatgtccattttcacattcatgggcgcaaatgtgatgcgtctcgacgacacatattcattccaggtaatcaataaaactgttaagatggtcatcccagcactgatacagtcagattccggggactctatcgaggtgagccgcaacgtggaagagattgtggtcaagatcatttccgtctttgtcgatgctctccctcacgtgccagaacacagacgccttcctattctggtccagttagtcgacacactgggcgccgagaagtttctgtggatcttactgatcttgctgttcgaacagtacgtgaccaaaaccgttctggccgctgcttacggggagaaggatgcaattttggaagccgatactgagttctggttcagtgtctgctgcgagttttcagtgcagcatcagatccaaagtctgatgaatattcttcaatatctgctcaaactcccagaggagaaagaagaaaccataccaaaggccgtttccttcaacaaatctgaaagtcaggaagagatgctgcaggtgttcaacgtggaaacccacacaagcaaacaactgaggcacttcaagttcctttcagtgagtttcatgagtcagctgctctcgtccaataattttttgaaaaaggtggtagaatctggcggcccggaaattctcaaggggctcgaagagaggctgctggaaacagtacttggatacatctctgcggtcgcacaatcaatggagaggaacgcagacaaactgactgtcaagttttggcgcgccctgctcagcaaggcttatgatctgctggacaaagtgaacgccctcctaccgacagaaacctttataccggttatcaggggactagtcggaaaccctttgccctccgttcggcgcaaggccctggatctattgaataataaactgcaacagaatatttcttggaagaagactattgtgactcgatttctgaaacttgtgcctgacctcttagctatcgtccagcggaagaaaaaggaaggagaggaagagcaggctattaacagacaaactgccctgtatacgctcaagctgctctgtaagaacttcggagcagagaatcctgacccattcgtgccagttctcaatacagccgttaagctcattgcgcccgagcgcaaggaagagaaaaatgttctagggtctgcgctgctatgcattgctgaagtgacatcaaccctcgaagctttagccatcccgcagctgccctctctgatgccctcactactcactaccatgaagaatacttctgagctcgtgtcctcggaggtgtacctgctgagcgccctggctgctctgcagaaggttgttgaaactcttccgcacttcatctccccatatcttgagggcatactgagtcaggtgattcatctcgaaaaaatcaccagcgaaatggggtcagcttctcaggcgaatatcagactcacaagcctcaaaaaaacccttgctactacactggctccacgcgtgttgcttcccgcaatcaagaaaacctataaacaaatcgagaagaactggaagaatcacatgggcccatttatgtcaatcctgcaggaacatataggagttatgaaaaaagaggaactgaccagtcaccagtctcagctgacagcctttttcctggaagcgctggactttagggcccagcattccgagaatgatctggaggaagtcggcaagacagagaactgtatcattgactgtttagtcgccatggtcgtcaagttaagcgaggtgactttccgcccgctctttttcaagctgttcgattgggccaagactgaagacgccccaaaggacaggctacttaccttctacaatctcgccgattgcattgccgagaagctcaagggtctgtttaccctgtttgcaggccacttggtgaaaccctttgcagataccttaaatcaggtgaacatatccaagaccgatgaggcgtttttcgactccgagaacgatcctgagaaatgttgtttgctgctccagttcatcctgaattgcctgtacaagatctttttgttcgatacgcaacactttatctcaaaggaaagagcagaagcccttatgatgcctcttgtagaccaactcgagaacagactcggaggagaggaaaaattccaggagcgagtgactaaacaccttattccatgtattgcccaatttagcgtcgcaatggcagatgattccttgtggaaaccactcaattatcagattctcctcaaaacacgggactccagtcccaaagtgcgctttgccgctttgatcactgtgttagccctggcagagaagctgaaggagaattacatagttctgctacccgaatccattccctttttggccgagctgatggaagatgagtgcgaggaggtggagcatcagtgtcagaaaacaatccagcaactggaaacggttctgggagagcctctgcagtcctacttctag

SEQ ID NO: 196460 - DNA, 6435 bp, Artificial Sequence
  derived and/or modified sequence
atgacaagcctggcacaacaactccagcggcttgctctacctcagtcggatgcatctctgctttcgagagacgaggtggccagtctactattcgaccccaaggaagccgcaaccatcgatagggacaccgccttcgctattggatgtacaggactggaggaactgttaggcatcgacccttccttcgaacaattcgaggccccactgttttcgcagctggcaaagacactggaaagatccgtccagacgaaggccgtgaataaacagttagacgaaaatatttcgctctttctaatccatctttccccgtattttctcctgaagccggcccagaagtgcctggaatggcttatccatcggttccacatacacctgtataaccaagacagtttgattgcgtgtgtgcttccataccacgagacacggatcttcgtccgggttatccagcttcttaaaattaataactcaaaacaccgctggttttggctgctccccgtcaagcagagtggcgtacccctggccaaaggcacattgatcacgcattgctacaaagacctgggcttcatggactttatctgctctctggtcacgaagtctgtcaaggtgtttgccgagtacccaggaagctcagcccagttacgcgtgttgcttgctttttatgcgtctaccattgtgtccgccctggttgcagccgaggatgtctctgacaacataatcgccaaactgttcccctacatccagaaggggctgaagagttctctgcccgactaccgggcggccacttatatgattatctgccaaatcagtgtgaaggtgaccatggagaataccttcgtcaactctcttgcgtcccaaataataaaaacattgaccaagattcccagccttattaaggacggcctcagttgccttatcgtgctgctccagcggcagaagccggagtctctggggaagaaaccctttccacatctatgcaatgttccagatctcatcaccattctccacgggatcagcgagacatatgacgtgtcccccctgctgcattacatgctgccgcaccttgtggtgtcgattattcaccacgtaacaggggaagaaacggaaggaatggatggccagatttacaagaggcatcttgaagcgatcctcacaaaaatttctctgaaaaacaatctggaccatctgctcgcgtccctactctttgaggaatatatatcgtattccagccaggaggagatggattctaataaggtatcgttactcaatgagcaattcctgcctctcattagactcctggaatcaaagtacccccgcaccttggatgtggtgctcgaggaacacttgaaagaaatcgccgatctcaaaaaacaggaactgtttcaccagttcgtaagcctctcaacaagcgggggtaagtatcagtttttagcagactccgatacatctttgatgctgtcactaaatcaccccctcgcccccgtgcgaattttagccatgaaccacctgaagaagatcatgaagacttccaaggaaggagtggacgagagcttcataaaggaagcagtgctggctcgtctgggcgatgataatattgatgtggttctttcagccatatctgcttttgaaatcttcaaggaacatttcagtagcgaagtaacaatctctaacctgctgaacctcttccaaagggcagagctgagcaagaacggcgaatggtatgaggtcctgaaaatcgctgccgatatactcattaaagaggaaattctctcggaaaacgatcagttaagtaaccaagtggttgtgtgtctgctgcccttcatggtcataaataacgatgacacagagtcagctgagatgaaaatcgccatttatcttagtaaatcagggatttgtagtctccaccctctgctgagggggtgggaagaagccctggaaaatgtgattaaaagtacaaagccgggcaagcttatcggtgtggccaaccaaaaaatgattgaactattggctgacaacatcaacttgggggaccctagttcaatgcttaaaatggtcgaggacctcatctccgtgggcgaggaggaaagtttcaatttgaagcagaaggtaacttttcatgtgattctgtccgttctggtgtcctgctgctctagtctaaaagagacccatttcccatttgctattagggtattttcactgttgcagaaaaagattaaaaagctggaaagcgtcatcaccgctgtagagattcctagtgagtggcatatcgaattgatgctggacagggggattccagtggagctctgggcccattacgtggaagaactcaacagcacacagagggtagccgtggaggattcagtctttttggtgttctcgttgaagaagtttatctatgcactcaaagcccctaagtcctttcccaagggggacatctggtggaaccccgaacagctcaaggaggacagccgagactacctgcacttactgataggactcttcgagatgatgctgaacggggctgacgccgtccactttagagtgctgatgaaactgttcattaaagtccatttagaagacgtatttcagctgttcaagttctgttcagtgctctggacttacggatccagtctgagcaaccctctgaactgctcggtcaaaactgtgcttcaaacacaggccctttacgttgggtgcgcaatgctttctagtcagaagacccagtgtaagcaccagctcgcctcgatcagcagccctgtggtcaccagcctgctgatcaacctaggctcacctgtcaaggaggtgagaagggcagcaatccaatgcctgcaggccctgtccggggtcgcctcgcccttctacctcatcatagaccacttgatcagcaaggccgaggagataacttcagacgccgcatacgtcattcaggatcttgctacccttttcgaagaactgcagagagagaaaaaattgaagagccatcagaaactgtctgagaccctgaagaacttgctgagctgtgtgtactcctgccccagctatatagccaaggacctgatgaaggtcctgcagggagtcaatggcgagatggttctatctcagctgctacctatggccgaacaactgctagaaaagattcagaaggagcctaccgcggtgcttaaggacgaggctatggtgctgcacctgacgcttggcaaatacaatgaattctccgtcagcctgctgaatgaagatccaaagagtctggacattttcataaaagcagtgcataccacaaaggagctctatgcaggcatgccaacgattcagatcaccgccttggaaaaaatcaccaagcctttctttgcggccatttcagatgaaaaagtgcagcaaaagcttctgcgaatgctgtttgatttactagttaactgtaagaatagccactgtgcccaaaccgtgagctccgtttttaagggtattagtgttaatgccgagcaagtacgcattgaactcgagccaccagataaggcgaaacccctgggtactgtccagcagaaaaggcgtcagaaaatgcaacagaaaaagtctcaggacctggagagcgtccaagaagtgggcggctcatattggcagcgggttacactgatattggagctgttgcagcacaaaaagaaactgagaagcccccaaattctcgtccctacactttttaatctcctatcccgctgcctggagcccctgccccaggagcaggggaacatggagtatacaaagcagctgatattgtcctgcctccttaatatatgtcagaaactttctcccgatgggggcaagatccccaaggacatcctagacgaagaaaaattcaatgtggagctaatagtgcagtgcatccgactgtctgagatgcctcaaacccatcatcacgcacttttgctgctcgggaccgtggccggcattttccccgataaagtgctgcacaatattatgtccatttttacattcatgggcgctaacgtcatgaggctagacgacacctactcctttcaggtgatcaacaagacagtgaagatggtgattccagccctcatccagtctgacagtggtgactccattgaagtcagccgaaacgttgaagaaatcgtggtgaagatcatatcagtcttcgttgatgcattgcctcacgtgccagaacatagacggctacctatccttgtgcagctcgtggacaccctcggcgcggaaaagtttctatggatcctcctaattctcctgtttgaacaatatgttacaaagaccgtgctggccgccgcttacggcgagaaggacgcaatattggaagcagacaccgagttttggtttagcgtctgctgtgaattctccgttcagcaccagatccagtcgctaatgaacatcctgcagtaccttctaaagctcccagaggagaaggaggagaccattcctaaggctgtgagttttaacaaaagcgagtctcaagaagaaatgttgcaggtgttcaatgtggaaactcacacgtctaaacagctccgtcacttcaaattcctctcggtttcatttatgagtcaactattgtctagtaataactttctgaagaaagtggttgagtccgggggtccagagatcttgaaaggactggaagaacggctactcgagaccgtactgggctacatctctgccgtcgcgcagtcgatggaacgcaacgccgataaactcacagtgaagttttggcgcgcacttttatctaaggcgtacgatctcctggataaagtgaatgctctgctgcccacagaaacctttatccctgtgatccgtgggctggtaggcaacccattgccttccgtaaggagaaaggcgttggatctgctgaataacaaactgcagcagaatatcagttggaagaaaactattgtcactcgcttccttaaactcgtgccagacctgctggcaatcgtgcagagaaagaagaaagagggcgaggaggaacaggccatcaatcgtcagaccgctctgtacacgctcaagctcctgtgcaaaaacttcggagccgaaaatcctgatcccttcgttccggtattaaatacggccgtgaaactcatcgcacctgagcgaaaagaggagaaaaacgtgttgggttctgccttactgtgcatcgcggaggtgacctcaacgttggaggcactcgctatcccacagctgccaagtttaatgccttcactgttgacaacaatgaaaaacacatccgaactggtctcctctgaagtgtacctgctaagcgcgttagcagctctgcagaaggtggtcgaaacccttccgcacttcatctccccctatttggaggggattctcagccaagttattcatttagaaaaaattacttccgaaatggggtcagcctcacaggcgaatatcagattgaccagcctgaagaagacgttggctacaacgctcgccccaagagtcttgttacctgccattaagaaaacttacaagcaaattgagaagaactggaaaaaccatatggggccattcatgtctatcctccaggagcacatcggtgtcatgaagaaagaggagctcactagccatcagagccagctgacagcattctttctggaagcccttgattttcgggctcagcacagcgaaaacgatctcgaggaggttgggaaaactgaaaattgtatcatcgactgtttggtcgctatggtggtgaaactgtctgaggtgacttttcggccattgttcttcaagctgtttgattgggcgaagactgaggacgcccccaaagaccgcctgctcaccttttacaacctggcagattgcatcgccgagaagctgaagggtctcttcaccctttttgctggccatctggtgaagccctttgctgacaccttgaatcaggtgaatatcagtaagacagatgaagcgttcttcgattctgaaaacgacccggaaaagtgttgcctgctactgcaattcattctgaactgcctatataagatcttcctgtttgacacccagcactttattagtaaagagcgcgctgaggccctaatgatgcccttggttgaccaattggagaatagacttggcggggaagagaaattccaggaaagggttactaagcacctaatcccctgtatcgcccaatttagcgtcgccatggctgacgactcactgtggaagcccctgaactatcaaattctgctcaagacgcgggactctagccctaaagttcggttcgctgctctgatcactgtgctggcccttgccgaaaagctgaaggagaactacattgtcctactgccagagtcgatccctttcctggcggagttgatggaggacgaatgcgaagaggtcgagcatcagtgtcaaaagactatacagcaacttgaaaccgtgcttggagagccgttacagagctacttctag

SEQ ID NO: 196461 - DNA, 363 bp, Artificial Sequence
  derived and/or modified sequence
atgaccagcctggcccagcagctgcagaggctggccctgccccagagtgatgccagcctgctgagcagagatgaggtggccagcctgctgtttgaccccaaggaggccgccaccatcgaccgggacacagcctttgccatcggctgcaccggcctggaggagctgctgggcatcgaccccagctttgagcagtttgaggcccccctcttcagccagctggccaagaccctggagaggtctgtgcagaccaaggctgtgaacaagcagctggatgagaacatcagcctcttcctgatccacctgagcccctacttcctgctgaagccagcccagaagtgcctggagtggctgatccacaggtag

SEQ ID NO: 196462 - DNA, 6192 bp, Artificial Sequence
  derived and/or modified sequence
atgaccagcctggcccagcagctgcagaggctggccctgccccagagtgatgccagcctgctgagcagagatgaggtggccagcctgctgtttgaccccaaggaggccgccaccatcgaccgggacacagcctttgccatcggctgcaccggcctggaggagctgctgggcatcgaccccagctttgagcagtttgaggcccccctcttcagccagctggccaagaccctggagaggtctgtgcagaccaaggctgtgaacaagcagctggatgagaacatcagcctcttcctgatccacctgagcccctacttcctgctgaagccagcccagaagtgcctggagtggctgatccaccgcttccacatccacctgtacaaccaggacagcctcatcgcctgtgtgctgccctaccacgagacccgcatctttgtgcgggtcatccagctgctgaagatcaacaacagcaagcaccgctggttctggctgctgcctgtgaagcagagcggcgtgcccctggccaagggcaccctcatcacccactgctacaaggacctgggcttcatggacttcatctgcagcctggtgaccaagtctgtgaaggtgtttgctgagtacccaggcagcagcgcccagctgcgggtgctgctggccttctacgccagcaccatcgtgtctgccctggtggccgcagaagatgtgtctgacaacatcatcgccaagctgttcccctacatccagaagggcctgaagagcagcctgcctgactacagagctgccacctacatgatcatctgccagatctctgtgaaggtgaccatggagaacacctttgtgaacagcctggccagccagatcatcaagaccctgaccaagatccccagcctcatcaaggatggcctgagctgcctgattgtgctgctgcagaggcagaagccagagagcctgggcaagaagcccttcccccacctgtgcaatgtgcctgacctgatcaccatcctgcacggcatcagcgagacctatgatgtgagccccctgctgcactacatgctgccccacctggtggtgtccatcatccaccacgtgactggagaggagacagagggcatggatggccagatctacaagaggcacctggaggccatcctgaccaagatcagcctgaagaacaacctggaccacctgctggccagcctgctgtttgaggagtacatctcctacagcagccaggaggagatggacagcaacaaggtgtccctgctgaatgagcagttcctgcccctcatccggctgctggagagcaagtaccccaggaccctggatgtggtgctggaggagcacctgaaggagattgctgacctgaagaagcaggagctgttccaccagtttgtgtccctgagcaccagcggcggcaagtaccagttcctggccgacagcgacaccagcctgatgctgagcctgaaccaccccctggcccctgtgcgcatcctggccatgaaccacctgaagaagatcatgaagaccagcaaggagggcgtggatgagagcttcatcaaggaggccgtgctggcccggctgggagatgacaacattgatgtggtgctgagcgccatcagcgcctttgagatcttcaaggagcacttcagcagcgaggtgaccatcagcaacctgctgaacctcttccagagagctgagctgagcaagaatggagagtggtatgaggtgctgaagattgctgctgacatcctgatcaaggaggagatcctgtctgaaaatgaccagctgagcaaccaggtggtggtgtgcctgctgcccttcatggtgatcaacaatgatgacacagagagcgctgagatgaagatcgccatctacctgagcaagagcggcatctgcagcctgcaccccctgctgcggggctgggaggaggccctggagaatgtcatcaagagcaccaagccaggcaagctgattggagtggccaaccagaagatgattgagctgctggccgacaacatcaacctgggggaccccagctccatgctgaagatggtggaggacctgatctctgtgggggaggaggagagcttcaacctgaagcagaaggtgaccttccacgtgatcctgtctgtgctggtgtcctgctgcagcagcctgaaggagacccacttcccctttgccatccgggtcttcagcctgctgcagaagaagatcaagaagctggagagcgtcatcacagctgtggagatccccagcgagtggcacatcgagctgatgctggaccggggcatccctgtggagctgtgggcccactacgtggaggagctgaacagcacccagagggtggccgtggaggacagcgtcttcctggtgttcagcctgaagaagttcatctatgccctgaaggcccccaagagcttccccaagggggacatctggtggaaccctgagcagctgaaggaggacagccgggactacctgcacctgctgattggcctgtttgagatgatgctgaatggagcagatgctgtgcacttccgggtgctgatgaagctgttcatcaaggtgcacctggaggatgtgttccagctgttcaagttctgcagcgtgctgtggacctacggcagcagcctgagcaaccccctgaactgcagcgtgaagacagtgctgcagacccaggccctgtatgtgggctgtgccatgctgagcagccagaagacccagtgcaagcaccagctggccagcatcagcagccctgtggtgaccagcctgctgatcaacctgggcagccctgtgaaggaggtgagaagagctgccatccagtgcctgcaggccctgagcggcgtggccagccccttctacctgatcatcgaccacctgatcagcaaggccgaggagatcaccagtgatgctgcctacgtgatccaggacctggccaccctgtttgaggagctgcagcgggagaagaagctgaagagccaccagaagctgtctgagaccctgaagaacctgctgagctgtgtgtacagctgccccagctacatcgccaaggacctgatgaaggtgctgcagggcgtgaatggagagatcaccaagcccttctttgctgccatcagtgatgagaaggtgcagcagaagctgctgaggatgctgtttgacctgctggtgaactgcaagaacagccactgtgcccagacagtgagcagcgtcttcaagggcatctctgtgaatgctgagcaggtgcgcatcgagctggagcccccagacaaggccaagcccctgggcaccgtgcagcagaagaggcggcagaagatgcagcagaagaagagccaggacctggagagcgtgcaggaggtgggcggcagctactggcagagggtgaccctcatcctggagctgctgcagcacaagaagaagctgcggagcccccagatcctggtgcccaccctcttcaacctgctgagccgctgcctggagcccctgccccaggagcagggcaacatggagtacaccaagcagctgatcctgagctgcctgctgaacatctgccagaagctgagcccagatggcggcaagatccccaaggacatcctggatgaggagaagttcaacgtggagctgattgtgcagtgcatccggctgtctgagatgccccagacccaccaccacgccctgctgctgctgggcaccgtggccggcatcttcccagacaaggtgctgcacaacatcatgagcatcttcaccttcatgggcgccaacgtgatgaggctggatgacacctacagcttccaggtgatcaacaagacagtgaagatggtgatcccagccctgatccagagcgacagcggggacagcattgaggtgtccagaaatgtggaggagatcgtggtgaagatcatctctgtgtttgtggatgccctgccccacgtgcctgagcaccggcggctgcccatcctggtgcagctggtggacaccctgggcgctgagaagttcctgtggatcctgctgatcctgctgtttgagcagtatgtgaccaagacagtgctggccgccgcctacggggagaaggatgccatcctggaggccgacacagagttctggttctctgtgtgctgtgagttctctgtgcagcaccagatccagagcctgatgaacatcctgcagtacctgctgaagctgcctgaggagaaggaggagaccatccccaaggctgtgtccttcaacaagtctgagagccaggaggagatgctgcaggtgttcaacgtggagacccacaccagcaagcagctgcggcacttcaagttcctgtctgtgtccttcatgagccagctgctgagcagcaacaacttcctgaagaaggtggtggagagcggcggccctgagatcctgaagggcctggaggagcggctgctggagaccgtgctgggctacatctctgctgtggcccagagcatggagagaaatgctgacaagctgactgtgaagttctggagggccctgctgagcaaggcctatgacctgctggacaaggtgaatgccctgctgcccacagagaccttcatccctgtgatccggggcctggtgggcaaccccctgcccagcgtgcggaggaaggccctggacctgctgaacaacaagctgcagcagaacatctcctggaagaagaccatcgtgacccgcttcctgaagctggtgcctgacctgctggccatcgtgcagaggaagaagaaggagggggaggaggagcaggccatcaaccggcagacagccctgtacaccctgaagctgctgtgcaagaactttggagcagaaaatccagacccctttgtgcctgtgctgaacacagctgtgaagctgattgcccctgagaggaaggaggagaagaatgtgctgggcagcgccctgctgtgcatcgccgaggtgaccagcaccctggaggccctggccatcccccagctgcccagcctgatgcccagcctgctgaccaccatgaagaacaccagcgagctggtgagcagcgaggtgtacctgctgagcgccctggccgccctgcagaaggtggtggagaccctgccccacttcatcagcccctacctggagggcatcctgagccaggtgatccacctggagaagatcaccagcgagatgggcagcgccagccaggccaacatccggctgaccagcctgaagaagaccctggccaccaccctggccccccgggtgctgctgcctgccatcaagaagacctacaagcagatcgagaagaactggaagaaccacatgggccccttcatgagcatcctgcaggagcacatcggcgtgatgaagaaggaggagctgaccagccaccagagccagctgacagccttcttcctggaggccctggacttccgggcccagcacagtgaaaatgacctggaggaggtgggcaagacagagaactgcatcatcgactgcctggtggccatggtggtgaagctgtctgaggtgaccttccggcccctcttcttcaagctgtttgactgggccaagacagaagatgcccccaaggaccggctgctgaccttctacaacctggccgactgcatcgccgagaagctgaagggcctcttcaccctgtttgctggccacctggtgaagccctttgctgacaccctgaaccaggtgaacatcagcaagacagatgaggccttctttgacagtgaaaatgaccctgagaagtgctgcctgctgctgcagttcatcctgaactgcctgtacaagatcttcctgtttgacacccagcacttcatcagcaaggagagagctgaggccctgatgatgcccctggtggaccagctggagaaccggctgggcggggaggagaagttccaggagcgggtgaccaagcacctgatcccctgcatcgcccagttctctgtggccatggctgatgacagcctgtggaagcccctgaactaccagatcctgctgaagacccgggacagcagccccaaggtgcgctttgctgccctgatcaccgtgctggccctggccgagaagctgaaggagaactacatcgtgctgctgcctgagagcatccccttcctggccgagctgatggaggatgaatgtgaggaggtggagcaccagtgccagaagaccatccagcagctggagaccgtgctgggggagcccctgcagagctacttctag

SEQ ID NO: 196463 - DNA, 6435 bp, Artificial Sequence
  derived and/or modified sequence
atgaccagcctggcccagcagctgcagaggctggccctgccccagagtgatgccagcctgctgagcagagatgaggtggccagcctgctgtttgaccccaaggaggccgccaccatcgaccgggacacagcctttgccatcggctgcaccggcctggaggagctgctgggcatcgaccccagctttgagcagtttgaggcccccctcttcagccagctggccaagaccctggagaggtctgtgcagaccaaggctgtgaacaagcagctggatgagaacatcagcctcttcctgatccacctgagcccctacttcctgctgaagccagcccagaagtgcctggagtggctgatccaccgcttccacatccacctgtacaaccaggacagcctcatcgcctgtgtgctgccctaccacgagacccgcatctttgtgcgggtcatccagctgctgaagatcaacaacagcaagcaccgctggttctggctgctgcctgtgaagcagagcggcgtgcccctggccaagggcaccctcatcacccactgctacaaggacctgggcttcatggacttcatctgcagcctggtgaccaagtctgtgaaggtgtttgctgagtacccaggcagcagcgcccagctgcgggtgctgctggccttctacgccagcaccatcgtgtctgccctggtggccgcagaagatgtgtctgacaacatcatcgccaagctgttcccctacatccagaagggcctgaagagcagcctgcctgactacagagctgccacctacatgatcatctgccagatctctgtgaaggtgaccatggagaacacctttgtgaacagcctggccagccagatcatcaagaccctgaccaagatccccagcctcatcaaggatggcctgagctgcctgattgtgctgctgcagaggcagaagccagagagcctgggcaagaagcccttcccccacctgtgcaatgtgcctgacctgatcaccatcctgcacggcatcagcgagacctatgatgtgagccccctgctgcactacatgctgccccacctggtggtgtccatcatccaccacgtgactggagaggagacagagggcatggatggccagatctacaagaggcacctggaggccatcctgaccaagatcagcctgaagaacaacctggaccacctgctggccagcctgctgtttgaggagtacatctcctacagcagccaggaggagatggacagcaacaaggtgtccctgctgaatgagcagttcctgcccctcatccggctgctggagagcaagtaccccaggaccctggatgtggtgctggaggagcacctgaaggagattgctgacctgaagaagcaggagctgttccaccagtttgtgtccctgagcaccagcggcggcaagtaccagttcctggccgacagcgacaccagcctgatgctgagcctgaaccaccccctggcccctgtgcgcatcctggccatgaaccacctgaagaagatcatgaagaccagcaaggagggcgtggatgagagcttcatcaaggaggccgtgctggcccggctgggagatgacaacattgatgtggtgctgagcgccatcagcgcctttgagatcttcaaggagcacttcagcagcgaggtgaccatcagcaacctgctgaacctcttccagagagctgagctgagcaagaatggagagtggtatgaggtgctgaagattgctgctgacatcctgatcaaggaggagatcctgtctgaaaatgaccagctgagcaaccaggtggtggtgtgcctgctgcccttcatggtgatcaacaatgatgacacagagagcgctgagatgaagatcgccatctacctgagcaagagcggcatctgcagcctgcaccccctgctgcggggctgggaggaggccctggagaatgtcatcaagagcaccaagccaggcaagctgattggagtggccaaccagaagatgattgagctgctggccgacaacatcaacctgggggaccccagctccatgctgaagatggtggaggacctgatctctgtgggggaggaggagagcttcaacctgaagcagaaggtgaccttccacgtgatcctgtctgtgctggtgtcctgctgcagcagcctgaaggagacccacttcccctttgccatccgggtcttcagcctgctgcagaagaagatcaagaagctggagagcgtcatcacagctgtggagatccccagcgagtggcacatcgagctgatgctggaccggggcatccctgtggagctgtgggcccactacgtggaggagctgaacagcacccagagggtggccgtggaggacagcgtcttcctggtgttcagcctgaagaagttcatctatgccctgaaggcccccaagagcttccccaagggggacatctggtggaaccctgagcagctgaaggaggacagccgggactacctgcacctgctgattggcctgtttgagatgatgctgaatggagcagatgctgtgcacttccgggtgctgatgaagctgttcatcaaggtgcacctggaggatgtgttccagctgttcaagttctgcagcgtgctgtggacctacggcagcagcctgagcaaccccctgaactgcagcgtgaagacagtgctgcagacccaggccctgtatgtgggctgtgccatgctgagcagccagaagacccagtgcaagcaccagctggccagcatcagcagccctgtggtgaccagcctgctgatcaacctgggcagccctgtgaaggaggtgagaagagctgccatccagtgcctgcaggccctgagcggcgtggccagccccttctacctgatcatcgaccacctgatcagcaaggccgaggagatcaccagtgatgctgcctacgtgatccaggacctggccaccctgtttgaggagctgcagcgggagaagaagctgaagagccaccagaagctgtctgagaccctgaagaacctgctgagctgtgtgtacagctgccccagctacatcgccaaggacctgatgaaggtgctgcagggcgtgaatggagagatggtgctgagccagctgctgcccatggccgagcagctgctggagaagatccagaaggagcccacagctgtgctgaaggatgaggccatggtgctgcacctgaccctgggcaagtacaatgagttctctgtgtccctgctgaatgaagaccccaagagcctggacatcttcatcaaggctgtgcacaccaccaaggagctgtatgccggcatgcccaccatccagatcacagccctggagaagatcaccaagcccttctttgctgccatcagtgatgagaaggtgcagcagaagctgctgaggatgctgtttgacctgctggtgaactgcaagaacagccactgtgcccagacagtgtcctctgtgttcaagggcatctctgtgaatgctgagcaggtgagaattgagctggagcccccagacaaggccaagcccctgggcaccgtgcagcagaagaggcggcagaagatgcagcagaagaagagccaggacctggagagcgtgcaggaggtgggcggcagctactggcagagggtgaccctcatcctggagctgctgcagcacaagaagaagctgcggagcccccagatcctggtgcccaccctcttcaacctgctgagccgctgcctggagcccctgccccaggagcagggcaacatggagtacaccaagcagctgatcctgagctgcctgctgaacatctgccagaagctgagcccagatggcggcaagatccccaaggacatcctggatgaggagaagttcaacgtggagctgattgtgcagtgcatccggctgtctgagatgccccagacccaccaccacgccctgctgctgctgggcaccgtggccggcatcttcccagacaaggtgctgcacaacatcatgagcatcttcaccttcatgggcgccaacgtgatgaggctggatgacacctacagcttccaggtgatcaacaagacagtgaagatggtgatcccagccctgatccagagcgacagcggggacagcattgaggtgtccagaaatgtggaggagatcgtggtgaagatcatctctgtgtttgtggatgccctgccccacgtgcctgagcaccggcggctgcccatcctggtgcagctggtggacaccctgggcgctgagaagttcctgtggatcctgctgatcctgctgtttgagcagtatgtgaccaagacagtgctggccgccgcctatggagagaaggatgccatcctggaggccgacacagagttctggttctctgtgtgctgtgagttctctgtgcagcaccagatccagagcctgatgaacatcctgcagtacctgctgaagctgcctgaggagaaggaggagaccatccccaaggctgtgtccttcaacaagtctgagagccaggaggagatgctgcaggtgttcaacgtggagacccacaccagcaagcagctgcggcacttcaagttcctgtctgtgtccttcatgagccagctgctgagcagcaacaacttcctgaagaaggtggtggagagcggcggccctgagatcctgaagggcctggaggagcggctgctggagaccgtgctgggctacatctctgctgtggcccagagcatggagagaaatgctgacaagctgactgtgaagttctggagggccctgctgagcaaggcctatgacctgctggacaaggtgaatgccctgctgcccacagagaccttcatccctgtgatccggggcctggtgggcaaccccctgcccagcgtgcggaggaaggccctggacctgctgaacaacaagctgcagcagaacatctcctggaagaagaccatcgtgacccgcttcctgaagctggtgcctgacctgctggccatcgtgcagaggaagaagaaggagggggaggaggagcaggccatcaaccggcagacagccctgtacaccctgaagctgctgtgcaagaactttggagctgagaacccagacccctttgtgcctgtgctgaacacagctgtgaagctgattgcccctgagaggaaggaggagaagaatgtgctgggcagcgccctgctgtgcatcgccgaggtgaccagcaccctggaggccctggccatcccccagctgcccagcctgatgcccagcctgctgaccaccatgaagaacaccagcgagctggtgtcctctgaggtgtacctgctgagcgccctggccgccctgcagaaggtggtggagaccctgccccacttcatcagcccctacctggagggcatcctgagccaggtgatccacctggagaagatcaccagcgagatgggcagcgccagccaggccaacatccggctgaccagcctgaagaagaccctggccaccaccctggccccccgggtgctgctgcctgccatcaagaagacctacaagcagatcgagaagaactggaagaaccacatgggccccttcatgagcatcctgcaggagcacatcggcgtgatgaagaaggaggagctgaccagccaccagagccagctgacagccttcttcctggaggccctggacttccgggcccagcacagtgaaaatgacctggaggaggtgggcaagacagagaactgcatcatcgactgcctggtggccatggtggtgaagctgtctgaggtgaccttccggcccctcttcttcaagctgtttgactgggccaagacagaagatgcccccaaggaccggctgctgaccttctacaacctggccgactgcatcgccgagaagctgaagggcctcttcaccctgtttgctggccacctggtgaagccctttgctgacaccctgaaccaggtgaacatcagcaagacagatgaggccttctttgattctgaaaatgaccctgagaagtgctgcctgctgctgcagttcatcctgaactgcctgtacaagatcttcctgtttgacacccagcacttcatcagcaaggagcgggcagaggccctgatgatgcccctggtggaccagctggagaaccggctgggcggggaggagaagttccaggagcgggtgaccaagcacctgatcccctgcatcgcccagttctctgtggccatggctgatgacagcctgtggaagcccctgaactaccagatcctgctgaagacccgggacagcagccccaaggtgcgctttgctgccctgatcaccgtgctggccctggccgagaagctgaaggagaactacatcgtgctgctgcctgagagcatccccttcctggccgagctgatggaggatgaatgtgaggaggtggagcaccagtgccagaagaccatccagcagctggagaccgtgctgggggagcccctgcagagctacttctag

SEQ ID NO: 196464 - DNA, 363 bp, Artificial Sequence
  derived and/or modified sequence
atgaccagcctggcccagcagctgcagcggctggccctgccccagtctgacgcaagtttactgtctcgggacgaagttgcatctctgttgttcgacccaaaagaagccgccactatagaccgcgacaccgcattcgcgataggctgcacagggctggaggaactgcttgggatcgatccttcgtttgagcagttcgaagctccactcttttcacagctggcaaagactcttgagcggtcagtccagacaaaagcggttaacaagcagttggatgaaaacatctctctgttcttgattcatctgtctccatatttcttgctgaagccggcccagaagtgcctggaatggttaatccataggtag

SEQ ID NO: 196465 - DNA, 6192 bp, Artificial Sequence
  derived and/or modified sequence
atgaccagcctggcccagcagctgcagcggctggccctgccccagtcagacgccagtttgctgtctcgggatgaagtggcgtccctcttgtttgatccaaaggaagccgccacaatcgatcgtgacaccgcttttgcgattggatgcacgggcctcgaggaactgcttgggatcgatcccagtttcgagcaattcgaagcccctctcttctctcaacttgctaaaacacttgagaggagcgtgcaaactaaagctgtgaataaacagctcgatgagaacatttcactgttcctcattcatctctctccatactttctcctgaaaccggcccagaagtgtctcgaatggcttatccacaggttccatattcatctatataaccaggatagcctgattgcctgtgtgcttccataccacgaaaccagaattttcgtgagagtgatccagctgctcaagataaataattctaagcacagatggttttggctgctgcccgtgaaacaatctggtgtcccattagccaagggtacacttataacccactgttacaaggacttgggattcatggattttatatgcagtctggtcaccaaaagtgtgaaggtgttcgccgaatatcccggttcctccgcccaactgagagtactcttggctttctacgcctcaactatagtatccgcattggttgctgccgaagatgtgtccgacaatattatcgcaaagctgtttccatacatccagaagggattgaagagcagtctgcccgactatcgggcagccacttacatgatcatttgccaaatttccgttaaggttaccatggagaatacttttgttaactcgctcgcttcccagattattaagaccctgactaagatcccctcactcattaaggacggtctctcttgccttattgttctgttgcagagacaaaagcccgagagtcttggcaaaaagccatttccccatctctgcaacgtccctgatctgatcaccatattgcatggaataagcgagacatacgacgtcagtccactactgcactacatgcttcctcatctagtcgtgtccatcatccaccatgtgactggcgaggagaccgaggggatggacgggcaaatatacaagcggcatctcgaagcaatccttaccaagatctcattgaaaaacaatctcgaccaccttttagcttcgctgttatttgaggagtacatcagctactcttctcaggaagaaatggattcaaataaggttagcctgttgaatgaacagtttctccctctgattagacttttggaatctaagtatcccagaacactcgacgtggttttggaagagcacctgaaggaaatcgctgatctgaagaaacaggagttgtttcatcagttcgtgtcgctctctacctccggtggaaaataccagttcctggctgatagtgatacctctctgatgctctcactcaatcatcccctggcacctgttcggatcctggcaatgaaccatctgaaaaagattatgaaaactagtaaggaaggtgttgacgaaagcttcataaaagaagcagtgctcgcgcggctcggcgatgataatatcgatgtggttctgagcgcaatttcagctttcgaaatatttaaggagcatttctcctctgaagtcaccatctccaatctcctgaatctgttccagagggcagaattgagcaagaacggggagtggtatgaagtgctgaaaattgctgccgatatcctgatcaaagaggaaatcctgagcgagaatgaccagctctccaaccaggtcgtggtttgtctgctgcccttcatggtaataaacaacgacgacaccgagagtgctgagatgaagatcgccatctacctgagtaaatccggtatctgtagcctgcaccctctccttcgcggctgggaggaagccctggagaacgtgatcaaatctaccaagccgggaaaactgatcggtgtcgccaatcagaagatgatcgaattgctggcagacaatatcaacctgggtgacccgagttctatgctgaaaatggtggaggacctgatcagcgtgggtgaggaagaatcatttaacctgaagcagaaggtcaccttccacgtgattctgagcgtccttgtaagttgttgtagcagcctgaaagagacgcatttccctttcgcgatcagggtgttttccctgctccagaaaaagattaagaagctcgaaagtgtgatcaccgcagtggagatcccttccgaatggcatatagagctcatgctggaccggggaatcccagtcgaattgtgggcccactacgtggaagaattgaacagcactcaacgggtggccgtggaagactcagtgtttcttgtcttctctctgaaaaagttcatttatgcccttaaagcccccaagtcctttcctaaaggcgatatttggtggaatcccgagcagctcaaagaggactctcgcgattacctacatctcctgattgggctcttcgagatgatgttgaacggcgccgacgccgtccacttccgcgtgttaatgaaactgttcatcaaggtgcacctagaagatgtgttccaactgtttaaattctgctctgttctgtggacttacggcagctccttgagcaatcctcttaattgcagcgtgaagacagttcttcaaacacaggctctgtatgtaggctgcgcaatgttgagttcccaaaagactcagtgcaaacaccagctagcctccatctcctcccccgtagtgacctctctgctcataaacctgggttccccagtgaaggaggtgaggcgcgcagccatacagtgtctgcaggccttgtctggggtcgcttcacccttttacttaattatcgaccacctgatttctaaggccgaggagatcacatcagatgcagcctacgtgatccaagaccttgccactttgtttgaggagctccagcgggaaaagaagctgaaaagtcaccaaaaactgagcgagaccctgaagaacctcctgtcatgtgtgtattcgtgtccatcctacatcgcgaaggacctgatgaaggtgctgcagggcgtaaacggcgaaatcaccaaaccattcttcgccgctatctccgacgagaaggttcagcagaagctgctgcggatgctgttcgacctcctagttaattgcaagaacagtcactgtgctcagacagtgtcttctgtgttcaaagggatatccgtcaacgcggaacaagtgcgtatcgaactggagccaccagataaggccaagccacttggcacagtccagcagaagcggcgacaaaagatgcagcagaaaaaatctcaggaccttgagtcagtacaggaggttgggggctcttattggcagcgggtgaccctgatcctagaactcctgcagcataaaaagaaactaagatctccgcaaattttagtgcctactttgttcaatttactctcgcgttgcctggagcccctgccccaagaacaaggaaatatggaatatactaaacagctgatcctgtcatgtctgctgaacatctgtcagaagttgtcacctgacggaggaaagattcccaaggacatcttggatgaagaaaagttcaacgtggagctcattgttcagtgcattcgactgtcagagatgccccagacccatcatcacgccctgttgctccttgggaccgtcgccggaattttcccagacaaggtcctccataacatcatgagtattttcacattcatgggggctaacgtgatgcggctggacgatacttatagtttccaagttatcaacaaaaccgtaaaaatggtaatacctgctctcatacagtccgacagtggtgattcgatcgaagtgtctcgcaacgttgaagagattgtcgtaaagatcatctccgtattcgtggacgccctgccacacgtgccagagcatcggcgcttgcccatactggtgcaacttgtggataccctaggcgcagaaaagtttctatggatcctgctgattcttctgtttgagcagtacgttaccaaaaccgtgctggccgcagcatatggagagaaggacgctatactggaagctgacaccgagttctggtttagcgtctgctgtgagttctcagtgcagcatcaaatccaatctctgatgaacattcttcagtatttgctgaagctgccagaagagaaagaagaaacaatcccaaaggccgtcagctttaacaagtcagagagccaagaggaaatgctgcaggtgttcaacgtcgagacacacacctccaagcagttgcgccacttcaaattcctgagtgtgtcgttcatgagtcaactgctgtccagcaacaactttttaaaaaaggtcgtagaatccggaggcccggagattctgaagggcctcgaagaacgcctcctggaaacagtcttaggctacattagcgcagtcgcccaatcaatggagcggaacgccgacaaactgacggtgaagttttggcgtgccctgttatctaaggcctacgacctgttggacaaagtcaatgccctcctccctacggaaacatttattcccgtcatccgggggcttgtaggcaatcccctcccttcagtcagaaggaaagcattggatctccttaacaacaaattacaacagaatattagctggaagaaaacgatagttacacggtttctgaagttggtacccgaccttttagccatcgtccagaggaagaagaaggagggggaggaggaacaggccataaacaggcagaccgctctctacaccctaaaactgttgtgcaagaacttcggcgcagagaatccagatcctttcgtccctgtgctaaacactgcagtcaagctgatcgctccggagagaaaggaggagaaaaacgtcctgggttccgcgttattgtgtatcgctgaagtgacatccaccctcgaggcactcgcgattcctcagctccctagtttgatgccttcacttctcacaaccatgaagaacactagcgaactggtctcgtctgaggtgtacctactatctgcattggccgccctgcagaaggttgtggagactttgcctcattttatttctccttatctcgaaggaatcctttcacaggtgatccaccttgagaaaatcacctccgagatggggtcagcctcccaagcgaatattcggctgacgagcctgaagaagaccctggctacaacactcgcgccccgtgttctgctgcctgcgatcaagaagacatacaagcagattgagaaaaactggaagaatcacatgggtccattcatgtcaatcctgcaggagcacattggggttatgaaaaaagaagagctgacttcccaccagtcccagctgaccgctttcttcctggaagccctcgacttcagggctcaacactctgagaatgacctcgaagaggtaggtaagaccgagaattgcatcatagactgtcttgttgctatggttgtcaagttgtctgaggtcacttttcggccattatttttcaagttgttcgattgggcaaagactgaggatgcccctaaggatcggttactcacattttacaatctggcggactgcattgcagagaagctcaagggcctttttaccttgtttgccggacacctagtaaagccattcgcagataccctaaatcaagtgaacattagcaagacagatgaggcattcttcgactccgagaacgaccctgaaaaatgctgcttgcttctccaatttatcttgaattgtttatacaagatcttcttatttgatacacagcactttatcagcaaagagagagctgaggctctgatgatgccacttgtggaccaattggagaaccgcctgggaggggaggagaaattccaagaaagagtgaccaagcacctgataccatgcatcgcccaatttagtgtggcgatggcggatgactcactttggaagccccttaattatcaaattttgctgaagacgagagattccagtcctaaagtgcggttcgccgctctgataaccgtgctggccctggcagagaagctgaaagaaaattatatcgtgctcctgccagagagcataccctttctggcagaacttatggaagacgagtgcgaggaggttgagcatcaatgtcagaaaacaatccagcagcttgagactgttctgggagagcccctgcagtcgtacttttag

SEQ ID NO: 196466 - DNA, 6435 bp, Artificial Sequence
  derived and/or modified sequence
atgaccagcctggcccagcagctgcagcggctggccctgccccagtcagacgcctcactgctgtcacgggatgaagttgcctccctgctttttgatccaaaggaagctgctactatcgatagggacactgcgtttgcaatcggttgtacaggtctggaagagctgcttggtatcgaccctagcttcgaacagtttgaagcccctctgtttagccagctcgcaaaaactctggagcgcagcgtgcagactaaggccgtgaacaaacaactggacgaaaatatctcactgtttctaatccatcttagcccctacttcctgctcaaacctgcacagaagtgccttgagtggttgatacacaggttccacattcatctttataaccaagactctctcattgcctgcgtactgccttaccacgagactagaattttcgtgagggtgatccaactcttaaagattaacaacagcaagcatcgctggttttggctgctacccgtcaagcaaagtggagtgcccttggccaagggaactctaataacacattgttacaaggatctgggcttcatggacttcatttgttctctcgtaactaagtctgtgaaagtgttcgccgagtatcccggctcaagcgcccagctgcgcgtccttttggcattctacgcgtccactatcgtcagcgccttggtcgctgctgaagacgttagcgacaacattatcgcgaaacttttcccatacatccagaagggcctgaagagtagtctgcccgactacagagccgcaacttacatgataatatgtcagatcagtgtcaaggttactatggaaaataccttcgtcaattcccttgcctcccagataatcaagaccctcaccaagattcccagccttattaaggatggactaagctgtttaattgtgctccttcagaggcagaagcctgagagcttgggtaaaaagccttttcctcatctgtgtaacgtccccgatctcatcaccattcttcacggaataagtgaaacctatgatgtgagccccctcctgcactacatgctgcctcatctggtggttagcattatccaccatgtgaccggtgaggagaccgagggtatggacgggcagatttacaagcgccatctagaggcgattctcaccaaaattagcctcaagaacaacctggaccatctgctggctagcctgctgtttgaagaatatataagttattcgagccaagaggagatggatagcaataaggtgtccctgcttaatgagcagtttctgcccctaatccgccttctggagtcaaaatacccaaggactctggacgttgtgctggaggaacatttaaaggagattgctgaccttaagaaacaggaacttttccatcaatttgtgtccttgagtacatccggaggtaaataccaatttctcgctgatagcgatacctccctaatgctctccctcaaccatcctctggcacccgttcgtatcttagccatgaatcatctaaagaaaattatgaaaacatctaaagaaggagtggacgaaagtttcattaaggaggccgtcctagctcgtctgggagatgacaatatcgacgtagtcctgtccgccatcagtgccttcgagatttttaaggagcatttcagctcagaggtgacaatatctaacctcttgaacctgtttcaacgcgctgagctgtctaaaaatggagaatggtacgaggttctaaagattgccgccgacatcctgattaaggaggagatcttgagtgaaaatgaccaattgtctaaccaagtcgtggtgtgcctgcttccgttcatggtgataaataacgacgacacagaaagcgctgagatgaagatcgctatttatctgtcaaaatccggcatttgctcccttcaccctcttctccggggctgggaggaggcactggagaatgtgatcaagtccaccaaaccaggcaaactaataggggtcgccaaccaaaaaatgattgagctgctggcagataatatcaacctgggggatccctcttccatgttgaagatggtcgaagatctgatttctgttggggaggaggaatcctttaaccttaagcaaaaagtaacgtttcatgtgatcctctcagtgcttgtgtcttgttgttccagcttaaaggagactcatttcccattcgcgatcagagtgttctcccttctgcaaaagaagataaagaagttggagtccgtcatcacagcagttgagatcccgtctgagtggcacatagagttgatgttggatcgcggcatcccagtggagctttgggcacattacgtagaagaattaaacagcacccagcgagtagcggtcgaggacagcgtgtttttagtcttctcacttaagaaatttatttacgctctgaaagcccctaagagttttccaaaaggcgatatctggtggaatcctgagcagctgaaggaagacagtcgcgattacctgcatttgcttatcggcctctttgagatgatgcttaatggtgcggacgctgttcattttcgcgtattgatgaagctttttattaaggtgcacctggaagacgtcttccagctattcaaattctgtagtgttctttggacctatggttcctccctgtctaacccactgaattgctcggtgaagaccgttttgcaaactcaggcactctacgtgggttgtgctatgcttagctcccagaagacacagtgtaagcaccagctcgcttcaatcagttctcccgttgttacctctctcctcattaatctcggatcgcccgtgaaggaggttcggcgggccgccatccagtgcctgcaggctctctcaggcgtcgccagcccgttttacttgattattgatcacctgatctccaaagcagaagaaataacctctgacgccgcatacgtcattcaagacctggccacactatttgaggaactgcagcgggagaagaaactgaaatcccatcagaagctcagcgagaccttaaaaaacctgctgagctgcgtatacagctgcccctcctatatcgctaaagatttgatgaaggtcttgcagggggtgaacggcgaaatggttctttctcagctcctgccaatggcagagcagctactggagaagatacagaaggagcctaccgcagtgctgaaagacgaagccatggtcctgcatctgacccttggaaaatacaacgagttcagtgtctcgctactgaacgaggacccaaagtcactagatatcttcattaaagcagtccacactaccaaagagctgtatgccgggatgcccacgatccagataaccgctctggagaaaattactaagccatttttcgccgctatcagcgatgagaaagttcaacaaaaacttctgaggatgctcttcgatttgctggtgaattgtaagaactcccactgtgcccaaacagtgtcttcagtttttaaaggaatctccgtaaatgccgaacaggtgaggatcgagctcgagccaccagacaaagcaaagccgctgggcaccgtgcagcagaaacgcagacagaagatgcagcaaaaaaaaagccaagatctggagagcgtgcaggaggtgggcggttcctactggcagcgggtcaccctcatactggagctactgcagcataaaaagaagcttcgcagcccacagattctggttccaactttgtttaacctgctgagcaggtgcctcgaaccacttcctcaagagcagggcaacatggaatacacaaagcagttgattttgtcctgtctgctaaatatttgccaaaaactgtcacccgatggcgggaaaattcccaaggatattcttgatgaagaaaagttcaacgtggaactcattgtacagtgcataaggctctccgagatgccccagactcatcaccatgcgctgcttttacttggtacagttgcaggcatctttcccgacaaggttcttcacaacataatgagtatattcacttttatgggcgcaaatgttatgcggctcgacgacacatactcctttcaggtcataaacaagacagtcaaaatggtcatacctgccttgattcagtcagattctggcgactcgatagaggtttctagaaacgtcgaagaaattgtggtgaagattatttccgtattcgtcgacgccctgccacatgtgcctgagcatcgaagactccccattctcgtccaacttgttgacacactcggggccgagaagtttctatggattctgctaatcctactcttcgaacaatatgtcacgaaaacagtgctggccgcggcttacggagagaaagatgcaatcttggaagcagataccgaattctggttttctgtgtgttgtgaattcagtgtccagcatcagatccaatctctgatgaatattctgcagtacctgctaaaattgccagaagagaaagaggagacaatccccaaagcagttagcttcaataaatcagagtctcaggaggaaatgctgcaggtgttcaatgtcgagacacacactagcaagcagttgcgtcattttaagttcctctctgtgtcattcatgtcacaattgttatcctcaaataatttcctgaagaaagtggtggagagcggtggcccagaaatactgaaggggctcgaagagaggctgctggaaacagtcttgggatacatctccgcagtcgctcaatccatggagaggaacgctgataagctgaccgtaaaattttggcgggcccttctgtccaaagcttatgaccttctggacaaggtgaatgcactcctccccactgaaacttttattccagtgattagaggactggttggtaaccccttgccaagtgtgcggaggaaggctctagacctgcttaataacaaattacagcagaatatcagctggaagaaaacgatcgtaacccgtttcctcaaactggtgcccgatctcctcgcaatagtccaaagaaaaaaaaaggagggtgaagaggagcaggccatcaatagacaaaccgcactctacactctgaaactgctttgcaagaatttcggcgcggagaatcctgaccctttcgtgcccgtccttaatacagccgtaaagctgatcgccccagagcggaaggaggagaaaaacgtcctgggttcggctttgctctgtatagccgaagtaacttccacattggaggcgttagccatcccacagctcccttccttaatgcccagcctcctgacgaccatgaagaatactagcgaattggtgtcctcggaagtctacttgctcagcgcccttgctgcactccaaaaggttgtggagaccctcccccattttatatctccctatctggaggggattctatctcaagtcatccacctggagaaaattacatctgaaatgggaagtgccagtcaggctaacatcagactgacttcccttaagaagacactggcaacaaccttggcacctagagtattgctcccggctatcaaaaaaacatataaacaaatcgaaaagaactggaagaaccatatgggccccttcatgtccatattacaggaacatatcggcgtgatgaagaaagaggaactgacctctcatcagagccagctgactgcgttctttcttgaggcccttgattttcgcgcacagcatagtgaaaacgatctggaagaggttggaaaaacggaaaactgtatcatcgattgcctcgttgcgatggtcgtaaagctgagtgaggtgacgtttcgaccactgttcttcaaactgtttgactgggctaaaactgaggacgcgcctaaggaccggctcctgacgttctacaatctcgccgattgtatcgccgagaagcttaaaggtctgttcactctctttgctgggcaccttgtgaagcctttcgccgatacattgaaccaggttaatattagcaaaactgacgaagctttttttgactcagagaacgatcccgaaaagtgctgtctcctgctgcagttcatcctgaattgcctctacaagatatttctgtttgatacgcaacacttcatcagcaaagaacgcgccgaggccttgatgatgcccttggtggaccagttagaaaaccggctcggcggagaggagaaatttcaagagagagtgaccaaacatctgatcccctgtatcgcgcagttcagtgtcgctatggccgacgactctctgtggaaaccccttaattatcagatcctgctgaaaacgagagatagttctccaaaggtgaggttcgcagcccttatcacggtgcttgcccttgctgaaaaactgaaggaaaactatatcgtgctgctgcctgaatccattcctttcctcgcggagcttatggaggacgaatgcgaagaggtggaacatcagtgccaaaagactatccaacaattagagactgtccttggagaacccctccaatcttacttctag

SEQ ID NO: 196467 - DNA, 363 bp, Artificial Sequence
  derived and/or modified sequence
atgactagcctcgcccagcagctgcaaagactcgcgttgccccagagtgacgcaagtctcctctctagagatgaggtcgcgtcgctgctcttcgatcctaaggaagctgcaaccattgaccgggatacagcatttgctatcggctgtacggggctggaagaactcctgggcattgacccgtcttttgagcaattcgaagcccctctgttctcacaacttgctaaaacgcttgaacggagcgtgcaaactaaggccgttaacaagcaactggatgagaatatctccctttttctgatacacctgtccccttattttctccttaaacccgctcagaaatgcctggaatggttgatacacagatag

SEQ ID NO: 196468 - DNA, 6191 bp, Artificial Sequence
  derived and/or modified sequence
atgactagtctcgctcaacagcttcagcggctggcattgccccagagcgacgccagcctcctatctcgagatgaagtggcctctcttttatttgatccgaaggaagcggcaactatagatcgcgatacagctttcgcaatcggctgcacaggactcgaggagttgttgggaatagacccatccttcgaacagttcgaggcccctctgttctcacagctggctaaaactctcgaacggtctgttcagactaaggcagtgaataagcagctggacgaaaacattagcctgttcttaattcatctgtcgccatactttctcctaaagccagcccagaagtgcctggagtggcttatccacaggttccacattcatctctacaatcaagattccttgattgcatgcgtccttccatatcacgaaaccaggatcttcgtgagggtgatccagttgcttaagatcaataatagtaaacaccgctggttttggcttctgccggtcaagcaatctggcgttccactggccaaagggactttaataacacactgttataaagatctgggctttatggactttatctgtagtctcgtgacgaagagcgtgaaagtgttcgccgaatacccaggaagttccgctcagttgcgtgtcctgctcgcgttctatgcatccactattgtcagtgctctcgttgccgctgaggacgtgtcggataacattatcgcgaaactgttcccatacattcagaaagggctgaagtcctctctcccagattatcgtgcggcaacgtacatgatcatctgtcagatttcagttaaagtgactatggagaacaccttcgtaaattccttagcaagccagattattaagactttgacaaagattccttcgctgatcaaggacgggctgtcttgtctgatcgtcttattgcaaagacagaagccagaatcgctgggaaagaaacctttcccccacttgtgcaatgtacctgatctgattaccatcctgcacggcatcagtgagacctatgacgtctcacccctgctacactacatgctgccccatctcgtcgtgtcaatcatccaccacgtgaccggtgaggaaacagagggcatggatggtcaaatatacaagaggcatctcgaagcgattctcaccaagatcagtcttaaaaacaatttggaccatctgctggccagtctcctctttgaggaatatatttcttatagttctcaggaagagatggattcaaacaaggttagcctcttgaatgagcagtttctcccactgatcagactgctggaaagtaagtacccacggactctggacgtcgtgctagaggagcatcttaaagagatcgcagatctcaagaagcaggagcttttccaccaatttgtgagcctgagcacttctgggggaaaataccagttcctggcagattcggatacttccttaatgctcagtctgaaccacccattggcaccagtgaggatccttgccatgaaccaccttaagaagattatgaagacttctaaagagggtgtggatgaaagctttataaaggaggctgtgctcgcccgattgggcgacgacaacatcgatgtagtgctcagcgccattagtgcatttgaaatattcaaagaacacttcagctccgaggttactatatcgaatctgctgaatcttttccaaagagcggagctctctaagaacggagaatggtatgaagtactcaaaatagccgcagacatcctgattaaggaggaaatcctgtcagagaatgatcagctttccaaccaagtggtggtgtgtctcctaccttttatggtaatcaataacgatgataccgagtctgccgagatgaagatcgccatttatctgtccaagagtgggatttgttccctgcacccgctcctccggggatgggaggaggctttggagaacgtaatcaaaagcacaaagccaggcaaactgatcggagtggctaatcagaaaatgatcgagttgctcgcagacaacattaatttgggggatccgtcgagcatgctgaaaatggtggaggatcttatcagcgtgggggaggaagagtcctttaacctgaaacaaaaggtcaccttccatgtgatcctatcagtgctcgtcagctgctgctcaagcttaaaggaaacccattttcccttcgctattcgcgtattcagtttactccagaaaaagatcaagaagctagaatctgttataaccgccgtggagatcccctcagaatggcacatcgaactcatgctcgatcgcggtattcccgtagagctttgggcgcattacgtggaggagttgaactcaacccaacgcgtggctgttgaggattcagttttcttggttttttcgcttaagaaattcatttatgccctgaaagctcccaaaagcttccctaaaggcgacatttggtggaacccagagcaactgaaagaagatagccgcgattacctccacttgttaatcggactgtttgagatgatgctgaacggggcagacgctgtccacttcagagtgctaatgaaactgtttatcaaggtgcaccttgaggatgtgtttcagctgttcaagttttgctccgtgctgtggacctacgggtcctccctgagcaaccctctgaactgcagcgtcaagaccgtgctgcagacacaggccctgtacgtgggttgcgcaatgctcagttctcagaaaacacagtgcaaacaccaactcgcctccatcagttctcccgttgtgacctcgttgctcatcaaccttgggtcaccagtgaaggaggtgaggagagcggctatccagtgtctgcaggccctcagtggagtggcatctcctttctacttgatcattgatcatctcatttctaaggcggaagagattacatccgatgctgcctacgtgattcaggatctggctacactgtttgaagagttgcagagagagaaaaagttgaagtctcaccagaaactcagcgagaccttgaagaacttattgtcttgcgtgtatagttgtccctcgtacatagcgaaagatctgatgaaagtactccagggggtgaacggagaaattaccaagcctttttttgctgccatctccgatgagaaggttcagcaaaagttgcttcgcatgcttttcgacttgttggtgaattgcaaaaactcccactgtgcacaaaccgtgtccagtgtatttaagggcatctctgtgaatgcggaacaggtcaggatcgaactggaacccccagataaggcaaagccactcggaaccgtccagcagaaacgtcgccaaaagatgcaacaaaagaaatcccaagatctcgagtctgtgcaggaggtaggtggaagttattggcagcgggtcacattgatactggagttgctccagcacaaaaagaagctccgaagtccacagatactggtgccaactttgttcaatctgctgtcaaggtgcctcgaacctctccctcaggaacaggggaatatggaatatacgaagcaactgatcctgtcctgcctcctcaacatttgtcagaagctgtctcccgatggaggcaagattcccaaggacatcctggacgaggagaaatttaatgtggaactcatcgttcagtgcatcaggttaagcgagatgccacagacccaccaccacgccctgctgctcttaggaaccgtagcaggtattttcccggataaggtattgcacaacattatgagcatctttacgttcatgggcgctaatgttatgcgtttggatgatacttattcttttcaggtgataaacaagacagttaagatggtcatcccagcactgatccagtctgactccggagactctatagaggtgagtaggaacgtggaggaaatcgtggtgaagatcatcagcgtctttgttgacgccctgccccacgtcccagagcaccgacgactgcccatcctagtccagctggtcgacacattgggtgccgaaaaatttctttggatcttgttgattctcctgttcgaacagtatgtcaccaagacagttttagcagctgcttacggggaaaaggatgctattctcgaagctgacacagagttctggttttctgtttgctgcgagttttcagtgcagcaccagatccagtctctgatgaatatactacagtatctgttgaaactccccgaagaaaaggaggagactattccaaaggccgtgagtttcaacaagtcagagagccaggaggagatgctgcaggtgttcaacgtcgagacacacacatcaaagcagctgcgccacttcaagttcttgtcagtctctttcatgtcccagctcctgagttccaataatttccttaaaaaggtggttgaaagcggcggtccagagatactgaaaggactcgaagagcggcttctggaaaccgtgcttgggtacatctcagcagtggcgcagagtatggagcgcaacgcagataagctgactgtgaagttctggagggcgctgctgagtaaagcttacgacttgctggataaagtgaatgctctcctgcctactgaaacttttatccccgttattagagggctggtcggcaatcccctgccttcagtcaggcgaaaggcgctggatctcctgaataataagcttcagcaaaatatctcatggaagaaaaccattgtgacaaggttcttgaaactcgtgcccgatttgctggccatcgtgcagcgcaagaagaaagagggcgaagaagaacaggcaattaatagacaaacggctctatatactctgaaactgttatgcaaaaactttggggctgagaacccagatccattcgtgcccgttctgaatacagccgtcaaacttatcgccccagagcgaaaagaagaaaagaacgtgctcgggtcagccttgctttgcatcgctgaagtcacatccaccctcgaggcgctggcaataccacagttacccagcctgatgccttccctactaactacgatgaagaacacctcagaattggtgtcgtcagaggtgtacctgctatccgcactggccgcactccagaaagtggttgagactctgcctcacttcatttccccctatctggaggggatcctttcccaggtaatacaccttgagaaaataacaagcgagatgggtagtgcctcacaagccaacattaggctgacaagtttgaagaagacactggccacgaccctggcaccacgcgtgctcctgcctgctatcaaaaaaacatataaacagattgaaaaaaattggaagaaccatatgggaccttttatgtcaattttacaagagcatattggtgttatgaagaaagaggagctgacctcacaccagtcccagttgaccgcctttttcctcgaggcacttgattttagggctcagcatagcgaaaatgatttggaggaagtcggcaagactgagaactgtattattgattgcttggtagctatggttgtgaaactttctgaagtcactttccgtcctctgttcttcaagctgtttgactgggcgaaaactgaagatgcccctaaggaccgtctcttaaccttctacaacctagcagactgcattgccgagaagctgaaaggactgttcacacttttcgcaggtcatctggtaaaaccatttgctgacacgctgaatcaggtgaacatttccaagacagatgaggccttcttcgacagcgagaacgacccggagaaatgttgccttctactgcaattcatcctgaactgtctctacaaaattttcttgtttgatactcagcactttatatctaaggagcgggcagaggctctgatgatgccattggtggatcagctagagaatagactcggtggagaagaaaaatttcaggagagggtgaccaagcacctgatcccttgtattgcccaattctccgtggccatggcagatgacagcctgtggaaacccttaaattaccagattctcctcaaaacacgggactctagtcccaaagtcagatttgccgctttaatcacagtgttggcgctggctgagaaactgaaggagaattacatcgtgttgctccccgagtcaataccttttctcgctgaactgatggaggacgagtgcgaggaagtcgaacaccagtgtcagaagaccatccagcagttggagacggtgctgggggagcccctgcagagttattttta

SEQ ID NO: 196469 - DNA, 6434 bp, Artificial Sequence
  derived and/or modified sequence
atgacgagcctcgcacagcaactgcagagactggctttgccccagagcgacgcgtcgctgcttagcagggacgaggtcgcatcactgcttttcgatcctaaggaggctgccacgattgaccgcgacacagccttcgcaattggttgtacaggcttggaagagctgttgggcatcgatccctccttcgaacaatttgaagctccactttttagtcaattggcaaaaaccctggaacggtctgtccagacaaaggccgtgaataagcagttagacgaaaatatctctctatttttgatccatctgtctccctactttttgctgaaacccgctcagaagtgtctggagtggctaatccatagatttcacattcatctctacaaccaggactcgctcatcgcctgtgtcttgccataccacgagactcgcatctttgtgagggttatccagctgctaaagatcaataactctaagcaccgatggttctggctgctgccagtgaaacagagtggcgtcccacttgcgaaggggacactgatcacccactgctacaaggatctcgggttcatggattttatatgctccctggttaccaagagtgtgaaagtttttgcggaataccctgggtcttctgcccagttgcgagttctcctagcattttatgcatctactattgtttctgcgctggttgctgccgaggacgtctctgataatataatcgccaagctctttccctacatacagaaagggctgaagtcttccctgccggattaccgcgcagccacgtacatgatcatttgccagatttctgtgaaagtgacgatggaaaacacctttgtgaattccctggcctctcaaatcattaagacgctgaccaaaattccctctttgataaaagacgggctttcatgcttgattgtgctattgcagcggcagaagcccgaaagtttgggcaaaaaaccgttcccccatctatgtaacgtcccggatctcatcaccatcctccacggtattagtgagacctacgacgtctcaccactgctccattatatgctgccccatctagttgtttcaataatacatcacgtgacaggggaggagaccgaggggatggatgggcaaatctacaaacgccacctggaggctattctgaccaaaatctccttgaagaacaacttggaccacctgctggctagcctccttttcgaggagtatattagctattcctctcaagaggaaatggactctaacaaagtatctctgctgaacgaacaatttttgcccctgatccggttgctcgaatctaagtacccccgaactctcgatgtggtgctggaagagcacctcaaggagattgctgacctcaaaaaacaggagctcttccatcagttcgtgtctctgtctacctctggagggaaataccaatttttagcagatagtgacacatcactgatgttaagtttaaatcacccactggccccagttagaatcctggccatgaaccatcttaagaaaattatgaaaacctccaaggaaggagtggatgagagtttcattaaagaggcggtcctggcccgtctcggggacgataatattgacgtggttctctcggccatcagcgcttttgaaatattcaaggagcacttttcctccgaagtcacaatttcaaacctccttaatctcttccagcgagccgagctgagcaaaaatggcgaatggtatgaagtgttgaagattgcagctgacattctcatcaaagaggaaatcctctccgaaaacgatcagctatctaaccaagtggtggtgtgtctgttgccgtttatggtgattaacaatgacgatactgagtctgctgaaatgaaaatagcgatctacctctctaaatccggcatttgctcactgcatcctttgctgagaggatgggaggaagcactggagaacgtcattaagtctaccaaacctggtaaattgattggcgtggcgaaccagaaaatgattgagctgttagcagacaatattaacctaggcgatcctagctctatgttaaaaatggtggaggacctaattagcgttggggaggaggagtcgttcaacctgaaacagaaggttactttccatgtgatcctatccgtactggtctcctgttgctctagtctgaaggagactcacttccccttcgctatcagggtattctccctattgcagaagaaaattaagaaactcgagagtgtgatcaccgccgtggaaataccttcagagtggcatattgaactgatgctcgatcggggaattccagttgagttatgggcccactacgtggaagagctgaattccacacagcgtgtggccgtggaggattccgtgtttctcgtatttagcctgaaaaaatttatctacgcgctgaaagcgcctaaatctttccccaagggcgatatttggtggaatcctgagcagcttaaggaggatagccgcgactacctccatctcttgatcggcctgttcgagatgatgctcaacggcgcagatgccgtgcactttcgcgttttgatgaagctattcatcaaagttcatcttgaagatgtgttccaactgtttaaattctgctctgtattatggacttacggatcttcattgagcaaccctcttaactgtagcgtaaaaactgtgttgcagacacaagcgctgtatgtcggctgcgccatgctgagctctcagaagacgcaatgtaaacaccagctggcaagcatctcctcgcctgtggttaccagtctcctaattaatctgggtagtcccgtcaaggaagtgaggagggcagcgatacagtgcctgcaggccctgagcggcgttgcctccccattttaccttatcattgatcatctcatctcaaaggctgaagagattacctctgacgcagcctatgtcatacaagacctcgccaccctgttcgaggagctccagcgggagaaaaagcttaagagccaccagaaattgagtgaaactctgaagaacctattatcctgtgtgtatagctgtccttcctacatcgccaaggacctgatgaaggtgctccagggggtgaatggcgagatggtcctctctcagctgcttcccatggctgaacagctgcttgagaaaatccagaaagaacctaccgccgtactgaaagacgaagccatggtcctccacctgactcttggaaagtacaatgaatttagtgtctctctgcttaatgaagaccccaaatcgctggatatttttatcaaggccgtacacactactaaagaactctacgcagggatgcccaccattcaaattactgccctggaaaagattacaaagcccttttttgccgctatttccgacgaaaaggtccagcagaagttattaaggatgctgtttgacctgctcgtcaactgcaaaaactcacactgtgcacaaacagtttccagcgtgttcaaaggtatcagcgtaaacgcggagcaggttcggatcgaacttgagccacctgataaggccaaaccactgggcaccgtgcagcaaaagcgcaggcagaagatgcagcaaaaaaagtcccaggaccttgagtcggtgcaggaggttgggggaagttattggcagcgggtgacactcattctcgaattgctccagcacaagaagaagttgaggtcgccacagatcctggtccctactcttttcaacctcctgtctaggtgcctggaaccccttcctcaggaacagggcaatatggagtacacaaaacagttgattttgagttgcctgctgaatatatgccagaagctgtcaccggatggtgggaagattccaaaagatatcctggacgaggagaaatttaacgtggaactgatcgtccagtgcatccggctgtcggagatgccgcagacccaccatcatgctctcctgctgctcggcacggtcgctggaatattccctgataaggtccttcataacataatgagcatatttacctttatgggagctaatgtcatgagactggacgatacctactcttttcaggtgatcaataagactgtgaaaatggttattcccgcactgatccagagcgactccggagacagtattgaagtgtctaggaacgtcgaggagattgttgtgaagataattagtgtatttgtcgatgcacttccgcacgttcccgagcacagacgtctacctattttggtccaattggtcgatactttgggcgctgaaaaattcttgtggatcttgctgatcctcttattcgagcaatatgtgaccaagaccgttctggccgcagcatacggtgagaaggacgccatcctggaggcggataccgaattttggttctctgtctgttgcgaattctccgttcagcatcaaatccaaagcctgatgaacatcctacagtatttattgaaactccccgaagaaaaggaggaaacaataccgaaagccgtgtcttttaataagtcggagagccaggaggagatgctgcaagtattcaacgtggagacacacacctcaaagcagctgcgacattttaaattcctctccgtttccttcatgagccaactgctttcctccaataatttcctgaaaaaggttgtcgaaagtggcggacccgaaatcctgaaaggcctggaagagcgcctgcttgagacagtcctgggttatatctccgccgtcgcacagagcatggagcggaacgctgacaaactgactgttaagttctggagggcactcttgtctaaggcctacgatcttcttgataaggtgaatgccctgcttcctaccgaaactttcatccctgtaatacggggacttgtgggcaacccactcccctccgtgcggaggaaggctctggaccttctgaacaataagctgcaacagaatatcagctggaaaaagaccatagtcaccaggtttctgaagttggtaccagacctgcttgcaatcgttcagcgaaaaaagaaagaaggggaggaggaacaggctattaatcggcaaaccgcgttgtacacactaaagctgctgtgtaaaaacttcggggctgaaaaccccgaccccttcgtgccagttctcaacacggctgttaagttgattgccccagaacggaaggaagagaagaacgtactcggatcggcccttttgtgtatcgctgaagtgacttccacactagaagcgcttgcaattcctcagctaccctctctaatgcccagtcttctgactacgatgaaaaacacatccgaactggtctcatcagaggtttacctgctctcagccctggccgctctccagaaggtggtcgaaaccctcccacactttatatctccgtatctggaaggcatcttgagccaggtcatccacctcgagaaaattactagtgagatgggttccgcctctcaggccaatatccggctgacaagtctcaagaaaaccctggccactacgctggcccctagggtcttacttcccgctataaagaagacctataagcagatcgaaaagaactggaaaaaccacatgggccctttcatgagcatcttacaagagcacattggggtgatgaagaaggaggaactaacaagccatcaatctcaactcaccgcattttttttagaggccttagacttcagggctcaacatagcgaaaacgacctggaggaagttggtaagaccgaaaattgcattattgattgtctcgtcgcaatggtggtaaagctcagcgaggttaccttccgaccacttttcttcaaactttttgactgggccaaaaccgaagacgcgccaaaagataggctgctgacattttataacctggccgactgtatcgcagagaaactgaagggcttgtttactctgttcgctggccacctggtgaaacctttcgccgacacgttgaatcaggtgaatatctccaaaacggacgaagccttcttcgacagcgagaatgatccagagaagtgttgtttacttctccagtttatcctgaactgcctgtacaaaatatttcttttcgatacccagcacttcatctccaaggagagagccgaagcgctgatgatgcccttggtggatcaactggaaaatcggctggggggagaggaaaagttccaggaacgcgtcacaaaacacctcatcccatgtattgcccaattctccgttgctatggccgatgattctctgtggaagcccctaaactaccagattctcctcaagaccagagactcaagccccaaggttcgcttcgccgctctaatcaccgttttggccttggcggagaaattgaaagagaactatatcgtcctgctgcctgaatctataccgtttttggccgagctgatggaggacgaatgtgaggaagtggagcaccaatgccaaaaaaccatccaacaacttgaaacagtgctgggcgaacccttacagtcttattttta

SEQ ID NO: 196470 - DNA, 363 bp, Artificial Sequence
  derived and/or modified sequence
atgaccagcctggcccagcagctgcagagactggccctgccccagagcgacgccagcctgctgagcagagacgaggtggccagcctgctgttcgaccccaaggaggccgccaccatcgacagagacaccgccttcgccatcggctgcaccggcctggaggagctgctgggcatcgaccccagcttcgagcagttcgaggcccccctgttcagccagctggccaagaccctggagagaagcgtgcagaccaaggccgtgaacaagcagctggacgagaacatcagcctgttcctgatccacctgagcccctacttcctgctgaagcccgcccagaagtgcctggagtggctgatccacagatag

SEQ ID NO: 196471 - DNA, 6192 bp, Artificial Sequence
  derived and/or modified sequence
atgaccagcctggcccagcagctgcagagactggccctgccccagagcgacgccagcctgctgagcagagacgaggtggccagcctgctgttcgaccccaaggaggccgccaccatcgacagagacaccgccttcgccatcggctgcaccggcctggaggagctgctgggcatcgaccccagcttcgagcagttcgaggcccccctgttcagccagctggccaagaccctggagagaagcgtgcagaccaaggccgtgaacaagcagctggacgagaacatcagcctgttcctgatccacctgagcccctacttcctgctgaagcccgcccagaagtgcctggagtggctgatccacagattccacatccacctgtacaaccaggacagcctgatcgcctgcgtgctgccctaccacgagaccagaatcttcgtgagagtgatccagctgctgaagatcaacaacagcaagcacagatggttctggctgctgcccgtgaagcagagcggcgtgcccctggccaagggcaccctgatcacccactgctacaaggacctgggcttcatggacttcatctgcagcctggtgaccaagagcgtgaaggtgttcgccgagtaccccggcagcagcgcccagctgagagtgctgctggccttctacgccagcaccatcgtgagcgccctggtggccgccgaggacgtgagcgacaacatcatcgccaagctgttcccctacatccagaagggcctgaagagcagcctgcccgactacagagccgccacctacatgatcatctgccagatcagcgtgaaggtgaccatggagaacaccttcgtgaacagcctggccagccagatcatcaagaccctgaccaagatccccagcctgatcaaggacggcctgagctgcctgatcgtgctgctgcagagacagaagcccgagagcctgggcaagaagcccttcccccacctgtgcaacgtgcccgacctgatcaccatcctgcacggcatcagcgagacctacgacgtgagccccctgctgcactacatgctgccccacctggtggtgagcatcatccaccacgtgaccggcgaggagaccgagggcatggacggccagatctacaagagacacctggaggccatcctgaccaagatcagcctgaagaacaacctggaccacctgctggccagcctgctgttcgaggagtacatcagctacagcagccaggaggagatggacagcaacaaggtgagcctgctgaacgagcagttcctgcccctgatcagactgctggagagcaagtaccccagaaccctggacgtggtgctggaggagcacctgaaggagatcgccgacctgaagaagcaggagctgttccaccagttcgtgagcctgagcaccagcggcggcaagtaccagttcctggccgacagcgacaccagcctgatgctgagcctgaaccaccccctggcccccgtgagaatcctggccatgaaccacctgaagaagatcatgaagaccagcaaggagggcgtggacgagagcttcatcaaggaggccgtgctggccagactgggcgacgacaacatcgacgtggtgctgagcgccatcagcgccttcgagatcttcaaggagcacttcagcagcgaggtgaccatcagcaacctgctgaacctgttccagagagccgagctgagcaagaacggcgagtggtacgaggtgctgaagatcgccgccgacatcctgatcaaggaggagatcctgagcgagaacgaccagctgagcaaccaggtggtggtgtgcctgctgcccttcatggtgatcaacaacgacgacaccgagagcgccgagatgaagatcgccatctacctgagcaagagcggcatctgcagcctgcaccccctgctgagaggctgggaggaggccctggagaacgtgatcaagagcaccaagcccggcaagctgatcggcgtggccaaccagaagatgatcgagctgctggccgacaacatcaacctgggcgaccccagcagcatgctgaagatggtggaggacctgatcagcgtgggcgaggaggagagcttcaacctgaagcagaaggtgaccttccacgtgatcctgagcgtgctggtgagctgctgcagcagcctgaaggagacccacttccccttcgccatcagagtgttcagcctgctgcagaagaagatcaagaagctggagagcgtgatcaccgccgtggagatccccagcgagtggcacatcgagctgatgctggacagaggcatccccgtggagctgtgggcccactacgtggaggagctgaacagcacccagagagtggccgtggaggacagcgtgttcctggtgttcagcctgaagaagttcatctacgccctgaaggcccccaagagcttccccaagggcgacatctggtggaaccccgagcagctgaaggaggacagcagagactacctgcacctgctgatcggcctgttcgagatgatgctgaacggcgccgacgccgtgcacttcagagtgctgatgaagctgttcatcaaggtgcacctggaggacgtgttccagctgttcaagttctgcagcgtgctgtggacctacggcagcagcctgagcaaccccctgaactgcagcgtgaagaccgtgctgcagacccaggccctgtacgtgggctgcgccatgctgagcagccagaagacccagtgcaagcaccagctggccagcatcagcagccccgtggtgaccagcctgctgatcaacctgggcagccccgtgaaggaggtgagaagagccgccatccagtgcctgcaggccctgagcggcgtggccagccccttctacctgatcatcgaccacctgatcagcaaggccgaggagatcaccagcgacgccgcctacgtgatccaggacctggccaccctgttcgaggagctgcagagagagaagaagctgaagagccaccagaagctgagcgagaccctgaagaacctgctgagctgcgtgtacagctgccccagctacatcgccaaggacctgatgaaggtgctgcagggcgtgaacggcgagatcaccaagcccttcttcgccgccatcagcgacgagaaggtgcagcagaagctgctgagaatgctgttcgacctgctggtgaactgcaagaacagccactgcgcccagaccgtgagcagcgtgttcaagggcatcagcgtgaacgccgagcaggtgagaatcgagctggagccccccgacaaggccaagcccctgggcaccgtgcagcagaagagaagacagaagatgcagcagaagaagagccaggacctggagagcgtgcaggaggtgggcggcagctactggcagagagtgaccctgatcctggagctgctgcagcacaagaagaagctgagaagcccccagatcctggtgcccaccctgttcaacctgctgagcagatgcctggagcccctgccccaggagcagggcaacatggagtacaccaagcagctgatcctgagctgcctgctgaacatctgccagaagctgagccccgacggcggcaagatccccaaggacatcctggacgaggagaagttcaacgtggagctgatcgtgcagtgcatcagactgagcgagatgccccagacccaccaccacgccctgctgctgctgggcaccgtggccggcatcttccccgacaaggtgctgcacaacatcatgagcatcttcaccttcatgggcgccaacgtgatgagactggacgacacctacagcttccaggtgatcaacaagaccgtgaagatggtgatccccgccctgatccagagcgacagcggcgacagcatcgaggtgagcagaaacgtggaggagatcgtggtgaagatcatcagcgtgttcgtggacgccctgccccacgtgcccgagcacagaagactgcccatcctggtgcagctggtggacaccctgggcgccgagaagttcctgtggatcctgctgatcctgctgttcgagcagtacgtgaccaagaccgtgctggccgccgcctacggcgagaaggacgccatcctggaggccgacaccgagttctggttcagcgtgtgctgcgagttcagcgtgcagcaccagatccagagcctgatgaacatcctgcagtacctgctgaagctgcccgaggagaaggaggagaccatccccaaggccgtgagcttcaacaagagcgagagccaggaggagatgctgcaggtgttcaacgtggagacccacaccagcaagcagctgagacacttcaagttcctgagcgtgagcttcatgagccagctgctgagcagcaacaacttcctgaagaaggtggtggagagcggcggccccgagatcctgaagggcctggaggagagactgctggagaccgtgctgggctacatcagcgccgtggcccagagcatggagagaaacgccgacaagctgaccgtgaagttctggagagccctgctgagcaaggcctacgacctgctggacaaggtgaacgccctgctgcccaccgagaccttcatccccgtgatcagaggcctggtgggcaaccccctgcccagcgtgagaagaaaggccctggacctgctgaacaacaagctgcagcagaacatcagctggaagaagaccatcgtgaccagattcctgaagctggtgcccgacctgctggccatcgtgcagagaaagaagaaggagggcgaggaggagcaggccatcaacagacagaccgccctgtacaccctgaagctgctgtgcaagaacttcggcgccgagaaccccgaccccttcgtgcccgtgctgaacaccgccgtgaagctgatcgcccccgagagaaaggaggagaagaacgtgctgggcagcgccctgctgtgcatcgccgaggtgaccagcaccctggaggccctggccatcccccagctgcccagcctgatgcccagcctgctgaccaccatgaagaacaccagcgagctggtgagcagcgaggtgtacctgctgagcgccctggccgccctgcagaaggtggtggagaccctgccccacttcatcagcccctacctggagggcatcctgagccaggtgatccacctggagaagatcaccagcgagatgggcagcgccagccaggccaacatcagactgaccagcctgaagaagaccctggccaccaccctggcccccagagtgctgctgcccgccatcaagaagacctacaagcagatcgagaagaactggaagaaccacatgggccccttcatgagcatcctgcaggagcacatcggcgtgatgaagaaggaggagctgaccagccaccagagccagctgaccgccttcttcctggaggccctggacttcagagcccagcacagcgagaacgacctggaggaggtgggcaagaccgagaactgcatcatcgactgcctggtggccatggtggtgaagctgagcgaggtgaccttcagacccctgttcttcaagctgttcgactgggccaagaccgaggacgcccccaaggacagactgctgaccttctacaacctggccgactgcatcgccgagaagctgaagggcctgttcaccctgttcgccggccacctggtgaagcccttcgccgacaccctgaaccaggtgaacatcagcaagaccgacgaggccttcttcgacagcgagaacgaccccgagaagtgctgcctgctgctgcagttcatcctgaactgcctgtacaagatcttcctgttcgacacccagcacttcatcagcaaggagagagccgaggccctgatgatgcccctggtggaccagctggagaacagactgggcggcgaggagaagttccaggagagagtgaccaagcacctgatcccctgcatcgcccagttcagcgtggccatggccgacgacagcctgtggaagcccctgaactaccagatcctgctgaagaccagagacagcagccccaaggtgagattcgccgccctgatcaccgtgctggccctggccgagaagctgaaggagaactacatcgtgctgctgcccgagagcatccccttcctggccgagctgatggaggacgagtgcgaggaggtggagcaccagtgccagaagaccatccagcagctggagaccgtgctgggcgagcccctgcagagctacttctag

SEQ ID NO: 196472 - DNA, 6435 bp, Artificial Sequence
  derived and/or modified sequence
atgaccagcctggcccagcagctgcagagactggccctgccccagagcgacgccagcctgctgagcagagacgaggtggccagcctgctgttcgaccccaaggaggccgccaccatcgacagagacaccgccttcgccatcggctgcaccggcctggaggagctgctgggcatcgaccccagcttcgagcagttcgaggcccccctgttcagccagctggccaagaccctggagagaagcgtgcagaccaaggccgtgaacaagcagctggacgagaacatcagcctgttcctgatccacctgagcccctacttcctgctgaagcccgcccagaagtgcctggagtggctgatccacagattccacatccacctgtacaaccaggacagcctgatcgcctgcgtgctgccctaccacgagaccagaatcttcgtgagagtgatccagctgctgaagatcaacaacagcaagcacagatggttctggctgctgcccgtgaagcagagcggcgtgcccctggccaagggcaccctgatcacccactgctacaaggacctgggcttcatggacttcatctgcagcctggtgaccaagagcgtgaaggtgttcgccgagtaccccggcagcagcgcccagctgagagtgctgctggccttctacgccagcaccatcgtgagcgccctggtggccgccgaggacgtgagcgacaacatcatcgccaagctgttcccctacatccagaagggcctgaagagcagcctgcccgactacagagccgccacctacatgatcatctgccagatcagcgtgaaggtgaccatggagaacaccttcgtgaacagcctggccagccagatcatcaagaccctgaccaagatccccagcctgatcaaggacggcctgagctgcctgatcgtgctgctgcagagacagaagcccgagagcctgggcaagaagcccttcccccacctgtgcaacgtgcccgacctgatcaccatcctgcacggcatcagcgagacctacgacgtgagccccctgctgcactacatgctgccccacctggtggtgagcatcatccaccacgtgaccggcgaggagaccgagggcatggacggccagatctacaagagacacctggaggccatcctgaccaagatcagcctgaagaacaacctggaccacctgctggccagcctgctgttcgaggagtacatcagctacagcagccaggaggagatggacagcaacaaggtgagcctgctgaacgagcagttcctgcccctgatcagactgctggagagcaagtaccccagaaccctggacgtggtgctggaggagcacctgaaggagatcgccgacctgaagaagcaggagctgttccaccagttcgtgagcctgagcaccagcggcggcaagtaccagttcctggccgacagcgacaccagcctgatgctgagcctgaaccaccccctggcccccgtgagaatcctggccatgaaccacctgaagaagatcatgaagaccagcaaggagggcgtggacgagagcttcatcaaggaggccgtgctggccagactgggcgacgacaacatcgacgtggtgctgagcgccatcagcgccttcgagatcttcaaggagcacttcagcagcgaggtgaccatcagcaacctgctgaacctgttccagagagccgagctgagcaagaacggcgagtggtacgaggtgctgaagatcgccgccgacatcctgatcaaggaggagatcctgagcgagaacgaccagctgagcaaccaggtggtggtgtgcctgctgcccttcatggtgatcaacaacgacgacaccgagagcgccgagatgaagatcgccatctacctgagcaagagcggcatctgcagcctgcaccccctgctgagaggctgggaggaggccctggagaacgtgatcaagagcaccaagcccggcaagctgatcggcgtggccaaccagaagatgatcgagctgctggccgacaacatcaacctgggcgaccccagcagcatgctgaagatggtggaggacctgatcagcgtgggcgaggaggagagcttcaacctgaagcagaaggtgaccttccacgtgatcctgagcgtgctggtgagctgctgcagcagcctgaaggagacccacttccccttcgccatcagagtgttcagcctgctgcagaagaagatcaagaagctggagagcgtgatcaccgccgtggagatccccagcgagtggcacatcgagctgatgctggacagaggcatccccgtggagctgtgggcccactacgtggaggagctgaacagcacccagagagtggccgtggaggacagcgtgttcctggtgttcagcctgaagaagttcatctacgccctgaaggcccccaagagcttccccaagggcgacatctggtggaaccccgagcagctgaaggaggacagcagagactacctgcacctgctgatcggcctgttcgagatgatgctgaacggcgccgacgccgtgcacttcagagtgctgatgaagctgttcatcaaggtgcacctggaggacgtgttccagctgttcaagttctgcagcgtgctgtggacctacggcagcagcctgagcaaccccctgaactgcagcgtgaagaccgtgctgcagacccaggccctgtacgtgggctgcgccatgctgagcagccagaagacccagtgcaagcaccagctggccagcatcagcagccccgtggtgaccagcctgctgatcaacctgggcagccccgtgaaggaggtgagaagagccgccatccagtgcctgcaggccctgagcggcgtggccagccccttctacctgatcatcgaccacctgatcagcaaggccgaggagatcaccagcgacgccgcctacgtgatccaggacctggccaccctgttcgaggagctgcagagagagaagaagctgaagagccaccagaagctgagcgagaccctgaagaacctgctgagctgcgtgtacagctgccccagctacatcgccaaggacctgatgaaggtgctgcagggcgtgaacggcgagatggtgctgagccagctgctgcccatggccgagcagctgctggagaagatccagaaggagcccaccgccgtgctgaaggacgaggccatggtgctgcacctgaccctgggcaagtacaacgagttcagcgtgagcctgctgaacgaggaccccaagagcctggacatcttcatcaaggccgtgcacaccaccaaggagctgtacgccggcatgcccaccatccagatcaccgccctggagaagatcaccaagcccttcttcgccgccatcagcgacgagaaggtgcagcagaagctgctgagaatgctgttcgacctgctggtgaactgcaagaacagccactgcgcccagaccgtgagcagcgtgttcaagggcatcagcgtgaacgccgagcaggtgagaatcgagctggagccccccgacaaggccaagcccctgggcaccgtgcagcagaagagaagacagaagatgcagcagaagaagagccaggacctggagagcgtgcaggaggtgggcggcagctactggcagagagtgaccctgatcctggagctgctgcagcacaagaagaagctgagaagcccccagatcctggtgcccaccctgttcaacctgctgagcagatgcctggagcccctgccccaggagcagggcaacatggagtacaccaagcagctgatcctgagctgcctgctgaacatctgccagaagctgagccccgacggcggcaagatccccaaggacatcctggacgaggagaagttcaacgtggagctgatcgtgcagtgcatcagactgagcgagatgccccagacccaccaccacgccctgctgctgctgggcaccgtggccggcatcttccccgacaaggtgctgcacaacatcatgagcatcttcaccttcatgggcgccaacgtgatgagactggacgacacctacagcttccaggtgatcaacaagaccgtgaagatggtgatccccgccctgatccagagcgacagcggcgacagcatcgaggtgagcagaaacgtggaggagatcgtggtgaagatcatcagcgtgttcgtggacgccctgccccacgtgcccgagcacagaagactgcccatcctggtgcagctggtggacaccctgggcgccgagaagttcctgtggatcctgctgatcctgctgttcgagcagtacgtgaccaagaccgtgctggccgccgcctacggcgagaaggacgccatcctggaggccgacaccgagttctggttcagcgtgtgctgcgagttcagcgtgcagcaccagatccagagcctgatgaacatcctgcagtacctgctgaagctgcccgaggagaaggaggagaccatccccaaggccgtgagcttcaacaagagcgagagccaggaggagatgctgcaggtgttcaacgtggagacccacaccagcaagcagctgagacacttcaagttcctgagcgtgagcttcatgagccagctgctgagcagcaacaacttcctgaagaaggtggtggagagcggcggccccgagatcctgaagggcctggaggagagactgctggagaccgtgctgggctacatcagcgccgtggcccagagcatggagagaaacgccgacaagctgaccgtgaagttctggagagccctgctgagcaaggcctacgacctgctggacaaggtgaacgccctgctgcccaccgagaccttcatccccgtgatcagaggcctggtgggcaaccccctgcccagcgtgagaagaaaggccctggacctgctgaacaacaagctgcagcagaacatcagctggaagaagaccatcgtgaccagattcctgaagctggtgcccgacctgctggccatcgtgcagagaaagaagaaggagggcgaggaggagcaggccatcaacagacagaccgccctgtacaccctgaagctgctgtgcaagaacttcggcgccgagaaccccgaccccttcgtgcccgtgctgaacaccgccgtgaagctgatcgcccccgagagaaaggaggagaagaacgtgctgggcagcgccctgctgtgcatcgccgaggtgaccagcaccctggaggccctggccatcccccagctgcccagcctgatgcccagcctgctgaccaccatgaagaacaccagcgagctggtgagcagcgaggtgtacctgctgagcgccctggccgccctgcagaaggtggtggagaccctgccccacttcatcagcccctacctggagggcatcctgagccaggtgatccacctggagaagatcaccagcgagatgggcagcgccagccaggccaacatcagactgaccagcctgaagaagaccctggccaccaccctggcccccagagtgctgctgcccgccatcaagaagacctacaagcagatcgagaagaactggaagaaccacatgggccccttcatgagcatcctgcaggagcacatcggcgtgatgaagaaggaggagctgaccagccaccagagccagctgaccgccttcttcctggaggccctggacttcagagcccagcacagcgagaacgacctggaggaggtgggcaagaccgagaactgcatcatcgactgcctggtggccatggtggtgaagctgagcgaggtgaccttcagacccctgttcttcaagctgttcgactgggccaagaccgaggacgcccccaaggacagactgctgaccttctacaacctggccgactgcatcgccgagaagctgaagggcctgttcaccctgttcgccggccacctggtgaagcccttcgccgacaccctgaaccaggtgaacatcagcaagaccgacgaggccttcttcgacagcgagaacgaccccgagaagtgctgcctgctgctgcagttcatcctgaactgcctgtacaagatcttcctgttcgacacccagcacttcatcagcaaggagagagccgaggccctgatgatgcccctggtggaccagctggagaacagactgggcggcgaggagaagttccaggagagagtgaccaagcacctgatcccctgcatcgcccagttcagcgtggccatggccgacgacagcctgtggaagcccctgaactaccagatcctgctgaagaccagagacagcagccccaaggtgagattcgccgccctgatcaccgtgctggccctggccgagaagctgaaggagaactacatcgtgctgctgcccgagagcatccccttcctggccgagctgatggaggacgagtgcgaggaggtggagcaccagtgccagaagaccatccagcagctggagaccgtgctgggcgagcccctgcagagctacttctag

SEQ ID NO: 196473 - DNA, 793 bp, Artificial Sequence
  derived and/or modified sequence
ggtaccatgtgggaagcgctgtgaagagttgttgccttccaagatatacccaaattcccagttccagcccgtgtcattaaaactccgctggcgtgaaagatgacgtccttagcccagcagctgcaacgactcgccctccctcaaagtgatgccagcctcttatctagagatgaagttgcttctttgttatttgaccctaaggaagcggccacaatcgacagggacaccgccttcgccattggatgtactggcctggaagagttgcttggaattgatccttcctttgagcagtttgaagcaccgttgttcagtcagctagcaaaaaccttggagcgaagtgttcagaccaaagcagtaaacaaacagttggatgaaaacatttcattattccttattcacttgtcgccttacttcctgcttaagccagcacagaagtgtctggagtggttgattcacaggtagctaatagaattacagaaataactatgggttaatcactttggtcttgtaaaaaattaagtagttgagaacttatcaaattaaagctgaaaaattaggtatattaagagattgatacaatgtccattgtgtgagataagcatgctcttctgcctttaaattcttttttgttgatagtgaaaagtagaactactggtgattttgagtaaatggtctaacctcattagtttttttttgagatagagtcttgctgggcactcaggctggagtgcaatattgaaatcttggctcactgcaacctctgcctcccaggttcaagtgattctcccacctc

SEQ ID NO: 196474 - DNA, 6538 bp, Artificial Sequence
  derived and/or modified sequence
gagggttgggctccttggtaccatgtgggaagcgctgtgaagagttgttgccttccaagatatacccaaattcccagttccagcccgtgtcattaaaactccgctggcgtgaaagatgacgtccttagcccagcagctgcaacgactcgccctccctcaaagtgatgccagcctcttatctagagatgaagttgcttctttgttatttgaccctaaggaagcggccacaatcgacagggacaccgccttcgccattggatgtactggcctggaagagttgcttggaattgatccttcctttgagcagtttgaagcaccgttgttcagtcagctagcaaaaaccttggagcgaagtgttcagaccaaagcagtaaacaaacagttggatgaaaacatttcattattccttattcacttgtcgccttacttcctgcttaagccagcacagaagtgtctggagtggttgattcacaggttccatatacatctctataatcaagatagcctcattgcttgtgttctgccataccacgagacaagaatatttgtgcgagtcatacagcttctaaaaattaataattcaaagcacagatggttctggttgttgccagttaagcaatctggagtgccgttagctaaaggaactttgattacccactgctacaaagatcttggattcatggatttcatttgcagtttggtgacaaaatctgtgaaggtttttgctgagtacccgggcagctcagctcagttgagggtgctcttggctttctatgcttctaccatagtgtcggcgctggtagctgcagaggacgtatcagacaatatcatcgccaaactatttccctatatccaaaagggattgaaatcatctttaccagattacagagctgcaacatacatgataatatgtcagatttctgtgaaagtgaccatggaaaatacctttgtgaattcattggcatcacagatcatcaaaacattgaccaagattccctctttgatcaaggatgggttaagttgcttgatagtgctcctgcagagacagaagccagagagccttgggaaaaagccattccctcacttatgtaatgttcctgatcttattacaatacttcatgggatttctgaaacttacgatgtcagtcctcttctgcattacatgcttccccatctggtcgtctccatcattcatcatgttacaggagaagaaactgaaggaatggatggtcaaatctacaagagacacttagaagctatacttacaaaaatatcactgaagaacaacttagaccatttgttggctagccttctatttgaagagtatatttcatatagttcacaggaagaaatggattctaataaagtgtctttgcttaatgaacaatttcttccactcattaggcttttagaaagcaaataccccagaacattagatgttgtattagaggaacacttaaaggaaattgcagatctgaaaaaacaagagcttttccatcagtttgtttctctttctacaagtggaggaaagtatcagtttttagcagattctgatacttctttgatgctcagcctgaatcatccacttgctcctgtgagaattctggccatgaatcatttgaaaaagatcatgaaaacatcaaaggagggtgttgatgaatctttcataaaagaagctgttttagcccgattaggtgatgataatatagatgttgttttgtcggctataagtgcttttgagattttcaaagaacacttcagttcagaagtgacgatttcaaatcttctgaatctctttcaaagagcagaactttcaaagaatggagaatggtacgaggtacttaagatagccgctgacatattaattaaagaagagatactgagtgaaaatgatcagttgtcaaatcaggtggttgtatgtttgctgccatttatggttatcaataatgatgatacggaatctgctgagatgaaaattgctatatatttatcaaaatcaggaatctgctccctgcaccctctattaagaggctgggaagaagctcttgaaaatgtaattaaaagcacaaagccaggaaaactaatcggtgtagcaaatcagaagatgattgagttgttggctgataatataaatttaggagatccttcttcaatgttaaagatggtggaggatttaataagcgtgggtgaggaggagtcctttaacctgaagcagaaagtaacgtttcatgtgatcctgtctgtgctcgtctcttgttgttcatctttaaaagaaacccactttccatttgcgataagagtcttcagtttgttgcagaaaaaaataaagaagcttgaaagtgtcattactgcagtggaaatcccctcagaatggcacattgaactgatgttagacagagggatcccagtggagctgtgggcacattatgtagaagagctcaacagcactcagagggtggccgtggaggactcggtttttcttgtattttccttgaaaaaatttatttatgcactgaaagctcctaaatcttttcctaaaggtgatatatggtggaatcctgaacaactgaaagaagacagcagggactatctgcacttgctcattgggctgtttgagatgatgctcaatggtgccgatgctgttcatttcagagttctgatgaaacttttcataaaggtgcatctagaagatgtttttcagttattcaagttctgttctgttttatggacctatggttctagcctttcaaatccactaaactgcagtgtgaaaacagtgctgcagactcaagctctttatgtgggctgtgcaatgctttcttctcagaagacacagtgtaaacaccaactggcatccatatcttctccagtggtgacatctttactcattaacctgggaagccccgtaaaagaagttcgtagggctgccattcagtgtctccaggccctcagtggagtggcatccccgttttatctgataatagatcatttgatttctaaagcagaggagatcacttcagatgctgcctatgttattcaggatttggctactttatttgaggaactacagagagaaaagaaactgaaatctcatcagaagttgtctgaaactttgaaaaacttacttagttgtgtgtatagttgcccatcttatatagcaaaagatttgatgaaagtacttcagggagtcaacggtgagattacaaaaccattttttgcagccatatcagatgaaaaagttcagcagaagcttttaagaatgttgtttgatttattggtgaactgtaaaaactcacattgtgctcagactgtcagcagtgtttttaaagggatttccgttaatgctgaacaagtccgaatagaactggagccaccagataaagctaaacccttgggcacagttcagcaaaaaagaaggcaaaaaatgcagcagaaaaaatcacaagatctagaatctgttcaggaagttggaggttcttactggcaaagagtaactctcatcctggaattactgcagcacaaaaagaagctcagaagtcctcagatattggtgccaactctttttaacttgctatcaagatgtttagaacccttgccacaagagcagggaaatatggaatacaccaaacaattaattcttagttgtctgctcaacatctgccaaaaactatctccagatggtggcaaaatacccaaagatattttagatgaggagaagttcaacgtggagttgatagttcagtgcatccgcctttcggagatgccgcagacccatcaccatgcccttttacttttgggcactgttgctggaatatttccggataaagttttacacaatatcatgtctatttttacatttatgggagccaatgtcatgcgcctagatgatacttacagttttcaagttattaacaagacagtgaaaatggttattcccgcacttattcagtctgatagtggagattctatagaagtttcaagaaacgttgaagagattgtggtaaaaatcattagtgtatttgtggatgcgctgccacacgtcccggagcacaggcgcctgcccatccttgttcaacttgttgatacactgggtgcagagaaattcctctggattctcctcatcttgctttttgaacagtatgtcacaaaaacagtgctggcggctgcctatggcgaaaaggatgctattttagaagcagacactgaattttggttttcagtctgttgtgagtttagtgtccagcatcagatacaaagcttgatgaatatcctccagtacttactaaagctgccagaggaaaaagaagaaaccattcccaaagcagtgtcatttaataagagtgaatcacaagaagaaatgctacaggtttttaatgtagagactcacactagcaagcaactgcggcattttaaatttttgtcagtgtccttcatgtctcagctcctgtcttccaataattttctgaaaaaggtagttgagagtggtggtcctgagattttaaaaggccttgaagagaggttgctggagaccgttctcggctatatcagtgcagttgcacagtccatggaaaggaacgcagacaaactcaccgtgaagttctggcgcgcgctccttagtaaagcttacgacctgttagataaggtcaatgccttgctgcccacagagacattcattcctgtgatcagagggctggtgggcaatcccctgccatctgttcgccgcaaagcgctggaccttttgaataacaagctgcagcaaaatatatcctggaagaagacaatagttacccgtttcctaaaactggttccagaccttttggccattgtgcagcgtaagaaaaaggaaggggaagaagaacaagcaatcaacagacagacagcattgtataccttaaagcttttatgcaagaattttggtgcagaaaatccagatccttttgtcccagtgctgaacactgctgtgaaactgattgctccagagagaaaggaggagaagaatgtcctgggaagcgcgctgctgtgcatagcagaggtgacctccaccctggaggcgctggccatcccccagcttcccagcctgatgccatcgttgctgacaacaatgaagaacaccagcgagctggtctccagcgaggtctacctgctcagtgccttggctgctctgcagaaggttgtggagactctcccgcacttcatcagcccctatctggaaggcattctctcccaggtgattcatctggagaaaatcactagtgaaatgggttctgcgtcacaggctaatatccgtctcacatctcttaaaaagacactggctaccacacttgcaccccgagtcctgttgcccgccatcaaaaaaacttacaagcagattgagaagaactggaagaatcacatgggtccgtttatgagcatcttgcaagagcatattggggtgatgaagaaggaagagctcacctcccatcagtctcagctaaccgcctttttcctggaagccctggacttccgagcccagcactctgagaacgatctggaggaagttggaaaaacggaaaattgtatcattgactgtctagtagccatggttgtcaaactttccgaggtcacattcaggcccctgttcttcaagctgtttgattgggctaaaacagaagatgccccaaaggacaggttgttgacattttacaacttggcagattgcattgctgaaaagctgaaagggctttttactctgtttgccggccacttagtgaagccttttgctgacaccttgaaccaggtgaacatctccaaaacagatgaagcattttttgactctgaaaatgaccctgaaaagtgctgcttgctgttgcagtttattttgaactgtttatacaaaatcttcctttttgatacccagcattttataagtaaagagagagcagaagccttgatgatgcctctggtggatcagctggaaaacaggcttgggggagaagagaaattccaggaacgggtgacaaagcacctgataccatgcatcgcacagttttcggtggccatggcggatgactctctttggaaaccactgaactaccagattctgctaaagacgagagactcctcgcctaaggttcgatttgctgctttgattactgtgttagcactggctgaaaaactaaaggagaattatattgtcttgctaccagaatccattcctttcttagcagagttgatggaagatgaatgtgaagaagtagaacatcagtgccaaaagactattcagcaactggaaactgtcctgggagagccactccagagctatttctaagactttctgtggtgtttcatactctactcagagttcacactcatatttcatatttttatttttgggtgttgggtgccatgttacttttggtgccttaatacacctacttggattacttacaaatgttttatcacttctttacaaaatccccacctggcttgtgctgccacataagcctctcctgcctatcgtatagagctgcagaaagagtaaatgatacacggtattttt

SEQ ID NO: 196475 - DNA, 8447 bp, Artificial Sequence
  derived and/or modified sequence
gagggttgggctccttggtaccatgtgggaagcgctgtgaagagttgttgccttccaagatatacccaaattcccagttccagcccgtgtcattaaaactccgctggcgtgaaagatgacgtccttagcccagcagctgcaacgactcgccctccctcaaagtgatgccagcctcttatctagagatgaagttgcttctttgttatttgaccctaaggaagcggccacaatcgacagggacaccgccttcgccattggatgtactggcctggaagagttgcttggaattgatccttcctttgagcagtttgaagcaccgttgttcagtcagctagcaaaaaccttggagcgaagtgttcagaccaaagcagtaaacaaacagttggatgaaaacatttcattattccttattcacttgtcgccttacttcctgcttaagccagcacagaagtgtctggagtggttgattcacaggttccatatacatctctataatcaagatagcctcattgcttgtgttctgccataccacgagacaagaatatttgtgcgagtcatacagcttctaaaaattaataattcaaagcacagatggttctggttgttgccagttaagcaatctggagtgccgttagctaaaggaactttgattacccactgctacaaagatcttggattcatggatttcatttgcagtttggtgacaaaatctgtgaaggtttttgctgagtacccgggcagctcagctcagttgagggtgctcttggctttctatgcttctaccatagtgtcggcgctggtagctgcagaggacgtatcagacaatatcatcgccaaactatttccctatatccaaaagggattgaaatcatctttaccagattacagagctgcaacatacatgataatatgtcagatttctgtgaaagtgaccatggaaaatacctttgtgaattcattggcatcacagatcatcaaaacattgaccaagattccctctttgatcaaggatgggttaagttgcttgatagtgctcctgcagagacagaagccagagagccttgggaaaaagccattccctcacttatgtaatgttcctgatcttattacaatacttcatgggatttctgaaacttacgatgtcagtcctcttctgcattacatgcttccccatctggtcgtctccatcattcatcatgttacaggagaagaaactgaaggaatggatggtcaaatctacaagagacacttagaagctatacttacaaaaatatcactgaagaacaacttagaccatttgttggctagccttctatttgaagagtatatttcatatagttcacaggaagaaatggattctaataaagtgtctttgcttaatgaacaatttcttccactcattaggcttttagaaagcaaataccccagaacattagatgttgtattagaggaacacttaaaggaaattgcagatctgaaaaaacaagagcttttccatcagtttgtttctctttctacaagtggaggaaagtatcagtttttagcagattctgatacttctttgatgctcagcctgaatcatccacttgctcctgtgagaattctggccatgaatcatttgaaaaagatcatgaaaacatcaaaggagggtgttgatgaatctttcataaaagaagctgttttagcccgattaggtgatgataatatagatgttgttttgtcggctataagtgcttttgagattttcaaagaacacttcagttcagaagtgacgatttcaaatcttctgaatctctttcaaagagcagaactttcaaagaatggagaatggtacgaggtacttaagatagccgctgacatattaattaaagaagagatactgagtgaaaatgatcagttgtcaaatcaggtggttgtatgtttgctgccatttatggttatcaataatgatgatacggaatctgctgagatgaaaattgctatatatttatcaaaatcaggaatctgctccctgcaccctctattaagaggctgggaagaagctcttgaaaatgtaattaaaagcacaaagccaggaaaactaatcggtgtagcaaatcagaagatgattgagttgttggctgataatataaatttaggagatccttcttcaatgttaaagatggtggaggatttaataagcgtgggtgaggaggagtcctttaacctgaagcagaaagtaacgtttcatgtgatcctgtctgtgctcgtctcttgttgttcatctttaaaagaaacccactttccatttgcgataagagtcttcagtttgttgcagaaaaaaataaagaagcttgaaagtgtcattactgcagtggaaatcccctcagaatggcacattgaactgatgttagacagagggatcccagtggagctgtgggcacattatgtagaagagctcaacagcactcagagggtggccgtggaggactcggtttttcttgtattttccttgaaaaaatttatttatgcactgaaagctcctaaatcttttcctaaaggtgatatatggtggaatcctgaacaactgaaagaagacagcagggactatctgcacttgctcattgggctgtttgagatgatgctcaatggtgccgatgctgttcatttcagagttctgatgaaacttttcataaaggtgcatctagaagatgtttttcagttattcaagttctgttctgttttatggacctatggttctagcctttcaaatccactaaactgcagtgtgaaaacagtgctgcagactcaagctctttatgtgggctgtgcaatgctttcttctcagaagacacagtgtaaacaccaactggcatccatatcttctccagtggtgacatctttactcattaacctgggaagccccgtaaaagaagttcgtagggctgccattcagtgtctccaggccctcagtggagtggcatccccgttttatctgataatagatcatttgatttctaaagcagaggagatcacttcagatgctgcctatgttattcaggatttggctactttatttgaggaactacagagagaaaagaaactgaaatctcatcagaagttgtctgaaactttgaaaaacttacttagttgtgtgtatagttgcccatcttatatagcaaaagatttgatgaaagtacttcagggagtcaacggtgagatggtgctttctcagctattgcctatggctgaacaactgctagaaaagatccagaaggagcccacagctgtgctgaaagatgaggccatggttctgcatctcactctgggaaagtataatgaattttcagtttcccttttaaatgaggatccgaagagtctagatatatttataaaagctgtgcacacaacaaaggaactttacgcgggaatgccaaccattcagatcacagcccttgaaaagattacaaaaccattttttgcagccatatcagatgaaaaagttcagcagaagcttttaagaatgttgtttgatttattggtgaactgtaaaaactcacattgtgctcagactgtcagcagtgtttttaaagggatttccgttaatgctgaacaagtccgaatagaactggagccaccagataaagctaaacccttgggcacagttcagcaaaaaagaaggcaaaaaatgcagcagaaaaaatcacaagatctagaatctgttcaggaagttggaggttcttactggcaaagagtaactctcatcctggaattactgcagcacaaaaagaagctcagaagtcctcagatattggtgccaactctttttaacttgctatcaagatgtttagaacccttgccacaagagcagggaaatatggaatacaccaaacaattaattcttagttgtctgctcaacatctgccaaaaactatctccagatggtggcaaaatacccaaagatattttagatgaggagaagttcaacgtggagttgatagttcagtgcatccgcctttcggagatgccgcagacccatcaccatgcccttttacttttgggcactgttgctggaatatttccggataaagttttacacaatatcatgtctatttttacatttatgggagccaatgtcatgcgcctagatgatacttacagttttcaagttattaacaagacagtgaaaatggttattcccgcacttattcagtctgatagtggagattctatagaagtttcaagaaacgttgaagagattgtggtaaaaatcattagtgtatttgtggatgcgctgccacacgtcccggagcacaggcgcctgcccatccttgttcaacttgttgatacactgggtgcagagaaattcctctggattctcctcatcttgctttttgaacagtatgtcacaaaaacagtgctggcggctgcctatggcgaaaaggatgctattttagaagcagacactgaattttggttttcagtctgttgtgagtttagtgtccagcatcagatacaaagcttgatgaatatcctccagtacttactaaagctgccagaggaaaaagaagaaaccattcccaaagcagtgtcatttaataagagtgaatcacaagaagaaatgctacaggtttttaatgtagagactcacactagcaagcaactgcggcattttaaatttttgtcagtgtccttcatgtctcagctcctgtcttccaataattttctgaaaaaggtagttgagagtggtggtcctgagattttaaaaggccttgaagagaggttgctggagaccgttctcggctatatcagtgcagttgcacagtccatggaaaggaacgcagacaaactcaccgtgaagttctggcgcgcgctccttagtaaagcttacgacctgttagataaggtcaatgccttgctgcccacagagacattcattcctgtgatcagagggctggtgggcaatcccctgccatctgttcgccgcaaagcgctggaccttttgaataacaagctgcagcaaaatatatcctggaagaagacaatagttacccgtttcctaaaactggttccagaccttttggccattgtgcagcgtaagaaaaaggaaggggaagaagaacaagcaatcaacagacagacagcattgtataccttaaagcttttatgcaagaattttggtgcagaaaatccagatccttttgtcccagtgctgaacactgctgtgaaactgattgctccagagagaaaggaggagaagaatgtcctgggaagcgcgctgctgtgcatagcagaggtgacctccaccctggaggcgctggccatcccccagcttcccagcctgatgccatcgttgctgacaacaatgaagaacaccagcgagctggtctccagcgaggtctacctgctcagtgccttggctgctctgcagaaggttgtggagactctcccgcacttcatcagcccctatctggaaggcattctctcccaggtgattcatctggagaaaatcactagtgaaatgggttctgcgtcacaggctaatatccgtctcacatctcttaaaaagacactggctaccacacttgcaccccgagtcctgttgcccgccatcaaaaaaacttacaagcagattgagaagaactggaagaatcacatgggtccgtttatgagcatcttgcaagagcatattggggtgatgaagaaggaagagctcacctcccatcagtctcagctaaccgcctttttcctggaagccctggacttccgagcccagcactctgagaacgatctggaggaagttggaaaaacggaaaattgtatcattgactgtctagtagccatggttgtcaaactttccgaggtcacattcaggcccctgttcttcaagctgtttgattgggctaaaacagaagatgccccaaaggacaggttgttgacattttacaacttggcagattgcattgctgaaaagctgaaagggctttttactctgtttgccggccacttagtgaagccttttgctgacaccttgaaccaggtgaacatctccaaaacagatgaagcattttttgactctgaaaatgaccctgaaaagtgctgcttgctgttgcagtttattttgaactgtttatacaaaatcttcctttttgatacccagcattttataagtaaagagagagcagaagccttgatgatgcctctggtggatcagctggaaaacaggcttgggggagaagagaaattccaggaacgggtgacaaagcacctgataccatgcatcgcacagttttcggtggccatggcggatgactctctttggaaaccactgaactaccagattctgctaaagacgagagactcctcgcctaaggttcgatttgctgctttgattactgtgttagcactggctgaaaaactaaaggagaattatattgtcttgctaccagaatccattcctttcttagcagagttgatggaagatgaatgtgaagaagtagaacatcagtgccaaaagactattcagcaactggaaactgtcctgggagagccactccagagctatttctaagactttctgtggtgtttcatactctactcagagttcacactcatatttcatatttttatttttgggtgttgggtgccatgttacttttggtgccttaatacacctacttggattacttacaaatgttttatcacttctttacaaaatccccacctggcttgtgctgccacataagcctctcctgcctatcgtatagagctgcagaaagagtaaatgatacacggtatttttatacagactgctgtgtttgtttaaacatttattattctcttcctgattgatggtaataatattagacttgttaattttagcacccaaagctgacgcctcatttgcactgtaagccttaactcttctgtacagcagtatcttacatacatggtatccatgttgcagatttcactcaaagttgctctatttcaagaaaatgaagttatttagcaatcaacagaagtacttttgactgtaaagcctacttttcattttgggtaggcgaacttcagccttcgtttctttgttgtgcccataaagagaagtggttctggaatgctttttttaacccaggagtgtgactgtcacctttatcctttgttcttttgggaaacgggagagatgaaggcaacacgctgcttctaaaacagctcacacctggctgctcacacagagggcccagaaacactgggtggcacgaggaagctcctccaggattcagaatgaacccagttccattggtggttaactaagaactacttgtctaagaaagtaagtatcagtagatttttttcaatgctttgaagtgccctaatctctagtactgggtcatggtgaagttggaaagtgagggttcaaataaaattagatctgccccctttttaaaggcatctaagaacatcccgtagaatgttcgcattgagtttaaaagcctttgaagctaatatagaagtttaatgcagaaatgtggcaagcaaaaggccaacttgcattttagagacagagcttgctagtatagaagtgcatatttctaagaaatgtctcagtaaaattcattaataaatactaatagctttttaaatttttttcctccacgtaaaatgaaaatgaacttaagacttacaaggaatgatgtgagtgggctatttttttcctaaatgcctcacagtctccaacagctcagttaagcactctgatggtctttatggagaaaaataactctgggggattctcgagtcttcttgccttctacagctttccctgtggcaccctccacccccaaccagtgtctttgagcttggtgagactctgcatacattaatatgaaaagctggaaaagaattaagggctagcgatttctacactgagtacttttaaaaaaataagattgacaatggtattcttttcaatatatggatagaaataatatctaaaatctgttctgaaaatattcctaaatcctggcagagttctgccccagtctaatgtgataaaatgatcctcactgactgagcttttttccctccccactcccaaacctttgaaatttcctgtaacaagatctgacctgtaaagatcccatatacatggaacttctgccaactcccctcaaataatagaaaaatcacagaaatggaaccatttaacttgctgatacaggtttgattttaatcacgtaaagtggaagagtgctttgatctcagttgctaatgatgatggactaatctttagaagaacggaggccttgattggtgatttcatgggaacaaaacagatttctgcattacctctgcctgctttgtgggtcccttagttggcgtacactttctgatagtgcctgccttatgaatgcctgaagtctaatcctgaccttactttgttgcccataaatatctttcaaattgaa

SEQ ID NO: 196476 - protein, 485 aa, Artificial Sequence
  derived and/or modified sequence
MDPTALVEAIVEEVACPICMTFLREPMSIDCGHSFCHSCLSGLWEIPGESQNWGYTCPLCRAPVQPRNLRPNWQLANVVEKVRLLRLHPGMGLKGDLCERHGEKLKMFCKEDVLIMCEACSQSPEHEAHSVVPMEDVAWEYKWELHEALEHLKKEQEEAWKLEVGERKRTATWKIQVETRKQSIVWEFEKYQRLLEKKQPPHRQLGAEVAAALASLQREAAETMQKLELNHSELIQQSQVLWRMIAELKERSQRPVRWMLQDIQEVLNRSKSWSLQQPEPISLELKTDCRVLGLREILKTYAADVRLDPDTAYSRLIVSEDRKRVHYGDTNQKLPDNPERFYRYNIVLGSQCISSGRHYWEVEVGDRSEWGLGVCKQNVDRKEVVYLSPHYGFWVIRLRKGNEYRAGTDEYPILSLPVPPRRVGIFVDYEAHDISFYNVTDCGSHIFTFPRYPFPGRLLPYFSPCYSIGTNNTAPLAICSLDGED

SEQ ID NO: 196477 - protein, 206 aa, Artificial Sequence
  derived and/or modified sequence
MQKLELKTDCRVLGLREILKTYAADVRLDPDTAYSRLIVSEDRKRVHYGDTNQKLPDNPERFYRYNIVLGSQCISSGRHYWEVEVGDRSEWGLGVCKQNVDRKEVVYLSPHYGFWVIRLRKGNEYRAGTDEYPILSLPVPPRRVGIFVDYEAHDISFYNVTDCGSHIFTFPRYPFPGRLLPYFSPCYSIGTNNTAPLAICSLDGED

SEQ ID NO: 196478 - DNA, 3321 bp, Artificial Sequence
  derived and/or modified sequence
gctgcgggctactgggcctgcgctgccgggctttgggttctgggcctctgccgctctctggccctaagtgctgagctgccgggaacggcagcttctgacgctgggccattggacgctgcggaaccaggcttcttcactttgagtttccgccgcgaagcgccagtccgggccgaggagggagcctttactacttctccctggtttcattcatgttctgaggagggtgtgagaaggaaccatggatcccacagccttggtggaagccattgtggaagaagtggcctgtcccatctgtatgaccttcctgagggagcccatgagcattgactgtggccacagcttctgccacagctgtctctctggactctgggagatcccaggagaatcccagaactggggttacacctgtcccctctgtcgagctcctgtccagccaaggaacctgcggcctaattggcagctggccaatgttgtagaaaaagtccgtctgctaaggctacatccaggaatggggctgaagggtgacctgtgtgagcgccatggggaaaagctgaagatgttctgcaaagaggatgtcttgataatgtgtgaggcctgcagccagtccccagagcatgaggcccacagtgttgtgccaatggaggatgttgcctgggagtacaagtgggaacttcatgaggccctcgaacatctgaagaaagagcaagaagaggcctggaagcttgaagttggtgaaaggaaacgaactgccacctggaagatacaggtggaaacccgaaaacagagtattgtatgggagtttgaaaaataccagcgattactagagaaaaagcagccaccacatcggcagctgggggcagaggtagcagcagctctggccagcctacagcgggaggcagcggagaccatgcagaaactggagttgaaccatagcgagctcatccagcagagccaggtcctgtggaggatgattgcagagttgaaagagaggtcgcagaggcctgtccgctggatgttgcaggatattcaggaagtgttaaacaggagcaaatcttggagcttgcagcagccagaaccaatctccctggagttgaagacagattgccgtgtgctggggctaagagagatcctgaagacttatgcagctgatgtgcgcttggatccagatactgcttactcccgtctcatcgtgtctgaggacagaaaacgtgtgcactatggagacaccaaccagaaactgccagacaatcctgagagattttaccgctataatatcgtcctgggaagccagtgcatctcctcaggccggcactactgggaggtggaggtgggagacaggtctgagtggggcctgggagtatgtaagcaaaatgtagaccggaaggaggtggtctacttatccccccactatggattctgggtgataaggctgaggaagggaaatgagtaccgagcaggcaccgatgagtacccaatcctgtccttgccggtccctcctcgccgggtgggaatcttcgtggattatgaggcccatgacatttctttctacaatgtgactgactgtggctcccacatcttcactttcccccgctatcccttccctgggcgcctcctgccctattttagtccttgctacagcattggaaccaacaacactgctcctctggccatctgctccctggatggggaggactaagaaagctaccaccctaaccacagaggcttggaattgggcctggcccccatggggcttggaggaccgagccactgacaggtatcccctgaaactgagctgagcccagtatccaaggattcctctgtctgatcctttggtctttgctaccaggctgaagtctgtcatgaaaccacttattttaaaaagcagaggcccagtcaaatgagcattgcatcccatgagggaagcacgacagggctgatggtgaggatcagagcagttctaaggtgactcgttggggtaaggatcaggactttgtccatgtagtagccaaccaccctcttccctgattcccgtccggtgtcacagttcagtcagtgaggatgatgaagtagatacagtcttcaggacaccattagatgggctttcccaataggccaaaaaaatgctgcgcatacccagagctggttgttgtgctgaggccagtcagaggatgcttcccctgaggtttgctataactaagcaacctttatgtgactctcaccttctgacctcctggcaagagaaattcagtgcagcagggggacacagacctgcccaagccaccccactgccgttccctctctgagcacaagctgggcaaatcactgtcccttggactccaggagaccagtgtcctagtcttgccttttttctctaagtggcaggatcagaaaacctgcgagctttagtttgtattttcactttatgaatgaggaaactgaaatggccttaagggagcaagttatttctttttttttgacacggagtctcactctgttgcccaggctggagtgcagtggcacgatctcggctcactgcaggctctgcctcctgggttcacgccattctcctgcctcagcttcccgagtagctgggactacaggcgcccaccacgacgcctggctcatttttttgtatttttagtagagacggagtttcaccatgttagctaggatggtctcgatctcctgacctcatgatccgccctcctcagcctcccacagtgctgggattagaggcatgagccactgcgcccggcccctggagcaagttatttcttacaaagctgctgaaggtaagattatcaaaattataaagcatttttcacactcaagtgaaacaaggttgacaaactcacttcgcaggtcacatgcctatacatcacttattatatttgggtctgaaacttctcacatgtttgggaggttttatgtgtcctcattgggaaaatgggtgtaattcagcataaaacctcatatgattgtcctgcctcatggagctgttgtatagatcccagatccatcccatgatttgttcctgtctgaggcatagaggcaggcaagccgtggattttgcacatggtgactttcccactgtgccatgatacagtctgcatcttatagcagtgcctttgtctcagggcctctgctggcagtctagaccttttgggcagaaaggagcttcaaatggctgtgataaggaatattaaaaattgtgtttctactttaattgtattggctgttcatgtatgtaggagttaaaataggccaaactggagaaataaacgcattctgtccaccatgaaaaaaaaaaaaaaaaaaaaa

SEQ ID NO: 196479 - DNA, 1458 bp, Artificial Sequence
  derived and/or modified sequence
atggaccccaccgccctggtggaggccatcgtggaggaggtggcctgccccatctgcatgaccttcctgagagagcccatgagcatcgactgcggccacagcttctgccacagctgcctgagcggcctgtgggagatccccggcgagagccagaactggggctacacctgccccctgtgcagagcccccgtgcagcccagaaacctgagacccaactggcagctggccaacgtggtggagaaggtgagactgctgagactgcaccccggcatgggcctgaagggcgacctgtgcgagagacacggcgagaagctgaagatgttctgcaaggaggacgtgctgatcatgtgcgaggcctgcagccagagccccgagcacgaggcccacagcgtggtgcccatggaggacgtggcctgggagtacaagtgggagctgcacgaggccctggagcacctgaagaaggagcaggaggaggcctggaagctggaggtgggcgagagaaagagaaccgccacctggaagatccaggtggagaccagaaagcagagcatcgtgtgggagttcgagaagtaccagagactgctggagaagaagcagcccccccacagacagctgggcgccgaggtggccgccgccctggccagcctgcagagagaggccgccgagaccatgcagaagctggagctgaaccacagcgagctgatccagcagagccaggtgctgtggagaatgatcgccgagctgaaggagagaagccagagacccgtgagatggatgctgcaggacatccaggaggtgctgaacagaagcaagagctggagcctgcagcagcccgagcccatcagcctggagctgaagaccgactgcagagtgctgggcctgagagagatcctgaagacctacgccgccgacgtgagactggaccccgacaccgcctacagcagactgatcgtgagcgaggacagaaagagagtgcactacggcgacaccaaccagaagctgcccgacaaccccgagagattctacagatacaacatcgtgctgggcagccagtgcatcagcagcggcagacactactgggaggtggaggtgggcgacagaagcgagtggggcctgggcgtgtgcaagcagaacgtggacagaaaggaggtggtgtacctgagcccccactacggcttctgggtgatcagactgagaaagggcaacgagtacagagccggcaccgacgagtaccccatcctgagcctgcccgtgccccccagaagagtgggcatcttcgtggactacgaggcccacgacatcagcttctacaacgtgaccgactgcggcagccacatcttcaccttccccagataccccttccccggcagactgctgccctacttcagcccctgctacagcatcggcaccaacaacaccgcccccctggccatctgcagcctggacggcgaggactag

SEQ ID NO: 196480 - DNA, 1458 bp, Artificial Sequence
  derived and/or modified sequence
atggatcctactgccctggtggaggctattgtggaagaagtggcttgtcctatctgcatgacttttcttcgtgagcccatgtcaatagactgtggacactccttttgtcactcttgcctcagtggcttgtgggaaattcctggagaatcccagaactgggggtacacatgtcctctgtgtcgcgccccagtgcagcctagaaacctccgaccaaattggcaactcgccaatgtggtggagaaagtgcggcttctgcgcctgcatcccggaatggggctgaagggagacctgtgcgaaagacacggggaaaaactgaaaatgttctgcaaggaagatgtgcttataatgtgcgaggcctgttctcagagccccgagcatgaagcccactctgtggtgcccatggaagatgtcgcttgggaatataagtgggagctgcacgaagcacttgaacatctgaagaaggagcaggaggaggcctggaaactggaggtgggggagcggaagcgtacagccacttggaaaattcaagtagaaacaagaaagcagtctattgtttgggaattcgagaagtatcagcgactcctggaaaaaaaacagcctccacaccggcagctgggggcggaggtcgccgcggctctcgccagcttacagcgggaagctgctgaaacaatgcagaagctcgaactgaaccattccgaactgattcagcagtctcaagtgctgtggagaatgatcgccgaattgaaggagcgctcccagaggcctgtcaggtggatgctccaagacatccaggaagtcctaaacaggagtaaatcctggagtctgcagcaaccagaaccaatatccttggagctgaagacagactgcagagtgcttggactgagagaaatactgaagacatacgccgctgatgtccgtctagatcctgataccgcctactcgagattaatcgtgtcagaagatcggaaacgggtacactatggcgacaccaatcaaaaactccctgacaatccggaacgcttttaccggtataacatcgtcctgggttctcagtgtataagcagcggacggcattattgggaggtcgaagtaggtgatcggtctgagtggggactcggcgtctgtaagcagaacgtagacagaaaagaagtggtctatctatctccccactacgggttctgggtgattagacttcggaaaggaaacgaatatcgcgcaggcacagatgagtacccaatcctatcgttacccgtgcccccccgccgcgttggaatcttcgttgactacgaggctcatgacatttccttctataacgttacagactgcgggtcacacatctttactttccccagataccccttccctgggaggctgctcccctatttctccccctgttactccatcggaacgaacaacacagccccgttggcaatctgctcgctggacggcgaggattag

SEQ ID NO: 196481 - DNA, 1458 bp, Artificial Sequence
  derived and/or modified sequence
atggaccccacagccctggtggaggccatcgtggaggaggtggcctgccccatctgcatgaccttcctgcgggagcccatgagcattgactgtggccacagcttctgccacagctgcctgagcggcctgtgggagatccctggagagagccagaactggggctacacctgccccctgtgccgggcccctgtgcagcccaggaacctgcggcccaactggcagctggccaacgtggtggagaaggtgcggctgctgcggctgcaccctggcatgggcctgaagggggacctgtgtgaaagacatggagagaagctgaagatgttctgcaaggaggatgtgctgatcatgtgtgaggcctgcagccagagccctgagcacgaggcccacagcgtggtgcccatggaggatgtggcctgggagtacaagtgggagctgcacgaggccctggagcacctgaagaaggagcaggaggaggcctggaagctggaggtgggggagaggaagaggacagccacctggaagatccaggtggagaccaggaagcagagcatcgtgtgggagtttgagaagtaccagaggctgctggagaagaagcagcccccccaccggcagctgggcgctgaggtggccgccgccctggccagcctgcagcgggaggccgctgagaccatgcagaagctggagctgaaccacagcgagctgatccagcagagccaggtgctgtggaggatgattgctgagctgaaggagaggagccagaggcctgtgcgctggatgctgcaggacatccaggaggtgctgaacagaagcaagtcctggagcctgcagcagcctgagcccatcagcctggagctgaagacagactgccgggtgctgggcctgcgggagatcctgaagacctacgccgcagatgtgcggctggaccctgacacagcctacagccggctgattgtgtctgaggacaggaagagggtgcactatggagacaccaaccagaagctgcctgacaaccctgagcgcttctaccgctacaacatcgtgctgggcagccagtgcatcagcagcggccgccactactgggaggtggaggtgggggacagaagtgagtggggcctgggcgtgtgcaagcagaatgtggacaggaaggaggtggtgtacctgagcccccactacggcttctgggtgatccggctgaggaaaggaaatgagtaccgggccggcacagatgagtaccccatcctgagcctgcctgtgcccccaagaagagtgggcatctttgtggactatgaggcccatgacatctccttctacaacgtgacagactgtggcagccacatcttcaccttcccccgctaccccttccctggccgcctgctgccctacttcagcccctgctacagcatcggcaccaacaacacagcccccctggccatctgcagcctggatggagaggactag

SEQ ID NO: 196482 - DNA, 1458 bp, Artificial Sequence
  derived and/or modified sequence
atggaccccaccgccctggtggaggccatcgtggaggaggtggcctgcccgatctgtatgacgtttctcagggagccaatgtccatcgattgcgggcacagcttctgtcatagttgtctgtccgggttgtgggagattcccggggaaagccagaattggggttatacatgcccactctgccgagcacctgtgcagccccggaatctacgccccaattggcagcttgctaatgttgtggagaaggtgcgacttctgagacttcaccccggtatggggctgaagggcgacctgtgtgaacgccacggcgaaaaattgaaaatgttctgcaaagaagatgtccttatcatgtgcgaagcttgctctcagtcacctgagcacgaggcacactcagtcgtacccatggaggatgtcgcctgggagtataagtgggagctgcatgaagccctggagcatctgaagaaggaacaggaggaggcctggaagctagaggtcggggaacgtaagcggacggccacttggaagatacaggtggagacgcgcaagcagtccatcgtttgggagtttgagaagtatcagagattgctggagaagaagcaaccaccccatcgtcagctcggcgcggaagtcgccgccgcacttgcgtcactgcaaagagaagcagccgagacgatgcagaagctcgagctcaatcattccgagttgatccagcagtctcaggttttgtggcgtatgatcgccgaattgaaagagagatctcagcggcccgtacgctggatgctgcaggacatccaggaggtgctaaaccggagcaaaagctggtctctgcagcaaccagagccgatttctctggagctgaaaactgactgccgggttctgggccttcgagagatcctcaagacttatgcggccgacgtgcggctggacccggacacagcttatagccgattgatagtcagcgaggaccgtaaacgcgtgcattacggtgataccaaccaaaagttacctgacaaccccgaacggttttaccgctacaacattgtactgggatctcagtgcatctcaagtggccgccactactgggaggtcgaggtgggagataggtcagaatggggcctgggcgtttgcaaacaaaacgttgacagaaaagaggttgtctatttaagtcctcactatggattctgggtcattaggttgcgcaagggcaatgaataccgcgccggtaccgacgaatatccaatcttatccttacccgtgcctcccagacgcgttggcatattcgttgactacgaagcacatgatatttcattctacaacgtcacagactgtggcagtcacatcttcacattccctcgctatccgttccctgggaggttgctgccctatttttctccctgctatagtatcggcactaataatacagccccattagccatttgctctctggatggagaggactag

SEQ ID NO: 196483 - DNA, 1458 bp, Artificial Sequence
  derived and/or modified sequence
atggacccaaccgcactggtcgaagccattgtggaagaggttgcctgtccaatctgcatgacatttctgagagaacctatgtccattgattgtgggcatagtttttgtcacagctgtcttagcggactgtgggagataccgggtgagagtcagaactgggggtatacctgtccactgtgcagagctcctgtacagccaagaaacctgcgacctaactggcagctggccaacgtcgtggagaaagtgcgcttactcaggctgcacccaggtatggggctgaagggtgatctctgtgagcgccacggagaaaaactgaaaatgttttgtaaggaggatgttctgattatgtgcgaagcatgctcacagtcacccgagcacgaagcacactccgtggtccccatggaagacgtagcatgggagtacaaatgggaactgcacgaggccctggagcacctgaaaaaagaacaggaggaagcctggaagctggaggtgggtgaacggaagcgtaccgccacatggaagatccaagtcgaaaccagaaagcagagtattgtctgggaattcgagaaatatcagcgcttactggagaagaagcagccacctcatcgccagctgggcgctgaagtcgcggctgcgctcgccagtctccagagagaagctgccgagacaatgcaaaaactagagctgaaccactctgaactcattcagcagtctcaggtgttatggaggatgatcgccgagctgaaggaaaggagtcagcgccctgtacggtggatgctgcaagatatccaggaagtgctcaacaggtccaaatcatggtcgttgcagcaaccagagcccatttctctggagcttaagacagactgcagggtgctcggcctgagggaaattctcaagacctacgccgcagatgtgaggctcgacccagataccgcttactccaggctgatcgtctcagaggaccgcaaacgcgttcattatggggatactaaccagaaactccccgacaaccctgagcggttctatagatacaacatcgttctcgggtcacagtgtataagcagtggtcggcattattgggaggtcgaggtcggagataggagcgagtggggcctcggggtgtgcaagcagaatgtggatcggaaggaagtagtctacctgagtccccactacggcttctgggtgattagactgagaaaaggcaatgagtaccgcgcaggtacagacgagtaccctattttaagccttcccgtgcctccgcgacgcgtgggcatctttgtagattatgaagcacatgacattagcttttacaacgtgaccgactgtggttcccatatttttacttttcctagatatccatttccgggacgcctgctgccctatttttctccctgttacagcatcggaacaaataatacagcacctctagcgatttgtagcctggacggcgaagactag

SEQ ID NO: 196484 - DNA, 3352 bp, Artificial Sequence
  derived and/or modified sequence
attggctgccgtcccgcgagcggggcctagagccgggtgtagtattctgggagctgcgggctactgggcctgcgctgccgggctttgggttctgggcctctgccgctctctggccctaagtgctgagctgccgggaacggcagcttctgacgctgggccattggacgctgcggaaccaggcttcttcactttgagtttccgccgcgaagcgccagtccgggccgaggagggagcctttactacttctccctggtttcattcatgttctgaggagggtgtgagaaggaaccatggatcccacagccttggtggaagccattgtggaagaagtggcctgtcccatctgtatgaccttcctgagggagcccatgagcattgactgtggccacagcttctgccacagctgtctctctggactctgggagatcccaggagaatcccagaactggggttacacctgtcccctctgtcgagctcctgtccagccaaggaacctgcggcctaattggcagctggccaatgttgtagaaaaagtccgtctgctaaggctacatccaggaatggggctgaagggtgacctgtgtgagcgccatggggaaaagctgaagatgttctgcaaagaggatgtcttgataatgtgtgaggcctgcagccagtccccagagcatgaggcccacagtgttgtgccaatggaggatgttgcctgggagtacaagtgggaacttcatgaggccctcgaacatctgaagaaagagcaagaagaggcctggaagcttgaagttggtgaaaggaaacgaactgccacctggaagatacaggtggaaacccgaaaacagagtattgtatgggagtttgaaaaataccagcgattactagagaaaaagcagccaccacatcggcagctgggggcagaggtagcagcagctctggccagcctacagcgggaggcagcggagaccatgcagaaactggagttgaaccatagcgagctcatccagcagagccaggtcctgtggaggatgattgcagagttgaaagagaggtcgcagaggcctgtccgctggatgttgcaggatattcaggaagtgttaaacaggagcaaatcttggagcttgcagcagccagaaccaatctccctggagttgaagacagattgccgtgtgctggggctaagagagatcctgaagacttatgcagctgatgtgcgcttggatccagatactgcttactcccgtctcatcgtgtctgaggacagaaaacgtgtgcactatggagacaccaaccagaaactgccagacaatcctgagagattttaccgctataatatcgtcctgggaagccagtgcatctcctcaggccggcactactgggaggtggaggtgggagacaggtctgagtggggcctgggagtatgtaagcaaaatgtagaccggaaggaggtggtctacttatccccccactatggattctgggtgataaggctgaggaagggaaatgagtaccgagcaggcaccgatgagtacccaatcctgtccttgccggtccctcctcgccgggtgggaatcttcgtggattatgaggcccatgacatttctttctacaatgtgactgactgtggctcccacatcttcactttcccccgctatcccttccctgggcgcctcctgccctattttagtccttgctacagcattggaaccaacaacactgctcctctggccatctgctccctggatggggaggactaagaaagctaccaccctaaccagagaggcttggaattgggcctggcccccatggggcttggaggaccgagccactgacaggtatcccctgaaactgagctgagcccagtatccaaggattcctctgtctgatcctttggtctttgctaccaggctgaagtctgtcatgaaaccacttattttaaaaagcagaggcccagtcaaatgagcattgcatcccatgagggaagcacgacagggctgatggtgaggatcagagcagttctaaggtgactcgttggggtaaggatcaggactttgtccatgtagtagccaaccaccctcttccctgattcccgtccggtgtcacagttcagtcagtgaggatgatgaagtagatacagtcttcaggacaccattagatgggctttcccaataggccaaaaaaatgctgcgcatacccagagctggttgttgtgctgaggccagtcagaggatgcttcccctgaggtttgctataactaagcaacctttatgtgactctcaccttctgacctcctggcaagagaaattcagtgcagcagggggacacagacctgcccaagccaccccactgccgttccctctctgagcacaagctgggcaaatcactgtcccttggactccaggagaccagtgtcctagtcttgccttttttctctaagtggcaggatcagaaaacctgcgagctttagtttgtattttcactttatgaatgaggaaactgaaatggccttaagggagcaagttatttctttttttttgacacggagtctcactctgttgcccaggctggagtgcagtggcacgatctcggctcactgcaggctctgcctcctgggttcacgccattctcctgcctcagcttcccgagtagctgggactacaggcgcccaccacgacgcctggctcatttttttgtatttttagtagagacggagtttcaccatgttagctaggatggtctcgatctcctgacctcatgatccgccctcctcagcctcccacagtgctgggattagaggcatgagccactgcgcccggcccctggagcaagttatttcttacaaagctgctgaaggtaagattatcaaaattataaagcatttttcacactcaagtgaaacaaggttgacaaactcacttcgcaggtcacatgcctatacatcacttattatatttgggtctgaaacttctcacatgtttgggaggttttatgtgtcctcattgggaaaatgggtgtaattcagcataaaacctcatatgattgtcctgcctcatggagctgttgtatagatcccagatccatcccatgatttgttcctgtctgaggcatagaggcaggcaagccgtggattttgcacatggtgactttcccactgtgccatgatacagtctgcatcttatagcagtgcctttgtctcagggcctctgctggcagtctagaccttttgggcagaaaggagcttcaaatggctgtgataaggaatattaaaaattgtgtttctactttaattgtattggctgttcatgtatgtaggagttaaaataggccaaactggagaaataaacgcattctgtccaccatg

SEQ ID NO: 196485 - protein, 323 aa, Artificial Sequence
  derived and/or modified sequence
MSERKVLNKYYPPDFDPSKIPKLKLPKDRQYVVRLMAPFNMRCKTCGEYIYKGKKFNARKETVQNEVYLGLPIFRFYIKCTRCLAEITFKTDPENTDYTMEHGATRNFQAEKLLEEEEKRVQKEREDEELNNPMKVLENRTKDSKLEMEVLENLQELKDLNQRQAHVDFEAMLRQHRLSEEERRRQQQEEDEQETAALLEEARKRRLLEDSDSEDEAAPSPLQPALRPNPTAILDEAPKPKRKVEVWEQSVGSLGSRPPLSRLVVVKKAKADPDCSNGQPQAAPTPGAPQNRKEANPTPLTPGASSLSQLGAYLDSDDSNGSN

SEQ ID NO: 196486 - DNA, 972 bp, Artificial Sequence
  derived and/or modified sequence
atgagcgagagaaaggtgctgaacaagtactacccccccgacttcgaccccagcaagatccccaagctgaagctgcccaaggacagacagtacgtggtgagactgatggcccccttcaacatgagatgcaagacctgcggcgagtacatctacaagggcaagaagttcaacgccagaaaggagaccgtgcagaacgaggtgtacctgggcctgcccatcttcagattctacatcaagtgcaccagatgcctggccgagatcaccttcaagaccgaccccgagaacaccgactacaccatggagcacggcgccaccagaaacttccaggccgagaagctgctggaggaggaggagaagagagtgcagaaggagagagaggacgaggagctgaacaaccccatgaaggtgctggagaacagaaccaaggacagcaagctggagatggaggtgctggagaacctgcaggagctgaaggacctgaaccagagacaggcccacgtggacttcgaggccatgctgagacagcacagactgagcgaggaggagagaagaagacagcagcaggaggaggacgagcaggagaccgccgccctgctggaggaggccagaaagagaagactgctggaggacagcgacagcgaggacgaggccgcccccagccccctgcagcccgccctgagacccaaccccaccgccatcctggacgaggcccccaagcccaagagaaaggtggaggtgtgggagcagagcgtgggcagcctgggcagcagaccccccctgagcagactggtggtggtgaagaaggccaaggccgaccccgactgcagcaacggccagccccaggccgcccccacccccggcgccccccagaacagaaaggaggccaaccccacccccctgacccccggcgccagcagcctgagccagctgggcgcctacctggacagcgacgacagcaacggcagcaactag

SEQ ID NO: 196487 - DNA, 1419 bp, Artificial Sequence
  derived and/or modified sequence
gataattacccagcctaaccatttctcaggtgcttgcgaggtgatcagaaggcaaagatgtcggagcgaaaagtattaaacaaatactacccgccggactttgacccatcaaagatccccaaactcaagctccccaaagaccggcagtacgtggtgcggctgatggcccccttcaacatgaggtgtaagacgtgcggagaatacatctacaaggggaagaaattcaatgctcggaaggagacggtgcagaacgaggtctacctgggcctgcccatcttccgcttttacatcaagtgcacgcgctgcctggcagagatcaccttcaagacagaccctgaaaacacagactacaccatggagcatggagccacgcggaatttccaggctgagaagctcctggaggaggaggagaagagggtgcagaaggagcgggaggacgaggagctgaacaaccccatgaaggtgctggagaaccggaccaaggactccaagctggagatggaggtgctggagaacctccaggagctgaaagacctgaaccagcggcaggcgcacgtggacttcgaggctatgctgaggcagcaccgcctgtcggaggaggagcggcggaggcagcagcaggaggaggacgagcaggagaccgcggccctgttggaggaagccagaaagcgaagactgctggaggactccgactcagaggatgaggctgctccctcgcccctgcagccagcccttcggcccaaccccaccgccatcctggatgaggccccaaagcccaagaggaaggtggaggtctgggagcagagcgttggcagcctgggcagccggcccccgctgtcgaggctggtcgtggtgaagaaggcaaaggccgacccggactgcagcaacgggcagcctcaggcggcccccaccccaggagccccgcagaacaggaaggaggccaaccctacacccctgacgcctggcgcgtcctccctgagccaactgggtgcatacctggacagtgacgacagcaacggcagcaactgagccctcccaggaccccctcacggggtcaaagtcacacgtccagcttcagccacattgaggccagcattgctggtggtcagggcaggaggccttggcgtgactggaggccggacagacaagcgccagcgtgctccaacacatagggccaccaggggcctcagccccaggaggtcccttctctgtgccctcaccagcctctcaacacctcggggacccctgctgctcctgcccccacctgtcactgtgcttagggctgcaacatccctggagcagcttccaacactacttcagggtggcagtgtttggggcactgggcgagcctgccggcctctagatggcctcatctcttccttccacaaactgtctagaaccaataaaaggaaacctgcc

SEQ ID NO: 196488 - DNA, 972 bp, Artificial Sequence
  derived and/or modified sequence
atgtcagaaaggaaagtgctgaataagtactatccgcctgatttcgatccttctaaaatcccaaaattaaaacttccaaaggaccgtcagtacgtggttcgcctcatggcgccgttcaacatgaggtgtaagacctgcggcgaatatatttataagggaaaaaaattcaacgcaaggaaggaaaccgtacagaacgaggtataccttggactgccaattttccggttttacatcaagtgcacccggtgccttgcggagataaccttcaagaccgaccctgaaaacacggattacacaatggaacatggagctacacgaaatttccaggcagagaagctcctggaagaggaggagaagagagtgcagaaagagagggaagatgaggagttaaataacccaatgaaggttcttgagaatagaactaaggacagcaaattagaaatggaagtgctggagaacttacaggaactgaaagacctgaaccagagacaggcccatgtggattttgaggctatgttgagacagcatcgcctcagtgaagaagaaaggaggcgccagcagcaggaggaggacgagcaggaaaccgcagcattgttagaggaggcccggaagagacgactcctcgaggatagcgactccgaggacgaagccgccccctcaccactgcagcctgcactccggccaaatcctaccgccattctggacgaggccccgaaacccaaaaggaaagttgaggtgtgggagcagtccgtcggaagtctcgggtctcggccccccctgtcccgactcgtcgtggtgaagaaagccaaggctgaccccgattgttctaatggccagccacaggcggctcctacccctggtgccccccaaaaccgaaaagaggctaacccgacccctttaacacctggcgccagcagcctttcacagcttggggcatacctggacagcgacgactccaacggaagcaactag

SEQ ID NO: 196489 - DNA, 972 bp, Artificial Sequence
  derived and/or modified sequence
atgtctgagaggaaggtgctgaacaagtactaccccccagactttgaccccagcaagatccccaagctgaagctgcccaaggaccggcagtatgtggtgcggctgatggcccccttcaacatgcgctgcaagacctgtggggagtacatctacaagggcaagaagttcaatgccaggaaggagaccgtgcagaatgaggtgtacctgggcctgcccatcttccgcttctacatcaagtgcacccgctgcctggccgagatcaccttcaagacagatcctgagaacacagactacaccatggagcacggggccaccaggaacttccaggccgagaagctgctggaggaggaggagaagagggtgcagaaggagcgggaggatgaggagctgaacaaccccatgaaggtgctggagaacagaaccaaggacagcaagctggagatggaggtgctggagaacctgcaggagctgaaggacctgaaccagaggcaggcccacgtggactttgaggccatgctgcggcagcaccggctgtctgaggaggagcggcggcggcagcagcaggaggaggatgagcaggagacagctgccctgctggaggaggccaggaagaggcggctgctggaggacagcgacagtgaagatgaagctgcccccagccccctgcagcctgccctgcggcccaaccccacagccatcctggatgaggcccccaagcccaagaggaaggtggaggtgtgggagcagagcgtgggcagcctgggcagccggccccccctgagccggctggtggtggtgaagaaggccaaggctgaccctgactgcagcaatggccagccccaggccgcccccacccctggggccccccagaacaggaaggaggccaaccccacccccctgacccctggggccagcagcctgagccagctgggcgcctacctggacagtgatgacagcaatggcagcaactag

SEQ ID NO: 196490 - DNA, 972 bp, Artificial Sequence
  derived and/or modified sequence
atgagcgagcggaaggtgctgaacaagtactacccccccgacttcgatccttcaaaaataccaaaattgaagttacccaaagaccgccaatacgtcgtgaggttaatggctccctttaatatgcgctgtaagacttgcggagaatatatctacaaggggaagaaatttaatgcacggaaagagacggtgcagaacgaagtctacctcggactgcccatcttcagattctatattaagtgtacaagatgtctcgctgaaattaccttcaaaactgaccccgagaacaccgactatacgatggagcacggcgctacccgtaatttccaggctgagaagctgcttgaagaggaggagaagcgggtccagaaggaacgggaggatgaagagctaaataaccccatgaaggtgttagaaaacaggaccaaagattccaagctcgaaatggaggttctggagaaccttcaggagctcaaggatctgaatcaacggcaggcacacgtggattttgaagctatgctgcgacagcatcgcctatctgaagaggagaggagacggcaacagcaggaggaggacgaacaagagacagcagcactgcttgaggaagctcgtaagcggagactgcttgaggattccgattctgaggatgaagcggcaccaagccccctgcagcccgccctccgccctaatcctacagctatcctagacgaggctccgaagcctaaacgtaaagttgaggtgtgggagcagtcagtcggctctttgggcagcagaccacccctgagccggttggtggtggtgaaaaaagcaaaggccgaccctgactgttcaaatggtcagccccaggcggcccccacccctggcgcccctcaaaatagaaaggaagcaaatcctaccccgcttacgccaggcgctagtagcctctcacagttaggcgcatacctcgatagcgacgactcaaacggcagtaactag

SEQ ID NO: 196491 - DNA, 972 bp, Artificial Sequence
  derived and/or modified sequence
atgagcgagagaaaggtgttgaacaagtattaccctcctgatttcgacccatctaaaattccaaagctaaaactaccaaaggacaggcagtatgttgtccgccttatggccccattcaacatgaggtgcaaaacgtgtggggaatatatttataaaggtaagaaattcaatgccaggaaggagaccgtacagaatgaagtctatctcggcctccccatcttccgcttttatatcaaatgcaccagatgtcttgcagaaattacttttaaaacagaccccgagaacaccgattacaccatggagcatggagctaccaggaactttcaggccgagaaacttctggaggaggaagagaaacgcgtgcagaaggagcgggaagatgaagaattaaataaccctatgaaggtcctggaaaacagaacaaaagatagtaaactcgagatggaagttctggagaacctgcaggaattaaaggatcttaaccaacggcaggcacatgtggattttgaggctatgctgcgacagcataggctgtccgaggaggagaggagacgacagcagcaggaggaggacgaacaggagaccgcggctctactggaagaggctagaaaacgaaggctactggaggattctgatagcgaggacgaggctgctccttctccactccaaccagcactgcgccctaacccaaccgctattctcgacgaagccccaaaaccaaagaggaaagtcgaggtgtgggaacagtcggtggggagcctgggatcaaggccaccactgtctcgcctcgtagtcgtgaagaaagccaaagctgacccagactgcagcaacggtcagccacaggccgcaccaacccccggagcaccccagaaccgaaaagaagccaacccgacccctctgacaccaggcgcttcttctctcagccagctgggtgcttacttggactctgacgactcaaatggttctaattag

SEQ ID NO: 196492 - protein, 660 aa, Artificial Sequence
  derived and/or modified sequence
MKVTLSALDTSESSFTPLVVIELAQDVKEETKEWLKNRIIAKKKDGGAQLLFRPLLNKYEQETLENQNLYLVGASKIRMLLGAEAVGLVKECNDNTMRAFTYRTRQNFKGFDDNNDDFLTMAECQFIIKHELENLRAKDEKMIPGYPQAKLYPGKSLLRRLLTSGIVIQVFPLHDSEALKKLEDTWYTRFALKYQPIDSIRGYFGETIALYFGFLEYFTFALIPMAVIGLPYYLFVWEDYDKYVIFASFNLIWSTVILELWKRGCANMTYRWGTLLMKRKFEEPRPGFHGVLGINSITGKEEPLYPSYKRQLRIYLVSLPFVCLCLYFSLYVMMIYFDMEVWALGLHENSGSEWTSVLLYVPSIIYAIVIEIMNRLYRYAAEFLTSWENHRLESAYQNHLILKVLVFNFLNCFASLFYIAFVLKDMKLLRQSLATLLITSQILNQIMESFLPYWLQRKHGVRVKRKVQALKADIDATLYEQVILEKEMGTYLGTFDDYLELFLQFGYVSLFSCVYPLAAAFAVLNNFTEVNSDALKMCRVFKRPFSEPSANIGVWQLAFETMSVISVVTNCALIGMSPQVNAVFPESKADLILIVVAVEHALLALKFILAFAIPDKPRHIQMKLARLEFESLEALKQQQMKLVTENLKEEPMESGKEKAT

SEQ ID NO: 196493 - DNA, 1983 bp, Artificial Sequence
  derived and/or modified sequence
atgaaggtgaccctctccgccctggacaccagtgaatctagcttcacacccctggtggttatcgaactggcccaagatgtgaaggaagaaacaaaagagtggctgaagaatcgcatcatcgcaaaaaagaaagatggcggtgcccagttgctgtttcgaccactcctgaataagtacgaacaggagaccctggagaatcagaacttgtacctggtcggggcgagcaaaattagaatgctcctgggagccgaagccgtggggctggtcaaggagtgtaacgataacactatgagagctttcacttacagaacccgccagaactttaagggattcgatgataacaatgacgatttcctgacgatggccgaatgtcagtttatcattaagcacgaactggaaaaccttcgagccaaggacgagaagatgataccaggctacccacaggccaaactgtatccgggtaaatctctgctgcgcaggcttcttacaagcgggattgtgatccaggtgttccctcttcacgactcagaagcccttaagaaactagaagacacgtggtacacaagatttgcattgaaatatcagcctattgatagtattaggggctattttggagaaaccattgcactctacttcgggttcttagagtacttcaccttcgcacttatcccaatggccgttatcggcctgccgtactatttgttcgtgtgggaagattacgataagtatgtcatcttcgcgagttttaaccttatctggagcacggtgatcctggagctgtggaagagagggtgtgctaacatgacgtacagatggggcacccttttgatgaagcgcaagttcgaggagccacgccccggattccacggcgtgctggggataaatagtatcaccgggaaagaagagccattgtaccccagttacaagaggcagctccgcatttacctagtctctttgccattcgtgtgtctgtgtctgtatttttcactgtatgttatgatgatatactttgatatggaggtctgggctctgggcttgcatgagaacagcggcagtgagtggacttccgtgctcttgtacgtcccttcaataatttatgccatcgtgatcgagatcatgaacaggctataccggtacgctgctgaattcttgacatcttgggagaatcataggctcgagtctgcatatcagaaccacctcatactaaaagttttggtcttcaactttctcaattgcttcgcctccctgttttacatcgcgtttgtgctcaaagatatgaagctgctcagacagagtctggccacgttactcattacatcacagattctcaaccagattatggaaagtttcctgccctattggctgcaacgcaaacatggtgttcgcgttaagcgcaaggtgcaggcactgaaggctgatattgatgcgacactttatgagcaagtcatcttagaaaaggagatgggcacttaccttggaacatttgatgactatctcgagctctttctgcaattcggctacgtttcactgttctcctgcgtttatcctctcgccgcggcttttgctgttctcaataattttaccgaggtgaatagtgatgctctgaaaatgtgccgagtgtttaagcggccattcagtgaacctagcgctaatatcggggtgtggcagctcgcctttgagacaatgagtgtgatcagtgtggtcacaaactgtgcgcttattggaatgtcccctcaggtcaacgcggttttccccgaatctaaagcagatcttatcctaattgttgtggcagtagagcatgccttgctagctctgaagttcatcctggcgttcgcaatccctgacaaacctcgacacattcagatgaagctggctcgtttggagtttgagagcctggaagccctgaagcagcagcaaatgaaacttgtcacggagaacctgaaagaggagccgatggagtccgggaaagaaaaagcgacctag

SEQ ID NO: 196494 - DNA, 1983 bp, Artificial Sequence
  derived and/or modified sequence
atgaaggtgaccctgagcgccctggacaccagcgagagcagcttcacccccctggtggtgattgagctggcccaggatgtgaaggaggagaccaaggagtggctgaagaaccgcatcatcgccaagaagaaggatggaggagcccagctgctcttccggcccctgctgaacaagtatgagcaggagaccctggagaaccagaacctgtacctggtgggcgccagcaagatccgcatgctgctgggcgctgaggccgtgggcctggtgaaggaatgtaatgacaacaccatgagggccttcacctaccgcacccggcagaacttcaagggctttgatgacaacaatgatgacttcctgaccatggccgagtgccagttcatcatcaagcatgagctggagaacctgcgggccaaggatgagaagatgatccctggctacccccaggccaagctgtacccaggcaagagcctgctgcggcggctgctgaccagcggcatcgtcatccaggtgttccccctgcatgacagcgaggccctgaagaagctggaggacacctggtacaccaggtttgccctgaagtaccagcccatcgacagcatccggggctactttggagagaccatcgccctgtacttcggcttcctggagtacttcacctttgccctgatccccatggccgtcatcggcctgccctactacctgtttgtgtgggaggactatgacaagtatgtgatctttgccagcttcaacctgatctggagcaccgtcatcctggagctgtggaagaggggctgtgccaacatgacctaccgctggggcaccctgctgatgaagaggaagtttgaggagccccggcccggcttccatggagtgctgggcatcaacagcatcaccgggaaggaggagcccctgtaccccagctacaagaggcagctgcgcatctacctggtgtccctgccctttgtgtgcctgtgcctgtacttcagcctgtatgtgatgatgatctactttgacatggaggtgtgggccctgggcctgcacgagaacagcggcagcgagtggacctctgtgctgctgtatgtgcccagcatcatctatgccatcgtcatcgagatcatgaaccggctgtaccgctatgctgctgagttcctgacctcctgggagaaccaccggctggagagcgcctaccagaaccacctgatcctgaaggtgctggtgttcaacttcctgaactgctttgccagcctcttctacatcgcctttgtgctgaaggacatgaagctgctgcggcagagcctggccaccctgctgatcaccagccagatcctgaaccagatcatggagagcttcctgccctactggctgcagaggaagcatggagtgcgggtgaagaggaaggtgcaggccctgaaggctgacattgatgccaccctgtatgagcaggtgatcctggagaaggagatgggcacctacctgggcacctttgatgactacctggagctgttcctgcagtttggctacgtgtccctcttcagctgtgtgtaccccctggccgccgcctttgctgtgctgaacaacttcacagaggtgaacagtgatgccctgaagatgtgcagggtcttcaagaggcccttcagcgagcccagcgccaacatcggcgtgtggcagctggcctttgagaccatgtctgtcatctctgtggtgaccaactgtgccctgattggcatgagcccccaggtgaatgctgtgtttcctgagagcaaggctgacctgatcctgattgtggtggccgtggagcacgccctgctggccctgaagttcatcctggcctttgccatcccagacaagcccaggcacatccagatgaagctggcccggctggagtttgagagcctggaggccctgaagcagcagcagatgaagctggtgacagagaacctgaaggaggagcccatggagagcggcaaggagaaggccacctag

SEQ ID NO: 196495 - DNA, 1983 bp, Artificial Sequence
  derived and/or modified sequence
atgaaggtgaccctgagcgccctggacaccagcgagagcagcttcacacctctcgtggtcatcgagctggcccaggatgtgaaagaagagaccaaagagtggttgaagaatcgtatcatcgccaaaaagaaggatgggggggctcaactgctttttaggcccctgcttaataaatacgagcaggagacccttgaaaaccagaacctttaccttgttggcgcctctaagattcgaatgcttctgggggctgaagccgtaggcctggttaaagagtgcaacgacaataccatgcgggccttcacctacagaacgcggcaaaattttaagggattcgatgacaataacgatgatttcctcacgatggctgaatgtcaatttatcattaaacacgaacttgaaaacctgagagcaaaggatgaaaaaatgatccctggctatccgcaggcaaaactttacccaggtaaatcccttctccggcgattgctgacaagcggaatcgttatacaagttttccccttgcacgacagcgaagcactcaagaaattagaggatacctggtacaccaggttcgccttgaagtatcaacccatcgattcgatccggggatactttggcgagacgattgcactgtattttggatttctggaatatttcacctttgcgttgatccccatggctgttattgggctgccctactatctcttcgtttgggaagactacgataagtacgtgatcttcgcgtcttttaacctgatttggtctaccgtgatactggagctctggaagaggggctgtgccaatatgacgtacagatggggaactttactgatgaaaagaaaattcgaggagcctaggccagggttccacggtgtgctgggtattaacagcatcacagggaaagaggaacccctctacccttcgtacaagagacaacttcggatttacttagtgtctctgcctttcgtgtgcctttgcctgtattttagcctttacgtcatgatgatctattttgacatggaggtgtgggcgctgggactgcacgaaaattctggaagcgagtggacgtcagtgctcttgtatgtgccttcgattatttatgccattgttatcgagataatgaacaggctgtatagatatgcagctgaatttctgacgagttgggagaatcacagattagagtctgcatatcagaatcacctgatcctgaaagttctggtgttcaatttcctgaattgcttcgcatccctcttttatattgcctttgtcttgaaagatatgaaacttctgagacaaagccttgctacacttctgattacatcacagatactcaatcaaataatggaatcctttctgccctactggctgcagagaaagcacggagtgagagtcaagaggaaagttcaggccctgaaagccgacattgatgccactttatatgagcaggtgatcctggaaaaggagatggggacgtacctgggcacctttgacgactacttggagctgtttctgcagttcgggtatgtcagcctgttctcctgcgtgtaccctctcgccgcagcgtttgccgttctcaacaacttcaccgaagttaatagcgatgctttgaagatgtgcagagtcttcaagagaccattttccgagccctctgcaaacattggcgtgtggcaactggcattcgaaaccatgtcagtcatctctgtggttaccaattgcgccctgatcggtatgagcccgcaggttaatgcagtgttcccagagtctaaggccgatcttattttaattgtggttgcggtagagcacgccttgctggctctgaagttcatattggctttcgccattcctgataagccaagacatatccagatgaaactggcgaggctagagttcgaatccctggaagccctgaagcagcagcagatgaagttagtgaccgagaacctgaaggaggagccaatggagtcaggcaaagagaaggcgacatag

SEQ ID NO: 196496 - DNA, 3212 bp, Artificial Sequence
  derived and/or modified sequence
gaccgcatctaggccccgccgcgtccgccacgcccagcgctcggcggcgcccgccccactggcctggcccgccccccgcaccgagcactctttcgcccggcctccggttctcgccggctctcggacccgcctccgaagacgtggagcgctgcggcggctgatttgtcaaagatgaaagtgaccttatcagctttggatacttctgagagttctttcacacctttggtggtcatagaacttgctcaggatgtcaaagaagaaaccaaagaatggctgaaaaacagaattatagctaaaaaaaaagatggaggtgcccagttgttgtttagaccattgttaaataaatatgaacaagaaacactagaaaatcagaacttatatcttgttggtgcctccaagattagaatgttactaggggcagaagcagtgggattggtaaaagagtgcaatgataacaccatgagagccttcacatacagaaccagacagaacttcaaaggttttgatgataacaatgatgatttcctgacaatggcagaatgtcaattcattatcaaacatgaacttgaaaatcttagagctaaagatgaaaaaatgatccctggttaccctcaggcaaagttgtatccaggaaaatcattgttgagaagattgctcacgtctggcatcgtgattcaggtgtttccactgcatgacagtgaagccctgaagaagcttgaggacacctggtacactcggtttgctttgaagtatcagcccatagacagtattcgtggctactttggggaaacaattgctctgtactttggatttttggagtatttcacttttgcattaatccccatggctgtcattgggttaccttactacttgtttgtgtgggaagactatgacaagtacgtgatctttgcctcgttcaacctcatctggtccacggtgattctggaactgtggaagcgtggctgtgccaacatgacctacaggtgggggacactgctcatgaagagaaagtttgaggagccccggccaggatttcatggtgtcttgggtatcaattccatcactgggaaggaggagcctctgtaccccagctacaagagacagttgcgcatttacctggtctccctgccattcgtgtgcctctgcctctatttctcactgtatgtcatgatgatttacttcgacatggaggtttgggccttgggtctacatgagaacagcgggtctgagtggaccagtgtcctgttgtatgtgcccagcatcatctatgccattgtgattgagatcatgaatcgtctctatcgatatgctgccgagtttttaacttcatgggagaatcacagattggaatctgcctatcagaaccatctaattctgaaagttttagtgttcaacttcctcaattgctttgcctcactcttctatattgcctttgtcttgaaagatatgaagcttttgcgccagagcttggccactctcctaattacctcccagatcctcaaccaaattatggaatcttttcttccttattggctccaaaggaagcatggtgtgcgggtgaagaggaaggtgcaggctttaaaggcagacattgatgctacattatatgaacaagtcatcctggaaaaagaaatgggaacttatttgggcacctttgatgattacttggagttattcctgcagtttggttatgtgagccttttctcctgtgtttacccattagcagctgcctttgctgtgttaaataacttcactgaagtaaattcagatgccttaaaaatgtgcagggtcttcaaacgtccattctcagaaccttcagccaatattggtgtgtggcagttggcttttgaaacgatgagtgttatatctgtggtcactaactgtgcgctgattggaatgtcaccacaagtgaatgcagtctttccagaatcaaaagcagacctcattttgattgtagtagcagtggagcacgcactcctggctttaaagtttatacttgcatttgccatacctgataagccacggcatatccagatgaaactagccagactggaatttgagtctttggaggcactcaagcagcagcaaatgaagctcgtgaccgagaacctgaaggaggaaccaatggaaagcgggaaggagaaggcaacctgagtgcccagcgtgcccagctgccctgttggcagaggcctgtgtctgtgccacacctgccacggtggcagggggggtacccggggcagcatcgtggctcctgaacccagacccaatgcttagccaaacgaagtggctcccatgtggcaagcacccttctcagtttcgcagtggcttggctcgggatccttggcagttcccccagccccaccctgtctgctccttcccagttccttcccgggccccacacgctgctccagctgccaactttgctgcagagccactgccgcccttgagcctctcaccatgagtgagccaccagctctccacgttcccctcatagcagtgtcactcccaaccccaccatggcccagggacccgtggacaggttggggatggggtgtgtgcccactgtgctcatcacaggagcctcagttgagagtgagcggggtacagtaaggcagtgcttcccacactggacctctttcctggttctcttttgcaatacattaacagaccctttatcaacataaacaatagtaactgagctattaaaggcaacctctctgactccttctgcctacataggtaccgcaatgggcttcccttttctgaagcacttggtgaggtcactgaaggtggagcggtgagatcaggagcccagggtgaggggcttggctggaggccaggcaccaaagcttgtagctgaaggctgggccatttttgagaactgctgctggtggtgcccacctacagggacactagggctgctttcacatgcagggtgtacccatggtgccaagccaagggccagcagccactcctggtgccctggcctgggcttgggcttgcagagaaaagggccctccttgcccagtggtgctgcccacctccctagctgtgtccatggactgccctgcattcacaggcacaagaatgccatgtaggccagtgctgcccacgtatacagcccttcccaccagcgctggccgtcctgctgtagccaagacactacagacccgtgggcacctccactcggacagcagcagatgccctggccc

SEQ ID NO: 196497 - DNA, 1983 bp, Artificial Sequence
  derived and/or modified sequence
atgaaggttaccctcagcgccctggatacgagcgaaagctccttcacccccttggtagtgatcgagctggcacaagatgttaaagaggagaccaaagaatggcttaaaaaccgaatcatagccaaaaagaaggatgggggagcccagttactttttaggcccctgctcaataaatatgaacaggagactttggagaaccagaacttgtaccttgtcggagcctccaagataaggatgttgttgggcgctgaggctgtagggctggttaaggaatgcaatgacaatacaatgagagcgttcacatacaggactagacaaaactttaagggtttcgatgataataatgacgatttcctcaccatggctgaatgccaatttattattaaacacgaattggaaaatttaagagccaaggacgagaaaatgataccgggatatccacaggccaagctgtacccaggaaagagcctcctgaggcgactgttgactagcggaatcgtgatccaggtgttccctctccacgactcggaggcgctgaaaaagcttgaagacacctggtacacgcgattcgcattgaaataccagccaatcgactctatccggggttactttggagaaactatcgctctgtactttgggttcctggagtacttcacctttgcgctcatacctatggcggtgatcggactgccatattatctcttcgtctgggaggactacgacaaatatgttattttcgccagcttcaacctcatttggagtaccgtaattctcgaattatggaagaggggctgcgccaatatgacttaccgttggggaactctgctgatgaagcggaaattcgaagagcctagacccggatttcacggagtccttggtattaacagcataaccggtaaggaagagcctctgtacccttcctataaacgccagctaaggatttacctggtctctcttcctttcgtgtgtttgtgcctgtacttttctctttatgtcatgatgatttactttgatatggaggtttgggccctcgggctacacgagaactctggttctgagtggacatccgttctcctgtatgtgccctccattatttacgctatagtgatcgagattatgaaccgcctgtacagatacgccgctgaatttttaacctcttgggagaatcacaggctggagtcagcttaccagaaccatctgatcctaaaagttttggttttcaattttctgaactgtttcgcttccttgttctatattgctttcgtgcttaaggatatgaagctgcttcgacagtctctggccacacttcttatcacctctcaaattctgaatcaaatcatggagagcttcctaccttattggctgcaacgcaagcacggtgtgagagtgaaacggaaggtgcaagccctcaaagccgatatcgatgcgaccctatacgagcaagttatattggaaaaggagatgggaacgtacttagggactttcgacgactacctggagctgtttttgcagtttggctacgtcagtttattcagctgcgtgtacccattagctgctgcattcgcagtgctgaataactttacagaagttaattccgatgcactgaagatgtgcagagtctttaagaggccattctccgagccatcggccaacattggcgtgtggcagctcgcttttgaaactatgtctgtgattagtgtcgtgacaaactgcgctctgatcgggatgtcgccacaggtaaacgctgtcttccccgaaagtaaagccgatcttatcctcatagtagtggcagttgaacatgctcttctggcccttaaatttatcctggccttcgcgatccccgacaagcccagacacatccagatgaagctggcaaggctcgagttcgagtctttggaggcgctgaagcagcagcagatgaagctcgtcaccgaaaatctgaaggaagaaccaatggaatcaggaaaagagaaagctacttag

SEQ ID NO: 196498 - DNA, 1983 bp, Artificial Sequence
  derived and/or modified sequence
atgaaggtgaccctgagcgccctggacaccagcgagagcagcttcacccccctggtggtgatcgagctggcccaggacgtgaaggaggagaccaaggagtggctgaagaacagaatcatcgccaagaagaaggacggcggcgcccagctgctgttcagacccctgctgaacaagtacgagcaggagaccctggagaaccagaacctgtacctggtgggcgccagcaagatcagaatgctgctgggcgccgaggccgtgggcctggtgaaggagtgcaacgacaacaccatgagagccttcacctacagaaccagacagaacttcaagggcttcgacgacaacaacgacgacttcctgaccatggccgagtgccagttcatcatcaagcacgagctggagaacctgagagccaaggacgagaagatgatccccggctacccccaggccaagctgtaccccggcaagagcctgctgagaagactgctgaccagcggcatcgtgatccaggtgttccccctgcacgacagcgaggccctgaagaagctggaggacacctggtacaccagattcgccctgaagtaccagcccatcgacagcatcagaggctacttcggcgagaccatcgccctgtacttcggcttcctggagtacttcaccttcgccctgatccccatggccgtgatcggcctgccctactacctgttcgtgtgggaggactacgacaagtacgtgatcttcgccagcttcaacctgatctggagcaccgtgatcctggagctgtggaagagaggctgcgccaacatgacctacagatggggcaccctgctgatgaagagaaagttcgaggagcccagacccggcttccacggcgtgctgggcatcaacagcatcaccggcaaggaggagcccctgtaccccagctacaagagacagctgagaatctacctggtgagcctgcccttcgtgtgcctgtgcctgtacttcagcctgtacgtgatgatgatctacttcgacatggaggtgtgggccctgggcctgcacgagaacagcggcagcgagtggaccagcgtgctgctgtacgtgcccagcatcatctacgccatcgtgatcgagatcatgaacagactgtacagatacgccgccgagttcctgaccagctgggagaaccacagactggagagcgcctaccagaaccacctgatcctgaaggtgctggtgttcaacttcctgaactgcttcgccagcctgttctacatcgccttcgtgctgaaggacatgaagctgctgagacagagcctggccaccctgctgatcaccagccagatcctgaaccagatcatggagagcttcctgccctactggctgcagagaaagcacggcgtgagagtgaagagaaaggtgcaggccctgaaggccgacatcgacgccaccctgtacgagcaggtgatcctggagaaggagatgggcacctacctgggcaccttcgacgactacctggagctgttcctgcagttcggctacgtgagcctgttcagctgcgtgtaccccctggccgccgccttcgccgtgctgaacaacttcaccgaggtgaacagcgacgccctgaagatgtgcagagtgttcaagagacccttcagcgagcccagcgccaacatcggcgtgtggcagctggccttcgagaccatgagcgtgatcagcgtggtgaccaactgcgccctgatcggcatgagcccccaggtgaacgccgtgttccccgagagcaaggccgacctgatcctgatcgtggtggccgtggagcacgccctgctggccctgaagttcatcctggccttcgccatccccgacaagcccagacacatccagatgaagctggccagactggagttcgagagcctggaggccctgaagcagcagcagatgaagctggtgaccgagaacctgaaggaggagcccatggagagcggcaaggagaaggccacctag

SEQ ID NO: 196499 - protein, 352 aa, Artificial Sequence
  derived and/or modified sequence
MKENSIALNILGKITRDDDPESEIKMKIAMLLKQLDLHLLNHSLKHISLEISLSPMTVKKDIELLKRFSGKGNQTVLESIEYTSDYEFSNGCRAPPWRQIRGEICYVLVKPHDGETLCITCSAGGVFLNGGKTDDEGDVNYERKGSIYKNLVTFLREKSPKFSENMSKLGISFSEDQQKEKDQLGKAPKKEEAAALRKDISGSDKRSLEKNQINFWRNQMTKRWEPSLNWKTTVNYKGKGSAKEIQEDKHTGKLEKPRPSVSHGRAQLLRKSAEKIEETVSDSSSESEEDEEPPDHRQEASADLPSEYWQIQKLVKYLKQKETSQNGRNKRWIRKQNTRVIRSMIFDVGKTS

SEQ ID NO: 196500 - protein, 1044 aa, Artificial Sequence
  derived and/or modified sequence
MGVALRKLTQWTAAGHGTGILEITPLNEAILKEIIVFVESFIYKHPQEAKFVFVEPLEWNTSLAPSAFESGYVVSETTVKSEEVDKNGQPLLFLSVPQIKIRSFGQLSRLLLIAKTGKLKEAQACVEANRDPIVKILGSDYNTMKENSIALNILGKITRDDDPESEIKMKIAMLLKQLDLHLLNHSLKHISLEISLSPMTVKKDIELLKRFSGKGNQTVLESIEYTSDYEFSNGCRAPPWRQIRGEICYVLVKPHDGETLCITCSAGGVFLNGGKTDDEGDVNYERKGSIYKNLVTFLREKSPKFSENMSKLGISFSEDQQKEKDQLGKAPKKEEAAALRKDISGSDKRSLEKNQINFWRNQMTKRWEPSLNWKTTVNYKGKGSAKEIQEDKHTGKLEKPRPSVSHGRAQLLRKSAEKIEETVSDSSSESEEDEEPPDHRQEASADLPSEYWQIQKLVKYLKGGNQTATVIALCSMRDFSLAQETCQLAIRDVGGLEVLINLLETDEVKCKIGSLKILKEISHNPQIRQNIVDLGGLPIMVNILDSPHKSLKCLAAETIANVAKFKRARRVVRQHGGITKLVALLDCAHDSTKPAQSSLYEARDVEVARCGALALWSCSKSHTNKEAIRKAGGIPLLARLLKTSHENMLIPVVGTLQECASEENYRAAIKAERIIENLVKNLNSENEQLQEHCAMAIYQCAEDKETRDLVRLHGGLKPLASLLNNTDNKERLAAVTGAIWKCSISKENVTKFREYKAIETLVGLLTDQPEEVLVNVVGALGECCQERENRVIVRKCGGIQPLVNLLVGINQALLVNVTKAVGACAVEPESMMIIDRLDGVRLLWSLLKNPHPDVKASAAWALCPCIKNAKDAGEMVRSFVGGLELIVNLLKSDNKEVLASVCAAITNIAKDQENLAVITDHGVVPLLSKLANTNNNKLRHHLAEAISRCCMWGRNRVAFGEHKAVAPLVRYLKSNDTNVHRATAQALYQLSEDADNCITMHENGAVKLLLDMVGSPDQDLQEAAAGCISNIRRLALATEKARYT

SEQ ID NO: 196501 - protein, 389 aa, Artificial Sequence
  derived and/or modified sequence
LSRLLLIAKTGKLKEAQACVEANRDPIVKILGSDYNTMKENSIALNILGKITRDDDPESEIKMKIAMLLKQLDLHLLNHSLKHISLEISLSPMTVKKDIELLKRFSGKGNQTVLESIEYTSDYEFSNGCRAPPWRQIRGEICYVLVKPHDGETLCITCSAGGVFLNGGKTDDEGDVNYERKGSIYKNLVTFLREKSPKFSENMSKLGISFSEDQQKEKDQLGKAPKKEEAAALRKDISGSDKRSLEKNQINFWRNQMTKRWEPSLNWKTTVNYKGKGSAKEIQEDKHTGKLEKPRPSVSHGRAQLLRKSAEKIEETVSDSSSESEEDEEPPDHRQEASADLPSEYWQIQKLVKYLKQKETSQNGRNKRWIRKQNTRVIRSMIFDVGKTS

SEQ ID NO: 196502 - DNA, 3135 bp, Artificial Sequence
  derived and/or modified sequence
atgggcgtggccctgagaaagctgacccagtggaccgccgccggccacggcaccggcatcctggagatcacccccctgaacgaggccatcctgaaggagatcatcgtgttcgtggagagcttcatctacaagcacccccaggaggccaagttcgtgttcgtggagcccctggagtggaacaccagcctggcccccagcgccttcgagagcggctacgtggtgagcgagaccaccgtgaagagcgaggaggtggacaagaacggccagcccctgctgttcctgagcgtgccccagatcaagatcagaagcttcggccagctgagcagactgctgctgatcgccaagaccggcaagctgaaggaggcccaggcctgcgtggaggccaacagagaccccatcgtgaagatcctgggcagcgactacaacaccatgaaggagaacagcatcgccctgaacatcctgggcaagatcaccagagacgacgaccccgagagcgagatcaagatgaagatcgccatgctgctgaagcagctggacctgcacctgctgaaccacagcctgaagcacatcagcctggagatcagcctgagccccatgaccgtgaagaaggacatcgagctgctgaagagattcagcggcaagggcaaccagaccgtgctggagagcatcgagtacaccagcgactacgagttcagcaacggctgcagagcccccccctggagacagatcagaggcgagatctgctacgtgctggtgaagccccacgacggcgagaccctgtgcatcacctgcagcgccggcggcgtgttcctgaacggcggcaagaccgacgacgagggcgacgtgaactacgagagaaagggcagcatctacaagaacctggtgaccttcctgagagagaagagccccaagttcagcgagaacatgagcaagctgggcatcagcttcagcgaggaccagcagaaggagaaggaccagctgggcaaggcccccaagaaggaggaggccgccgccctgagaaaggacatcagcggcagcgacaagagaagcctggagaagaaccagatcaacttctggagaaaccagatgaccaagagatgggagcccagcctgaactggaagaccaccgtgaactacaagggcaagggcagcgccaaggagatccaggaggacaagcacaccggcaagctggagaagcccagacccagcgtgagccacggcagagcccagctgctgagaaagagcgccgagaagatcgaggagaccgtgagcgacagcagcagcgagagcgaggaggacgaggagccccccgaccacagacaggaggccagcgccgacctgcccagcgagtactggcagatccagaagctggtgaagtacctgaagggcggcaaccagaccgccaccgtgatcgccctgtgcagcatgagagacttcagcctggcccaggagacctgccagctggccatcagagacgtgggcggcctggaggtgctgatcaacctgctggagaccgacgaggtgaagtgcaagatcggcagcctgaagatcctgaaggagatcagccacaacccccagatcagacagaacatcgtggacctgggcggcctgcccatcatggtgaacatcctggacagcccccacaagagcctgaagtgcctggccgccgagaccatcgccaacgtggccaagttcaagagagccagaagagtggtgagacagcacggcggcatcaccaagctggtggccctgctggactgcgcccacgacagcaccaagcccgcccagagcagcctgtacgaggccagagacgtggaggtggccagatgcggcgccctggccctgtggagctgcagcaagagccacaccaacaaggaggccatcagaaaggccggcggcatccccctgctggccagactgctgaagaccagccacgagaacatgctgatccccgtggtgggcaccctgcaggagtgcgccagcgaggagaactacagagccgccatcaaggccgagagaatcatcgagaacctggtgaagaacctgaacagcgagaacgagcagctgcaggagcactgcgccatggccatctaccagtgcgccgaggacaaggagaccagagacctggtgagactgcacggcggcctgaagcccctggccagcctgctgaacaacaccgacaacaaggagagactggccgccgtgaccggcgccatctggaagtgcagcatcagcaaggagaacgtgaccaagttcagagagtacaaggccatcgagaccctggtgggcctgctgaccgaccagcccgaggaggtgctggtgaacgtggtgggcgccctgggcgagtgctgccaggagagagagaacagagtgatcgtgagaaagtgcggcggcatccagcccctggtgaacctgctggtgggcatcaaccaggccctgctggtgaacgtgaccaaggccgtgggcgcctgcgccgtggagcccgagagcatgatgatcatcgacagactggacggcgtgagactgctgtggagcctgctgaagaacccccaccccgacgtgaaggccagcgccgcctgggccctgtgcccctgcatcaagaacgccaaggacgccggcgagatggtgagaagcttcgtgggcggcctggagctgatcgtgaacctgctgaagagcgacaacaaggaggtgctggccagcgtgtgcgccgccatcaccaacatcgccaaggaccaggagaacctggccgtgatcaccgaccacggcgtggtgcccctgctgagcaagctggccaacaccaacaacaacaagctgagacaccacctggccgaggccatcagcagatgctgcatgtggggcagaaacagagtggccttcggcgagcacaaggccgtggcccccctggtgagatacctgaagagcaacgacaccaacgtgcacagagccaccgcccaggccctgtaccagctgagcgaggacgccgacaactgcatcaccatgcacgagaacggcgccgtgaagctgctgctggacatggtgggcagccccgaccaggacctgcaggaggccgccgccggctgcatcagcaacatcagaagactggccctggccaccgagaaggccagatacacctag

SEQ ID NO: 196503 - DNA, 3135 bp, Artificial Sequence
  derived and/or modified sequence
atgggggtcgccctgcggaaactaacccaatggaccgctgccggccacggcaccggcatattagagattactcctcttaacgaggcaatacttaaagagataattgtgttcgttgagtcttttatttataagcatccgcaggaagccaagttcgtcttcgtggaaccgctggaatggaacaccagcctggccccctctgcttttgagtcaggatacgtggtgagcgaaaccacagtaaagtccgaggaggtagataagaacggccaacctctcctgttcctctccgtcccccagatcaagattcgcagcttcggccagcttagtcgcttgctgctgatcgcaaagacaggcaagctgaaagaagcacaggcatgcgttgaagccaacagggacccgattgtgaagatcttaggatctgactacaataccatgaaggaaaacagcatagccctgaacatcttaggcaaaatcacacgggatgacgacccagagtcagagatcaagatgaaaatagccatgctcctaaagcagctcgatttgcatctgctcaaccacagtcttaagcacatttcccttgagatttcgctctcacctatgactgtgaagaaagatatagagctcttaaagaggttcagtggcaagggaaaccaaaccgtgcttgagagtattgaatatacatccgattatgagttcagcaatggctgtcgggcaccaccctggcgccagatccgcggggagatctgctacgtcctggtcaagccccatgacggggagactttatgtattacgtgttccgccggcggagtgtttctgaatggtggaaaaacagatgacgagggggatgtaaactacgagaggaaggggagcatctacaagaatctggtcaccttcctgcgggaaaaatcacctaaattttctgagaatatgagcaaacttggcatctcattctctgaagaccagcaaaaggaaaaggatcagctaggcaaggcccctaaaaaagaagaggctgcagccctgcggaaggacattagcggttctgataaaagaagcctggaaaaaaaccagatcaatttctggcgtaaccagatgactaagagatgggagccctcactcaattggaaaacaactgtgaactacaagggcaagggctccgctaaggaaatccaggaagacaagcacaccggcaaactcgagaaaccaaggccttccgtcagccatggaagggcgcagctcctccgcaaatcagccgagaagatcgaggaaacagtgtccgactcaagttcggagagcgaagaagatgaagaaccacccgaccacagacaagaggcctctgcagacctgccgtcagagtactggcaaatacaaaaactggtgaagtacttaaagggaggaaaccaaaccgcgactgtaatagccctgtgtagtatgagggacttttccctggcccaggaaacctgccaactggctattcgcgatgtgggtggactggaagtgctgattaacctgctggagaccgatgaagtaaagtgcaagatcggcagtctgaaaatacttaaggagatctcccataatccacagatccgacaaaatattgtagaccttggcggcctacccatcatggttaatatcttagacagccctcataaatctttaaagtgtttggccgccgagaccatcgccaacgtagcgaaattcaagagagcaaggcgggtggtgagacagcacggaggtatcaccaaactagtcgcactcctcgactgcgcacacgatagcacaaaaccagctcagagctccttgtacgaagctcgggacgtggaagtggccagatgcggagcccttgccctgtggtcctgctctaagtcacatacaaataaagaggccatccgtaaagctggaggcattcctttgcttgcacgacttctcaagacctcgcatgaaaatatgctgatccccgttgtcggcactctgcaagaatgtgcctccgaggagaactatagagccgctattaaagctgaaagaataatcgagaatctagtcaagaatctaaacagcgagaacgaacagctgcaggaacactgtgcaatggcgatatatcagtgtgccgaagacaaggagacacgggatctggtgagactgcacggcggtttgaagccgcttgcctctctattgaacaacactgataataaggagaggctcgccgcggttaccggagcgatttggaaatgtagtatatccaaggaaaacgtgactaagttccgagagtataaggccatcgagacgctggtgggtctgctgacagatcagccagaagaagttctggtgaatgtggttggggctctgggggaatgctgccaggagcgcgaaaacagggtgattgtgcgtaagtgtggcggaattcagcccctggtaaaccttttagttggaataaatcaggccttgttagttaacgttacaaaggcggttggcgcctgcgctgtcgagccggagagcatgatgatcatagaccgcctcgatggcgtgagactgctgtggtcccttctgaagaaccctcatcccgacgtcaaagcgagcgcggcctgggctttgtgtccatgcattaagaatgccaaggacgcaggggaaatggttagaagtttcgttggcggcctggaattaatcgtgaacttgctcaaatcggacaataaggaggtgctggcctccgtttgcgccgcaatcacaaatatcgccaaagaccaagaaaacctggctgtaatcaccgatcatggtgtcgtccccctcctgagtaaactcgcaaatacaaacaataacaagctcagacaccacctggccgaagctatcagccggtgttgcatgtggggccgtaaccgcgttgcgttcggcgagcacaaagctgtggctcccttggttcgttatctaaagtccaatgacaccaatgtgcatcgtgctacagctcaggcgctctaccagctgagcgaggacgccgataactgtatcaccatgcacgaaaatggagctgttaaactgctgcttgatatggtcggatcccctgaccaggatctccaggaggccgctgcaggatgtatatctaatataaggcgactcgccttagcaaccgagaaggcccggtacacctag

SEQ ID NO: 196504 - DNA, 3135 bp, Artificial Sequence
  derived and/or modified sequence
atgggcgtggccctgaggaagctgacccagtggacagctgctggccacggcaccggcatcctggagatcacccccctgaatgaggccatcctgaaggagatcatcgtgtttgtggagagcttcatctacaagcacccccaggaggccaagtttgtgtttgtggagcccctggagtggaacaccagcctggcccccagcgcctttgagagcggctacgtggtgtctgagaccaccgtgaagtctgaggaggtggacaagaatggccagcccctgctcttcctgtctgtgccccagatcaagatccgcagctttggccagctgagccggctgctgctgattgccaagacaggcaagctgaaggaggcccaggcctgtgtggaggccaacagagaccccatcgtgaagatcctgggcagtgactacaacaccatgaaggagaacagcatcgccctgaacatcctgggcaagatcaccagagatgatgatcctgagagcgagatcaagatgaagatcgccatgctgctgaagcagctggacctgcacctgctgaaccacagcctgaagcacatcagcctggagatcagcctgagccccatgacagtgaagaaggacatcgagctgctgaagcgcttcagcggcaagggcaaccagacagtgctggagagcattgagtacaccagtgactatgagttcagcaatggctgccgggccccaccctggaggcagatccggggggagatctgctacgtgctggtgaagccccatgatggagagaccctgtgcatcacctgcagcgctgggggcgtcttcctgaatggaggcaagacagatgatgaaggagatgtgaactatgaaaggaagggcagcatctacaagaacctggtgaccttcctgcgggagaagagccccaagttcagcgagaacatgagcaagctgggcatctccttcagcgaggaccagcagaaggagaaggaccagctgggcaaggcccccaagaaggaggaggccgccgccctgaggaaggacatcagcggcagtgacaagaggagcctggagaagaaccagatcaacttctggaggaaccagatgaccaagcgctgggagcccagcctgaactggaagaccaccgtgaactacaagggcaagggcagcgccaaggagatccaggaggacaagcacacaggcaagctggagaagccccggcccagcgtgagccacggccgggcccagctgctgaggaagtctgctgagaagattgaggagaccgtgtctgacagcagcagcgagagcgaggaggatgaggagcccccagaccaccggcaggaggccagcgctgacctgcccagcgagtactggcagatccagaagctggtgaagtacctgaagggcggcaaccagacagccaccgtgattgccctgtgcagcatgagggacttcagcctggcccaggagacctgccagctggccatcagagatgtgggcggcctggaggtgctgatcaacctgctggagacagatgaggtgaagtgcaagattggcagcctgaagatcctgaaggagatcagccacaacccccagatccggcagaacatcgtggacctgggcggcctgcccatcatggtgaacatcctggacagcccccacaagagcctgaagtgcctggccgctgagaccatcgccaacgtggccaagttcaagagggccaggagagtggtgcggcagcacggcggcatcaccaagctggtggccctgctggactgtgcccatgacagcaccaagccagcccagagcagcctgtatgaggccagagatgtggaggtggcccgctgtggggccctggccctgtggagctgcagcaagagccacaccaacaaggaggccatcaggaaggccggcggcatccccctgctggcccggctgctgaagaccagccatgagaacatgctgatccctgtggtgggcaccctgcaggagtgtgccagcgaggagaactacagagctgccatcaaggccgagcgcatcatcgagaacctggtgaagaacctgaacagtgaaaatgagcagctgcaggagcactgtgccatggccatctaccagtgtgccgaggacaaggagacccgggacctggtgcggctgcatggaggcctgaagcccctggccagcctgctgaacaacacagacaacaaggagcggctggccgctgtgactggagccatctggaagtgcagcatcagcaaagaaaatgtgaccaagttccgggagtacaaggccatcgagaccctggtgggcctgctgacagaccagcctgaggaggtgctggtgaatgtggtgggcgccctgggggagtgctgccaggagcgggagaacagagtcatcgtgaggaaatgtggcggcatccagcccctggtgaacctgctggtgggcatcaaccaggccctgctggtgaatgtgaccaaggctgtgggcgcctgtgctgtggagcctgagagcatgatgatcatcgaccggctggatggagtgcggctgctgtggagcctgctgaagaacccccacccagatgtgaaggccagcgctgcctgggccctgtgcccctgcatcaagaatgccaaggatgctggggagatggtgcgcagctttgtgggcggcctggagctgattgtgaacctgctgaagagtgacaacaaggaggtgctggcctctgtgtgtgccgccatcaccaacatcgccaaggaccaggagaacctggccgtcatcacagaccatggagtggtgcccctgctgagcaagctggccaacaccaacaacaacaagctgcggcaccacctggccgaggccatcagccgctgctgcatgtggggcaggaacagagtggcctttggagagcacaaggctgtggcccccctggtgcgctacctgaagagcaatgacaccaacgtgcaccgggccacagcccaggccctgtaccagctgtctgaagatgctgacaactgcatcaccatgcatgaaaatggagctgtgaagctgctgctggacatggtgggcagcccagaccaggacctgcaggaggccgctgctggctgcatcagcaacatccggcggctggccctggccacagagaaggcccgctacacctag

SEQ ID NO: 196505 - DNA, 3135 bp, Artificial Sequence
  derived and/or modified sequence
atgggcgtggccctgcggaagctgacccagtggaccgccgccggccacgggaccggaatcctggagattacccctcttaacgaagccattttaaaggagatcatcgtgtttgtggaatcttttatatacaaacatccccaggaggctaaattcgtcttcgtggaaccattagagtggaatacatccctggctccatctgcctttgagagtggctatgtcgtaagcgagaccacagtgaaaagcgaggaagtagacaagaacggccagcctctactttttctgtcggtccctcaaattaagattcgtagtttcggccaactgagtagacttctgctgatagccaagactggcaaattgaaggaggcccaagcctgcgtggaagcgaaccgcgacccaattgttaagatattgggctcagattataacaccatgaaggagaatagtatagcgttaaacatcctgggcaagatcacgagggacgatgaccctgagtcagagatcaagatgaaaattgcaatgctgctgaagcagctggatctgcatctgttgaatcactcccttaagcacatttccttggagatctcgttatctcctatgacggtcaagaaagacatagaacttcttaaaagattttccggcaagggcaatcagactgttcttgaatcaatcgagtatacgtctgattatgagttttccaacggctgcagagcaccaccttggcgacagatccggggcgagatttgctacgtgctcgtcaagccccacgatggcgagaccctgtgcatcacatgtagtgccggtggcgtatttctgaatgggggaaaaacggacgacgaaggagacgtaaactatgaacgcaaaggctccatatacaagaacctggttacgtttctgcgtgagaagtcacccaaattcagtgagaatatgtctaagttggggatcagcttctctgaggatcagcagaaagagaaggatcagctcggcaaagcaccgaaaaaagaggaagccgcagcactgagaaaagacatttcaggcagcgataaaaggtcgctggagaagaaccaaattaatttctggcgaaaccagatgacaaaacgttgggaacccagcttgaattggaagacaaccgtgaactataaaggcaaaggttcagccaaggaaatccaggaggacaagcataccggaaagcttgaaaagccccggccctccgtctcccacggcagagcacagctgctcagaaaaagcgccgaaaagatcgaggaaacagtaagcgacagctcttcagaatctgaggaggacgaggaacccccggatcacagacaagaggctagtgccgaccttcccagcgaatattggcagattcagaaattggtgaaatatctcaaagggggcaaccagacagcaacggtgatcgcgctgtgcagcatgagagacttcagcctggcccaggagacctgccaactcgctatacgcgacgtaggagggttagaggtgctgatcaatctcctggagactgacgaagtgaagtgcaagattggtagcctcaagatcctgaaggagatctcacataatccacagattcgccagaacatcgtggatttgggcggactccctattatggtcaacatcctcgattctccacacaagagcttgaagtgtctcgccgccgaaaccatcgcaaatgtggcaaaattcaagagagctaggagagtcgtgcggcagcacggagggatcaccaagctagtcgccctactagattgcgcacacgactccacaaagccggcccagtcctctctttatgaggccagagacgtagaggtggcccggtgcggggctcttgccctgtggtcttgctcaaaatcccatacgaataaagaagctattaggaaggctgggggcattcccctgctcgcccgcctgctgaagactagtcacgagaatatgcttatcccagtcgttgggaccctgcaagaatgcgcttctgaagaaaactatcgggccgctataaaggccgagcgaatcatcgaaaacctggtaaaaaacctaaattcagagaacgagcagttacaagagcactgtgctatggccatctatcaatgtgccgaggacaaggagacacgcgaccttgttcggttgcatggcggtctaaaaccgctggctagtcttctgaacaatacggataacaaagagaggctcgcggccgtaactggagctatctggaaatgctcaattagtaaggaaaatgtcacaaaattcagggagtataaagccatcgaaactctagtgggcctccttaccgaccagcccgaagaggttctcgtcaacgttgtcggtgcactgggggagtgttgtcaggaaagagagaacagggtgatagtgcggaagtgcggtgggatccagcccctagtgaacctactggtggggatcaatcaggctttactggtgaacgtgacaaaggccgtcggtgcctgcgcagtggaacctgaaagcatgatgatcatcgaccgcctggacggggtccgcctgctgtggtccctgctgaaaaatccgcaccccgatgtcaaggcaagtgctgcctgggccctgtgtccctgcattaagaatgccaaggacgctggtgagatggtcaggtccttcgttggggggctggagctaattgtgaacttgttaaaatctgacaacaaagaagtcctcgcgtcagtctgcgcagcaattactaatatcgcaaaagatcaggaaaacctggcagtgataaccgatcacggtgtggtccctctcttaagtaagctggctaatacaaataataacaagctgcggcaccatctggcggaagcaattagtcggtgctgcatgtggggacgcaaccgagttgctttcggcgaacacaaagctgtagcacccctggtgagatatctaaaatccaatgatacaaacgtccacagggcaacagcacaggcactgtaccagctctctgaggacgcagataattgtatcacaatgcacgagaacggggccgtgaagcttcttttggatatggttggtagccctgatcaggaccttcaagaggctgccgccggttgtattagcaacatcagacgcctagcactggcgacagaaaaggccaggtacacctag

SEQ ID NO: 196506 - DNA, 3135 bp, Artificial Sequence
  derived and/or modified sequence
atgggcgttgccctaaggaaactgacccagtggactgcagccggacacgggaccggaatcctagagattaccccgcttaacgaagcgatcctcaaggagataatagtgtttgtcgagtccttcatctacaaacatccccaggaggcaaagttcgttttcgtggaaccgctcgagtggaatacaagcctggctcccagtgctttcgaaagtggatacgtggtatcggaaaccaccgtgaagagcgaagaggtggacaagaatggccagccattgctgtttctgtctgttcctcagattaaaatccggtcgttcggacagctaagccgactcctgctgattgcaaaaacaggaaagcttaaggaagcccaggcctgcgtggaagcaaacagagacccgatcgttaaaatcctgggtagcgactataacaccatgaaagagaattcaatcgctctgaatatccttggaaaaattactcgggatgatgatccggaatcagaaatcaaaatgaagatcgctatgttactgaaacaactagacttgcacctcctaaatcactctctgaagcacatttccctagaaatctctctctcaccaatgaccgtcaaaaaagacatcgagctcttgaaaaggttctccgggaagggtaaccagaccgttttggaaagcatcgaatatacatctgactacgagttctcaaatggctgccgcgctcccccttggcggcagatccgtggcgagatatgctacgtgctggttaagccccatgatggcgaaactctttgtattacttgctccgctgggggtgttttccttaacgggggaaagacggatgacgaaggtgatgttaactatgagcggaaggggagcatttacaaaaaccttgtgacctttctgcgcgaaaaaagtccgaaattctcagagaatatgtccaagctcgggatttccttcagtgaggaccagcagaaggaaaaggaccagctgggcaaggctccaaaaaaggaggaagctgctgcactccggaaagatatcagtggctctgacaagagaagcctagagaagaaccaaatcaatttctggcggaatcagatgactaaacggtgggagcccagtctcaactggaagacgacagtgaactataaaggtaaaggctctgctaaagaaatccaggaggataagcacactgggaagctggagaagcccagacccagtgtctctcacggtagagctcagctcctaagaaaatccgcagaaaaaatcgaggaaactgtgtccgatagctccagtgagagcgaagaagatgaggaaccacctgaccaccgccaggaggcgtcggctgatctcccctcagagtattggcagatccaaaaactggtgaagtatctgaagggtgggaatcagacggcaaccgtgatagccctgtgcagcatgcgtgacttttcactggcccaggagacatgccagctcgctataagagatgtcggcggattagaagtacttataaatcttctggaaacagacgaggtgaagtgtaaaatcggttccctgaaaatcctcaaggaaatctcccataatccgcagattcggcaaaacattgtggacctgggcggtctgccaatcatggtaaacatccttgactcaccacataaaagtttaaaatgtctggctgctgagactattgccaacgtggctaaattcaaacgtgctcggagagtcgtgagacagcatggtggcataaccaagttagtggccctgctggattgcgcacatgatagtaccaagccagctcagtcctctctgtatgaggcccgagatgtggaagtggctaggtgcggagcgctggccctatggagttgctccaagtctcacacaaacaaagaggcaatcaggaaggcgggagggattcccctacttgcacggctcctgaagacatctcatgaaaatatgctgatacccgtggtcggtaccctgcaagagtgcgctagtgaagagaattacagggctgccattaaggccgagaggatcatcgagaatctggttaagaacctgaattcagaaaatgagcagcttcaagagcactgtgccatggccatatatcagtgcgccgaggacaaggagaccagggatctggtccggttgcacggcggtctcaaacccttggcttcccttctaaacaataccgacaataaggagcgtctcgcagctgtcactggagctatctggaagtgcagtatttccaaggaaaacgtcaccaagttcagggaatataaggccatcgaaaccttagtgggcttactaacagaccagcccgaagaggtgctggtgaacgtggtgggcgcactcggtgaatgttgtcaggagagggaaaatcgagtaattgtgcgcaagtgcggcggaattcagcctctggttaatctcctggttgggataaatcaggcgttgttggttaatgtgacgaaggcagtgggggcttgcgcagtggagccggaatccatgatgataattgatcgcctcgacggcgtacggttgctctggtccttgctgaaaaatcctcatcccgatgtgaaagccagtgccgcatgggccctctgtccctgcattaaaaacgccaaagacgctggcgagatggttaggtccttcgtcggcggactagaattgattgtcaacctactcaaatctgataataaagaggtcctggcttcagtgtgtgccgcaatcacaaatattgccaaggaccaagagaaccttgcagtgatcaccgaccatggagtggtgcctttgctgtcgaaattggctaatactaataacaacaaactgcggcatcacctcgcagaggccatctctaggtgttgcatgtgggggaggaatcgcgtagcatttggtgagcataaagcagtagctccactggtgcggtacttgaagtccaacgatactaacgtccatagggccactgcacaggccctctaccagctgtcagaagatgctgataactgcatcactatgcacgaaaatggagctgtgaagttgctgcttgacatggtcggttctcctgaccaggaccttcaggaggccgctgccggttgtatttctaatatccgcagactcgccctcgctacagagaaggctcgctacacgtag

SEQ ID NO: 196507 - DNA, 3572 bp, Artificial Sequence
  derived and/or modified sequence
atacggtgcaacgggtccgcgggaatcttggatgcgcggaggtcccgagaccaggtgcgtgtgctaagctcaggtctgagcacggtggatcccatgggtgtggctctgaggaaattgacgcagtggactgctgccggacatggaactggaatcctcgaaatcacccctctaaatgaagcgatattgaaagaaattattgtgtttgtggagagttttatctataaacatcctcaagaggcaaaatttgtttttgtggaaccacttgaatggaacacaagtttggcgccctcagcatttgaatcaggttatgttgtcagtgaaacaacagtcaaatcagaagaagttgataaaaatggacagcctttgctatttctctctgtaccacaaattaaaattaggagctttgggcagctgtcacgcttgttacttattgccaaaactgggaagttgaaggaagcccaagcatgtgttgaagctaacagagaccccatagtaaaaatcctgggctctgattataatacaatgaaagaaaactcaattgcattaaatattcttggcaaaattaccagagatgatgatcctgaaagtgaaattaagatgaagattgctatgctgcttaagcaattggatctgcacctcctcaatcattctctaaaacatatttcattagaaataagtttaagtcccatgacggtgaagaaggatatagaactgctcaaacgtttctcaggaaaaggaaaccaaacagtcttggaatctattgaatatacctcagattatgaattttcaaatggatgtcgagccccaccgtggagacaaattcgtggggaaatttgttatgtgctggtgaaacctcacgatggtgagactctgtgcattacttgcagtgcaggaggagtatttttaaatggtggcaaaacagatgatgaaggggacgttaattatgagagaaaaggttcaatttataaaaaccttgtcacatttttaagagaaaaatcaccaaaattttcagaaaatatgtctaaattgggaattagcttcagtgaagaccagcaaaaggaaaaggatcagcttggcaaagcccccaagaaggaagaagcagctgccctccgcaaagacatttctggttcagacaaaaggtcactggagaagaaccaaattaatttttggaggaatcaaatgaccaagagatgggaaccaagcttaaactggaagaccactgttaattacaaaggcaaaggctcagcaaaagaaatccaagaggacaaacacacaggaaaacttgaaaaaccaagaccatctgtttcacacggaagagcacaattacttcggaagagtgctgaaaagattgaggaaactgttagcgatagctcctcagaaagtgaggaagatgaagaaccacctgaccatcgtcaggaagcaagtgcagatttgccatcagaatattggcaaattcagaagctggtgaaatatttaaagggaggaaatcaaacagctacagtgattgcgttgtgttcaatgagggatttcagcttagctcaagaaacctgccagttggccatcagagatgttggaggcctggaagtgctgataaatttgcttgaaaccgatgaagtcaaatgtaagattggttcattaaaaatactgaaggaaatcagtcataatcctcaaatcagacagaatattgttgaccttgggggcttaccaattatggtgaatatacttgattctccacacaagagtctaaaatgtttggcagccgagactatcgcgaatgttgccaagtttaaaagagcacggcgggtggtgaggcagcacgggggtatcaccaaactggttgctctactagactgtgcacatgattccacaaaacctgcccaatcgagtctgtatgaggccagagacgtggaagtggctcgctgtggggcactggccctgtggagctgcagtaagagtcatacgaataaagaagccatccgcaaagctgggggcattcctctgttggctcggctgctgaagacttctcatgaaaacatgctaattccagtggtggggacattgcaagagtgtgcatcagaggaaaactaccgggctgcaatcaaagcagaaaggatcattgaaaaccttgtcaagaacctaaatagtgagaatgagcagctgcaggagcactgcgccatggccatttaccagtgtgctgaagataaggaaacccgggacctcgttaggctgcacggaggacttaagcccttggccagtctactcaataacactgacaataaagagcggttagctgctgtcacaggggctatatggaaatgttccatcagcaaagagaatgttaccaagtttcgggaatacaaagccattgaaaccttggtgggacttctaacagatcagcctgaagaagtacttgtgaatgtggttggggccttgggagaatgctgccaagaacgtgaaaaccgagtcattgtccggaaatgtggtggcattcaaccacttgtgaacctccttgttggaataaaccaagctcttcttgtgaatgttacaaaagcagttggtgcttgtgcagtagaacctgaaagtatgatgataattgatcgcttagatggagttcgtttgttgtggtccctgctgaaaaatcctcacccagacgtgaaggccagcgcagcatgggcactctgtccatgcatcaaaaatgcaaaggatgctggggaaatggttcgttcctttgttggtggtttggaacttattgtcaatttactgaaatcagataacaaagaagttctggcaagtgtatgtgctgccattaccaacatagcaaaagatcaagaaaatttagctgttatcacagatcatggagttgttcctttattgtccaaactggcaaatacaaataacaataaattgagacatcatctagcagaagctatttcacgttgctgtatgtggggcaggaatagagtggccttcggtgagcacaaagcagtggctccactagtgcgttatctgaaatcaaatgacaccaacgtgcatcgggcgacagctcaggccttgtaccaactctcagaagacgccgataactgcatcaccatgcatgagaatggtgcagtaaagcttctactggatatggttgggtcccctgaccaggatctccaggaagctgcagctggttgtatatccaatatccgcaggctggctcttgctacagagaaggcaagatacacttgaaatttaaatggacattacaagctatcaaattctacatgacacaggacatgtcactcccatggccagaaagcctaaattgggaaacagttgttagcaaaccctttcaaccatctaaatgaaaacacacaaattgaaaatgcacagaatgtttttcatctgaaaattgcatggagacttttgtttctatttaatgttttcgagatatgacatgtgataagatggaaagccaataaacctgtgataagtttctaagaatatgagaatatacgtatatgatgtatttttagttcagtgatgcttttgtatttgtggcgattttaataaaaaggatatggccttcccaa

SEQ ID NO: 196508 - protein, 759 aa, Artificial Sequence
  derived and/or modified sequence
MAGLTLFVGRLPPSARSEQLEELFSQVGPVKQCFVVTEKGSKACRGFGYVTFSMLEDVQRALKEITTFEGCKINVTVAKKKLRNKTKEKGKNENSECPKKEPKAKKAKVADKKARLIIRNLSFKCSEDDLKTVFAQFGAVLEVNIPRKPDGKMRGFGFVQFKNLLEAGKALKGMNMKEIKGRTVAVDWAVAKDKYKDTQSVSAIGEEKSHESKHQESVKKKGREEEDMEEEENDDDDDDDDEEDGVFDDEDEEEENIESKVTKPVQIQKRAVKRPAPAKSSDHSEEDSDLEESDSIDDGEELAQSDTSTEEQEDKAVQVSNKKKRKLPSDVNEGKTVFIRNLSFDSEEEELGELLQQFGELKYVRIVLHPDTEHSKGCAFAQFMTQEAAQKCLLAASPENEAGGLKLDGRQLKVDLAVTRDEAAKLQTTKVKKPTGTRNLYLAREGLIRAGTKAAEGVSAADMAKRERFELLKHQKLKDQNIFVSRTRLCLHNLPKAVDDKQLRKLLLSATSGEKGVRIKECRVMRDLKGVHGNMKGQSLGYAFAEFQEHEHALKALRLINNNPEIFGPLKRPIVEFSLEDRRKLKMKELRIQRSLQKMRSKPATGEPQKGQPEPAKDQQQKAAQHHTEEQSKVPPEQKRKAGSTSWTGFQTKAEVEQVELPDGKKRRKVLALPSHRGPKIRLRDKGKVKPVHPKKPKPQINQWKQEKQQLSSEQVSRKKAKGNKTETRFNQLVEQYKQKLLGPSKGAPLAKRSKWFDS

SEQ ID NO: 196509 - DNA, 2280 bp, Artificial Sequence
  derived and/or modified sequence
atggccggcctgaccctgttcgtgggcagactgccccccagcgccagaagcgagcagctggaggagctgttcagccaggtgggccccgtgaagcagtgcttcgtggtgaccgagaagggcagcaaggcctgcagaggcttcggctacgtgaccttcagcatgctggaggacgtgcagagagccctgaaggagatcaccaccttcgagggctgcaagatcaacgtgaccgtggccaagaagaagctgagaaacaagaccaaggagaagggcaagaacgagaacagcgagtgccccaagaaggagcccaaggccaagaaggccaaggtggccgacaagaaggccagactgatcatcagaaacctgagcttcaagtgcagcgaggacgacctgaagaccgtgttcgcccagttcggcgccgtgctggaggtgaacatccccagaaagcccgacggcaagatgagaggcttcggcttcgtgcagttcaagaacctgctggaggccggcaaggccctgaagggcatgaacatgaaggagatcaagggcagaaccgtggccgtggactgggccgtggccaaggacaagtacaaggacacccagagcgtgagcgccatcggcgaggagaagagccacgagagcaagcaccaggagagcgtgaagaagaagggcagagaggaggaggacatggaggaggaggagaacgacgacgacgacgacgacgacgacgaggaggacggcgtgttcgacgacgaggacgaggaggaggagaacatcgagagcaaggtgaccaagcccgtgcagatccagaagagagccgtgaagagacccgcccccgccaagagcagcgaccacagcgaggaggacagcgacctggaggagagcgacagcatcgacgacggcgaggagctggcccagagcgacaccagcaccgaggagcaggaggacaaggccgtgcaggtgagcaacaagaagaagagaaagctgcccagcgacgtgaacgagggcaagaccgtgttcatcagaaacctgagcttcgacagcgaggaggaggagctgggcgagctgctgcagcagttcggcgagctgaagtacgtgagaatcgtgctgcaccccgacaccgagcacagcaagggctgcgccttcgcccagttcatgacccaggaggccgcccagaagtgcctgctggccgccagccccgagaacgaggccggcggcctgaagctggacggcagacagctgaaggtggacctggccgtgaccagagacgaggccgccaagctgcagaccaccaaggtgaagaagcccaccggcaccagaaacctgtacctggccagagagggcctgatcagagccggcaccaaggccgccgagggcgtgagcgccgccgacatggccaagagagagagattcgagctgctgaagcaccagaagctgaaggaccagaacatcttcgtgagcagaaccagactgtgcctgcacaacctgcccaaggccgtggacgacaagcagctgagaaagctgctgctgagcgccaccagcggcgagaagggcgtgagaatcaaggagtgcagagtgatgagagacctgaagggcgtgcacggcaacatgaagggccagagcctgggctacgccttcgccgagttccaggagcacgagcacgccctgaaggccctgagactgatcaacaacaaccccgagatcttcggccccctgaagagacccatcgtggagttcagcctggaggacagaagaaagctgaagatgaaggagctgagaatccagagaagcctgcagaagatgagaagcaagcccgccaccggcgagccccagaagggccagcccgagcccgccaaggaccagcagcagaaggccgcccagcaccacaccgaggagcagagcaaggtgccccccgagcagaagagaaaggccggcagcaccagctggaccggcttccagaccaaggccgaggtggagcaggtggagctgcccgacggcaagaagagaagaaaggtgctggccctgcccagccacagaggccccaagatcagactgagagacaagggcaaggtgaagcccgtgcaccccaagaagcccaagccccagatcaaccagtggaagcaggagaagcagcagctgagcagcgagcaggtgagcagaaagaaggccaagggcaacaagaccgagaccagattcaaccagctggtggagcagtacaagcagaagctgctgggccccagcaagggcgcccccctggccaagagaagcaagtggttcgacagctag

SEQ ID NO: 196510 - DNA, 2280 bp, Artificial Sequence
  derived and/or modified sequence
atggcaggccttaccttatttgttgggcgactgcccccttcagcgcggtctgaacaactcgaagagctgttttcccaggtgggaccggttaagcagtgctttgtggtcacagaaaagggctccaaagcctgtcgggggtttgggtacgtgacattcagtatgctggaggacgtgcagcgcgcactgaaagagatcaccacctttgaaggctgcaagatcaatgtaaccgttgctaaaaagaaattgagaaataaaactaaggagaaaggaaagaatgaaaattccgagtgccccaagaaagagcccaaagccaaaaaagctaaggtagccgacaagaaggcacggctgatcatccggaatctgagtttcaagtgttctgaggacgatttgaagactgtgtttgcccagttcggggctgtactcgaggtgaacattcctcgtaagcctgatgggaaaatgcgcggatttggttttgttcagtttaagaatctgctggaagccggaaaagctctgaagggcatgaacatgaaggagatcaagggccgaacagttgccgttgattgggcggtcgctaaggacaagtacaaagacacccagagcgttagcgccattggggaagagaagagccacgagagcaaacaccaggaatcagtgaaaaagaaaggtagagaggaagaagacatggaagaggaggagaatgacgacgacgatgatgacgacgacgaggaggatggcgtcttcgatgacgaggatgaggaagaggaaaatatagagagtaaagtaaccaagcctgtgcagatccagaaacgcgctgttaaaaggcccgcacccgcaaagtcttctgaccactcagaagaagactcagatctggaggagagcgactcgatcgatgacggcgaggaattggcgcagagcgatacttccacggaggagcaagaggataaggctgttcaagtttccaacaagaaaaaacggaaattgccttcagatgttaatgaaggtaaaacagtgttcatcagaaatctgagctttgactctgaggaggaagagctcggtgagctgttgcagcagtttggcgagctgaagtatgtgagaattgtgctgcaccctgacacagaacattccaaagggtgcgccttcgcgcagttcatgactcaggaagctgctcagaaatgcctgctggctgcctcccctgagaatgaggccggcgggttgaagttagacggtcgacagctgaaagtggacctggccgtgaccagagacgaggccgccaaactccagacaactaaagtcaaaaaaccaaccggtactagaaacctgtatcttgccagagagggcctcatccgggctggcactaaggctgcagaaggtgtgagcgccgccgatatggcaaagagggaacggttcgaattgctcaaacaccagaagctgaaggaccaaaacatatttgtgtctcgcacaaggctgtgcctgcataatttgcccaaggcagttgatgacaagcagctgcgaaaattgttgctgagcgccacctctggggagaaaggagtgagaattaaggagtgtagggtgatgcgagacttgaaaggtgtgcatggcaatatgaagggacagagcctgggctacgcattcgccgagttccaggagcatgaacacgccttgaaggccctacggcttattaataataaccccgaaattttcggccctttgaaacgaccaattgtggagttcagcttagaagatagaaggaaacttaagatgaaggagctcaggatccagcggtccctccagaagatgcgctccaagccggcaactggcgaaccacagaaaggacagcccgaacctgctaaagaccaacaacagaaggccgcccagcatcacactgaagaacagagcaaagtgcctcccgagcagaagcggaaggcaggctcgactagttggacaggttttcagaccaaggccgaagtggagcaagtcgagctgcccgatggaaagaagagaagaaaggtcctggctttgccctcacatcgcggcccaaagattaggctccgcgacaaaggtaaggtgaagcccgttcacccaaagaagccaaagccccagattaaccagtggaagcaggaaaagcagcagctgagttctgagcaggtcagccgcaagaaagctaagggtaacaagacagaaacgcggtttaatcaactcgtggaacagtacaaacagaaactgctgggtccgtctaagggagcaccattagccaagagaagcaagtggtttgacagttag

SEQ ID NO: 196511 - DNA, 2280 bp, Artificial Sequence
  derived and/or modified sequence
atggccggcctgaccctgtttgtgggccgcctgccccccagcgcccggtctgagcagctggaggagctgttcagccaggtgggccctgtgaagcagtgctttgtggtgacagagaagggcagcaaggcctgccggggcttcggctacgtgaccttctccatgctggaggatgtgcagagggccctgaaggagatcaccacctttgagggctgcaagatcaacgtgacagtggccaagaagaagctgaggaacaagaccaaggagaagggcaagaatgaaaattctgagtgccccaagaaggagcccaaggccaagaaggccaaggtggccgacaagaaggcccggctcatcatccggaacctgtccttcaagtgcagtgaagatgacctgaagacagtgtttgcccagtttggagctgtgctggaggtgaacatccccaggaagccagatggcaagatgaggggcttcggctttgtgcagttcaagaacctgctggaggccggcaaggccctgaagggcatgaacatgaaggagatcaagggccgcacagtggccgtggactgggccgtggccaaggacaagtacaaggacacccagagcgtgtctgccatcggggaggagaagagccatgagagcaagcaccaggagagcgtgaagaagaagggccgggaggaggaggacatggaggaggaggagaatgatgatgatgatgatgatgatgatgaagaagatggagtgtttgatgatgaagatgaggaggaggagaacatcgagagcaaggtgaccaagcctgtgcagatccagaagagagctgtgaagaggcctgccccagccaagagcagtgaccacagcgaggaggacagcgacctggaggagagtgacagcattgatgatggagaggagctggcccagagcgacaccagcacagaggagcaggaggacaaggctgtgcaggtgagcaacaagaagaagaggaagctgcccagtgatgtgaatgaaggcaagacagtgttcatccggaacctgagctttgacagcgaggaggaggagctgggggagctgctgcagcagtttggagagctgaagtatgtgcgcatcgtgctgcacccagacacagagcacagcaagggctgtgcctttgcccagttcatgacccaggaggccgcccagaagtgcctgctggccgccagcccagaaaatgaggccggcggcctgaagctggatggccggcagctgaaggtggacctggccgtgaccagagatgaagctgccaagctgcagaccaccaaggtgaagaagcccaccggcaccaggaacctgtacctggcccgggagggcctcatccgggccggcaccaaggctgctgagggcgtgtctgctgctgacatggccaagcgggagagatttgagctgctgaagcaccagaagctgaaggaccagaacatctttgtgtccaggacccggctgtgcctgcacaacctgcccaaggctgtggatgacaagcagctgaggaagctgctgctgagcgccaccagcggggagaagggcgtgcgcatcaaggaatgtcgggtgatgagggacctgaagggcgtgcacggcaacatgaagggccagagcctgggctacgcctttgctgagttccaggagcacgagcacgccctgaaggccctgcggctcatcaacaacaaccctgagatcttcggccccctgaagaggcccatcgtggagttcagcctggaggacaggaggaagctgaagatgaaggagctgcgcatccagaggagcctgcagaagatgaggagcaagccagccactggagagccccagaagggccagcctgagcccgccaaggaccagcagcagaaggccgcccagcaccacacagaggagcagagcaaggtgcccccagagcagaagaggaaggccggcagcacctcctggacaggcttccagaccaaggccgaggtggagcaggtggagctgcctgatggcaagaagaggaggaaggtgctggccctgcccagccaccggggccccaagatccggctgcgggacaagggcaaggtgaagcctgtgcaccccaagaagcccaagccccagatcaaccagtggaagcaggagaagcagcagctgagcagcgagcaggtgtccaggaagaaggccaagggcaacaagacagagacccgcttcaaccagctggtggagcagtacaagcagaagctgctgggccccagcaagggggcccccctggccaagaggagcaagtggtttgacagctag

SEQ ID NO: 196512 - DNA, 2280 bp, Artificial Sequence
  derived and/or modified sequence
atggccggcctgaccctgttcgtgggccggctgccccccagcgcccggtcagagcagcttgaagagttgttttcccaagtcggacctgtcaagcagtgctttgtggtgacggaaaaggggagtaaggcgtgtagaggattcgggtatgtgaccttttctatgcttgaggatgttcagcgggcgctgaaagagatcactacctttgagggatgcaagatcaatgtaacagtcgctaaaaaaaaactccgtaacaaaactaaagagaagggcaagaacgaaaattcagaatgtcctaaaaaagagccaaaagccaagaaggctaaggttgccgacaagaaggcccgactgatcatcaggaacctaagcttcaagtgctcggaagacgatctaaaaactgtgttcgcacagttcggggcagtgctggaggttaatattccacgtaaacccgacggcaagatgcgtggattcgggtttgtgcagtttaagaatctattagaagccggcaaagctctgaaaggtatgaatatgaaggagatcaaagggagaacagttgccgtcgactgggcggtcgctaaagataaatataaagatacccagtccgttagcgctattggtgaagaaaagagccacgagtcgaaacaccaggaaagcgtcaaaaagaagggaagagaggaggaggacatggaagaggaggaaaacgacgacgatgacgatgacgacgatgaggaagatggagtcttcgatgatgaagacgaggaagaggagaatattgagagcaaagtcacaaagcctgtacagattcagaaacgcgccgtaaaacggcctgcacctgctaagtcgtctgaccattccgaggaggacagcgacttagaagaaagtgacagtattgacgatggtgaggagctagcacagtctgacacgagcacggaagaacaggaagacaaggctgtccaggtgagcaacaaaaaaaagcgaaagctgcccagtgacgtcaatgagggcaagacagtgtttattcgcaatctgtcatttgactcagaggaagaagagcttggagaactgctgcagcagttcggggaactgaagtacgtgcgaattgtcctccatcccgacaccgaacattctaaaggctgtgctttcgctcagttcatgacacaggaggccgctcagaaatgcctgctcgccgctagtcctgagaatgaggcaggtggactgaagttagatgggagacagcttaaagttgatctagcggtcacacgtgacgaagcagcaaagcttcagacgacgaaggtcaagaagccgacaggcacccggaacctataccttgctcgcgaaggattgatccgggcgggcacaaaggcagctgagggcgtgtcagccgctgacatggcaaagcgagagcgctttgagctcctcaaacatcaaaagctgaaggatcaaaacatctttgtctcccgcacccgcttgtgcttgcataatctgcccaaggccgtcgatgacaagcaactcagaaagctgctattaagcgcaacaagcggcgagaagggggtgaggatcaaagaatgcagagttatgagagacctgaaaggagttcacggtaatatgaaggggcaatctctcggatacgcctttgccgaattccaagaacatgagcacgcactgaaggctctccgtctaatcaataacaacccagagatatttggtcccctcaagagacccatcgtggaattttccctcgaagatcggaggaaactcaaaatgaaagagctcaggatccagaggtcgttgcagaagatgcgctctaaacccgcgaccggggaaccgcaaaaagggcagcctgagccagctaaggaccagcagcaaaaagccgcccagcaccacacagaagaacagtccaaagtccctccggagcagaaacggaaagccggctcaactagctggaccgggtttcaaacaaaagccgaagtcgagcaggtcgaactgcctgatggcaagaagaggaggaaagttctagccctcccctctcaccgggggccgaaaattcggttgagagataaggggaaggttaaacccgtccacccaaaaaaaccaaaaccccagattaaccagtggaaacaagagaagcagcagttgtcatcggaacaggtgagtcggaaaaaggcaaaagggaacaagaccgagactcgttttaaccagcttgtggaacaatacaagcagaagctactgggaccctccaagggagccccgctagccaagaggagtaaatggttcgattcatag

SEQ ID NO: 196513 - DNA, 2280 bp, Artificial Sequence
  derived and/or modified sequence
atggctggactgaccctgtttgttgggagacttcctccgtccgccaggagtgagcaactcgaggaactgtttagtcaggtcggcccagtaaaacagtgcttcgtggtaacagagaagggtagcaaagcgtgtagagggttcggctacgttaccttttctatgctggaggatgtgcagagggcgctgaaagaaattacaacttttgaagggtgtaagatcaacgtgaccgttgccaagaaaaagctgagaaataaaactaaagaaaagggaaaaaacgagaactctgagtgccccaagaaagaacccaaagctaaaaaagcaaaagtggccgacaagaaagcgcgtcttataattcggaatttgtcctttaagtgctccgaggatgacctcaaaacagtgtttgcccagtttggcgcagttttagaagtaaatatccctaggaaacccgacgggaagatgcgaggtttcggcttcgttcaattcaaaaatctcctggaagcgggaaaggctctgaaggggatgaacatgaaggagatcaaaggaaggaccgttgctgtcgattgggccgttgcgaaagacaaatacaaggacacccaaagtgtctccgccatcggtgaggaaaagagccacgaatctaaacatcaggagtctgtcaagaagaaggggagggaagaggaggatatggaagaggaagaaaatgatgatgacgacgatgacgatgacgaggaggacggcgtctttgacgatgaagatgaggaagaggaaaacattgaatccaaagtgacgaagccggtgcagattcaaaaacgagcggtgaagcggcctgctccagccaaaagcagcgaccactcagaagaggacagtgacctagaggagagcgattctattgacgatggggaggagttggcccagtccgacacatccaccgaagaacaggaggacaaagccgtccaggtgagcaataaaaaaaagcgtaagctgccttccgatgtgaacgagggaaaaaccgtgttcatccgcaacctctcttttgacagcgaagaagaggagttgggagagctgttgcagcagtttggggaactaaagtatgttagaattgtgttgcatccagacacagaacatagcaaaggctgtgctttcgctcagttcatgactcaggaggcggcacagaagtgtctactcgccgcttcacccgagaacgaagctgggggtcttaagttagacggaagacagttgaaggtagatctagcggtgacccgcgacgaagccgctaagcttcagacaacaaaagtaaaaaagcccacagggactaggaatctgtacctcgcaagggagggcctgattcgggctggaacgaaagctgccgagggggtgagtgcggctgacatggccaagcgcgaaaggtttgagcttctgaaacaccagaagctcaaggatcagaatatatttgtgtcacggacgagactttgccttcacaacctcccgaaagccgtggatgataaacagctcaggaagttgctactgtcggcgacaagcggcgaaaagggcgtaaggataaaggaatgcagggtaatgcgggacctgaagggagttcatggcaacatgaagggtcaaagcctgggttacgccttcgccgaatttcaggagcacgagcacgcactgaaggccctacggctgatcaataacaaccctgagatttttggccctttgaaacggccaatcgtggagttttcactggaagaccgacggaagctgaaaatgaaggagcttaggatccagagatcactgcaaaagatgaggagcaagcctgcaacaggggagccgcagaaagggcagccagaacctgccaaggatcagcaacagaaggcagctcaacatcacactgaagaacagtcgaaagtgccccctgagcagaaaaggaaagctggctcgacttcttggacaggattccagaccaaggctgaggtcgaacaggtggagctcccagatggaaagaaacggaggaaggtgctcgctcttccctctcatcgtggacccaaaattcgacttagggacaaaggaaaagtgaagccggtgcacccaaaaaaacccaaacctcagattaaccaatggaagcaggagaagcagcagctcagctccgagcaggtgagtaggaagaaagcaaaaggaaacaaaacagagacccggttcaatcaacttgtagagcagtataagcagaagctgctgggcccttccaagggcgctcctttggctaagcgttccaaatggttcgactcatag

SEQ ID NO: 196514 - DNA, 2808 bp, Artificial Sequence
  derived and/or modified sequence
acttccggaatctctcggcgtgtgagcttggttgtcctaccaaagccagcgtttcggctcgcgtgcgccggcctagtttgctcgcgtcctcacgcgctttgggtttcccggtctcatggccggcctgaccttatttgtgggccgcctcccgccctcggcccgcagtgagcagctggaggaactgttcagtcaggtggggccggtgaagcagtgcttcgtggtgactgaaaaagggagtaaggcatgtcgaggctttggctatgtcactttttcaatgctggaagatgttcagagggccctcaaggagattaccacctttgaaggttgcaagatcaacgtgactgttgccaagaaaaaactgaggaacaagacaaaggaaaaggggaaaaatgaaaactcagagtgcccaaagaaggagccgaaggctaaaaaagccaaagtggcagataagaaagccagattaattattcggaacctgagctttaagtgttcagaagatgacttgaagacagtatttgctcaatttggagctgtcctggaagtaaatatccctaggaaaccagatgggaagatgcgcggttttggttttgttcagttcaaaaacctcctagaagcaggtaaagctctcaaaggcatgaacatgaaagagataaaaggccggacagtggctgtggattgggccgtggcaaaggataaatataaagatacacagtctgtttctgctataggtgaggaaaagagccatgaatctaaacatcaggaatcagttaaaaagaagggcagagaggaagaggatatggaagaggaagaaaacgatgatgatgacgatgatgatgatgaagaagatggggtttttgatgatgaagatgaagaggaagagaatatagaatcaaaggtgaccaagcctgtgcaaattcagaagagagcagtcaagagaccagcccctgcaaaaagcagtgatcattctgaggaggacagtgacctagaggaaagcgatagtattgatgatggagaggaactggctcagagtgataccagcactgaggagcaagaggataaagctgtgcaagtctcaaacaaaaagaagaggaaattaccctctgatgtgaatgaagggaaaactgtttttatcagaaatctgtcctttgactcagaagaagaagaacttggggagcttctccaacagtttggagaactcaaatatgtccgcattgtcttgcatccagacacagagcattctaaaggttgtgcatttgcccagttcatgactcaagaagcagctcagaaatgccttctagctgcttctccagagaatgaggctggtgggcttaaactggatggccggcagctcaaggttgacttggcggtgacccgtgatgaggctgcaaagcttcagacgacgaaggtgaagaagccgactggcacccggaatctctatctggcccgagaaggcttgattcgtgctgggacgaaggctgcagagggtgtgagtgctgctgatatggccaaaagagaacggtttgagctgctgaagcatcagaaactcaaggaccagaatatctttgtctcccgaaccaggctctgcctgcacaatctcccaaaggctgtagatgacaaacagctcagaaagctgctgctgagtgctactagtggagagaaaggggtgcgcatcaaggagtgtagagtgatgcgagacctcaaaggagttcatgggaacatgaagggtcagtccctgggctacgcctttgcggagttccaagagcacgagcatgccctgaaagccctccgcctcatcaacaacaatccagaaatctttgggcctctgaagagaccaatagtggagttctctttagaagatcgaagaaaacttaaaatgaaggaattaaggatccagcgcagcttgcaaaaaatgagatccaagcctgcaactggtgagcctcagaaggggcaaccagagcctgcaaaagaccagcaacagaaggcagctcaacaccacacagaggaacaaagcaaggtgcccccagagcagaagagaaaggcgggctctacctcatggaccgggttccagaccaaggctgaagtggagcaggtggagctgcctgatggaaagaagagaagaaaggtcctggcgctcccctcacaccgaggccccaaaatcaggttgcgggacaaaggcaaagtgaagcccgtccatcccaaaaagccaaagccacagataaaccagtggaagcaggagaagcagcaattatcgtccgagcaggtatctaggaaaaaagctaagggaaataagacggaaacccgcttcaaccagctggtcgaacaatataagcagaaattattgggaccttctaaaggagcacctcttgcaaagaggagcaaatggtttgatagttgatgatggcagcaggctgggtaagaagctgggttgtgtactttctggtgacactcctgggctcctccccatcccccgtgtctctcactgagggaaagaaaatccccaagggcactgccactgtgctcggaggtgccctggactgtgtacatctgaactttggtccatcctttgatgtgtggttcgttagccacaaagagaaatatctgaaagtcaacatgatgcttcttgcatattatccagattattgtatgaagttgtgtctataattattaccaatttttattctttatttctcaaatggaaacacctgaaaaagcattctggagtgctgaatttttaagatgtatattttgttaagcatattctctaaatgagatattgtgtggctttttagtaacaacgtcatttctaat

SEQ ID NO: 196515 - protein, 995 aa, Artificial Sequence
  derived and/or modified sequence
MSSLPRRAKVQVQDVVLKDEFSSFSELSSASEEDDKEDSAWEPQKKVPRSRKQPPPKESKPKRMPRVKKNAPQISDGSEVVVVKEELNSSVAIADTALEDRKNKLDTVQTLKTAKTKQKCAAQPHTVRRTKKLKVEEETSKASNLEGESNSSETPSTSTVWGGTCKKEENDDDFTFGQSALKKIKTETYPQGQPVKFPANANSTKEEVEMNWDMVQVLSERTNIEPWVCANIIRLFNDDNTIPFIIRYRKELINNLDADSLREVQQTLEELRAVAKKVHSTIQKIKKEGKMSECLLKAMLNCKTFEELEHVSAPYKTGSKGTKAQRARQLGLEGAARALLEKPGELSLLSYIRPDVKGLSTLQDIEIGVQHILADMIAKDKDTLDFIRNLCQKRHVCIQSSLAKVSSKKVNEKDVDKFLLYQHFSCNIRNIHHHQILAINRGENLKVLTVKVNISDGVKDEFCRWCIQNRWRPRSFARPELMKILYNSLNDSFKRLIYPLLCREFRAKLTSDAEKESVMMFGRNLRQLLLTSPVPGRTLMGVDPGYKHGCKLAIISPTSQILHTDVVYLHCGQGFREAEKIKTLLLNFNCSTVVIGNGTACRETEAYFADLIMKNYFAPLDVVYCIVSEAGASIYSVSPEANKEMPGLDPNLRSAVSIARRVQDPLAELVKIEPKHIGVGMYQHDVSQTLLKATLDSVVEECVSFVGVDINICSEVLLRHIAGLNANRAKNIIEWREKNGPFINREQLKKVKGLGPKSFQQCAGFIRINQDYIRTFCSQQTETSGQIQGVAVTSSADVEVTNEKQGKKKSKTAVNVLLKPNPLDQTCIHPESYDIAMRFLSSIGGTLYEVGKPEMQQKINSFLEKEGMEKIAERLQTTVHTLQVIIDGLSQPESFDFRTDFDKPDFKRSIVCLEDLQIGTVLTGKVENATLFGIFVDIGVGKSGLIPIRNVTEAKLSKTKKRRSLGLGPGERVEVQVLNIDIPRSRITLDLIRVL

SEQ ID NO: 196516 - protein, 514 aa, Artificial Sequence
  derived and/or modified sequence
MKILYNSLNDSFKRLIYPLLCREFRAKLTSDAEKESVMMFGRNLRQLLLTSPVPGRTLMGVDPGYKHGCKLAIISPTSQILHTDVVYLHCGQGFREAEKIKTLLLNFNCSTVVIGNGTACRETEAYFADLIMKNYFAPLDVVYCIVSEAGASIYSVSPEANKEMPGLDPNLRSAVSIARRVQDPLAELVKIEPKHIGVGMYQHDVSQTLLKATLDSVVEECVSFVGVDINICSEVLLRHIAGLNANRAKNIIEWREKNGPFINREQLKKVKGLGPKSFQQCAGFIRINQDYIRTFCSQQTETSGQIQGVAVTSSADVEVTNEKQGKKKSKTAVNVLLKPNPLDQTCIHPESYDIAMRFLSSIGGTLYEVGKPEMQQKINSFLEKEGMEKIAERLQTTVHTLQVIIDGLSQPESFDFRTDFDKPDFKRSIVCLEDLQIGTVLTGKVENATLFGIFVDIGVGKSGLIPIRNVTEAKLSKTKKRRSLGLGPGERVEVQVLNIDIPRSRITLDLIRVL

SEQ ID NO: 196517 - DNA, 3681 bp, Artificial Sequence
  derived and/or modified sequence
gggaaccggaaggtgcggtggcactcacggaatctcgggtcttctgacgtgccgggcgggaagatgtcatcattgccaagaagagcgaaagtacaggtccaggatgtggtactgaaagatgaattttcttcattctctgagttatcatctgcctctgaagaagatgacaaggaagatagtgcctgggagccccaaaagaaagttcccagaagccgtaaacagccccctcccaaggaatccaaaccaaagaggatgcctcgggtgaagaagaatgccccacagatcagtgatggctcagaagtcgttgttgttaaggaggagctgaatagctctgtggctattgctgatactgctttagaagacagaaaaaataaattggatactgtacagactctgaaaacagccaagacaaaacagaaatgtgcagcgcagccacatacagttcgaaggactaaaaagctgaaagttgaagaagaaaccagcaaagccagcaacttagagggtgagagtaatagttcagagacaccatccacaagcactgtgtggggaggtacatgcaagaaggaagagaatgacgatgactttacatttggtcagtccgctttaaagaaaatcaagactgagacatatcctcaggggcagcctgtcaagtttccagcaaatgccaatagtactaaagaggaggtggaaatgaattgggacatggtacaggttttatctgagagaactaatattgaaccttgggtttgtgccaacatcattcgtctctttaatgatgataacacaattcccttcattatacgttatagaaaagagctcattaataaccttgatgctgattccttgagagaagttcagcaaaccctagaagagctacgggctgttgcaaagaaagttcatagtacaatccagaaaattaagaaggaagggaagatgtctgagtgcttgttaaaagccatgctgaattgtaaaacttttgaagaactagaacacgtgtctgctccatataaaactggaagcaaagggactaaagcccagagagcaagacagttgggcttagaaggagcagccagggcactgcttgagaaaccaggggagctcagtctgctatcgtacattaggcctgacgttaaagggctttcaacgcttcaggatattgaaataggagtgcagcatattttagcagatatgattgctaaagacaaagacacgcttgacttcattcggaacttgtgccagaagagacatgtttgtatccagtcatctctggcaaaagtatcctcaaaaaaggtaaatgagaaagatgttgataagtttctgctctaccagcatttttcctgcaacataagaaacattcaccatcatcagattctggcaattaaccgtggagaaaatttgaaggtactgacggttaaggtcaatatttctgatggagtgaaggatgaattctgtaggtggtgcatccaaaacaggtggagaccacgtagctttgcaaggccagagttaatgaagatcttatataattcactgaatgattcctttaaacgccttatttatcctcttctctgtagagaattcagagccaaactaacatcagatgcagagaaggaatcagtaatgatgtttggacggaaccttcgtcagctccttttaacaagccctgttccagggcgcaccttaatgggagtggatcctggttataaacatggttgcaaattagctataatttctcctactagtcagatacttcatactgatgtggtttacttgcattgtggacaaggcttccgagaggcggagaaaataaagacacttttgctgaatttcaactgcagcacagtagtgattggaaatggaactgcctgcagggaaacagaagcttactttgctgacctgataatgaagaattattttgcaccactggatgttgtttactgtatcgtcagtgaagcaggagcatcaatctacagtgtcagccctgaagctaacaaagagatgccagggctggaccctaatttgagaagtgcagtttccatagcaaggcgtgtacaagatccattagctgagctagtgaaaattgagccaaagcacattggagttggaatgtatcagcatgacgtatcccagactttactcaaggcaacactggacagtgttgtagaagaatgtgtcagctttgtgggagtggatattaacatctgttcagaagttttgttaaggcatattgcaggactcaatgccaacagggccaaaaatattattgaatggcgagagaaaaatggaccctttatcaaccgagaacagctgaagaaagtgaaagggctgggcccaaaatccttccaacagtgtgctggcttcatcagaatcaaccaggattatatccgaacgttttgcagtcagcaaactgaaacttcaggccaaattcaaggagttgctgtgacatcttcagcagacgttgaggtcacaaatgagaagcagggcaaaaagaagagcaaaactgcagtgaatgttttactgaagccaaatcctttggaccaaacttgtattcatccagaatcatatgacatagcaatgaggtttttgtcatccattggagggacactgtatgaggttggaaagcctgaaatgcaacaaaaaataaattcattccttgaaaaggaaggaatggagaaaattgcagaaagattgcaaacaacagtacacaccttacaggtcatcatagatggtctcagccagcctgaaagctttgactttcgaacagattttgataaacctgatttcaagagaagcatagtatgcctggaagatctgcagattgggacagttcttacaggcaaagttgagaatgccactctctttggaatttttgtggatataggagtggggaaatctgggctgattcccatacgaaatgtaacagaagcaaaactttcaaaaacaaagaagagaagaagccttggactgggccccggagaaagagtggaagtccaagtactcaacattgacatcccccgatctaggattactctggacctcattcgggtgttatgagtatcccacgaaggccagacgctgattttattttctcatttccacagattgacaaggataagtcagttgtttgtaaactctaggtagcagatgagaaataattcacttaatatcagaaatattttccaaacactttcctttattttttcttctgaataaatagaaaaccaacagtttgatttccttttcccttaaaggaaacaactaatacacattcttatatggctttatgtagtaatagttttctgactaaaattttgttttttattttttgtaatttatctttaactccttttgcattttgtataacagattgcttaacttctacttgccaacatctgccttgctggacttgtatgggattgtcttcttgatttgaattgtaccgtctttgttgacacagtagggctgggcagtgtttaatccttccattttatagatttttttttaatcaggccttttggacttcattcataattttgcaataatctcttttcccttgtcatgcaagccaaaaatataccagtaaaacagattctgacgtgtttgtagttatcaaatgaatggctcgaaacacttctcaaaaggatatacgtattgaccccaacaataaatgtttgtggctagtga

SEQ ID NO: 196518 - DNA, 1980 bp, Artificial Sequence
  derived and/or modified sequence
agtttctgtcccaagctttattatttctgttaccttattcccttctccaccatgggtcttcctgtgtgtcaggattttttattctggcaattaaccgtggagaaaatttgaaggtactgacggttaaggtcaatatttctgatggagtgaaggatgaattctgtaggtggtgcatccaaaacaggtggagaccacgtagctttgcaaggccagagttaatgaagatcttatataattcactgaatgattcctttaaacgccttatttatcctcttctctgtagagaattcagagccaaactaacatcagatgcagagaaggaatcagtaatgatgtttggacggaaccttcgtcagctccttttaacaagccctgttccagggcgcaccttaatgggagtggatcctggttataaacatggttgcaaattagctataatttctcctactagtcagatacttcatactgatgtggtttacttgcattgtggacaaggcttccgagaggcggagaaaataaagacacttttgctgaatttcaactgcagcacagtagtgattggaaatggaactgcctgcagggaaacagaagcttactttgctgacctgataatgaagaattattttgcaccactggatgttgtttactgtatcgtcagtgaagcaggagcatcaatctacagtgtcagccctgaagctaacaaagagatgccagggctggaccctaatttgagaagtgcagtttccatagcaaggcgtgtacaagatccattagctgagctagtgaaaattgagccaaagcacattggagttggaatgtatcagcatgacgtatcccagactttactcaaggcaacactggacagtgttgtagaagaatgtgtcagctttgtgggagtggatattaacatctgttcagaagttttgttaaggcatattgcaggactcaatgccaacagggccaaaaatattattgaatggcgagagaaaaatggaccctttatcaaccgagaacagctgaagaaagtgaaagggctgggcccaaaatccttccaacagtgtgctggcttcatcagaatcaaccaggattatatccgaacgttttgcagtcagcaaactgaaacttcaggccaaattcaaggagttgctgtgacatcttcagcagacgttgaggtcacaaatgagaagcagggcaaaaagaagagcaaaactgcagtgaatgttttactgaagccaaatcctttggaccaaacttgtattcatccagaatcatatgacatagcaatgaggtttttgtcatccattggagggacactgtatgaggttggaaagcctgaaatgcaacaaaaaataaattcattccttgaaaaggaaggaatggagaaaattgcagaaagattgcaaacaacagtacacaccttacaggtcatcatagatggtctcagccagcctgaaagctttgactttcgaacagattttgataaacctgatttcaagagaagcatagtatgcctggaagatctgcagattgggacagttcttacaggcaaagttgagaatgccactctctttggaatttttgtggatataggagtggggaaatctgggctgattcccatacgaaatgtaacagaagcaaaactttcaaaaacaaagaagagaagaagccttggactgggccccggagaaagagtggaagtccaagtactcaacattgacatcccccgatctaggattactctggacctcattcgggtgttatgagtatcccacgaaggccagacgctgattttattttctcatttccacagattgacaaggataagtcagttgtttgtaaactctaggtagcagatgagaaataattcacttaatatcagaaatattttccaaacactttcctttattttttcttctgaataaatagaaaaccaacagtttgatttccttttcccttaaaggaaacaactaatacacattc

SEQ ID NO: 196519 - DNA, 2988 bp, Artificial Sequence
  derived and/or modified sequence
atgagcagcctgcccagaagagccaaggtgcaggtgcaggacgtggtgctgaaggacgagttcagcagcttcagcgagctgagcagcgccagcgaggaggacgacaaggaggacagcgcctgggagccccagaagaaggtgcccagaagcagaaagcagcccccccccaaggagagcaagcccaagagaatgcccagagtgaagaagaacgccccccagatcagcgacggcagcgaggtggtggtggtgaaggaggagctgaacagcagcgtggccatcgccgacaccgccctggaggacagaaagaacaagctggacaccgtgcagaccctgaagaccgccaagaccaagcagaagtgcgccgcccagccccacaccgtgagaagaaccaagaagctgaaggtggaggaggagaccagcaaggccagcaacctggagggcgagagcaacagcagcgagacccccagcaccagcaccgtgtggggcggcacctgcaagaaggaggagaacgacgacgacttcaccttcggccagagcgccctgaagaagatcaagaccgagacctacccccagggccagcccgtgaagttccccgccaacgccaacagcaccaaggaggaggtggagatgaactgggacatggtgcaggtgctgagcgagagaaccaacatcgagccctgggtgtgcgccaacatcatcagactgttcaacgacgacaacaccatccccttcatcatcagatacagaaaggagctgatcaacaacctggacgccgacagcctgagagaggtgcagcagaccctggaggagctgagagccgtggccaagaaggtgcacagcaccatccagaagatcaagaaggagggcaagatgagcgagtgcctgctgaaggccatgctgaactgcaagaccttcgaggagctggagcacgtgagcgccccctacaagaccggcagcaagggcaccaaggcccagagagccagacagctgggcctggagggcgccgccagagccctgctggagaagcccggcgagctgagcctgctgagctacatcagacccgacgtgaagggcctgagcaccctgcaggacatcgagatcggcgtgcagcacatcctggccgacatgatcgccaaggacaaggacaccctggacttcatcagaaacctgtgccagaagagacacgtgtgcatccagagcagcctggccaaggtgagcagcaagaaggtgaacgagaaggacgtggacaagttcctgctgtaccagcacttcagctgcaacatcagaaacatccaccaccaccagatcctggccatcaacagaggcgagaacctgaaggtgctgaccgtgaaggtgaacatcagcgacggcgtgaaggacgagttctgcagatggtgcatccagaacagatggagacccagaagcttcgccagacccgagctgatgaagatcctgtacaacagcctgaacgacagcttcaagagactgatctaccccctgctgtgcagagagttcagagccaagctgaccagcgacgccgagaaggagagcgtgatgatgttcggcagaaacctgagacagctgctgctgaccagccccgtgcccggcagaaccctgatgggcgtggaccccggctacaagcacggctgcaagctggccatcatcagccccaccagccagatcctgcacaccgacgtggtgtacctgcactgcggccagggcttcagagaggccgagaagatcaagaccctgctgctgaacttcaactgcagcaccgtggtgatcggcaacggcaccgcctgcagagagaccgaggcctacttcgccgacctgatcatgaagaactacttcgcccccctggacgtggtgtactgcatcgtgagcgaggccggcgccagcatctacagcgtgagccccgaggccaacaaggagatgcccggcctggaccccaacctgagaagcgccgtgagcatcgccagaagagtgcaggaccccctggccgagctggtgaagatcgagcccaagcacatcggcgtgggcatgtaccagcacgacgtgagccagaccctgctgaaggccaccctggacagcgtggtggaggagtgcgtgagcttcgtgggcgtggacatcaacatctgcagcgaggtgctgctgagacacatcgccggcctgaacgccaacagagccaagaacatcatcgagtggagagagaagaacggccccttcatcaacagagagcagctgaagaaggtgaagggcctgggccccaagagcttccagcagtgcgccggcttcatcagaatcaaccaggactacatcagaaccttctgcagccagcagaccgagaccagcggccagatccagggcgtggccgtgaccagcagcgccgacgtggaggtgaccaacgagaagcagggcaagaagaagagcaagaccgccgtgaacgtgctgctgaagcccaaccccctggaccagacctgcatccaccccgagagctacgacatcgccatgagattcctgagcagcatcggcggcaccctgtacgaggtgggcaagcccgagatgcagcagaagatcaacagcttcctggagaaggagggcatggagaagatcgccgagagactgcagaccaccgtgcacaccctgcaggtgatcatcgacggcctgagccagcccgagagcttcgacttcagaaccgacttcgacaagcccgacttcaagagaagcatcgtgtgcctggaggacctgcagatcggcaccgtgctgaccggcaaggtggagaacgccaccctgttcggcatcttcgtggacatcggcgtgggcaagagcggcctgatccccatcagaaacgtgaccgaggccaagctgagcaagaccaagaagagaagaagcctgggcctgggccccggcgagagagtggaggtgcaggtgctgaacatcgacatccccagaagcagaatcaccctggacctgatcagagtgctgtag

SEQ ID NO: 196520 - DNA, 1545 bp, Artificial Sequence
  derived and/or modified sequence
atgaagatcctgtacaacagcctgaacgacagcttcaagagactgatctaccccctgctgtgcagagagttcagagccaagctgaccagcgacgccgagaaggagagcgtgatgatgttcggcagaaacctgagacagctgctgctgaccagccccgtgcccggcagaaccctgatgggcgtggaccccggctacaagcacggctgcaagctggccatcatcagccccaccagccagatcctgcacaccgacgtggtgtacctgcactgcggccagggcttcagagaggccgagaagatcaagaccctgctgctgaacttcaactgcagcaccgtggtgatcggcaacggcaccgcctgcagagagaccgaggcctacttcgccgacctgatcatgaagaactacttcgcccccctggacgtggtgtactgcatcgtgagcgaggccggcgccagcatctacagcgtgagccccgaggccaacaaggagatgcccggcctggaccccaacctgagaagcgccgtgagcatcgccagaagagtgcaggaccccctggccgagctggtgaagatcgagcccaagcacatcggcgtgggcatgtaccagcacgacgtgagccagaccctgctgaaggccaccctggacagcgtggtggaggagtgcgtgagcttcgtgggcgtggacatcaacatctgcagcgaggtgctgctgagacacatcgccggcctgaacgccaacagagccaagaacatcatcgagtggagagagaagaacggccccttcatcaacagagagcagctgaagaaggtgaagggcctgggccccaagagcttccagcagtgcgccggcttcatcagaatcaaccaggactacatcagaaccttctgcagccagcagaccgagaccagcggccagatccagggcgtggccgtgaccagcagcgccgacgtggaggtgaccaacgagaagcagggcaagaagaagagcaagaccgccgtgaacgtgctgctgaagcccaaccccctggaccagacctgcatccaccccgagagctacgacatcgccatgagattcctgagcagcatcggcggcaccctgtacgaggtgggcaagcccgagatgcagcagaagatcaacagcttcctggagaaggagggcatggagaagatcgccgagagactgcagaccaccgtgcacaccctgcaggtgatcatcgacggcctgagccagcccgagagcttcgacttcagaaccgacttcgacaagcccgacttcaagagaagcatcgtgtgcctggaggacctgcagatcggcaccgtgctgaccggcaaggtggagaacgccaccctgttcggcatcttcgtggacatcggcgtgggcaagagcggcctgatccccatcagaaacgtgaccgaggccaagctgagcaagaccaagaagagaagaagcctgggcctgggccccggcgagagagtggaggtgcaggtgctgaacatcgacatccccagaagcagaatcaccctggacctgatcagagtgctgtag

SEQ ID NO: 196521 - DNA, 2988 bp, Artificial Sequence
  derived and/or modified sequence
atgagcagcctgccccgtagagccaaggtacaagtgcaggacgtagtgttgaaagatgaattttcgagttttagcgaactgagctctgccagcgaggaggatgataaggaggattccgcctgggagcctcagaagaaggtaccaagatcccgaaaacaacccccccccaaggagagcaagccaaaaaggatgcctcgggtgaaaaagaatgccccccagatatctgacgggagcgaggtggtggtggtaaaagaggaactaaacagctccgttgccattgcagacaccgctctggaagatcgcaagaataaactcgatactgtacagaccctcaaaacagcaaagactaagcagaagtgcgccgcacagccccacacagtcagacggactaagaaactgaaggtggaggaagaaacaagtaaagcttctaacttggagggcgagtccaatagctcagaaaccccttcgacatccactgtgtggggcggcacatgcaagaaggaggagaacgacgatgacttcaccttcgggcagtcagccttgaaaaaaattaagaccgagacctatcctcaggggcagcctgtgaagtttcccgctaatgcgaactctactaaagaagaagtagaaatgaactgggacatggttcaggtactgtctgagaggaccaacatcgaaccttgggtctgcgcaaatatcatcagattgttcaacgatgacaataccattccttttatcattcgttataggaaggaacttatcaataacttagatgccgatagtttgcgcgaggtgcaacagaccttggaggaactgcgagccgtggccaagaaggtgcactccacgatccagaaaattaagaaggagggcaagatgtccgaatgtctattgaaagctatgctgaattgcaaaaccttcgaagagcttgagcatgtgagcgcgccctataaaactggcagcaagggcaccaaagcccaacgggctaggcagctaggtttagagggagccgcgcgggcactattggagaagccaggcgaactgtctctcctgagttatatacgaccagacgttaagggtctgtctacactgcaggatatcgaaataggagtgcagcacattttagctgacatgatagccaaggacaaagatactctggacttcattaggaacttatgccagaaacggcatgtatgtatccaatctagcctggcgaaagtgtctagtaagaaggtgaacgagaaggacgttgacaagtttctcctgtatcagcacttcagctgcaacattagaaacattcaccatcaccagatcctcgccatcaaccgtggcgaaaatctgaaagtgctgaccgtgaaagtgaacatttcagacggagtgaaagatgaattctgtcggtggtgtatacagaacagatggcgcccaagaagtttcgcgagaccagaacttatgaagatcctgtataactctcttaatgactcctttaaaagactgatctatccactactttgcagggagttccgggcgaaactgacctcagacgccgaaaaggaaagcgtcatgatgtttggcagaaatctgcggcagctgcttctgacatccccagtccccgggcgaactttgatgggagtggatccaggatacaagcacgggtgcaaacttgcaattatctcccccacaagccaaattctacataccgatgtcgtctatctgcattgcggccagggcttcagggaagcagagaaaatcaagaccttgctgctgaattttaactgcagcacggtcgtcattggtaacgggaccgcctgtagagaaacggaggcttattttgccgatttaataatgaaaaattactttgcacctctggacgtggtgtattgtatcgtgagcgaggcaggcgcaagtatctattccgtcagtcccgaagctaataaggaaatgcccggacttgatcccaatctgaggagcgcagtctcaattgcccgtagggtccaagaccccctggctgagttagttaagattgagcccaagcatattggtgtcggtatgtatcagcatgacgtgtctcagactctgttgaaggccactctggactctgtggtggaggaatgcgtgagcttcgtgggcgtggacattaacatttgttccgaagtcctgctgaggcatatcgccggtcttaacgcaaaccgggcaaagaacatcattgaatggcgtgagaagaacggcccattcattaatagagagcagttgaagaaggtcaagggcctggggcccaaatcgtttcaacagtgtgcaggctttatacgcatcaaccaagactacattcgaacattctgctcacagcagaccgagacaagcggacagattcaaggtgtggcagtgactagctctgccgacgtggaggttacaaacgagaaacaaggcaagaagaagagtaaaacagcagtaaatgtactgctcaagcccaatcccctcgaccagacttgcatccatccggagtcctatgatattgccatgcggtttctatcttctatcggcggaacgctctatgaagtgggaaagcccgaaatgcagcagaaaatcaattctttcctcgagaaagaaggcatggaaaagattgcagagcgtctccaaacgaccgtgcacacccttcaggttatcatcgatgggctctcccaaccggagtccttcgattttagaacggatttcgataagcctgactttaagcgcagcattgtctgtctggaggatctccagatcggaacagtgctgaccgggaaagtagagaatgccaccctgttcggaattttcgtggacattggagtcggcaagtccggcttaatcccgataaggaacgtgacagaggctaagctcagtaagaccaagaaacggaggtccctgggactaggccctggggaaagggtggaagtacaggtgttgaacatcgatattccgcggagtcgtattactctggacttaattagggttctgtag

SEQ ID NO: 196522 - DNA, 1545 bp, Artificial Sequence
  derived and/or modified sequence
atgaagatcctgtataatagtctgaacgattcctttaagcgcctgatctacccactactgtgcagggaattcagagccaaactcacctctgacgctgagaaagaatctgttatgatgtttggcagaaatcttcggcagcttttactgacctcgcccgtgccgggtaggacgctgatgggagtggaccccggttataaacatgggtgcaagctcgccatcataagtcccacatcccagattctccatacagacgttgtttacctccattgtggccagggtttcagggaggcggagaagataaagactcttttgcttaattttaattgctctacagtggtcatcggaaatgggacggcatgtcgagagaccgaagcgtatttcgcagacttgatcatgaagaactacttcgcgcctctggacgtggtatactgcattgtgtccgaagccggagcgtctatttactccgtgtcccctgaagctaacaaggaaatgcccggcctggacccaaaccttagatcagcagtgtccatcgcgaggagggtgcaggacccactggctgaacttgtgaaaatcgagcctaagcacataggagtcggcatgtatcagcatgacgtttctcagactctgctgaaagctaccttagattcagtcgtggaggagtgtgtgtccttcgtgggggttgatatcaatatttgctctgaggttcttctgaggcatatagcgggattgaatgccaacagggccaaaaatatcatcgagtggcgcgagaaaaacgggccatttattaacagggaacagctgaaaaaggtaaaggggctgggccctaagtcgttccagcagtgcgcaggcttcatccggataaatcaagactatatcaggacattctgcagccagcagactgaaacttccggacagattcaaggggtcgcagttacctcatctgctgatgtcgaggtgaccaatgagaaacagggcaaaaaaaagagtaagaccgcagtgaacgtgctcctcaaacccaatcctctggaccagacatgtatccacccggaaagctacgacatcgcgatgcgatttctctcaagcattggaggcaccctgtatgaagtggggaaaccagagatgcagcaaaagattaacagtttcctggagaaggagggcatggaaaaaattgccgaacgactgcaaactactgtgcatacccttcaggtgatcatcgatggcctttcccaacctgagtcctttgacttcagaactgacttcgataagccagactttaagcgctccattgtgtgcctagaagatctgcagatcgggacagtactcacagggaaggtggagaatgctaccctcttcggcatctttgtggatatcggagtgggaaaaagtggactgatccctattaggaacgtgacggaagctaaactctcaaaaaccaaaaagcgtaggtcactcggcctgggccctggcgagagggttgaggtgcaagtgctgaacattgacattcccagatctcggataacgctggacctgatccgtgtcttatag

SEQ ID NO: 196523 - DNA, 2988 bp, Artificial Sequence
  derived and/or modified sequence
atgagcagcctgccccggcgggccaaggtgcaggtgcaggatgtggtgctgaaggatgagttcagcagcttcagcgagctgagcagcgcctctgaagaagatgacaaggaggacagcgcctgggagccccagaagaaggtgcccaggagcaggaagcagcccccacccaaggagagcaagcccaagaggatgccccgggtgaagaagaatgccccccagatcagtgatggcagcgaggtggtggtggtgaaggaggagctgaacagctctgtggccatcgctgacacagccctggaggacaggaagaacaagctggacacagtgcagaccctgaagacagccaagaccaagcagaagtgtgccgcccagccccacacagtgcggaggaccaagaagctgaaggtggaggaggagaccagcaaggccagcaacctggagggggagagcaacagcagcgagacccccagcaccagcacagtgtggggcggcacctgcaagaaggaggagaatgatgatgacttcaccttcggccagagcgccctgaagaagatcaagacagagacctacccccagggccagcctgtgaagtttcctgccaatgccaacagcaccaaggaggaggtggagatgaactgggacatggtgcaggtgctgtctgagaggaccaacatcgagccctgggtgtgtgccaacatcatccgcctcttcaatgatgacaacaccatccccttcatcatccgctacaggaaggagctgatcaacaacctggatgctgacagcctgcgggaggtgcagcagaccctggaggagctgcgggctgtggccaagaaggtgcacagcaccatccagaagatcaagaaggagggcaagatgtctgaatgtctgctgaaggccatgctgaactgcaagacctttgaggagctggagcacgtgtctgccccctacaagacaggcagcaagggcaccaaggcccagagggcccggcagctgggcctggagggcgccgcccgggccctgctggagaagccaggagagctgagcctgctgagctacatccggccagatgtgaagggcctgagcaccctgcaggacattgaaattggagtgcagcacatcctggccgacatgattgccaaggacaaggacaccctggacttcatccggaacctgtgccagaagagacatgtgtgcatccagagcagcctggccaaggtgagcagcaagaaggtgaatgagaaggatgtggacaagttcctgctgtaccagcacttcagctgcaacatccggaacatccaccaccaccagatcctggccatcaacagaggagagaacctgaaggtgctgactgtgaaggtgaacatcagtgatggagtgaaggatgagttctgccgctggtgcatccagaaccgctggaggcccaggagctttgcccggcctgagctgatgaagatcctgtacaacagcctgaatgacagcttcaagaggctcatctaccccctgctgtgccgggagttccgggccaagctgaccagtgatgctgagaaggagagcgtgatgatgtttggaagaaacctgcggcagctgctgctgaccagccctgtgcccggccgcaccctgatgggcgtggaccccggctacaagcacggctgcaagctggccatcatcagccccaccagccagatcctgcacacagatgtggtgtacctgcactgcggccagggcttccgggaggccgagaagatcaagaccctgctgctgaacttcaactgcagcacagtggtgattggaaatggaacagcctgccgggagacagaggcctactttgctgacctgatcatgaagaactactttgcccccctggatgtggtgtactgcatcgtgtctgaggccggggccagcatctacagcgtgtccccagaggccaacaaggagatgcctggcctggaccccaacctgcggtctgctgtgtccatcgcccggcgggtgcaggaccccctggccgagctggtgaagattgagcccaagcacatcggcgtgggcatgtaccagcatgatgtgtcccagaccctgctgaaggccaccctggacagcgtggtggaggagtgtgtgtcctttgtgggcgtggacatcaacatctgcagcgaggtgctgctgcggcacatcgccggcctgaatgccaacagagccaagaacatcatcgagtggagggagaagaatggccccttcatcaaccgggagcagctgaagaaggtgaagggcctgggccccaagagcttccagcagtgtgccggcttcatccgcatcaaccaggactacatccgcaccttctgcagccagcagacagagaccagcggccagatccagggcgtggccgtgaccagcagcgcagatgtggaggtgaccaatgagaagcagggcaagaagaagagcaagacagctgtgaatgtgctgctgaagcccaaccccctggaccagacctgcatccaccctgagagctatgacatcgccatgaggttcctgagcagcattggaggcaccctgtatgaggtgggcaagccagagatgcagcagaagatcaacagcttcctggagaaggagggcatggagaagattgctgagcggctgcagaccaccgtgcacaccctgcaggtgatcattgatggcctgagccagcctgagagctttgacttcagaacagactttgacaagccagacttcaagaggagcatcgtgtgcctggaggacctgcagatcggcaccgtgctgaccgggaaggtggagaatgccaccctgtttggcatctttgtggacatcggcgtgggcaagagcggcctcatccccatcagaaatgtgacagaggccaagctgagcaagaccaagaagaggaggagcctgggcctgggccctggagagcgggtggaggtgcaggtgctgaacatcgacatccccaggagccgcatcaccctggacctgatccgggtgctgtag

SEQ ID NO: 196524 - DNA, 1545 bp, Artificial Sequence
  derived and/or modified sequence
atgaagatcctgtacaacagcctgaatgacagcttcaagaggctcatctaccccctgctgtgccgggagttccgggccaagctgaccagtgatgctgagaaggagagcgtgatgatgtttggaagaaacctgcggcagctgctgctgaccagccctgtgcccggccgcaccctgatgggcgtggaccccggctacaagcacggctgcaagctggccatcatcagccccaccagccagatcctgcacacagatgtggtgtacctgcactgcggccagggcttccgggaggccgagaagatcaagaccctgctgctgaacttcaactgcagcacagtggtgattggaaatggaacagcctgccgggagacagaggcctactttgctgacctgatcatgaagaactactttgcccccctggatgtggtgtactgcatcgtgtctgaggccggggccagcatctacagcgtgtccccagaggccaacaaggagatgcctggcctggaccccaacctgcggtctgctgtgtccatcgccaggagagtgcaggaccccctggccgagctggtgaagattgagcccaagcacatcggcgtgggcatgtaccagcatgatgtgtcccagaccctgctgaaggccaccctggacagcgtggtggaggagtgtgtgtcctttgtgggcgtggacatcaacatctgcagcgaggtgctgctgcggcacatcgccggcctgaatgccaacagagccaagaacatcatcgagtggagggagaagaatggccccttcatcaaccgggagcagctgaagaaggtgaagggcctgggccccaagagcttccagcagtgtgccggcttcatccgcatcaaccaggactacatccgcaccttctgcagccagcagacagagaccagcggccagatccagggcgtggccgtgaccagcagcgcagatgtggaggtgaccaatgagaagcagggcaagaagaagagcaagacagctgtgaatgtgctgctgaagcccaaccccctggaccagacctgcatccaccctgagagctatgacatcgccatgaggttcctgagcagcatcggcggcaccctgtatgaggtgggcaagccagagatgcagcagaagatcaacagcttcctggagaaggagggcatggagaagattgctgagcggctgcagaccaccgtgcacaccctgcaggtgatcattgatggcctgagccagcctgagagctttgacttcagaacagactttgacaagccagacttcaagaggagcatcgtgtgcctggaggacctgcagattggaacagtgctgaccgggaaggtggagaatgccaccctgtttggcatctttgtggacattggagtgggcaagagcggcctcatccccatcagaaatgtgacagaggccaagctgagcaagaccaagaagagaagaagcctgggcctgggccctggagagcgggtggaggtgcaggtgctgaacatcgacatccccaggagccgcatcaccctggacctgatccgggtgctgtag

SEQ ID NO: 196525 - DNA, 2988 bp, Artificial Sequence
  derived and/or modified sequence
atgagcagcctgccccggcgggccaaggtgcaggtgcaggacgtggtgctgaaggacgaattcagttccttcagcgagctgagctccgcaagtgaggaggatgataaggaagatagcgcttgggagccacaaaagaaagtacccaggagtcgcaaacagcccccccctaaggagtctaagcccaaacgcatgccccgcgttaagaagaacgcccctcagatctcagatggctcggaggttgtagtggtcaaagaagagttaaattcatcagtggcaattgcggacacagctttggaggaccgcaaaaataagctggatactgtccagacattgaaaactgccaaaacaaagcagaaatgtgcagcccaacctcacacggtccggaggactaagaaactcaaagtagaggaggagactagcaaagcctctaacctcgagggggaaagtaatagctccgaaaccccatctactagcacagtctggggaggcacctgtaaaaaggaggaaaatgacgacgatttcacatttggacagagcgccttgaagaagattaagaccgagacatacccgcagggacagcctgttaaattccccgccaatgccaacagcactaaggaagaggtggagatgaactgggacatggtccaggtgctctcagagcgcactaacatagaaccctgggtgtgcgcgaacatcataaggctctttaacgacgacaatacaatccctttcatcatcagatacagaaaagagcttataaacaatctggacgccgacagtctcagagaggtacagcagactctggaagagcttcgggcagtggccaaaaaagtacattcaactatacagaagataaagaaagaaggcaaaatgagcgagtgcttactgaaggccatgctgaactgcaaaacattcgaggagctggagcatgtctctgctccatacaaaaccggcagcaaggggacgaaggcccagagggctagacagttggggctggagggcgccgccagggccctgcttgagaagccgggcgagttatccttgctttcgtatatcagacctgacgtgaaggggctcagcacccttcaggacattgagataggcgtgcagcacatcctggcggatatgattgcaaaagataaagacactctggacttcatcagaaatctgtgtcagaagcggcacgtctgcattcagtcctccctagccaaggtctcaagcaagaaagtaaatgagaaagacgtcgacaagttcttgctgtaccagcacttttcatgcaacatccgaaatattcaccaccaccaaattttggccatcaatcgtggggagaaccttaaggtgctgaccgtaaaggtcaatataagcgacggtgtcaaggatgagttttgtcgttggtgtatccagaatcgttggcgcccacgctctttcgctcgccccgaactgatgaagatcctttacaactcactgaacgattctttcaagcgccttatctatcccctgttgtgccgcgagtttcgagcaaagttgaccagcgacgccgagaaggagagtgtgatgatgttcggcaggaacctgagacagttgttgctgactagccccgttcctggaaggacactgatgggggttgatcccggctacaaacatggctgcaaattggccatcatctccccaacctcacagatcctgcatacagacgtcgtatacctccactgcggacagggatttagagaagccgaaaagatcaagactctccttctcaatttcaactgtagcaccgtggtgatcgggaatgggactgcctgcagagagacggaagcatacttcgctgatctcatcatgaaaaattatttcgctccattggatgtggtgtattgcatagttagtgaggccggagcctcgatctactcggtgtccccagaggcaaataaagaaatgcccgggctagatccaaatttgcgctccgctgtgtcgattgccagaagagtccaggacccactggccgaattggtcaagatcgagcctaaacacattggagtggggatgtatcagcatgacgtgagccagaccctccttaaggctactcttgactctgtcgtggaagaatgcgtgtcctttgtaggggtcgatatcaacatatgcagtgaagtacttctgagacatatcgctgggttgaacgccaatcgggccaaaaacatcattgagtggcgggagaaaaatggcccattcatcaatcgggaacagctaaagaaggtgaaaggcctgggacctaaatcttttcagcagtgcgctggattcattcgcattaatcaggattatatccggaccttctgctctcaacaaactgaaaccagtggacagatacagggtgtggctgttacttcttccgccgatgttgaggtaaccaacgaaaaacaaggcaagaaaaaaagcaagaccgcagtgaatgttctcctgaagccaaaccctctggatcaaacctgtatccatcccgagtcgtacgatattgctatgcggttcctctcttcgattggaggaacgttgtacgaagtgggcaagccagaaatgcagcagaagataaattccttcctcgagaaagagggcatggagaagatagctgaacggctgcagacaaccgttcataccctgcaggtaatcatcgacggcctatcccagcctgaatcattcgattttcgcactgattttgacaaacccgattttaagagatcaatcgtctgcttggaggacttacagatcgggactgtgctgaccggtaaggtcgaaaatgctacattgttcggcattttcgtcgacattggcgtcggcaaatcaggacttatccctataagaaacgtgactgaggcaaagctgtctaaaaccaagaagaggcgcagtctcgggttggggccgggggagcgtgtcgaagttcaagtgctgaacatcgatataccacgttcaagaattacactcgacctgatccgcgttctctag

SEQ ID NO: 196526 - DNA, 1545 bp, Artificial Sequence
  derived and/or modified sequence
atgaagatcctgtacaacagcctgaacgacagcttcaagcggctgatttaccctctgctgtgtcgagagtttcgcgctaagctgacatctgacgctgagaaagagagcgtgatgatgtttggcaggaacttgcggcagttgctgctgacaagccctgtgccaggccggaccctgatgggtgtcgatccaggttacaagcatggatgcaagctcgcaatcatctctccaacatcacaaattctccacacagatgttgtgtatctgcactgtgggcagggattcagagaggccgaaaaaatcaagacacttttgctaaatttcaattgcagcaccgtggtcattgggaacgggactgcgtgtcgggagacagaggcctacttcgctgacttgataatgaaaaattattttgcacctttagacgtcgtgtactgcatagtgagcgaggccggggcttcaatctattcggtgtcccccgaggccaataaggaaatgcctggactggatcctaacctgcgcagcgcagttagtatcgctcgaagagttcaggaccctttggcagagttagttaaaatagagcctaaacacatcggtgttggcatgtaccaacacgatgtgagtcagacgttactgaaagctactctggatagtgttgttgaggagtgcgtatcattcgtgggggtcgatatcaacatctgttcggaagtcttgctgcggcacatcgccggcctgaatgcaaatcgggctaaaaatattatcgagtggcgggaaaagaatggacctttcataaatcgggaacagctgaaaaaggtcaaaggattaggccccaaatccttccagcagtgcgcagggtttatccgcataaaccaagactacatacgaaccttttgttcccaacagacagagactagcggacaaattcagggggtggcagtcacatccagtgccgacgtcgaggtcaccaatgagaagcagggtaaaaagaagtccaagaccgcagtcaacgtacttctgaaacccaatcctctggaccagacctgtatccatcccgaatcctatgacatcgctatgaggttccttagtagcatcgggggtactttgtacgaagtcggcaagccagaaatgcagcagaaaatcaactcctttctggagaaagaagggatggagaagatcgctgagcggctacagacaactgttcacactttacaagtcattatagacggcctatcccagcccgagtcattcgattttaggaccgacttcgacaagcctgatttcaagaggagcatcgtttgcctggaagacctgcaaatcggcacggtgctgaccgggaaagtggagaatgctaccttgtttggaatttttgtggatatcggggtggggaaaagcggactcattccaattcgtaacgttaccgaggcaaaactgtcaaagactaaaaagcgcaggagtctagggttgggtcccggtgagagagtggaagtccaagtgttaaacatcgacattcctcgtagccggataacgcttgacctgattagagtgctgtag

SEQ ID NO: 196527 - DNA, 2988 bp, Artificial Sequence
  derived and/or modified sequence
atgtcttcactgcccaggcgagccaaagtgcaggttcaggacgtggttctgaaggatgaattttctagcttctcagaattgtcgtccgctagcgaggaggatgataaggaagattccgcatgggaaccacagaagaaggtccctcgctcacgtaagcaaccaccccctaaggagtcgaagccaaaacggatgcctagggtgaaaaagaacgcaccccagataagcgatggctcggaggtggtcgttgttaaagaagagttgaactcctccgttgcaatcgctgatacagcgctcgaggaccgaaagaataaactggacacggtgcagaccctgaaaaccgctaagactaagcaaaaatgcgccgctcagccccacacagtgcgaagaacaaagaagctgaaggtcgaggaagagaccagtaaggcatcaaacctcgaaggggagtcaaacagcagcgaaaccccgagtaccagcacagtgtgggggggtacatgtaaaaaagaggagaacgacgacgattttactttcggacagtctgcccttaaaaagatcaagaccgagacgtacccccagggacagcctgtgaagttcccggcaaacgctaacagcactaaagaggaggtagagatgaactgggatatggtgcaagtgcttagcgagcgcacaaacatcgagccgtgggtctgtgccaacatcatccggctgttcaacgacgataacaccataccgtttattatccggtataggaaggagctcatcaataatctcgacgccgattccttgcgggaggtgcagcagaccctggaagaactgagggccgtcgctaaaaaggttcacagcacaattcagaagatcaagaaggagggcaagatgagcgagtgcctcttaaaggcgatgttgaactgcaaaactttcgaagagcttgaacacgtgtctgcgccttataaaacgggatccaaggggacgaaggcacagcgggcacggcagctcggcttggagggcgctgccagagcgctgctggagaagcccggagaactttccctgctcagctacataagaccggatgtaaagggtttaagtacacttcaagacatcgaaatcggcgttcaacatatcctggcagacatgatagcaaaagataaagacacgctcgattttatcaggaatctgtgccagaaacgccatgtgtgcatccaaagctccctggccaaagtatcttcaaagaaggttaacgaaaaggacgtagacaagtttctcttgtaccagcactttagctgtaacatcaggaatattcaccaccatcagatcctggccatcaaccggggagaaaacctcaaagtactcacagtgaaagtgaacatttctgacggcgttaaagacgaattctgccgctggtgtatccagaaccgttggaggccacgctcatttgccagacccgaactcatgaaaatcttgtacaattctctaaacgacagttttaagaggctgatctaccctctcttgtgcagggagtttagagctaagcttacgagcgatgctgagaaggagtcagtgatgatgtttggtaggaatcttcggcagctgctgcttacaagtcctgtcccaggcaggactttaatgggggtggatcctggttacaagcacggctgcaagctggcgattatctctccaactagccaaatattgcacaccgacgtagtttacctccattgtggccagggcttccgtgaggcagagaaaatcaaaacactgttattgaattttaactgttctaccgtagtgataggaaacggaaccgcttgccgagagactgaagcctactttgctgatttgataatgaaaaattatttcgcacctctggacgttgtgtactgcattgtgagtgaggctggcgctagcatttacagcgtgagtccggaagctaataaagagatgccaggacttgaccctaacttacgcagcgcagtatcgatcgcaaggagagttcaagatccactggccgagttggtcaagatcgaacccaagcacatcggggtcggaatgtaccaacatgatgtgagccagacactcctgaaggccaccctggactctgtcgtggaggaatgtgtgagcttcgttggggtggacattaatatatgttcagaagtgctcctacggcatatcgctgggctgaacgccaatcgagcgaaaaatattatcgagtggcgcgagaaaaatggtcctttcatcaaccgcgagcaactaaagaaagttaaggggctgggcccaaaaagcttccaacagtgtgccggttttatacgaattaatcaggattacatacggactttttgttcacaacagactgagacctccggccagatccagggcgtggccgtgacttcttctgccgatgtggaggtgacgaatgaaaagcagggtaagaaaaaaagtaagacagctgtcaacgtgcttttgaagcctaacccgctagaccagacttgcattcacccggagagctatgacatagcaatgcggttcctctccagcatcgggggtactttgtatgaggtcggtaaacctgaaatgcagcaaaagatcaacagttttcttgaaaaagaggggatggaaaagattgccgagcgcctgcagactaccgtgcatacacttcaggttatcatcgacggcctgagccagcccgaatctttcgattttcggactgactttgacaaaccggattttaaaagaagcatcgtgtgcctggaagacttacaaatcgggaccgtcctgactggcaaggtagagaacgccacactatttggcatctttgttgatataggagtgggtaagtcgggcctgatccccattaggaatgtgacagaggccaaactaagtaagaccaaaaagcgaaggtctctaggtctcgggcctggcgagcgcgtggaggtacaggtgctcaacatcgacattccacgatcgcggatcactctggacctcattcgagtgttatag

SEQ ID NO: 196528 - DNA, 1545 bp, Artificial Sequence
  derived and/or modified sequence
atgaagatcctatacaattccttaaacgacagttttaagcggttgatctacccattgctttgccgcgaatttcgtgccaagttaacttctgatgcagagaaagaaagtgtgatgatgtttggcagaaatctgaggcagctgctgctgacttctccagtcccagggaggaccctgatgggagtggacccaggatataagcatggatgcaagctagctataatttctcctactagccagatcttgcacacggacgttgtatatctgcactgtgggcagggcttcagagaagcggagaaaattaagacacttttactcaattttaactgttcgaccgtggtcatcggcaatggtacagcctgccgagaaaccgaggcatacttcgcagacttgattatgaagaattacttcgctcccttggacgtggtgtattgcatagttagtgaggcaggggcaagcatctactccgtttcaccagaggccaataaggagatgccgggtctggaccccaatttgcggagtgcagtgtctattgccaggcgggtgcaggaccctctggcagagctggtcaagattgagccaaagcacatcggcgtgggcatgtaccagcatgatgtgagtcaaaccttactaaaggctaccctggactccgtcgtggaggaatgcgttagttttgttggtgtggacatcaatatttgttctgaggtgttacttcgtcatatcgcaggcctgaatgcgaatcgggcaaagaacattattgagtggcgagaaaaaaacggcccttttatcaatcgggaacaacttaagaaagtgaaaggactcggcccaaagtccttccagcagtgtgccggattcatcaggattaatcaggattatatcagaacattctgtagtcagcaaactgaaacatccggacagattcagggagttgccgtcaccagctctgcagacgtcgaagttacaaatgagaaacaagggaaaaaaaaaagcaagacggcagtgaacgtgctgctcaagcctaatcctctcgatcagacctgtatccatcccgagtcttacgatattgctatgcgcttcctatcctccatcggcggaactctttacgaggtcggtaagccagaaatgcagcagaagataaatagttttcttgagaaggagggcatggagaaaatcgctgaacggctgcaaacgactgttcacacactccaggtgattattgacgggttaagccaacccgaaagcttcgatttccggacagacttcgacaaacctgacttcaaacgctcaatagtgtgtctggaggatctgcagattggaactgtcctgaccggcaaggtagaaaacgctaccctgtttggtatctttgtggacatcggcgtcggcaagagcggcctgatcccgataaggaacgtgactgaagctaaactgtctaaaaccaaaaagcgccgatcacttggccttggtcctggagagcgtgtggaggtacaggtgctaaacatagatatccccaggagccgcatcacactggacttgatcagggtcctgtag

SEQ ID NO: 196529 - protein, 3585 aa, Artificial Sequence
  derived and/or modified sequence
MVLESVVADLLNRFLGDYVENLNKSQLKLGIWGGNVALDNLQIKENALSELDVPFKVKAGQIDKLTLKIPWKNLYGEAVVATLEGLYLLVVPGASIKYDAVKEEKSLQDVKQKELSRIEEALQKAAEKDKPKEAKKDTFVEKLATQVIKNVQVKITDIHIKYEDDVTDPKRPLSFGVTLGELSLLTANEHWTPCILNEADKIIYKLIRLDSLSAYWNVNCSMSYQRSREQILDQLKNEILTSGNIPPNYQYIFQPISASAKLYMNPYAESELKTPKLDCNIEIQNIAIELTKPQYLSMIDLLESVDYMVRNAPYRKYKPYLPLHTNGRRWWKYAIDSVLEVHIRRYTQMWSWSNIKKHRQLLKSYKIAYKNKLTQSKVSEEIQKEIQDLEKTLDVFNIILARQQAQVEVIRSGQKLRKKSADTGEKRGGWFSGLWGKKESKKKDEESLIPETIDDLMTPEEKDKLFTAIGYSESTHNLTLPKQYVAHIMTLKLVSTSVTIRENKNIPEILKIQIIGLGTQVSQRPGAQALKVEAKLEHWYITGLRQQDIVPSLVASIGDTTSSLLKIKFETNPEDSPADQTLIVQSQPVEVIYDAKTVNAVVEFFQSNKGLDLEQITSATLMKLEEIKERTATGLTHIIETRKVLDLRINLKPSYLVVPQTGFHHEKSDLLILDFGTFQLNSKDQGLQKTTNSSLEEIMDKAYDKFDVEIKNVQLLFARAEETWKKCRFQHPSTMHILQPMDIHVELAKAMVEKDIRMARFKVSGGLPLMHVRISDQKMKDVLYLMNSIPLPQKSSAQSPERQVSSIPIISGGTKGLLGTSLLLDTVESESDDEYFDAEDGEPQTCKSMKGSELKKAAEVPNEELINLLLKFEIKEVILEFTKQQKEEDTILVFNVTQLGTEATMRTFDLTVVSYLKKISLDYHEIEGSKRKPLHLISSSDKPGLDLLKVEYIKADKNGPSFQTAFGKTEQTVKVAFSSLNLLLQTQALVASINYLTTIIPSDDQSISVAKEVQISTEKQQKNSTLPKAIVSSRDSDIIDFRLFAKLNAFCVIVCNEKNNIAEIKIQGLDSSLSLQSRKQSLFARLENIIVTDVDPKTVHKKAVSIMGNEVFRFNLDLYPDATEGDLYTDMSKVDGVLSLNVGCIQIVYLHKFLMSLLNFLNNFQTAKESLSAATAQAAERAATSVKDLAQRSFRVSINIDLKAPVIVIPQSSISTNAVVVDLGLIRVHNQFSLVSDEDYLNPPVIDRMDVQLTKLTLYRTVIQPGIYHPDIQLLHPINLEFLVNRNLAASWYHKVPVVEIKGHLDSMNVSLNQEDLNLLFRILTENLCEGTEDLDKVKPRVQETGEIKEPLEISISQDVHDSKNTLTTGVEEIRSVDIINMLLNFEIKEVVVTLMKKSEKKGRPLHELNVLQLGMEAKVKTYDMTAKAYLKKISMQCFDFTDSKGEPLHIINSSNVTDEPLLKMLLTKADSDGPEFKTIHDSTKQRLKVSFASLDLVLHLEALLSFMDFLSSAAPFSEPSSSEKESELKPLVGESRSIAVKAVSSNISQKDVFDLKITAELNAFNVFVCDQKCNIADIKIHGMDASISVKPKQTDVFARLKDIIVMNVDLQSIHKKAVSILGDEVFRFQLTLYPDATEGEAYADMSKVDGKLSFKVGCIQIVYVHKFFMSLLNFLNNFQTAKEALSTATVQAAERAASSMKDLAQKSFRLLMDINLKAPVIIIPQSSVSPNAVIADLGLIRVENKFSLVPMEHYSLPPVIDKMNIELTQLKLSRTILQASLPQNDIEILKPVNMLLSIQRNLAAAWYVQIPGMEIKGKLKPMQVALSEDDLTVLMKILLENLGEASSQPSPTQSVQETVRVRKVDVSSVPDHLKEQEDWTDSKLSMNQIVSLQFDFHFESLSIILYNNDINQESGVAFHNDSFQLGELRLHLMASSGKMFKDGSMNVSVKLKTCTLDDLREGIERATSRMIDRKNDQDNNSSMIDISYKQDKNGSQIDAVLDKLYVCASVEFLMTVADFFIKAVPQSPENVAKETQILPRQTATGKVKIEKDDSVRPNMTLKAMITDPEVVFVASLTKADAPALTASFQCNLSLSTSKLEQMMEASVRDLKVLACPFLREKRGKNITTVLQPCSLFMEKCTWASGKQNINIMVKEFIIKISPIILNTVLTIMAALSPKTKEDGSKDTSKEMENLWGIKSINDYNTWFLGVDTATEITESFKGIEHSLIEENCGVVVESIQVTLECGLGHRTVPLLLAESKFSGNIKNWTSLMAAVADVTLQVHYYNEIHAVWEPLIERVEGKRQWNLRLDVKKNPVQDKSLLPGDDFIPEPQMAIHISSGNTMNITISKSCLNVFNNLAKGFSEGTASTFDYSLKDRAPFTVKNAVGVPIKVKPNCNLRVMGFPEKSDIFDVDAGQNLELEYASMVPSSQGNLSILSRQESSFFTLTIVPHGYTEVANIPVARPGRRLYNVRNPNASHSDSVLVQIDATEGNKVITLRSPLQIKNHFSIAFIIYKFVKNVKLLERIGIARPEEEFHVPLDSYRCQLFIQPAGILEHQYKESTTYISWKEELHRSREVRCMLQCPSVEVSFLPLIVNTVALPDELSYICTHGEDWDVAYIIHLYPSLTLRNLLPYSLRYLLEGTAETHELAEGSTADVLHSRISGEIMELVLVKYQGKNWNGHFRIRDTLPEFFPVCFSSDSTEVTTVDLSVHVRRIGSRMVLSVFSPYWLINKTTRVLQYRSEDIHVKHPADFRDIILFSFKKKNIFTKNKVQLKISTSAWSSSFSLDTVGSYGCVKCPANNMEYLVGVSIKMSSFNLSRIVTLTPFCTIANKSSLELEVGEIASDGSMPTNKWNYIASSECLPFWPESLSGKLCVRVVGCEGSSKPFFYNRQDNGTLLSLEDLNGGILVDVNTAEHSTVITFSDYHEGSAPALIMNHTPWDILTYKQSGSPEEMVLLPRQARLFAWADPTGTRKLTWTYAANVGEHDLLKDGCGQFPYDANIQIHWVSFLDGRQRVLLFTDDVALVSKALQAEEMEQADYEITLSLHSLGLSLVNNESKQEVSYIGITSSGVVWEVKPKQKWKPFSQKQIILLEQSYQKHQISRDHGWIKLDNNFEVNFDKDPMEMRLPIRSPIKRDFLSGIQIEFKQSSHQRSLRARLYWLQVDNQLPGAMFPVVFHPVAPPKSIALDSEPKPFIDVSVITRFNEYSKVLQFKYFMVLIQEMALKIDQGFLGAIIALFTPTTDPEAERRRTKLIQQDIDALNAELMETSMTDMSILSFFEHFHISPVKLHLSLSLGSGGEESDKEKQEMFAVHSVNLLLKSIGATLTDVDDLIFKLAYYEIRYQFYKRDQLIWSVVRHYSEQFLKQMYVLVLGLDVLGNPFGLIRGLSEGVEALFYEPFQGAVQGPEEFAEGLVIGVRSLFGHTVGGAAGVVSRITGSVGKGLAAITMDKEYQQKRREELSRQPRDFGDSLARGGKGFLRGVVGGVTGIITKPVEGAKKEGAAGFFKGIGKGLVGAVARPTGGIVDMASSTFQGIQRAAESTEEVSSLRPPRLIHEDGIIRPYDRQESEGSDLLEQELEIQE

SEQ ID NO: 196530 - protein, 1133 aa, Artificial Sequence
  derived and/or modified sequence
MDVLAEEFGNLTPEQLAAPIPTVEEKWRLLPAFLKVKGLVKQHIDSFNYFINVEIKKIMKANEKVTSDADPMWYLKYLNIYVGLPDVEESFNVTRPVSPHECRLRDMTYSAPITVDIEYTRGSQRIIRNALPIGRMPIMLRSSNCVLTGKTPAEFAKLNECPLDPGGYFIVKGVEKVILIQEQLSKNRIIVEADRKGAVGASVTSSTHEKKSRTNMAVKQGRFYLRHNTLSEDIPIVIIFKAMGVESDQEIVQMIGTEEHVMAAFGPSLEECQKAQIFTQMQALKYIGNKVRRQRMWGGGPKKTKIEEARELLASTILTHVPVKEFNFRAKCIYTAVMVRRVILAQGDNKVDDRDYYGNKRLELAGQLLSLLFEDLFKKFNSEMKKIADQVIPKQRAAQFDVVKHMRQDQITNGMVNAISTGNWSLKRFKMDRQGVTQVLSRLSYISALGMMTRISSQFEKTRKVSGPRSLQPSQWGMLCPSDTPEGEACGLVKNLALMTHITTDMEDGPIVKLASNLGVEDVNLLCGEELSYPNVFLVFLNGNILGVIRDHKKLVNTFRLMRRAGYINEFVSISTNLTDRCVYISSDGGRLCRPYIIVKKQKPAVTNKHMEELAQGYRNFEDFLHESLVEYLDVNEENDCNIALYEHTINKDTTHLEIEPFTLLGVCAGLIPYPHHNQSPRNTYQCAMGKQAMGTIGYNQRNRIDTLMYLLAYPQKPMVKTKTIELIEFEKLPAGQNATVAVMSYSGYDIEDALVLNKASLDRGFGRCLVYKNAKCTLKRYTNQTFDKVMGPMLDAATRKPIWRHEILDADGICSPGEKVENKQVLVNKSMPTVTQIPLEGSNVPQQPQYKDVPITYKGATDSYIEKVMISSNAEDAFLIKMLLRQTRRPEIGDKFSSRHGQKGVCGLIVPQEDMPFCDSGICPDIIMNPHGFPSRMTVGKLIELLAGKAGVLDGRFHYGTAFGGSKVKDVCEDLVRHGYNYLGKDYVTSGITGEPLEAYIYFGPVYYQKLKHMVLDKMHARARGPRAVLTRQPTEGRSRDGGLRLGEMERDCLIGYGASMLLLERLMISSDAFEVDVCGQCGLLGYSGWCHYCKSSCHVSSLRIPYACKLLFQELQSMNIIPRLKLSKYNE

SEQ ID NO: 196531 - protein, 1075 aa, Artificial Sequence
  derived and/or modified sequence
MKANEKVTSDADPMWYLKYLNIYVGLPDVEESFNVTRPVSPHECRLRDMTYSAPITVDIEYTRGSQRIIRNALPIGRMPIMLRSSNCVLTGKTPAEFAKLNECPLDPGGYFIVKGVEKVILIQEQLSKNRIIVEADRKGAVGASVTSSTHEKKSRTNMAVKQGRFYLRHNTLSEDIPIVIIFKAMGVESDQEIVQMIGTEEHVMAAFGPSLEECQKAQIFTQMQALKYIGNKVRRQRMWGGGPKKTKIEEARELLASTILTHVPVKEFNFRAKCIYTAVMVRRVILAQGDNKVDDRDYYGNKRLELAGQLLSLLFEDLFKKFNSEMKKIADQVIPKQRAAQFDVVKHMRQDQITNGMVNAISTGNWSLKRFKMDRQGVTQVLSRLSYISALGMMTRISSQFEKTRKVSGPRSLQPSQWGMLCPSDTPEGEACGLVKNLALMTHITTDMEDGPIVKLASNLGVEDVNLLCGEELSYPNVFLVFLNGNILGVIRDHKKLVNTFRLMRRAGYINEFVSISTNLTDRCVYISSDGGRLCRPYIIVKKQKPAVTNKHMEELAQGYRNFEDFLHESLVEYLDVNEENDCNIALYEHTINKDTTHLEIEPFTLLGVCAGLIPYPHHNQSPRNTYQCAMGKQAMGTIGYNQRNRIDTLMYLLAYPQKPMVKTKTIELIEFEKLPAGQNATVAVMSYSGYDIEDALVLNKASLDRGFGRCLVYKNAKCTLKRYTNQTFDKVMGPMLDAATRKPIWRHEILDADGICSPGEKVENKQVLVNKSMPTVTQIPLEGSNVPQQPQYKDVPITYKGATDSYIEKVMISSNAEDAFLIKMLLRQTRRPEIGDKFSSRHGQKGVCGLIVPQEDMPFCDSGICPDIIMNPHGFPSRMTVGKLIELLAGKAGVLDGRFHYGTAFGGSKVKDVCEDLVRHGYNYLGKDYVTSGITGEPLEAYIYFGPVYYQKLKHMVLDKMHARARGPRAVLTRQPTEGRSRDGGLRLGEMERDCLIGYGASMLLLERLMISSDAFEVDVCGQCGLLGYSGWCHYCKSSCHVSSLRIPYACKLLFQELQSMNIIPRLKLSKYNE

SEQ ID NO: 196532 - DNA, 3402 bp, Artificial Sequence
  derived and/or modified sequence
atggacgtgctggccgaggagttcggcaacctgacccccgagcagctggccgcccccatccccaccgtggaggagaagtggagactgctgcccgccttcctgaaggtgaagggcctggtgaagcagcacatcgacagcttcaactacttcatcaacgtggagatcaagaagatcatgaaggccaacgagaaggtgaccagcgacgccgaccccatgtggtacctgaagtacctgaacatctacgtgggcctgcccgacgtggaggagagcttcaacgtgaccagacccgtgagcccccacgagtgcagactgagagacatgacctacagcgcccccatcaccgtggacatcgagtacaccagaggcagccagagaatcatcagaaacgccctgcccatcggcagaatgcccatcatgctgagaagcagcaactgcgtgctgaccggcaagacccccgccgagttcgccaagctgaacgagtgccccctggaccccggcggctacttcatcgtgaagggcgtggagaaggtgatcctgatccaggagcagctgagcaagaacagaatcatcgtggaggccgacagaaagggcgccgtgggcgccagcgtgaccagcagcacccacgagaagaagagcagaaccaacatggccgtgaagcagggcagattctacctgagacacaacaccctgagcgaggacatccccatcgtgatcatcttcaaggccatgggcgtggagagcgaccaggagatcgtgcagatgatcggcaccgaggagcacgtgatggccgccttcggccccagcctggaggagtgccagaaggcccagatcttcacccagatgcaggccctgaagtacatcggcaacaaggtgagaagacagagaatgtggggcggcggccccaagaagaccaagatcgaggaggccagagagctgctggccagcaccatcctgacccacgtgcccgtgaaggagttcaacttcagagccaagtgcatctacaccgccgtgatggtgagaagagtgatcctggcccagggcgacaacaaggtggacgacagagactactacggcaacaagagactggagctggccggccagctgctgagcctgctgttcgaggacctgttcaagaagttcaacagcgagatgaagaagatcgccgaccaggtgatccccaagcagagagccgcccagttcgacgtggtgaagcacatgagacaggaccagatcaccaacggcatggtgaacgccatcagcaccggcaactggagcctgaagagattcaagatggacagacagggcgtgacccaggtgctgagcagactgagctacatcagcgccctgggcatgatgaccagaatcagcagccagttcgagaagaccagaaaggtgagcggccccagaagcctgcagcccagccagtggggcatgctgtgccccagcgacacccccgagggcgaggcctgcggcctggtgaagaacctggccctgatgacccacatcaccaccgacatggaggacggccccatcgtgaagctggccagcaacctgggcgtggaggacgtgaacctgctgtgcggcgaggagctgagctaccccaacgtgttcctggtgttcctgaacggcaacatcctgggcgtgatcagagaccacaagaagctggtgaacaccttcagactgatgagaagagccggctacatcaacgagttcgtgagcatcagcaccaacctgaccgacagatgcgtgtacatcagcagcgacggcggcagactgtgcagaccctacatcatcgtgaagaagcagaagcccgccgtgaccaacaagcacatggaggagctggcccagggctacagaaacttcgaggacttcctgcacgagagcctggtggagtacctggacgtgaacgaggagaacgactgcaacatcgccctgtacgagcacaccatcaacaaggacaccacccacctggagatcgagcccttcaccctgctgggcgtgtgcgccggcctgatcccctacccccaccacaaccagagccccagaaacacctaccagtgcgccatgggcaagcaggccatgggcaccatcggctacaaccagagaaacagaatcgacaccctgatgtacctgctggcctacccccagaagcccatggtgaagaccaagaccatcgagctgatcgagttcgagaagctgcccgccggccagaacgccaccgtggccgtgatgagctacagcggctacgacatcgaggacgccctggtgctgaacaaggccagcctggacagaggcttcggcagatgcctggtgtacaagaacgccaagtgcaccctgaagagatacaccaaccagaccttcgacaaggtgatgggccccatgctggacgccgccaccagaaagcccatctggagacacgagatcctggacgccgacggcatctgcagccccggcgagaaggtggagaacaagcaggtgctggtgaacaagagcatgcccaccgtgacccagatccccctggagggcagcaacgtgccccagcagccccagtacaaggacgtgcccatcacctacaagggcgccaccgacagctacatcgagaaggtgatgatcagcagcaacgccgaggacgccttcctgatcaagatgctgctgagacagaccagaagacccgagatcggcgacaagttcagcagcagacacggccagaagggcgtgtgcggcctgatcgtgccccaggaggacatgcccttctgcgacagcggcatctgccccgacatcatcatgaacccccacggcttccccagcagaatgaccgtgggcaagctgatcgagctgctggccggcaaggccggcgtgctggacggcagattccactacggcaccgccttcggcggcagcaaggtgaaggacgtgtgcgaggacctggtgagacacggctacaactacctgggcaaggactacgtgaccagcggcatcaccggcgagcccctggaggcctacatctacttcggccccgtgtactaccagaagctgaagcacatggtgctggacaagatgcacgccagagccagaggccccagagccgtgctgaccagacagcccaccgagggcagaagcagagacggcggcctgagactgggcgagatggagagagactgcctgatcggctacggcgccagcatgctgctgctggagagactgatgatcagcagcgacgccttcgaggtggacgtgtgcggccagtgcggcctgctgggctacagcggctggtgccactactgcaagagcagctgccacgtgagcagcctgagaatcccctacgcctgcaagctgctgttccaggagctgcagagcatgaacatcatccccagactgaagctgagcaagtacaacgagtag

SEQ ID NO: 196533 - DNA, 3402 bp, Artificial Sequence
  derived and/or modified sequence
atggatgtcctggcagaagaatttggcaatctgaccccagagcagctcgccgcacccatcccaaccgtagaagaaaagtggcggctgcttcctgcgtttctaaaagtgaaaggcctcgtgaagcaacacattgatagctttaactacttcataaatgtcgaaataaaaaagattatgaaagcgaacgagaaggttacctccgacgccgacccaatgtggtacctcaaatacctgaatatctatgtcggtctcccggacgttgaggagtcctttaacgtgacacgaccggtcagtccccacgaatgcaggcttagggacatgacttactcagccccaatcaccgtggatatcgaatacacacgcggctcccaacggatcatccggaatgccctgcctatcggcagaatgcctattatgctgaggtcttccaattgcgtactgacgggaaagacaccagcagaattcgccaagcttaatgagtgtccactcgatccaggagggtactttatagtgaagggtgtggaaaaggtcatcctgattcaagagcagctctcgaagaacagaatcatcgtcgaggccgataggaaaggcgctgtcggtgcatcagtaacctcctcaactcacgaaaagaaaagtaggaccaatatggccgtcaagcagggtaggttctatttgagacataacaccctgtccgaggacatccctattgtaattattttcaaggcgatgggtgttgagagtgaccaggagattgtccaaatgattggaacagaagagcatgtgatggccgcttttggcccgagcctggaggagtgccaaaaagctcagatctttacccagatgcaggcgctgaagtacattggaaacaaagtgagaaggcagaggatgtgggggggcggacccaaaaagacaaagatcgaggaggcccgagagctgctggcctctacaatcttgacccacgtgcctgttaaagagtttaattttcgcgccaagtgtatttataccgccgtgatggttaggagggtgatcctcgcccagggagataacaaggtcgacgaccgcgactattacggcaacaagcgactggaattggctggccaacttctgagtctgttgtttgaggatttatttaagaagttcaattccgagatgaagaaaatcgccgaccaggtaattcctaagcaacgggccgcccagttcgacgttgtgaagcatatgcgacaagatcagataaccaacgggatggttaacgctatttcaactgggaactggtccctgaagcgtttcaaaatggatcgtcaaggcgtaacgcaggttcttagtcggctctcgtacatctcagctctgggcatgatgacaaggatttcttcacagtttgagaaaacaagaaaagtcagtggacctcgcagcctccaaccgtcacagtgggggatgttgtgcccctctgataccccagagggtgaagcctgtggcctcgtcaaaaacctggctttaatgacccatattacgaccgacatggaggacggcccaattgtgaagctggcgagcaacctcggtgtagaagatgtgaacctcctttgcggagaggaactcagttaccccaacgtctttctcgtgtttctgaatggcaatattctcggtgttattcgcgatcataagaagttagtgaataccttccggcttatgcgccgcgctggctacatcaacgagttcgtctcaatatcaaccaatcttacagacagatgcgtctatattagctccgacggggggcggttgtgtaggccatatattatagtgaaaaaacagaagcctgcagttactaacaaacacatggaagagttggcccaggggtaccggaactttgaggactttctgcacgaatccttagtcgaatatcttgacgtgaacgaggagaacgactgcaacatcgcactttacgagcacacaatcaacaaagatacaactcatctggaaatcgagcccttcaccttgctaggagtgtgcgcaggtctcattccctaccctcatcacaaccagagccctaggaacacctatcagtgtgccatggggaagcaagccatgggtacaatcggttacaatcaaagaaatcgaatcgacactctgatgtacctgctggcatacccccagaaacctatggttaagactaagaccattgaactgatcgaattcgagaaactcccagcagggcaaaacgccactgtggctgtaatgtcatactcaggttatgacatcgaagatgccctggtgttgaacaaggcatcattggatcgtggattcggccgctgtctcgtctacaagaatgcaaagtgtacacttaagaggtatactaatcaaacttttgacaaggtgatgggccccatgctggatgccgcaacccgaaaacccatatggcgccatgagatccttgacgctgacggcatttgctcccccggcgaaaaggttgagaataagcaagttctcgtcaataaatccatgcctactgtgacccagataccacttgagggatccaacgtacctcagcagcctcagtataaggatgttcctattacgtacaagggcgcgactgattcctacattgagaaagtgatgatcagctcaaatgccgaggacgcatttttaataaaaatgctgctgcgtcagacccgccggcctgagatcggagacaaattcagctccaggcacggacagaagggggtgtgtggactgattgtcccacaagaagacatgccgttctgcgactccggaatctgtccagacatcatcatgaacccccatggcttcccatctcggatgacagtgggaaagctgattgaattgcttgcagggaaggccggagttttggatggaaggtttcactacggaacagcctttggcgggagcaaggttaaggatgtgtgtgaggacctcgttaggcacgggtataattaccttgggaaggactatgttacttccggcatcaccggcgagccattggaagcctatatctacttcggccctgtttactaccagaagctgaagcacatggtgcttgacaagatgcacgcccgcgccagaggacccagggcagttctgaccaggcagcctactgagggacgctccagggacggcggcctcaggttaggggagatggagagggattgtctgatcggttacggggcctcaatgttgttgttggaaagacttatgatttcttcagacgctttcgaggttgacgtctgcggccaatgtggcctgctcggctattccggttggtgtcattactgcaaatcctcttgccatgtgtcctccctccggatcccgtacgcatgtaaattgcttttccaggagttgcagagcatgaatatcatcccccgactgaagctctcaaaatacaatgagtag

SEQ ID NO: 196534 - DNA, 3402 bp, Artificial Sequence
  derived and/or modified sequence
atggatgtgctggccgaggagtttggaaacctgaccccagagcagctggccgcccccatccccaccgtggaggagaagtggaggctgctgcctgccttcctgaaggtgaagggcctggtgaagcagcacatcgacagcttcaactacttcatcaacgtggagatcaagaagatcatgaaggccaatgagaaggtgaccagtgatgctgaccccatgtggtacctgaagtacctgaacatctacgtgggcctgcctgatgtggaggagagcttcaacgtgaccaggcctgtgagcccccatgaatgtcggctgcgggacatgacctacagcgcccccatcaccgtggacatcgagtacacccggggcagccagaggatcatcagaaatgccctgcccatcggccgcatgcccatcatgctgcggagcagcaactgtgtgctgaccgggaagaccccagctgagtttgccaagctgaatgaatgtcccctggaccccggcggctacttcatcgtgaagggcgtggagaaggtgatcctgatccaggagcagctgagcaagaaccgcatcatcgtggaggccgacagaaaaggagctgtgggcgcctctgtgaccagcagcacccatgagaagaagagcaggaccaacatggctgtgaagcagggccgcttctacctgcggcacaacaccctgtctgaggacatccccatcgtcatcatcttcaaggccatgggcgtggagagtgaccaggagatcgtgcagatgattggaacagaggagcacgtgatggccgccttcggccccagcctggaggagtgccagaaggcccagatcttcacccagatgcaggccctgaagtacatcggcaacaaggtgcggcggcagaggatgtggggcggcggccccaagaagaccaagattgaggaggcccgggagctgctggccagcaccatcctgacccacgtgcctgtgaaggagttcaacttccgggccaagtgcatctacacagctgtgatggtgcggcgggtcatcctggcccagggcgacaacaaggtggatgaccgggactactacggcaacaagaggctggagctggccggccagctgctgagcctgctgtttgaggacctcttcaagaagttcaacagcgagatgaagaagattgctgaccaggtgatccccaagcagagagctgcccagtttgatgtggtgaagcacatgaggcaggaccagatcaccaacggcatggtgaatgccatcagcactggaaactggagcctgaagcgcttcaagatggaccggcagggcgtgacccaggtgctgagccggctgagctacatcagcgccctgggcatgatgacccgcatcagcagccagtttgagaagaccaggaaggtgtctggccccaggagcctgcagcccagccagtggggcatgctgtgccccagcgacaccccagagggggaggcctgtggcctggtgaagaacctggccctgatgacccacatcaccacagacatggaggatggccccatcgtgaagctggccagcaacctgggcgtggaggatgtgaacctgctgtgtggggaggagctgagctacccaaatgtgttcctggtgttcctgaatggaaacatcctgggcgtcatccgggaccacaagaagctggtgaacaccttccggctgatgagaagagctggctacatcaatgaatttgtgtccatcagcaccaacctgacagacagatgtgtgtacatcagcagtgatggcggccgcctgtgccggccctacatcatcgtgaagaagcagaagccagctgtgaccaacaagcacatggaggagctggcccagggctacagaaactttgaggacttcctgcacgagagcctggtggagtacctggatgtgaatgaggagaatgactgcaacatcgccctgtatgagcacaccatcaacaaggacaccacccacctggagattgagcccttcaccctgctgggcgtgtgtgccggcctcatcccctacccccaccacaaccagagccccaggaacacctaccagtgtgccatgggcaagcaggccatgggcaccatcggctacaaccagaggaacagaattgacaccctgatgtacctgctggcctacccccagaagcccatggtgaagaccaagaccatcgagctgattgaatttgagaagctgcctgctggccagaatgccaccgtggccgtgatgagctacagcggctatgacattgaagatgccctggtgctgaacaaggccagcctggaccggggcttcggccgctgcctggtgtacaagaatgccaagtgcaccctgaagcgctacaccaaccagacctttgacaaggtgatgggccccatgctggatgctgccaccaggaagcccatctggaggcatgagatcctggatgctgatggcatctgcagccctggagagaaggtggagaacaagcaggtgctggtgaacaagtccatgcccaccgtgacccagatccccctggagggcagcaatgtgccccagcagccccagtacaaggatgtgcccatcacctacaagggggccacagacagctacatcgagaaggtgatgatcagcagcaatgcagaagatgccttcctgatcaagatgctgctgcggcagaccaggaggcctgagattggagacaagttcagcagcagacatggccagaagggcgtgtgtggcctcatcgtgccccaggaggacatgcccttctgtgacagcggcatctgcccagacatcatcatgaacccccacggcttccccagcaggatgacagtgggcaagctgattgagctgctggccggcaaggccggcgtgctggatggccgcttccactacggcacagccttcggcggcagcaaggtgaaggatgtgtgtgaggacctggtgagacatggctacaactacctgggcaaggactatgtgaccagcggcatcaccggggagcccctggaggcctacatctacttcggccctgtgtactaccagaagctgaagcacatggtgctggacaagatgcacgcccgggcccggggccccagggctgtgctgacccggcagcccacagagggccgcagcagagatggcggcctgcggctgggggagatggagcgggactgcctgattggctacggggcctccatgctgctgctggagcggctgatgatcagcagtgatgcctttgaggtggatgtgtgtggccagtgtggcctgctgggctacagcggctggtgccactactgcaagagcagctgccacgtgagcagcctgcgcatcccctatgcctgcaagctgctcttccaggagctgcagagcatgaacatcatcccccggctgaagctgagcaagtacaatgaatag

SEQ ID NO: 196535 - DNA, 3402 bp, Artificial Sequence
  derived and/or modified sequence
atggacgtgctggccgaggagttcggcaacctgacccccgagcagcttgcagctcctattccaacagtggaagaaaagtggcgtttgctgccggcctttctcaaggtaaaaggccttgtcaagcagcatatcgattcttttaactacttcatcaacgtggagattaagaaaataatgaaagccaatgaaaaagtgacttccgacgcggatcccatgtggtatctaaagtacctcaacatctacgtgggactgcctgacgtggaagaaagcttcaacgtgaccaggccggtctccccgcacgaatgtcgcctgcgggatatgacatactccgccccgatcaccgtagacatcgagtacactcgaggctcccagagaatcatccggaacgcactgccaatcggtagaatgcctatcatgctgaggagctctaattgcgtgctcactggcaagacacctgcggaatttgcaaagctgaatgagtgccccttggatcctggcggctattttatcgtgaaaggagtggaaaaggtaatcctgatccaagaacagctatccaagaatcgcatcatcgttgaagccgaccgcaagggggccgttggtgctagcgtgacctccagtacccacgaaaaaaaaagccgcaccaatatggccgttaagcaaggaagattctatctgcgacataataccctttctgaggatatccctatcgtgattatcttcaaggcaatgggggtggaaagtgaccaggaaattgtgcagatgattggcacagaggaacacgttatggcagccttcggacccagcctcgaagagtgtcagaaagcccagatctttacacagatgcaggcactcaagtatattggtaacaaggtgaggagacagaggatgtggggaggtggccctaaaaaaacaaaaatcgaggaagcgcgagagcttctggcgtccacgatactgactcatgttcctgttaaagagttcaacttccgcgccaaatgtatctacacggcagtaatggtgcgccgagtgatccttgcacagggcgataataaagtggatgaccgcgactactacggcaataaacggctcgagctagcaggtcagctgctctcccttctgttcgaggatctgttcaagaaatttaacagtgaaatgaaaaaaatcgccgatcaggtgataccgaagcagagggcagctcaatttgatgtcgtgaaacacatgagacaagatcagattaccaatggtatggtgaacgcaattagtacaggcaactggtctctgaaacgattcaagatggatcgccagggcgtgacccaagtgctctctcggctgagttacatctctgccctggggatgatgacgaggatcagctcccaatttgaaaagacgcggaaagtctctggacctcgcagtctccagcccagccagtggggcatgctctgtcccagtgataccccggaaggagaggcctgcgggctggtcaaaaatctagcgctgatgacacatattacgactgatatggaagatgggccgatcgtgaagttagcctccaatctgggcgttgaggacgtcaatctcctctgtggcgaggagctctcctaccctaatgtcttcttggtcttccttaatggaaacattctaggcgtcatacgagaccacaaaaagctggtcaacacctttcggctgatgaggagagccgggtacattaatgaattcgtttcaatcagtactaaccttacggaccgctgcgtttacatcagctccgatggagggcgcctgtgcagaccctacataattgtgaaaaagcagaagccagccgttacgaataaacacatggaagaactggctcagggatatcggaactttgaagattttctccatgagagcctagtcgagtacctggacgtgaacgaggagaacgattgtaacatagccctttatgagcacaccatcaataaggacacaacacacttagaaatcgaaccgtttaccctgctgggagtctgtgctgggttgattccctacccccaccataatcagagccctagaaatacctaccagtgtgccatggggaagcaggcgatgggcacaatcggctataatcaacgcaataggatcgacaccttgatgtacctgctggcctatccgcagaagccgatggttaagacaaagacaatcgagctgattgaatttgaaaagctacccgctggccagaatgctaccgtggcagtaatgagttattctgggtatgatatcgaagacgcactggtgctaaacaaagctagtttggacaggggtttcggacggtgcctcgtttataaaaatgctaagtgcacactgaagcggtacactaaccagacttttgataaagttatgggcccgatgctggacgccgccacacggaagccgatctggaggcatgaaatcctggacgccgacgggatctgcagtccaggtgagaaagtggagaataagcaggtactcgtaaacaaatctatgcccaccgttacccagatacccctggaagggagcaacgtgccccagcaacctcagtacaaggatgtcccaatcacctacaagggcgctacagactcctacatcgagaaggttatgatctccagcaatgctgaggatgctttcctgatcaaaatgctcctgcgccaaacccgtcgcccggagatcggagataagttttctagtcgacacggccagaagggagtttgcggcctcattgtgcctcaagaagacatgcccttttgtgactccggcatctgccccgacataattatgaacccccatgggtttccctcacgcatgacggttggcaaactaatcgaattactggccggaaaggctggggtgctggacggacggttccattatggcactgccttcggaggatcaaaagtcaaggacgtgtgcgaggacctagttcggcacgggtacaactacctgggcaaagattacgtgacgtcgggcatcaccggcgagcctttagaagcgtacatttattttggtccggtctactatcaaaagcttaagcatatggttctggataaaatgcatgcaagggcccggggcccacgagcggtgttgacgcgacagcctactgaaggccgcagcagggacggcggtttgagactcggcgagatggagagagattgcctcattggttatggggcttccatgctcctgctggaaagacttatgatctcatccgatgctttcgaggtggacgtgtgtggccaatgcggactcctcggctatagcggctggtgccattattgtaagtcttcgtgccacgtcagttctttacgcattccgtatgcctgtaaacttctgtttcaggaactgcaatccatgaacataatcccccggctgaagctgagcaaatacaatgagtag

SEQ ID NO: 196536 - DNA, 3402 bp, Artificial Sequence
  derived and/or modified sequence
atggacgttctggccgaggaatttggtaatctgacacccgagcagttggctgcccctattccaaccgtggaggaaaaatggaggctcctacccgcttttcttaaagtcaaaggactcgtcaagcaacacattgacagtttcaattatttcataaacgtggaaatcaagaaaatcatgaaggctaacgaaaaggttacaagcgatgccgatcccatgtggtatttaaaatacctgaacatttatgtcggtttgccagacgtggaagagtcattcaacgtaacccggcctgtatcgcctcacgaatgcagactgcgggacatgacttactcagcccctatcacggtggacattgaatacaccagggggagccagcgcattatcaggaacgcgcttcccataggtagaatgccgataatgttgaggagctcaaattgcgttttgacagggaagactccagccgaatttgctaaactgaacgagtgccccctggatcccggtgggtacttcatagttaagggagttgagaaagtcatcttaatccaggaacagctgtccaagaaccgcatcatcgtggaagctgatcgaaagggcgcagtgggagcgtctgtaacaagttcaactcatgagaagaagtctcggacaaatatggcagtgaagcagggcaggttctatctccgtcacaatactctgagcgaagacatccccatcgtgattatcttcaaagctatgggagtggaatctgaccaggagattgtgcagatgattggaactgaagagcacgtgatggccgcattcggtccctctctcgaggagtgtcagaaagcacagatcttcacccagatgcaggccttaaagtacatcggcaacaaggtacggagacagaggatgtgggggggaggcccaaaaaaaacaaaaattgaagaagcaagagagcttcttgcatctacgatactgacccacgtaccggtgaaagagttcaatttcagggccaaatgcatctatactgccgtgatggtgcgcagggttatcctcgcccagggcgacaataaagtggacgacagggactattatggcaacaagaggctggagctcgccggacagttattgtctctgctgtttgaggacctgttcaaaaaattcaattccgagatgaagaagattgctgaccaggtgatacccaaacagcgcgcagcgcagttcgacgtagtgaagcatatgcgtcaggatcagattactaacggcatggttaatgcaatctcaactgggaactggtctttgaaacggttcaagatggatcgccaaggcgtcacacaggtgctttcacgcctcagctatatcagcgctcttggcatgatgacccgcattagctcccagtttgagaaaacacggaaggtctccggtccaagatctctgcaaccctcacagtggggaatgctgtgtccctcagacacccctgagggggaagcgtgcgggctggtaaaaaacctggcgctgatgacccacattaccacagatatggaggacggacctatagtgaagcttgctagcaatctgggcgtggaggatgttaaccttctgtgtggggaggaactctcgtaccccaacgtgttcctggtgtttctgaatggcaacattctgggcgttatcagagaccacaagaagctcgtgaacacttttaggctcatgcgtagggctggatacatcaacgaattcgtctctatatcaacgaacctgacggacagatgcgtctacattagctctgatggcggacgcctgtgcaggccttacattattgtgaagaagcagaagccagcggttaccaataaacacatggaggagctcgctcagggctatcggaacttcgaagattttctccacgaaagcctggtggaatacttggacgtgaacgaagaaaatgactgcaacatcgctctgtacgaacacaccatcaacaaggatactacgcacctggagatcgaaccttttacattgctgggcgtgtgcgcaggtcttataccttacccccatcataatcagtcaccacggaacacttaccagtgtgcaatgggcaagcaagctatggggaccattggttacaaccagcgaaatagaatcgacactctcatgtacctgctcgcctacccacagaaacccatggttaaaacaaagacaatagaactgattgagtttgagaagttacctgcaggccaaaatgccactgtcgcggttatgagttattctgggtatgacatcgaagacgccctagttttgaacaaagcaagccttgatcgcggattcggcagatgcctcgtgtacaaaaacgccaaatgtacactcaagcgttataccaaccagacttttgataaagtcatggggccaatgctcgatgccgcaacacgcaagccaatctggagacacgagattctggacgcagatggcatatgttctcccggagagaaagttgaaaacaaacaggtgctcgtaaacaaatcaatgccaactgtcacacaaatccccctggaaggctcaaacgttcctcagcagcctcagtacaaagacgtccccatcacttataaaggtgctactgactcttacattgagaaagtgatgatcagcagcaacgccgaggacgcgttcctcattaaaatgttactgagacaaacgcgacgcccagaaattggtgacaagttttcatccagacacggacagaaaggcgtctgcggcctgatcgtcccgcaggaggacatgccattttgcgacagcgggatctgccctgacataattatgaacccgcacggcttcccgagcaggatgactgttggcaaactgatcgaactgttggccggtaaggcaggggtattggacgggaggttccattatggaaccgcctttggtggatctaaggttaaagacgtgtgcgaagatcttgtgcggcacgggtacaattacctaggcaaggactacgtcacatccggaatcactggggagcccctcgaagcttacatctatttcgggccagtgtactatcagaagctcaagcacatggtgttggacaagatgcacgctagggccaggggtccaagagctgtgctcacacgccaacccacagagggaaggtcccgagatggtggactgaggttaggcgaaatggaaagagattgcctgatcgggtacggggctagcatgctgctgctcgagaggttaatgatctcctctgacgcctttgaggtggacgtttgcgggcagtgtggcctgctcggctactcgggctggtgtcactactgcaaaagtagttgtcacgtttcttccttaagaattccatacgcttgtaagctactcttccaggaactacaatcgatgaacataatccccaggcttaaacttagcaagtataatgagtag

SEQ ID NO: 196537 - DNA, 4273 bp, Artificial Sequence
  derived and/or modified sequence
accagagggcgtactttccttactcggcctcggccacatccgggttccaccgcagattcgggcagggagcgggcggaacctttctaccgcgtctctagctaacacgcacggcggggacagtttaggcctccgcgcaccgttcgccgggagtcttgcagtttgcttggtgcagggaaggcgggcgcggaggttctatctgtttcttcctccttcgtgagcagcatggacgtgctagcggaggagtttgggaacctgactccggagcagctggcggcgccgatcccgactgtagaggaaaaatggaggctgcttccagcatttttaaaggtgaaaggccttgtgaaacagcatatagattcatttaactatttcattaatgtagagataaagaagataatgaaagccaatgaaaaggttacaagtgacgctgaccctatgtggtacttaaaatatcttaatatctatgttgggcttcctgatgttgaagaaagcttcaatgtaactagaccagtgtcccctcatgagtgccgtttgagagacatgacatactctgcccctattacagtggatattgaatatacccgaggcagccagaggatcatccgcaatgccttacctatcggcagaatgcccataatgctacgtagttcaaactgtgttcttacaggaaaaacgccagcagaatttgccaaactgaacgaatgtcccttagatccaggtggctacttcattgttaaaggagtagaaaaagttattcttatccaagagcagctgtctaagaacaggatcatcgtggaggctgatagaaaaggggctgttggagcttcagttaccagctctacccatgagaaaaaaagcagaaccaatatggctgtgaaacaaggacgattttatttgaggcataatactttgtcagaagatatacccattgtcatcatatttaaggccatgggtgttgagagtgaccaggaaattgtgcagatgattggaacagaggagcacgtgatggctgcatttgggcccagtctggaagagtgccagaaagctcagattttcacacagatgcaggcattaaaatatatagggaacaaagtaagaaggcaaaggatgtggggaggtggaccaaagaaaaccaaaatagaagaagcaagagagctcctggcttccaccattctgacccatgtcccagttaaggaattcaatttccgagccaaatgtatctatactgcagtgatggtgcgaagagttattctggcccaaggagataataaagttgacgacagagattattatggtaacaagcgactggaattggcaggacagcttttatctcttctttttgaagacttgttcaaaaaatttaattctgaaatgaaaaagattgccgaccaggtgattcctaagcaaagagcagcccagtttgatgttgtcaaacacatgcgccaagaccagatcaccaatggcatggtgaatgctatttctaccggaaattggtctttaaagagatttaaaatggaccgccagggtgtaacccaagtgctgtctcgcttgtcatatatatccgcactgggcatgatgacaagaatctcttcccagtttgaaaaaacgagaaaagtgagtggtcctcgctccctccagccatctcagtggggaatgctgtgtccttcggacactcctgaaggagaggcatgtggtttggttaaaaacttggcccttatgacacacatcacaactgatatggaagatggacccattgttaaattagccagtaacttgggagtagaagatgtgaatttattatgtggggaagagctctcttacccaaatgtgtttcttgtctttcttaatggtaacatcttaggtgtcattcgagaccacaaaaagctagtgaatacatttcgactcatgagaagagcaggatatatcaatgaatttgtttccatctcaacaaatcttacagatcgatgtgtctatatttcttctgatgggggaaggctatgcagaccctacataattgtcaagaaacagaagccagcagtcacaaataaacatatggaagagctggcccaagggtacaggaattttgaagatttcttacatgagagtctggttgaatatttagatgtgaatgaagaaaatgattgtaacattgcactgtacgaacacacaattaataaagacaccacccacttggagattgaacccttcactcttctcggcgtgtgtgctggacttatcccataccctcaccataaccagtcaccgagaaacacttatcagtgtgccatggggaaacaagccatgggtactataggatacaaccagcgaaacagaattgatactctcatgtatctactagcatatccacaaaaacccatggttaagacaaaaaccattgaattgatagaatttgagaaactgccagctggacagaatgcaacagttgctgtgatgagctatagtggctatgatattgaagatgctcttgttttaaacaaggcctctttagacagaggctttgggcgttgccttgtatataaaaatgctaaatgtacgttgaaacgatacaccaatcagacttttgataaagtgatggggcccatgttggatgctgctacaaggaaacctatctggcgacatgaaatcttagatgcagatggtatttgttctccaggtgagaaagtagaaaacaaacaagtgcttgtaaataagtccatgcccacagtgactcagattcctttggaaggaagtaatgtaccacagcaaccacagtacaaagatgtacccataacctacaaaggagcaacagactcatatattgaaaaagtgatgatatcttcaaatgctgaagatgcttttctgatcaaaatgctgctgagacagacaaggcgtccagaaattggagacaaattcagcagtcgtcatgggcaaaaaggtgtttgtggcttgatcgtcccccaggaagacatgccattttgtgattctggcatctgtccggacatcatcatgaacccacacggcttcccatcacgaatgacggtggggaagctcattgagctgctggctggcaaggccggtgtgctggacggcagattccactacggcactgcgtttggaggcagtaaagtgaaggatgtgtgtgaggacctcgttcgccatggttataactacttggggaaagactatgttacatccggcatcacaggtgagcccttagaagcatacatctattttggccccgtgtactatcagaagctgaaacacatggtgctagataaaatgcatgcccgggcccggggcccacgagccgtccttaccaggcaacccactgaaggacggtctcgtgatggtggcttgcgtctcggggaaatggaacgtgactgtttaatcggttatggagccagtatgcttttgctagagagactaatgatttcaagtgatgcctttgaggttgatgtctgtgggcagtgtggacttctggggtattctggctggtgccattactgcaagtcatcctgccacgtgtcttccctccgtattccgtatgcctgcaagctgctcttccaggaactacagtctatgaacatcatccccaggttaaaactgtccaagtacaatgaatgaggatggaaaaaatgattattaaagagaacaagtgatacatccaatgcaacggaaagcagaagggatttaggactacgtctcctcctgtgaagaattcccttgcgtattctctctctaaaacaaccaaaaaaaaatggagaggctttttatatactctaagactggctaaacaaccttgatcattgagcctcgagccatgggagagatgctgaccatgtggactgcaaggctgcttgattcacagatggatgtgacctaaaggataaataagctattacttatgtgctgatctcttgacattcactcattagaagaccttactccttcaagcaaatgtttggggtcaaatttaccatatcttctggctaaccatattcaagattcttctgaaacttggaggatgtaaagaatccatttgatttggtcagcctggcttttgtcgtggtggctggctcggataaattttcccaacaattaaatcttgcctttacacacccaaactttgtaattttagtcttggtgaaatataatgaatttgttcctaccttgtcaagcaagaatgtcgtcttctcctatggactcaattgctattattttaaacctgcatgattgtaccatgcaatactattcgttaaatatctgaatctaa

SEQ ID NO: 196538 - DNA, 4118 bp, Artificial Sequence
  derived and/or modified sequence
agagcgtcgcgcttgcgagtcttttttccagagccggcctccgcgtgcgcgagtgaaggctgatcccagaggagctgtcagccgctgcgggggccgagaagccccgctgctggctctagggttggagctcttccagcataggaaaaatggaggctgcttccagcatttttaaaggtgaaaggccttgtgaaacagcatatagattcatttaactatttcattaatgtagagataaagaagataatgaaagccaatgaaaaggttacaagtgacgctgaccctatgtggtacttaaaatatcttaatatctatgttgggcttcctgatgttgaagaaagcttcaatgtaactagaccagtgtcccctcatgagtgccgtttgagagacatgacatactctgcccctattacagtggatattgaatatacccgaggcagccagaggatcatccgcaatgccttacctatcggcagaatgcccataatgctacgtagttcaaactgtgttcttacaggaaaaacgccagcagaatttgccaaactgaacgaatgtcccttagatccaggtggctacttcattgttaaaggagtagaaaaagttattcttatccaagagcagctgtctaagaacaggatcatcgtggaggctgatagaaaaggggctgttggagcttcagttaccagctctacccatgagaaaaaaagcagaaccaatatggctgtgaaacaaggacgattttatttgaggcataatactttgtcagaagatatacccattgtcatcatatttaaggccatgggtgttgagagtgaccaggaaattgtgcagatgattggaacagaggagcacgtgatggctgcatttgggcccagtctggaagagtgccagaaagctcagattttcacacagatgcaggcattaaaatatatagggaacaaagtaagaaggcaaaggatgtggggaggtggaccaaagaaaaccaaaatagaagaagcaagagagctcctggcttccaccattctgacccatgtcccagttaaggaattcaatttccgagccaaatgtatctatactgcagtgatggtgcgaagagttattctggcccaaggagataataaagttgacgacagagattattatggtaacaagcgactggaattggcaggacagcttttatctcttctttttgaagacttgttcaaaaaatttaattctgaaatgaaaaagattgccgaccaggtgattcctaagcaaagagcagcccagtttgatgttgtcaaacacatgcgccaagaccagatcaccaatggcatggtgaatgctatttctaccggaaattggtctttaaagagatttaaaatggaccgccagggtgtaacccaagtgctgtctcgcttgtcatatatatccgcactgggcatgatgacaagaatctcttcccagtttgaaaaaacgagaaaagtgagtggtcctcgctccctccagccatctcagtggggaatgctgtgtccttcggacactcctgaaggagaggcatgtggtttggttaaaaacttggcccttatgacacacatcacaactgatatggaagatggacccattgttaaattagccagtaacttgggagtagaagatgtgaatttattatgtggggaagagctctcttacccaaatgtgtttcttgtctttcttaatggtaacatcttaggtgtcattcgagaccacaaaaagctagtgaatacatttcgactcatgagaagagcaggatatatcaatgaatttgtttccatctcaacaaatcttacagatcgatgtgtctatatttcttctgatgggggaaggctatgcagaccctacataattgtcaagaaacagaagccagcagtcacaaataaacatatggaagagctggcccaagggtacaggaattttgaagatttcttacatgagagtctggttgaatatttagatgtgaatgaagaaaatgattgtaacattgcactgtacgaacacacaattaataaagacaccacccacttggagattgaacccttcactcttctcggcgtgtgtgctggacttatcccataccctcaccataaccagtcaccgagaaacacttatcagtgtgccatggggaaacaagccatgggtactataggatacaaccagcgaaacagaattgatactctcatgtatctactagcatatccacaaaaacccatggttaagacaaaaaccattgaattgatagaatttgagaaactgccagctggacagaatgcaacagttgctgtgatgagctatagtggctatgatattgaagatgctcttgttttaaacaaggcctctttagacagaggctttgggcgttgccttgtatataaaaatgctaaatgtacgttgaaacgatacaccaatcagacttttgataaagtgatggggcccatgttggatgctgctacaaggaaacctatctggcgacatgaaatcttagatgcagatggtatttgttctccaggtgagaaagtagaaaacaaacaagtgcttgtaaataagtccatgcccacagtgactcagattcctttggaaggaagtaatgtaccacagcaaccacagtacaaagatgtacccataacctacaaaggagcaacagactcatatattgaaaaagtgatgatatcttcaaatgctgaagatgcttttctgatcaaaatgctgctgagacagacaaggcgtccagaaattggagacaaattcagcagtcgtcatgggcaaaaaggtgtttgtggcttgatcgtcccccaggaagacatgccattttgtgattctggcatctgtccggacatcatcatgaacccacacggcttcccatcacgaatgacggtggggaagctcattgagctgctggctggcaaggccggtgtgctggacggcagattccactacggcactgcgtttggaggcagtaaagtgaaggatgtgtgtgaggacctcgttcgccatggttataactacttggggaaagactatgttacatccggcatcacaggtgagcccttagaagcatacatctattttggccccgtgtactatcagaagctgaaacacatggtgctagataaaatgcatgcccgggcccggggcccacgagccgtccttaccaggcaacccactgaaggacggtctcgtgatggtggcttgcgtctcggggaaatggaacgtgactgtttaatcggttatggagccagtatgcttttgctagagagactaatgatttcaagtgatgcctttgaggttgatgtctgtgggcagtgtggacttctggggtattctggctggtgccattactgcaagtcatcctgccacgtgtcttccctccgtattccgtatgcctgcaagctgctcttccaggaactacagtctatgaacatcatccccaggttaaaactgtccaagtacaatgaatgaggatggaaaaaatgattattaaagagaacaagtgatacatccaatgcaacggaaagcagaagggatttaggactacgtctcctcctgtgaagaattcccttgcgtattctctctctaaaacaaccaaaaaaaaatggagaggctttttatatactctaagactggctaaacaaccttgatcattgagcctcgagccatgggagagatgctgaccatgtggactgcaaggctgcttgattcacagatggatgtgacctaaaggataaataagctattacttatgtgctgatctcttgacattcactcattagaagaccttactccttcaagcaaatgtttggggtcaaatttaccatatcttctggctaaccatattcaagattcttctgaaacttggaggatgtaaagaatccatttgatttggtcagcctggcttttgtcgtggtggctggctcggataaattttcccaacaattaaatcttgcctttacacacccaaactttgtaattttagtcttggtgaaatataatgaatttgttcctaccttgtcaagcaagaatgtcgtcttctcctatggactcaattgctattattttaaacctgcatgattgtaccatgcaatactattcgttaaatatctgaatct

SEQ ID NO: 196539 - protein, 1041 aa, Artificial Sequence
  derived and/or modified sequence
MAAAAAAGAASGLPGPVAQGLKEALVDTLTGILSPVQEVRAAAEEQIKVLEVTEEFGVHLAELTVDPQGALAIRQLASVILKQYVETHWCAQSEKFRPPETTERAKIVIRELLPNGLRESISKVRSSVAYAVSAIAHWDWPEAWPQLFNLLMEMLVSGDLNAVHGAMRVLTEFTREVTDTQMPLVAPVILPEMYKIFTMAEVYGIRTRSRAVEIFTTCAHMICNMEELEKGAAKVLIFPVVQQFTEAFVQALQIPDGPTSDSGFKMEVLKAVTALVKNFPKHMVSSMQQILPIVWNTLTESAAFYVRTEVNYTEEVEDPVDSDGEVLGFENLVFSIFEFVHALLENSKFKSTVKKALPELIYYIILYMQITEEQIKVWTANPQQFVEDEDDDTFSYTVRIAAQDLLLAVATDFQNESAAALAAAATRHLQEAEQTKNSGTEHWWKIHEACMLALGSVKAIITDSVKNGRIHFDMHGFLTNVILADLNLSVSPFLLGRALWAASRFTVAMSPELIQQFLQATVSGLHETQPPSVRISAVRAIWGYCDQLKVSESTHVLQPFLPSILDGLIHLAAQFSSEVLNLVMETLCIVCTVDPEFTASMESKICPFTIAIFLKYSNDPVVASLAQDIFKELSQIEACQGPMQMRLIPTLVSIMQAPADKIPAGLCATAIDILTTVVRNTKPPLSQLLICQAFPAVAQCTLHTDDNATMQNGGECLRAYVSVTLEQVAQWHDEQGHNGLWYVMQVVSQLLDPRTSEFTAAFVGRLVSTLISKAGRELGENLDQILRAILSKMQQAETLSVMQSLIMVFAHLVHTQLEPLLEFLCSLPGPTGKPALEFVMAEWTSRQHLFYGQYEGKVSSVALCKLLQHGINADDKRLQDIRVKGEEIYSMDEGIRTRSKSAKNPERWTNIPLLVKILKLIINELSNVMEANAARQATPAEWSQDDSNDMWEDQEEEEEEEEDGLAGQLLSDILATSKYEEDYYEDDEEDDPDALKDPLYQIDLQAYLTDFLCQFAQQPCYIMFSGHLNDNERRVLQTIGI

SEQ ID NO: 196540 - DNA, 3126 bp, Artificial Sequence
  derived and/or modified sequence
atggccgccgccgccgccgccggcgccgccagcggcctgcccggccccgtggcccagggcctgaaggaggccctggtggacaccctgaccggcatcctgagccccgtgcaggaggtgagagccgccgccgaggagcagatcaaggtgctggaggtgaccgaggagttcggcgtgcacctggccgagctgaccgtggacccccagggcgccctggccatcagacagctggccagcgtgatcctgaagcagtacgtggagacccactggtgcgcccagagcgagaagttcagaccccccgagaccaccgagagagccaagatcgtgatcagagagctgctgcccaacggcctgagagagagcatcagcaaggtgagaagcagcgtggcctacgccgtgagcgccatcgcccactgggactggcccgaggcctggccccagctgttcaacctgctgatggagatgctggtgagcggcgacctgaacgccgtgcacggcgccatgagagtgctgaccgagttcaccagagaggtgaccgacacccagatgcccctggtggcccccgtgatcctgcccgagatgtacaagatcttcaccatggccgaggtgtacggcatcagaaccagaagcagagccgtggagatcttcaccacctgcgcccacatgatctgcaacatggaggagctggagaagggcgccgccaaggtgctgatcttccccgtggtgcagcagttcaccgaggccttcgtgcaggccctgcagatccccgacggccccaccagcgacagcggcttcaagatggaggtgctgaaggccgtgaccgccctggtgaagaacttccccaagcacatggtgagcagcatgcagcagatcctgcccatcgtgtggaacaccctgaccgagagcgccgccttctacgtgagaaccgaggtgaactacaccgaggaggtggaggaccccgtggacagcgacggcgaggtgctgggcttcgagaacctggtgttcagcatcttcgagttcgtgcacgccctgctggagaacagcaagttcaagagcaccgtgaagaaggccctgcccgagctgatctactacatcatcctgtacatgcagatcaccgaggagcagatcaaggtgtggaccgccaacccccagcagttcgtggaggacgaggacgacgacaccttcagctacaccgtgagaatcgccgcccaggacctgctgctggccgtggccaccgacttccagaacgagagcgccgccgccctggccgccgccgccaccagacacctgcaggaggccgagcagaccaagaacagcggcaccgagcactggtggaagatccacgaggcctgcatgctggccctgggcagcgtgaaggccatcatcaccgacagcgtgaagaacggcagaatccacttcgacatgcacggcttcctgaccaacgtgatcctggccgacctgaacctgagcgtgagccccttcctgctgggcagagccctgtgggccgccagcagattcaccgtggccatgagccccgagctgatccagcagttcctgcaggccaccgtgagcggcctgcacgagacccagccccccagcgtgagaatcagcgccgtgagagccatctggggctactgcgaccagctgaaggtgagcgagagcacccacgtgctgcagcccttcctgcccagcatcctggacggcctgatccacctggccgcccagttcagcagcgaggtgctgaacctggtgatggagaccctgtgcatcgtgtgcaccgtggaccccgagttcaccgccagcatggagagcaagatctgccccttcaccatcgccatcttcctgaagtacagcaacgaccccgtggtggccagcctggcccaggacatcttcaaggagctgagccagatcgaggcctgccagggccccatgcagatgagactgatccccaccctggtgagcatcatgcaggcccccgccgacaagatccccgccggcctgtgcgccaccgccatcgacatcctgaccaccgtggtgagaaacaccaagccccccctgagccagctgctgatctgccaggccttccccgccgtggcccagtgcaccctgcacaccgacgacaacgccaccatgcagaacggcggcgagtgcctgagagcctacgtgagcgtgaccctggagcaggtggcccagtggcacgacgagcagggccacaacggcctgtggtacgtgatgcaggtggtgagccagctgctggaccccagaaccagcgagttcaccgccgccttcgtgggcagactggtgagcaccctgatcagcaaggccggcagagagctgggcgagaacctggaccagatcctgagagccatcctgagcaagatgcagcaggccgagaccctgagcgtgatgcagagcctgatcatggtgttcgcccacctggtgcacacccagctggagcccctgctggagttcctgtgcagcctgcccggccccaccggcaagcccgccctggagttcgtgatggccgagtggaccagcagacagcacctgttctacggccagtacgagggcaaggtgagcagcgtggccctgtgcaagctgctgcagcacggcatcaacgccgacgacaagagactgcaggacatcagagtgaagggcgaggagatctacagcatggacgagggcatcagaaccagaagcaagagcgccaagaaccccgagagatggaccaacatccccctgctggtgaagatcctgaagctgatcatcaacgagctgagcaacgtgatggaggccaacgccgccagacaggccacccccgccgagtggagccaggacgacagcaacgacatgtgggaggaccaggaggaggaggaggaggaggaggaggacggcctggccggccagctgctgagcgacatcctggccaccagcaagtacgaggaggactactacgaggacgacgaggaggacgaccccgacgccctgaaggaccccctgtaccagatcgacctgcaggcctacctgaccgacttcctgtgccagttcgcccagcagccctgctacatcatgttcagcggccacctgaacgacaacgagagaagagtgctgcagaccatcggcatctag

SEQ ID NO: 196541 - DNA, 3126 bp, Artificial Sequence
  derived and/or modified sequence
atggccgctgctgcagcagcaggagctgctagcggccttccaggtccggtggcccagggcctcaaggaggccctggttgacaccctgaccggtatcctctcccctgtccaagaggttagggccgctgccgaagaacaaatcaaggtcctggaggtcaccgaggagttcggggtccacttagcggagctaacagtggacccccaaggggcgctcgctatcaggcagctggcttccgtaatacttaaacagtacgtagaaacccactggtgtgcacaaagcgagaaatttaggcccccagagactactgagagagcaaaaattgtgataagggaactgctgccaaatggtttgagggagtccataagcaaagttaggagctccgttgcatacgcagtgtccgccattgcgcactgggactggccggaagcgtggccccagttgttcaacttattgatggaaatgctggtgtcaggggatctcaacgctgttcatggcgctatgagggttctgactgagtttacaagggaggtgaccgacacccagatgcctcttgtggcccccgtcatcctgccagaaatgtataagatcttcactatggccgaagtgtacggcattagaacaagatcaagagcagtggagatcttcactacctgcgcccatatgatttgcaatatggaggaacttgaaaaaggagcggcaaaggttctgattttccctgtcgtgcagcaatttacggaagcctttgttcaggcattacagatccctgatggcccgacatctgacagtggcttcaagatggaagtcctaaaggctgtgacagcgctagtgaaaaatttcccaaaacatatggtgtcctctatgcaacagatcttgccaatagtttggaacacattaaccgaatctgcagcattttacgtccgtactgaggttaattatacagaggaggtcgaggaccctgttgactcagacggagaagtcctcggcttcgagaatcttgttttttctatttttgagttcgttcacgcgctgctcgaaaatagcaagtttaaatccaccgtcaagaaggctctgccagagcttatctactatatcattctctatatgcagatcacagaagaacaaatcaaagtgtggaccgcgaacccgcagcagttcgtggaagacgaggacgacgacaccttcagctacacggtgcgtattgctgcccaggatctgctcctggctgtggcaacggacttccagaacgagtctgctgctgctctagcagctgcagcgaccagacaccttcaggaggctgagcagaccaaaaacagtggcaccgagcattggtggaagattcatgaggcgtgcatgctggctctgggttctgttaaagccattatcacagattctgtgaaaaatggacggatccatttcgacatgcatggatttcttactaatgttattctcgccgatctgaatctctctgtgagcccgttccttctgggaagggccctgtgggccgctagcagatttaccgttgctatgagccccgagctcattcaacagttcctccaggccacggtgtccgggctgcatgagacccagccgccatctgtgcgtatctccgcggtccgcgccatctggggatattgtgaccagctgaaggtgagtgaaagcacacacgtgctgcagccatttctgccgtcaattctggacgggcttatacatctggctgcccagtttagttccgaagtcctgaatctggtgatggagacattgtgtatcgtatgtaccgtggatcctgaatttacagctagcatggaaagtaaaatttgcccctttaccattgccatattcctcaaatattccaacgaccctgtggttgcctccctggctcaagatatcttcaaagagttgtcacagatagaagcctgtcagggacccatgcagatgaggctaatccctactctggtgtcaataatgcaggcaccggccgacaagattcctgcaggcctgtgcgccacagcgattgatatactgaccacagtggtaagaaatacaaagcctcccctgtcacagttactaatctgccaggccttcccagccgtcgctcaatgcacattgcacaccgacgacaacgccacgatgcagaatggcggcgagtgccttcgcgcctatgtgagcgtaactttggaacaggtggcccagtggcatgacgagcagggccacaatggcctgtggtatgtgatgcaggtagtgtctcagctgcttgacccacgaacatccgagttcaccgccgctttcgttggccgcctggtaagtactcttatttctaaggccggcagggagctcggtgaaaacctggaccaaatactcagagcaattctatcgaaaatgcaacaggcggaaactctatcagtgatgcagtctctgatcatggttttcgctcacttggtacacacccaattagagccgctgttggagttcctctgttcacttcctggccctaccgggaagcccgcattagaattcgttatggccgagtggacctccagacaacacctcttttacggacagtacgagggcaaggtctcctccgtggctctctgcaagcttcttcagcacggcattaatgctgacgataaaagactccaagatatcagggtgaaaggcgaggagatatactcaatggatgaaggtatcaggactcggtctaagagtgcaaaaaatccagagcggtggaccaatattcctctgttggtgaagattctgaagctgatcatcaatgaactgtctaacgtcatggaagccaacgcggcccgacaagctacacccgccgaatggtcgcaggatgattccaacgacatgtgggaggatcaagaggaagaggaggaggaagaggaagacggactggccgggcagctgctgtcagatatccttgcgacctctaaatacgaagaggactactacgaagatgacgaagaagacgaccccgacgccctgaaggaccctctgtaccagattgatctgcaggcctacttgacggacttcctgtgccaatttgcccaacaaccatgttatattatgttcagtggccacctgaatgataatgaacgccgcgtgctccagaccattggcatctag

SEQ ID NO: 196542 - DNA, 11435 bp, Artificial Sequence
  derived and/or modified sequence
gccgcgcgcgggggccgtcattcggtggcgggtcccggccgcggggctggcgggctgaggggagaaaagatggcggcggcggcggcagctggtgcggcctccgggctgccgggtccagtggcacaaggattaaaggaagcgttagtggatacgctcaccgggatcctatccccagtacaggaggtgcgggcggctgctgaagaacagattaaggtgctggaggtgacggaggaatttggtgttcacttggcagaactgactgtagatccccagggggcactggcaatccgtcagctggcatcagtcatcttgaaacaatatgtggagactcactggtgtgcccaatcagagaaatttaggcctcctgaaactacagaaagggcaaaaattgttatccgggagctattgcctaatgggttgagagaatcgataagcaaagtgcgctccagtgtggcctatgcagtgtcagccattgcccactgggactggcctgaagcttggccccaactcttcaacctgctcatggagatgttggtgagcggagacttaaatgccgtccatggagccatgcgtgtgctgacagaattcactcgtgaagtaacagacacacagatgccacttgttgctcctgtcattctcccagagatgtataagatcttcaccatggctgaggtgtatggtattcgaacccgttcccgagccgtggagatttttaccacttgtgcccatatgatctgtaacatggaggagctggaaaagggtgcagccaaagtcctgatctttcccgtggtacagcagttcacagaggcctttgttcaggccctccagataccagatggccccacatctgacagtgggtttaagatggaggtcctaaaggcagtgacagccctagtgaaaaacttcccaaagcacatggtgtcctccatgcagcagattctgcctattgtttggaacaccctaaccgagagtgcagctttttatgtgaggacagaagtaaattacacagaagaagtagaagatcctgtggattctgatggtgaagtcctgggctttgaaaatctcgtctttagcatttttgaatttgtccatgctctactagaaaatagcaaattcaaaagcactgttaagaaagccttgcctgaattgatttattatattatcctgtacatgcaaatcactgaggagcagattaaagtatggacagccaacccccaacaatttgtagaagatgaagatgatgatacattctcctatactgttagaatagcagctcaagacttgttgctggctgtggccacagatttccagaatgaaagtgcagcagccctggctgctgcagccactcgacatttacaagaagctgagcaaaccaaaaacagtggcactgagcactggtggaagatccatgaggcatgcatgcttgccctaggctcagtgaaggccatcatcactgacagtgtgaaaaatggcaggattcattttgacatgcatgggttcctgaccaatgtcatccttgcagacctcaacctctcagtgtctcctttcctcttgggccgggcactttgggctgccagtcggttcactgttgctatgtcccctgaactgatccagcagttcctacaggcaacagttagtggtcttcacgagacacagcccccatcagttcgaatttctgcagtgagagccatctggggttattgtgaccaactgaaagtctcagagagtacccacgtgctccagcccttcctccccagcatccttgatggcttaattcacctagcagcccagttcagctcagaggtcctcaacctggtgatggagaccctgtgcatcgtttgtacagtagaccccgaattcacagcaagcatggaaagcaaaatctgccccttcaccatcgccattttcctaaagtacagtaatgatcccgtcgtcgcctcactggctcaggacatcttcaaggagctgtcccagattgaagcctgtcagggcccaatgcaaatgaggctgattcccactctggtcagcataatgcaggccccagcagacaagattcctgcagggctttgtgcgacagccattgatatcctgacaacagtagtacgaaatacaaagcctcccctttcccagcttctcatctgccaagctttccctgctgtggcacagtgtacccttcacacagatgacaatgccaccatgcagaatggcggagagtgcttgcgggcctatgtgtcagtgaccctggaacaagtagcccagtggcatgatgagcagggccacaatggactgtggtatgtgatgcaagtggtgagccagctcctggacccccgcacctcagagttcactgcggcctttgtgggccgccttgtttccaccctcatctccaaggcagggcgggaactcggggagaatctagaccagattcttcgtgccatcctcagtaagatgcagcaggcagagacgctcagtgtcatgcagtccctgatcatggtgttcgctcatctggtgcacactcagctagaacctctcttggagttcctgtgtagcctcccaggacctactggcaaacctgctctagagtttgtgatggctgagtggacaagccgacagcacctgttctatggacagtatgaaggcaaagtcagctctgtggcactctgtaagctgctccagcatggcatcaatgcagatgacaaacggctacaggatatccgtgtgaagggagaggagatctacagcatggatgagggcatccgcacccgctctaagtcagccaaaaacccagaacgctggacaaacattcctttgctggtcaagatcctaaagctgatcatcaacgagctctccaacgtcatggaggctaatgccgctcgccaggccactcctgcagagtggagtcaagatgactccaatgatatgtgggaggaccaggaggaggaagaggaggaggaggaggatggtttagctggccaacttttatctgacattcttgctacaagtaaatatgaggaggattactacgaggatgatgaggaagatgaccctgatgccctgaaggatcctctctatcagattgatctgcaggcatatctcacagatttcctctgccagtttgctcagcagccctgctacataatgttttcaggccaccttaatgacaatgagaggcgagttctacagaccatcggcatctaaaaaggggagcctttctacatttgctccttctgggccagccgcaaaccattttgcagccctcactggccttgagatgcactttcttctcaacctaaagtggcatcttgacccttggcccttggcctcggcagtgacactgatgacaattcagaccaggctcaccggtgccgtcacttaggaatgctggaacaaaggacatttctcaaagttcccctgaagacatgccatctctagaaccttttttctccccgactctacccccacctctgttcctagagccctctgctggcgagtccagaaacattattgcccagaaggattatgtgtttatggattattttgccccgcctcaggagcgcaggaagtcactaccatttatattctaaaacagacctatctatgttcataggacttctgatgtgttcagataggaatcctcatgagagatcattatgctttgtgccctggaccactgctgctctgggttctcaggaggaacaggcaagagcagcttcattctaagcctttccagtgacctcagccttgcttctcttctacaacactaaggctcctctgtcagaggaggtcgtcttgtttttgcttcattgcatgacataacccttcccctcaagctgttcctatatatacatgcacacacaaaataagccagacagatggcaatttgatcttccttttttagaaaaaaaaaaaaaaatggggaaaagggattttttttaaatccacctgacccaactatatttaatatgcctctcccacacattaccacagagtctgatattcaaaggttatcccctttccctcaggaagcctctaaagtgcttaagttgtagccctcaaatttgcaacatgtatttttctaggacagtaaagtaatctttacaaatgaatttagttgcatggtataaggtgtctcagcacctgtttgccttctattccctttagaaggtaagtaaaagtaatgggggaaaggattaggtggagcctgtctaaacattctagtgtgtcttggcaaacatagcctgaaatgattcttaaagaactggcattgtttaatcaaatatttttaagggagattccttaattgggaagtttagtctgtttggggttcaaagagtaaatgaggattagaaaatcatggagagaggctgggcgcggtggctaacgcctgtaatcctagcactttgggaggctgagatgggcggatcacttgagatcaggagtttgaggctagcctggccaacacagtgaaacctgcatttctactaaaaatacaaaaattagctgggcatggtggtgcatgcctgtaatcccagttaacttgagatgctgaggcaggagaatcgcttgaacttgggaagcagaggttgcagtgaaccgatatcacaccgttgcattccaaggcaagactcaatcacacacacacacacacacacacacaaatcatggggagaaagatgaaacctgtgttcccctttttttggtagtgcccacatctggtgccccatttttaataaccacaggatatttctttagattgatattctcacaaagaagaaatagaatataggctgggcgtggtgtgtcacacctgtaatcccagcacttacggaggccgaagccagcggatcaccagaggtcaggagttcgagaccagcctgaccaacatgatgaaaccctgtctctactaaaaatacaaaaattagccaggcatggtggcatgcacttgtaatcccagctactcgggaggctgagacaggagaatcgcttgaacctgggaggcagaggttgcagtaagccaagatcgcaccattgcactacagcctgggcaacaagaggagcgaaactctgtctcaaaaaaaaaaaagagaaagaatataaagtgaatctgaatctccactcaaggggatggccccaaggatattgtagctggtaatttcttcatgccactaggtgtccccagtgttcaacctccatgactgagattggaagaagtagagttaaaagtttttactacctttgagaagcctgcgggcatgttcacagtcgtcccatgccagccaggttctgaggctaactgcttgtgcccctgctgcttcacatggcattgtgggagttgctgatactggggaaatgatggcagatctgaccaagtggtgctgagaaaaccaccctcggccttgcagactccatagtttatctcaaggcagtgccagtcggatttggtgctaaaggcataaggccaagtcagcctctgatattggcacaaaagaatggtctcatgccagtagcattgaactgctgagcttgggaaggcttaaggctcccacacacagactgagaatgatgggggtccctctgcgtctgctaattagacaaacattctatatctagtgccaaaagtggtcctaaatcctttggcaagggtcctttctgctctcatgctgatttgggggaggactgggcatcctgcctcaggagaacttgagtcctgaggaaagggccctagtaacacttaagggctacccctggctaacagatactcggctgtgggtgagagcagaaggtcttggacccctcgatgtgcaggtacttaattgtgtttccagtgcattttcatatacattatcccatttaacctttataacaggttcacagagtggatattcccattctgttgatgagaaaaagagtggagagactgtgtccagtgtcagcaggaagaaaaaagatctgttggaggccagtacatgttgacagaaactctagaccatattttgtctcctgtctttggccaaagagaactagcttcagtctgaaaagggcagggctaagtggttacaaggaactaaaaagttcaaggtaagacaaatgaggtaaaaataaaaaagagcacttagctgctctgagacattttagtctcctgactggtaaacagcagctggggcaccaaggggctcccaggagtttgtcgagcttttattggagtgaactgaaaggaaaatggaaggaatgctataagactgaaaagaagttaaagccctaggaaggaagctgataacacaagttacagacgtatatgtgacattgatttgggagaatgaacctacaacaaatgacccaaaagcacctaaataagagtgacgagagtttaacagacattcattatggacttcagagaaaatgatgctaaactggtcttagaatcttctttaattttgttaactaggtaaataatctggacattttagtcaaagcattagacagacagagaagttggtaactgaccactaactaacaaactataaattcacccattgtgggttgacctggtaagttcccccagggctgtgtccttggcccctcctttgatattagtgacagatgactttttttatgccttacccattccacaaaagaatttgaagccatttacacaagagatagtactagtaaattaggagtgctgatcaaatttttagataataagaaacccttaggaaggatgacaatttagaatccaaatttaggatccaaacaaataccattacaaactataaaaatgagcagaatctaaatgtaacatttcaataaatgcagattgataataacatctgtgcagagttgaggactatagagtactgtgctgtcactaacagtattgtgtgctactaagagtttaatggctgggtgtggtggctcacacctgtaatcccaacactttgggaggcctaggtgggtaaatcagctgagatcaggagttcgagaccagcctggccaatgtggtgaaaccccgcctctactaaaaataaaaaaattagctgggcatggtggcacgtgcctgtaatcccagctactcgggaggctgaggcgggagaatcacttgaacctgggagacagaggttgcagtgagtcgagatcacaccattgcactccagcctgggcaacagagcaagattctgtctcaaaaaataaagtttattatgccaggagggccaggtgtggtgccacacccatgtaatcccagcactttaggaggctgaggagggcagatcacttaagcccaagagtttgagaccagtctgggcaatgtggcaataccttgtctcttaaaatttaaaataaaaaaaaagtttattatgccaggaactgttaatgtgtccaaaaaaactccagtgtggttctaggatgagataataaaaacaggttgtctagggtagtgtggaaggtcctttcagtcttcctgtgcctatcagtgatcctcattgccatgttcccttctggtgctcaaccggaggctccctgacagatgagtcctctgccagaggaaggctaagatgtagaggacaaatcgtgtcaaggaaaagaagcttgaaggagctaagaatgcttagcttagagaagacaagaggaaacaggacatggctttgggaagttcaaggatggtccagtgaaatacatactatacttttgcaccccagctaagctgacccatgatcagtaagtaggaaataaaaggccaatttctggctactcttgcccccaaccccatttcagtgaactatgaacctctattagatatgcaaggccggtgctaaatgctggagggctttggccctttccctcaaggagctagtctagtagggggtcagaaatacagatgggcctgaacataatgatggtttgacttccagtttttcaactttaggattgtgcaaaagctatacacattcggtagaaacagtacttcaagtatccatacaatcagtacagtattcaataaattacatgagacattcaacactttattataaaataggctttgtgttagatgagtttgcccaactgtaagctaatgtaagtgatctgagtaggtttaaggtagcctaggtgtattaaatgcatttttcacttaacggtattttcaacttttgttgggtttattgggatgtagccccattataagctgaaaagcatctgtagtataataaatgtggggagtgctgtgagagaaataagtgtactgggtttagttcccactgcccaaaaaaggaactggctaatggtaacctgggggaggaagtcgggtaagttgcatggagaaggcaacccttgaacacttgcaaggagctaacaatacctgcttctggagtatttaaacgccagtgggtatgctaaatacttttacctcagaccacctactaaccttacaaagtagtccactttgctcacccagttttacagattgatgaaactgaagcagacagatattgttaacctatcaaaggtcaccctgcaagtgtgtgattatagtccaagcagcttgtacttgttgcctatttgttttgcctttcctgtgcatttgccaggcagatgagagtggggtaagacattgcagagaaaaagtaagaaaaggccgtcatgaaacaatttcattttcagaccttataagcacgttacaagtactgatatttatgcttaagttcacgggagtcctggccagaaataaagctggaaggacaagtggggggcagattgtgaaggatccttcaagacctgcttcctctagagaatgggagactacccaagataactaaacagggaagtgatcaggttttgtgtcttagaaaagtgttgcagtgttgatgcaaatgtgactagaagggtgacttggaacctggattgaaggggtgggagatgggagaaaggaatgcagtctggcagcagctacagcagtccaggtgggaaaacccagagcctgaactaaggttgtaactagaggggatagggtggaagagctggattagagatgttgacaagataaagtcagtaggacttaaagactgacaagtaaggattttccaaaagtgagagctgtggaatgaattgtcttaaaatgttgcagtgagttcctcctcatcaatccaagtgctcgatcagaggctagacctttagttagcagtcacgggaaaattccccattctcacggggatttagactaggtcttaaccatactttaccaagattccagtagcaaagcacccaaaagtaatcgcaataaaattccaatttttgtaggccgggcatagtggctcacacctgtaatcccagcactttgggaggccgaggcaggcggaccacgacatcaagagttcaagagcagcctggccagcatggtgaaaccccgtctctactaaaaatacaaaaaaattagctgggcatggtggcgcatgcctataatcctagctactcaggcagctgaagcaggagaattgcttgaacccgggaggcagaggttgcagtgagccaagatcatgccactacactccagcctgggcgacagagcgacactctgcctcaaaaaaaaaaaaaaacaaaaaaaaaaacaagttttgtgaatttaagtttccctaatggatggtacaggtcaacatttgccatctaatgacacttacattccagttttttccttttttgagtaactgggaaaagggtggcattactgctggcttcctaaaattgaaaagtatactagggtttttaaacctgtgtagaatacatgatatggtagcaaatgtgctgtaggaagaaaagcaatgaggaactactggcctgactaggaggcctagaagtccctcccaggcttgagttgttctgacttggcatgattacatagctgcggcaagtgacgtttccttcaagccttggttccctcatctgtaaaatagggaactaatacctacctcacaggattgtagttagaattaaggatgacttcattaaagcacctctagtggtggaagatgtcccatcctatcccccacccatagctgggagctatgtttggctcattcttcctgactcactggattacactgtgactcagttcaatttcacacatgctgctgctaaattagggtcttggtgagcctttgggaggacagctctgaggaatgaattgtagcactgcagccctgcctgaggaacatgatagaaacaggtggtaggcccagctcttgccttccacctactaagcagtttttctgtggttagctgtgtgacataaactatcggtgtattaatttgctttcactagattcccccccccccaacaacttagtccaagaacatacctgaattctttgcatttccttgccttagttgcttttgtagggtggacagcaggactgcatgagaatagctgtgcttctggaccctatggtgaaagctctagtgaactgcaattaggcccagggtcccggaggaagaaggggagagaaaaaggggggtagttttccaaaagataagtaggggacaaaaaagtccacggggcctatgagcggtgagactcctgccctgattgtggcaaagcacctggagatgatagaacttcctagggaaaaggctgcatggagtccccagggatgctgggccctggtcaccaaggctccctgggaaggtctcttgtacctggggcacacagaccaacacttctgaatttgcaagcttaagagcatgtatgagcagaacctgtgcagaccaaggcttagagggctcacctcaatgttttgcactgtgtgagaccccaggaccttttcgtgattctggagaggggaacaaaccataataacaacaaaccaggtagcaggatagagactcattctcatctattttggttaaaagaaaataaatgtatttcttccacacctgattttgtgattgcaaattcataactaatatccctcgtcagctccgctgactcatccctgccacagggaggttcacagcaagagcacagaaactagggccagtgcccggttgtgtgaccttgagtaagttctttttcccttgaacagggagagagacacaatggatcagagtgtctctgccagttctaacttggggattctagtgggttgaaccgaacggtagtccgtttccaaaagaggaagccaagaccagagggggagtggttccttcaagtttgcagaaccagtaagtggcagagcaggactcatatctagttagtggttcagagcatgggctccggagctagactgcctggatttgaaccctggctttgccacttgcctgttgggtgactttggacaagctgcttaaattatgtctccatttcctaatccacagaacaagtgtaatactagttatctgtttcatggagtgattgtgaggattaaataaagttaatataacacaaagca

SEQ ID NO: 196543 - DNA, 3126 bp, Artificial Sequence
  derived and/or modified sequence
atggctgctgctgctgctgctggagctgccagcggcctgcccggccctgtggcccagggcctgaaggaggccctggtggacaccctgaccggcatcctgagccctgtgcaggaggtgcgggctgctgctgaggagcagatcaaggtgctggaggtgacagaggagtttggagtgcacctggccgagctgactgtggacccccagggcgccctggccatccggcagctggccagcgtcatcctgaagcagtatgtggagacccactggtgtgcccagagcgagaagttccggcccccagagaccacagagcgggccaagatcgtcatccgggagctgctgcccaacggcctgcgggagagcatcagcaaggtgcgcagctctgtggcctatgctgtgtctgccatcgcccactgggactggccagaggcctggccccagctgttcaacctgctgatggagatgctggtgtctggggacctgaatgctgtgcacggggccatgagggtgctgacagagttcacccgggaggtgacagacacccagatgcccctggtggcccctgtgatcctgcctgagatgtacaagatcttcaccatggccgaggtgtatggcatccgcaccaggagcagagctgtggagatcttcaccacctgtgcccacatgatctgcaacatggaggagctggagaagggggccgccaaggtgctgatcttccctgtggtgcagcagttcacagaggcctttgtgcaggccctgcagatcccagatggccccaccagtgacagcggcttcaagatggaggtgctgaaggctgtgacagccctggtgaagaacttccccaagcacatggtgtcctccatgcagcagatcctgcccatcgtgtggaacaccctgacagaatctgctgccttctacgtgaggacagaggtgaactacacagaggaggtggaggaccctgtggacagtgatggagaggtgctgggctttgagaacctggtgttcagcatctttgaatttgtgcacgccctgctggagaacagcaagttcaagagcacagtgaagaaggccctgcctgagctgatctactacatcatcctgtacatgcagatcacagaggagcagatcaaggtgtggacagccaacccccagcagtttgtggaggatgaagatgatgacaccttctcctacacagtgagaattgctgcccaggacctgctgctggccgtggccacagacttccagaatgaatctgctgctgccctggccgccgccgccaccaggcacctgcaggaggccgagcagaccaagaacagcggcacagagcactggtggaagatccacgaggcctgcatgctggccctgggctctgtgaaggccatcatcacagacagcgtgaagaatggccgcatccactttgacatgcacggcttcctgaccaacgtcatcctggccgacctgaacctgtctgtgagccccttcctgctgggccgggccctgtgggccgccagccgcttcaccgtggccatgagccctgagctgatccagcagttcctgcaggccaccgtgtctggcctgcacgagacccagccccccagcgtgcgcatctctgctgtgcgggccatctggggctactgtgaccagctgaaggtgtctgagagcacccacgtgctgcagcccttcctgcccagcatcctggatggcctcatccacctggccgcccagttcagcagcgaggtgctgaacctggtgatggagaccctgtgcatcgtgtgcaccgtggaccctgagttcaccgcctccatggagagcaagatctgccccttcaccatcgccatcttcctgaagtacagcaatgaccctgtggtggccagcctggcccaggacatcttcaaggagctgagccagatcgaggcctgccagggccccatgcagatgaggctcatccccaccctggtgtccatcatgcaggccccagctgacaagatcccagctggcctgtgtgccacagccatcgacatcctgaccaccgtggtgaggaacaccaagccacccctgagccagctgctgatctgccaggccttccctgctgtggcccagtgcaccctgcacacagatgacaatgccaccatgcagaatggaggagaatgtctgcgggcctacgtgtctgtgaccctggagcaggtggcccagtggcatgatgagcagggccacaacggcctgtggtacgtgatgcaggtggtgtcccagctgctggaccccaggaccagcgagttcaccgctgcctttgtgggccgcctggtgtccaccctcatcagcaaggccggccgggagctgggggagaacctggaccagatcctgcgggccatcctgagcaagatgcagcaggccgagaccctgtctgtgatgcagagcctcatcatggtgtttgcccacctggtgcacacccagctggagcccctgctggagttcctgtgcagcctgcccggccccaccgggaagccagccctggagtttgtgatggccgagtggaccagccggcagcacctgttctacggccagtatgagggcaaggtgtcctctgtggccctgtgcaagctgctgcagcacggcatcaatgctgatgacaagaggctgcaggacatccgggtgaagggggaggagatctacagcatggatgagggcatccgcaccaggagcaagagcgccaagaaccctgagcgctggaccaacatccccctgctggtgaagatcctgaagctgatcatcaatgagctgagcaatgtgatggaggccaatgctgcccggcaggccaccccagctgagtggagccaggatgacagcaatgacatgtgggaggaccaggaggaggaggaggaggaggaggaggatggcctggccggccagctgctgagtgacatcctggccaccagcaaatatgaggaggactactatgaagatgatgaagaagatgatcctgatgccctgaaggaccccctgtaccagattgacctgcaggcctacctgacagacttcctgtgccagtttgcccagcagccctgctacatcatgttttctggccacctgaatgacaatgaaagaagagtgctgcagaccatcggcatctag

SEQ ID NO: 196544 - DNA, 3126 bp, Artificial Sequence
  derived and/or modified sequence
atggccgccgccgccgccgccggcgccgccagcggcctgcccggcccggtggcccaggggctgaaagaggctctcgttgatactttgactgggattcttagccctgtgcaggaagtgagagcagctgctgaagagcaaatcaaagtgctggaggtcaccgaggagttcggagttcaccttgcagagctcacagttgacccccaaggcgcacttgcgatccggcagctggccagtgtgatcctgaagcagtacgttgaaactcattggtgcgcacagagcgagaaatttcgacctcccgagaccactgaacgggctaaaatcgtcataagagagctcctgcccaatggcctccgcgaatctattagcaaggtgcggagcagtgtcgcatatgccgttagtgcaatagcccattgggattggcctgaagcttggccccagctctttaacctgctcatggagatgctggtctcaggcgacctcaatgcagtacatggagctatgcgggttctgacggagttcacaagagaggtgacagatacgcagatgccattggtggcccccgtgatcctacccgaaatgtacaagatattcaccatggctgaggtgtatggtattagaactcgctcccgggctgtggagattttcaccacctgtgcacatatgatttgtaacatggaggagctcgagaagggtgcggccaaggttctcatattcccagtcgttcagcaattcacagaagccttcgtccaagcgttgcagatccctgacggccctacgagtgatagtggttttaaaatggaggtgctgaaggcagtgaccgccctcgtgaaaaactttccaaaacacatggtgtcctcaatgcagcagatcctgcctatcgtttggaataccctaaccgagtccgccgccttctacgtcagaacagaagtgaattatacggaagaggtggaagaccccgtggacagcgatggtgaagttttgggctttgagaacctggtcttttccatcttcgaattcgtgcacgcacttttggagaattccaaatttaaaagtaccgttaagaaggctttgcccgagctcatttactacattattctgtacatgcagattaccgaggagcagatcaaggtctggaccgctaacccccagcaattcgtcgaggatgaggacgacgatacgttcagctacacggtgcgaatagcggcccaggatttgctgttagccgtagcaaccgattttcagaacgaaagcgctgcggctctagcggcggcggcgaccagacatttgcaggaagccgaacagacaaaaaattcaggcacagaacactggtggaaaatacacgaggcctgcatgctcgcccttggctcagtgaaggctatcattactgacagcgtcaagaacggccgtatccatttcgacatgcatgggttcctgacaaatgttattttggccgacttaaacctgagtgtgtccccgttccttctgggacgcgccctgtgggccgctagcagattcacagtggccatgagtcccgagctgatacagcagttcctgcaagccacagtgagcggactgcacgagacccagcctccgtcagtgcggattagcgctgtccgggctatttggggttactgtgatcaactgaaggttagtgaatcaactcatgtgttgcagcctttcctgccatccatcttggatggcctcattcatctggcagcgcagttctcatcggaagtactcaatctcgtgatggagacactgtgcatcgtctgtaccgtggatcccgaattcaccgcctctatggagtcgaaaatttgcccatttaccattgcaatttttctgaagtattccaatgatcccgtggtcgcttcgctggcgcaggacatcttcaaggaactcagccagattgaagcttgtcagggtcctatgcagatgagactgatccccaccttggttagcattatgcaggctccagcagacaagatccctgctggcctgtgcgccaccgctatagacattctcacaaccgttgtccgtaacacaaagccaccgctctcacaactgttgatctgtcaggccttccctgccgtcgcacagtgcacattgcatactgatgataatgcgactatgcaaaatggaggcgaatgcttgcgggcgtatgtgtccgttaccctcgagcaggtcgctcaatggcacgacgagcagggccacaacggcctgtggtacgtgatgcaggtcgtgtcccagctcttagaccctcggacaagcgagttcacagcagccttcgtgggcagactcgtttcgaccttaatctcaaaggcgggtcgtgaacttggcgagaaccttgatcagatcctccgcgctattctgtccaagatgcagcaggccgaaaccctctctgtaatgcagagtctcatcatggtttttgcacacttagtgcacactcaacttgagcctctgttggaattcttatgttctctaccggggcctacgggaaagccagccttggagtttgtcatggctgagtggacaagccgccaacacctgttttatgggcagtacgagggaaaggtcagctccgtggcactgtgcaaactgctgcagcatgggattaatgcggatgataagcgattgcaggacattagagtgaaaggcgaggagatttactccatggacgaaggcatccgaacaagatcaaagagcgcgaaaaaccccgaacggtggacaaacattcctcttctcgtgaagattttgaagcttattatcaatgagctcagtaatgtcatggaagcaaatgcagcgagacaagcaacacccgccgaatggtcacaggacgactctaatgatatgtgggaagaccaggaggaggaagaagaggaggaggaagacggactggctgggcaacttctttcagacatactcgccacctctaagtacgaggaagattattacgaggacgacgaggaggacgaccccgacgctctgaaagatcccctctaccagattgatttacaggcgtacctcacagatttcctgtgtcagttcgctcagcagccttgctacattatgtttagtggccacctgaacgacaatgagcggcgcgttctgcaaacgatcggaatttag

SEQ ID NO: 196545 - DNA, 3126 bp, Artificial Sequence
  derived and/or modified sequence
atggctgccgctgccgctgcgggagccgcatcgggactacccggtcctgtagcccaagggctcaaagaagctctcgtcgatacactgacagggatcctatctcctgtccaggaggttcgtgctgctgcagaggagcagattaaggtcctggaggtgactgaagagttcggggtgcacctggctgagctgaccgtggacccacaaggggcactcgctatcaggcagttggccagtgtcatactgaagcagtacgtcgagacgcattggtgcgcccaatctgaaaaattccgaccccctgagacaacagaaagagccaagattgtgataagagagttgctgccaaacggcctgcgcgagtctatctctaaagtgcggagttccgtggcctacgcagtcagcgctatcgcccactgggattggccagaggcttggccccaactgtttaaccttctgatggagatgctggtcagcggtgatttgaacgccgtgcacggcgctatgcgggtcctgacagaattcaccagggaggttactgatacccaaatgccgctggtggctcccgtcatcttgcccgagatgtataagatcttcactatggccgaggtgtatggaattcggacgaggtcccgcgctgttgagatcttcactacttgcgctcacatgatatgcaacatggaagagctcgagaaaggtgctgccaaggtgcttatcttccctgttgtccagcaattcactgaagcctttgtgcaggctctccagattcccgatggccctacctcagattccggtttcaagatggaggtgcttaaggccgtgaccgcactggtgaaaaacttcccaaaacatatggtatcatctatgcagcaaatactcccaattgtttggaataccctcacagagtcagcagccttctatgtccggactgaggtaaattacactgaggaagtggaggaccccgtagatagcgatggtgaggtcctcggattcgaaaatctagtgttctccatttttgaatttgtgcatgcacttctggaaaatagtaaattcaaaagtacagttaaaaaagctttaccggagcttatctattatatcatcttgtatatgcagattaccgaggagcaaataaaggtgtggaccgccaaccctcagcagtttgtcgaggatgaagatgacgacacttttagctacaccgtcagaatagcagcccaggaccttttgttagccgtggccacagatttccagaacgagagtgctgctgccctggcagcagcagcaacacggcacctgcaagaagctgaacagacgaaaaattccggaacggagcactggtggaagatccacgaagcctgtatgttggctttgggcagcgtgaaggccataattactgattctgtcaaaaacggtaggatccactttgacatgcatggttttctgactaacgtcattcttgcggacctgaacctgtcagtgagtccctttctcctcggcagagctttgtgggctgccagccgcttcacggtcgcgatgagcccagaactcatccaacagtttcttcaggcgaccgtcagtggcctccatgaaactcagccaccaagcgtgcgcattagtgctgtgagggccatctggggatactgcgatcagctcaaagtcagcgaatccacccacgtcctccaacccttcctgccgtcgatcctggacggcctgatacatctggctgctcagttctcctccgaggttctcaacttggtcatggagacgttgtgtatcgtgtgtacagtcgaccccgagttcacagctagcatggaatctaagatctgcccatttacgatcgcaattttcctgaagtactctaatgaccctgtggtggccagcttagcccaggacatattcaaagagctttcgcaaatcgaagcatgccaaggacctatgcagatgaggcttattccaactttagtgagcataatgcaagcgccagccgataaaatacctgcgggattgtgcgctacggccatagatatactgacaacagttgtgcggaataccaagccgcctctgagtcagctccttatatgtcaagcgttcccagcagtcgctcagtgcacactgcatactgatgataacgccacaatgcagaatggtggagagtgccttcgggcttacgtgagtgtgacgctcgagcaagttgctcagtggcacgacgaacagggacacaatgggctgtggtacgtcatgcaggtcgtgagccagctccttgaccctcgaacctcagagttcaccgctgcatttgtgggacgcctcgtaagcaccctgatctccaaagcgggtcgtgagctcggagagaatcttgatcagatcctgagagcaatcttgagcaagatgcaacaggctgaaaccctctctgtcatgcagagtttgataatggtgttcgcacacctggttcatacacagttggaacccttgctggaatttctttgctctctccctgggccaaccggcaaacccgctctggaattcgtcatggctgagtggacaagccggcagcacctgttttatggccagtatgagggcaaagtctcttctgtggcgctgtgtaagcttttacaacacggcataaacgccgatgataaacggttgcaggacattcgcgtgaaaggcgaggagatttattcaatggacgaaggtatcaggactcggtcgaagtccgccaaaaacccagagcggtggacaaatattccacttctcgttaagatccttaagctgatcatcaatgagctctctaacgtcatggaagccaacgctgctcggcaagccactcctgctgagtggtcacaagacgactccaatgatatgtgggaggatcaagaggaagaggaggaagaggaagaagacgggctggcagggcagctcctgagcgacatcttagcgacaagcaaatacgaggaagactattacgaggacgacgaggaggatgatccagatgcactgaaggaccccctgtaccaaatcgacttacaggcgtatcttaccgattttctgtgccagttcgcacagcaaccatgctatatcatgttcagtggacatctgaacgataacgaacggagggtcctgcagaccattggtatttag

SEQ ID NO: 196546 - protein, 759 aa, Artificial Sequence
  derived and/or modified sequence
MISSTSVYGLKMQWTPEHAQWPEQHFDITSTTRSPAHKVEAYRGHLQRTYQYAWANDDISALTASNLLKKYAEKYSGILEGPVDRPVLSNYSDTPSGLVNGRKNESEPWQPSLNSEAVYPMNCVPDVITASKAGVSSALPPADVSASIGSSPGVASNLTEPSYSSSTCGSHTVPSLHAGLPSQEYAPGYNGSYLHSTYSSQPAPALPSPHPSPLHSSGLLQPPPPPPPPPALVPGYNGTSNLSSYSYPSASYPPQTAVGSGYSPGGAPPPPSAYLPSGIPAPTPLPPTTVPGYTYQGHGLTPIAPSALTNSSASSLKRKAFYMAGQGDMDSSYGNYSYGQQRSTQSPMYRMPDNSISNTNRGNGFDRSAETSSLAFKPTKQLMSSEQQRKFSSQSSRALTPPSYSTAKNSLGSRSSESFGKYTSPVMSEHGDEHRQLLSHPMQGPGLRAATSSNHSVDEQLKNTDTHLIDLVTNEIITQGPPVDWNDIAGLDLVKAVIKEEVLWPVLRSDAFSGLTALPRSILLFGPRGTGKTLLGRCIASQLGATFFKIAGSGLVAKWLGEAEKIIHASFLVARCRQPSVIFVSDIDMLLSSQVNEEHSPVSRMRTEFLMQLDTVLTSAEDQIVVICATSKPEEIDESLRRYFMKRLLIPLPDSTARHQIIVQLLSQHNYCLNDKEFALLVQRTEGFSGLDVAHLCQEAVVGPLHAMPATDLSAIMPSQLRPVTYQDFENAFCKIQPSISQKELDMYVEWNKMFGCSQ

SEQ ID NO: 196547 - DNA, 2280 bp, Artificial Sequence
  derived and/or modified sequence
atgatctcctcaacctcggtctacggcctgaaaatgcagtggactccagaacatgctcagtggccggaacagcacttcgatataaccagcacaacacgcagtcccgcgcacaaggtggaggcttatcggggccacctgcagaggacttaccagtatgcttgggccaacgacgacatcagcgctttaactgctagtaatctcctcaaaaagtacgcggaaaagtatagtggtatcctggaaggtcctgttgaccgtcctgtacttagcaattattcagacacaccatccggcctcgtaaacggaagaaagaacgagagcgaaccctggcagcccagcctcaactcagaggctgtgtaccctatgaattgtgtgccagacgtgattactgcttcgaaggcaggggtgagcagcgccctcccacccgcggatgtttccgcaagcatcggctcatcaccaggcgtggcatccaatctaactgaaccttcatacagctcctcaacttgcggaagccacacagtcccatcccttcacgcaggcctgccatcacaggagtatgcaccagggtacaatggatcctacctgcacagcacatactctagccagccggcccccgccctcccttcacctcacccgtcaccgctgcatagctccggcttgctgcagcctcctccccctcccccccctccaccagcacttgtgcctggctataacgggacaagcaacctgagttcatacagttacccatccgcctcttatccgccccaaactgccgtgggctctgggtactctcccggcggcgcacctccacctcctagtgcttatttgccctcaggaatccctgctcccactccccttccgcccacaacggtgcccgggtatacctaccaggggcacggcctgacacccatcgctccctctgcgctcaccaatagcagtgcttccagcttgaaacgcaaagccttttatatggccggccaaggtgatatggacagctcgtatggaaattattcgtacggccagcagcgctccacccaaagtcccatgtatagaatgcctgataactcaattagtaacacaaatcggggaaacggcttcgataggtctgcagagactagttctctggctttcaagccaacgaaacaattaatgtcaagtgaacagcagaggaaatttagttcccagagttctcgggcactcacccctccttcatattccacagctaaaaattcactgggaagcagatcctcggaatcctttggaaaatacacaagcccagtgatgtccgagcacggggatgaacatcgacagttgctgtcacatcccatgcagggtcctggcctcagggcagctaccagctccaaccactccgtcgacgaacaactcaaaaacaccgacacccatctcatcgaccttgtcaccaacgaaattataacccagggaccacccgtagactggaacgacattgcagggctagacctggtgaaagccgtgatcaaggaggaggtcctctggccagtgctacggagcgatgccttttctgggctaaccgccctgccgagatccattctcctgttcgggccccggggaactggaaaaaccctgctgggccgatgtatcgcttcacagctgggcgcaacgttctttaaaatcgctgggtctggcctcgtggcaaagtggcttggggaggccgagaaaattatacatgcatctttcttagtagcccggtgtaggcaaccctcggtcattttcgtgtcagatattgatatgctcctaagctctcaggtcaacgaagagcattcacctgtctcacgcatgcggactgagtttctgatgcagctggacaccgtgttgacatcagcggaagaccaaatcgttgtcatatgcgcgacttcaaagccggaggaaatcgatgagagtctgaggcggtattttatgaaacggctgttgatcccactccccgactccacagcccgccaccagattatcgtccagctgttatcccagcacaattattgcctcaacgataaagagtttgctttgctggttcagcgtaccgaggggttctccggactggacgttgctcatttgtgccaagaagcagtggttgggcccctgcatgccatgccagccactgacctcagtgccattatgccctcccagctgcgacctgtgacataccaggatttcgagaacgccttttgcaagattcagccctctatcagccagaaggagctagatatgtatgtggagtggaacaaaatgtttggatgtagccagtag

SEQ ID NO: 196548 - DNA, 2280 bp, Artificial Sequence
  derived and/or modified sequence
atgatcagcagcacctctgtgtatggcctgaagatgcagtggaccccagagcacgcccagtggccagagcagcactttgacatcaccagcaccaccaggagccctgcccacaaggtggaggcctaccggggccacctgcagaggacctaccagtatgcctgggccaatgatgacatcagcgccctgacagccagcaacctgctgaagaagtatgcagagaagtacagcggcatcctggagggccctgtggacaggcctgtgctgagcaactacagcgacacccccagcggcctggtgaatggaaggaagaatgaaagtgagccctggcagcccagcctgaacagcgaggccgtgtaccccatgaactgtgtgcctgatgtgatcacagccagcaaggccggcgtgtcctctgccctgcccccagcagatgtgtctgccagcatcggcagcagccctggggtggccagcaacctgacagagcccagctacagcagcagcacctgtggcagccacacagtgcccagcctgcacgccggcctgcccagccaggagtatgcccctggctacaacggcagctacctgcacagcacctacagcagccagcctgccccagccctgcccagcccccaccccagccccctgcacagcagcggcctgctgcagcccccacctcctcctcctcctcctccagccctggtgcccggctacaacggcaccagcaacctgagcagctacagctaccccagcgccagctacccaccccagacagctgtgggcagcggctacagccctgggggcgcccctcctccacccagcgcctacctgcccagcggcatcccagcccccacccccctgccccccaccaccgtgcccggctacacctaccagggccacggcctgacccccatcgcccccagcgccctgaccaacagcagcgccagcagcctgaagaggaaggccttctacatggccggccagggcgacatggacagcagctatggcaactacagctatggccagcagaggagcacccagagccccatgtacaggatgccagacaacagcatcagcaacaccaacagaggaaatggatttgacagatctgctgagaccagcagcctggccttcaagcccaccaagcagctgatgagcagcgagcagcagaggaagttcagcagccagagcagccgggccctgaccccacccagctacagcacagccaagaacagcctgggcagccgcagcagcgagagctttgggaagtacaccagccctgtgatgtctgagcacggagatgagcaccggcagctgctgagccaccccatgcagggccctggcctgcgggccgccaccagcagcaaccacagcgtggatgagcagctgaagaacacagacacccacctgattgacctggtgaccaatgagatcatcacccagggcccccctgtggactggaatgacattgctggcctggacctggtgaaggccgtcatcaaggaggaggtgctgtggcctgtgctgcggagtgatgccttcagcggcctgacagccctgcccaggagcatcctgctgtttggcccccggggcaccgggaagaccctgctgggccgctgcatcgccagccagctgggcgccaccttcttcaagattgctggcagcggcctggtggccaagtggctgggggaggccgagaagatcatccacgccagcttcctggtggcccgctgccggcagcccagcgtcatctttgtgtctgacatcgacatgctgctgagcagccaggtgaatgaggagcacagccctgtgtccaggatgaggacagagttcctgatgcagctggacacagtgctgaccagcgctgaggaccagatcgtggtgatctgtgccaccagcaagccagaggagattgatgagagcctgcggcgctacttcatgaagaggctgctgatccccctgcctgacagcacagcccggcaccagatcatcgtgcagctgctgagccagcacaactactgcctgaatgacaaggagtttgccctgctggtgcagaggacagagggcttcagcggcctggatgtggcccacctgtgccaggaggccgtggtgggccccctgcacgccatgcctgccacagacctgagcgccatcatgcccagccagctgcggcctgtgacctaccaggactttgaaaatgccttctgcaagatccagcccagcatcagccagaaggagctggacatgtatgtggagtggaacaagatgtttggctgcagccagtag

SEQ ID NO: 196549 - DNA, 2280 bp, Artificial Sequence
  derived and/or modified sequence
atgatcagcagcaccagcgtgtacggcctgaagatgcagtggacccccgaacatgcccaatggcccgagcagcacttcgatattactagcacaactaggagccctgcgcacaaggttgaggcgtaccgggggcacttacagcggacctatcagtatgcatgggccaacgacgacatcagcgccctcacagcgtcaaacctccttaaaaagtatgctgaaaagtactctggtatcctcgagggccctgtggacagaccagtgctttccaactacagtgacacaccatccggcctggtcaatgggcgaaagaacgagtctgaaccgtggcaaccttcgctaaattcggaagcagtgtatccgatgaattgcgtcccagacgtcatcactgcctccaaagcaggtgtgtccagtgccctgccaccagccgatgtcagtgcttctattggttcatctcctggagtggcctctaaccttacggagcccagctactctagttctacttgcggctcgcacactgtgcccagccttcacgccggcctaccgtcacaagaatacgccccaggatataatggctcttacctgcatagtacctatagctctcaacccgcacctgccctcccaagtcctcacccttcgccgctgcactcgtctgggctgttgcagcctcctccccctccacccccacctcctgccctggtgccaggatataatggcaccagtaatctttcttcatacagctatccatcggcaagctacccgcctcagacagcggtcggtagcggctactctcccgggggcgccccaccacctcccagtgcataccttccatccggtatccctgcccccacacccctccctccaacaacagttccaggctacacctatcagggccacgggttaactccaattgctccctccgcactgaccaacagtagtgcaagctccctgaagcggaaagctttctacatggcaggccaaggagatatggatagctcctatgggaattactcttacgggcagcagcggagtacccagtcccccatgtaccgcatgccagacaattcaatctctaacacgaatcgaggcaacggcttcgatcgtagcgcggaaacctctagcttagcattcaagccaacaaaacagctgatgtcttcagagcagcaacgaaagttctcatcgcagtcatctcgcgcccttactcctccctcttactctacggccaaaaattcgctcggaagccgcagttctgagtccttcggtaagtatacaagcccggtgatgagtgagcacggtgatgagcacaggcagcttctgagccaccctatgcagggtccaggtttgagagccgcaacaagctccaaccactctgtggacgaacagctcaaaaatactgatacccatctgattgacctggtgacaaacgagatcattactcagggcccccccgttgattggaatgacattgcgggcctggaccttgtgaaggcagtgataaaagaggaagtgttgtggcccgtcctgcgctctgatgcattctcggggctgaccgccctgccgcgtagcatcctcttgttcggtccccgaggcactggcaagacacttctcggtcgctgcatcgccagtcagcttggcgctaccttctttaaaatcgctggttccggacttgttgccaaatggctcggtgaggcggagaagattattcatgcatcctttctcgtggctaggtgccggcagccaagcgtgatcttcgtgtccgatatagacatgctcttatcttcacaggtgaacgaggaacactcccctgtctcacggatgaggacagaatttcttatgcagcttgacaccgtgctgaccagcgcagaggaccagatcgtagtaatttgcgctacgtcaaagcctgaagaaatagacgagagcctacgccgatatttcatgaagcgcttactcatccctctccccgactctactgcacggcaccagataatcgtacagctcttgtcccagcacaattactgtctaaacgataaggaatttgccctcttggtgcagcggacagagggattttcgggtttggatgtggcacacctctgccaggaagctgtcgtgggacctctgcacgcaatgccagccacagatctaagtgctattatgcccagccagcttcggccagtgacttatcaggatttcgagaatgccttctgcaaaatccagccgagtatcagccagaaggaactcgacatgtatgtagagtggaataagatgtttggctgcagccagtag

SEQ ID NO: 196550 - DNA, 2280 bp, Artificial Sequence
  derived and/or modified sequence
atgatttcctctacaagcgtatacggattaaaaatgcagtggactcccgagcacgctcagtggccagagcaacactttgacatcacttctactacgaggagtcctgctcacaaggtggaagcgtaccgtggacacctgcagcgtacctaccagtacgcctgggcgaatgacgatatttcggcgctgaccgcctccaatctgctcaaaaaatatgcggaaaagtacagcgggatcctcgaagggccagttgatcggccagtgttaagtaattactcagatacccctagcggactagtgaatgggagaaaaaatgaaagcgaaccatggcagccatcccttaatagtgaggctgtgtaccccatgaattgcgtccctgatgtgattacagccagtaaggctggcgtttccagcgcattgccaccagcagacgtcagtgcatctattgggagttctccaggtgtggccagtaatctgacagagccctcctattcatcctctacatgcggctcccataccgtaccaagcctccatgctgggctccccagtcaggagtacgcacccggatacaatggaagctaccttcactccacctattcttcacagccagcgccagccctcccctcccctcacccatcgccattgcactctagcgggctgttgcagccaccccctcctcccccacccccacctgctcttgtgcctggctacaacggcacctctaacctgagtagctactcttacccttctgcatcgtacccccctcagactgcagtggggagcggatacagcccaggcggtgcacctccacctcctagcgcctatctccctagcggtataccagccccaaccccactcccaccaacgaccgtgcctgggtatacctatcagggtcacggactcacccccatcgcccctagcgcactcacgaacagcagcgcctccagccttaagagaaaggccttttacatggctggtcaaggcgatatggactcatcgtacggcaattacagttacggccaacagcgtagtacccagtcgcccatgtacagaatgcccgacaattctatatctaatacaaatagaggtaacggctttgatcggtcagctgagacttcctctttggccttcaaaccaacaaaacagttgatgagcagcgaacagcagcggaagttttcgtcccaatcctccagggcgctcacccctcctagttacagtacagctaagaattccctgggctccagatcgagtgagtccttcggaaagtatactagcccagtcatgtctgaacacggggacgaacacaggcaattgctttcccatccaatgcagggccctggcctgcgagctgcgaccagttcaaatcactctgtggacgagcaactcaaaaacacagacacacacctcatcgacctggttacaaatgaaattattacgcaggggccacccgtggattggaatgatatcgccggactggatctggttaaggctgtaatcaaggaagaggtcctgtggcctgtgctgagaagcgatgcttttagcgggttaactgcattgccgcgaagcatccttctcttcggacctcgagggacgggtaagaccctgctgggacgttgcatcgccagccagctcggcgctactttctttaaaatcgcaggatccggactggtggccaagtggctgggcgaggccgagaagataatccacgcatcttttctggtggcacgatgtcgccagccctccgtcatctttgtctctgacattgatatgctgcttagctctcaggtgaacgaagagcacagcccagtgtctagaatgcggacagagttcttgatgcagttggacactgtgctgacgagtgctgaagatcagatcgtggtcatttgtgctacgagtaaacctgaagagatcgatgagtcactccggaggtacttcatgaagaggctcttgatacctctcccggacagcacagccagacaccaaattatcgttcagctgctcagtcagcacaactattgtcttaacgataaagagttcgctctgctcgtgcagcgcactgaaggtttcagtggactggacgttgcccatctctgccaggaggccgtcgtcgggccattgcatgctatgccagcgaccgacctctccgcaatcatgccgtctcaattgagaccagtgacttaccaagattttgagaatgcgttctgcaaaattcagccttccatcagtcagaaggagctcgacatgtacgtcgaatggaacaagatgttcggctgctctcagtag

SEQ ID NO: 196551 - DNA, 9536 bp, Artificial Sequence
  derived and/or modified sequence
ttttgggtttgaaattccaacatggcagaggctgcagtccgtcttcccttcaaaaacttggaatgatttcaaatcataggcaccttcacttaaccctagcttccattcatcagcaaacacatcggatcgatgctacgctaacctatcgggttctctctccgcgcgttcaggttaaatgaatacctgacgaaagggcccacgtttcaaggcagtgacatttgatagctgagaggaaaagtggctttaatgaaaagcaacctttggaattcctgcttgtgagaaatccaattcagctttttgtgctgccagcaagaaatgatcagtagcaccagtgtttatggcttgaagatgcagtggacgccagagcatgcccagtggccagaacagcactttgacatcacctcaaccactcggtctcctgcccacaaagttgaagcctacagaggtcatctgcagcgcacctatcagtacgcctgggcgaatgatgacatatctgctctgactgcatccaacctactaaaaaaatatgcagagaagtattccggcattttggaaggtcctgtggaccgacccgtactcagcaactattcggacacaccatcaggactagtgaacggtcggaaaaatgaaagtgaaccctggcagccttccttgaattcagaagctgtttatcccatgaactgtgttccggatgttatcactgccagcaaagctggagtcagttcagccctccctccagcagatgtctctgcgagtataggaagctctcctggggtagccagcaacctgacagaacctagttattcaagtagtacctgtggaagccacactgtacccagtcttcatgcagggctcccatctcaggaatatgccccaggatacaacggatcatatttgcattctacttatagtagccagccagcacctgcacttccttcacctcatccgtctcctttgcatagctctgggctactacagcccccaccaccacctcctccgccaccagccttggtcccaggctacaatgggacttctaacctctccagttacagctatccgtctgctagctatcctcctcagactgctgtggggtctgggtacagccctgggggggcaccgcctccgccttcagcgtacctgccttcaggaattcctgctcccacccccctaccccccaccactgttcctggctacacctaccagggccatggtttgacacctattgcaccgtcggctctgacaaacagttcagcaagttctctcaaaaggaaagctttctacatggcagggcaaggagatatggactccagttatggaaattacagctatggccaacagagatctacacagagtcctatgtacagaatgcccgacaacagcatttcaaacacaaatcgggggaatggctttgacagaagtgctgaaacatcatccttagcatttaagccaacgaagcagctaatgtcctctgaacagcaaaggaaattcagcagccagtccagtagggctctgacccctccttcctacagtactgctaaaaattcattgggatcaagatccagtgaatcctttgggaagtacacatcgccagtaatgagtgagcatggggacgagcacaggcagctcctctctcacccaatgcaaggccctggactccgtgcagctacctcatccaaccactctgtggacgagcaactgaagaatactgacacgcacctcatcgacctggtaaccaatgagattatcacccaaggacctccagtggactggaatgacattgctggtctcgacctggtgaaggctgtcattaaagaggaggttttatggccagtgttgaggtcagacgcgttcagtggactgacggccttacctcggagcatccttttatttggacctcgggggacaggcaaaacattattgggcagatgcatcgctagtcagctgggggccacatttttcaaaattgccggttctggactagtcgccaagtggttaggagaagcagagaaaattatccatgcctcttttcttgtggccaggtgtcgccagccctcggtgatttttgttagtgacattgacatgcttctctcctctcaagtgaatgaggaacatagtccagtcagtcggatgagaaccgaatttctgatgcaactggacactgtactaacttcggctgaggaccaaatcgtagtaatttgtgccaccagtaaaccagaagaaatagatgaatcccttcggaggtacttcatgaaacgacttttaatcccacttcctgacagcacagcgaggcaccagataatagtacaactgctctcacagcacaattactgtctcaatgacaaggagtttgcactgctcgtccagcgcacagaaggcttttctggactagatgtggctcatttgtgtcaggaagcagtggtgggccccctccatgccatgccagccacagacctttcagccattatgcccagccagttgaggcccgttacatatcaagactttgaaaatgctttctgcaagattcagcctagcatatctcaaaaggagcttgatatgtatgttgaatggaacaaaatgtttggttgcagtcagtgataacttctttagaaaaaaaaaatgtaatgaatgttggcacacacacataaaacctgctacatagggaatagagcccctttccagtagagtttaaattgcaaagggtactggggaagatgacgattaagttgcatctttagagtcagggtagatttggaggaaaagtgcatcaaatgagagcttctgatttgaaagccccagatgacagaaagcatatgtggatgctcagttctgttcaagctagacaacactcaccaaggagcaaggtgcaagtgtgttgatttcagaaggacatgaacctcgtgtgttgattccattctgctgttctcgagatttagttgctgtcaagtgcctggagtggtgctttattttttgtttgcctcacaattacattggtggcatgtgctaatataaagagctttaacttcaaacattattggactaaagagatgaacagttgtgttatgacagaaaaccagatttttgccattttaagagcaacagtattcctcaatcctgtctgttctgcagtattaagctaagaacaggtaaaacagggtaacggtaatctggaccttaatttctgcagttcatttcttttaatgttcttgtctgcaaaaactcaggaaagtgattgtgatttgtacagtacctcaaaggaatgtgttgaaagcactatgtactgctgagagtaataggataggcttcaatgttactttatattaaaatgtatgtttacctcaacaattggaaaatagcaaggaaaattactttgaatgtatccagaaaaatactgaagtgtgatacaactgaatatttacagtttaaagtagaaatggaaggatttttttaagttcttttactaattatggggaattaaccagagcagaataattctttatgtcaataactgcaagagttcttagtacattgctccttgataattaagtgaaaatgttcttaaaaggtacactggttaattgaaagctacttattcagtttgtgttagtgtctagacctgtcagccacaagacctgtttaggaccctgaaagtcacagtacctaaaaactatgactgcctttttattgcataggtggtagtggtggtgatggtggtggtagtttgcaagttatctcttaaaactgctgggaatggtgtcattctattcactaatctagcttatagacttgccgtgctgtttgatagaatgcagaggatagcaaccaaaacaaatacacaaataaataaaaacaaaaaccaaccaacaaaccaacttacatacacatatatatatccacaaagaacctctccatctcctccccttctttttgactccactcttgtcagtgcaattttgcttctcattttgaaatctgggctgtagtgctcctgctttatttctacctcagttttgttacatttctcttggaaagtaaagtagaaaattggaagtggacacacacactgcaatgtagcttgccaaacatgttactttgttttcttccatctttcaccgtaaatctagtttccaaagacatcagcatttgtgcttacttccacctcagtctaccagccccacccctacccatggcataagtggcatttttcttaatttcctatttttctcctgctctctgtcaagttgttctttgtatcctttaatgctttatgtgcaacctttcattgatagtgggctgatgtttggcaatgcttctgaactgtcacagagcaggctgtagctttccacagccactgcccatgcataagcagaacagcctggccttttgaatgtattttcctgggttttttccccttttctttttttagtttagagatgcagtaacaaaactgttgcaaagcactggcattttatgtattcaataaataagtgatgtacatttttaaaaaaatttaaataaatgcaatgagaagccccaagaaaggcctttctgttttttttttcttacaaaaatttttaccgatcttatccacaatatccaattctctgaaacacttaacatagagaaagctcatgagggatttcttatctctgaaattttatgatgcttgatctttactcccctttttttattttttatgttgctaaaaactgagcaattgaaccagaatttaatttactgtgacattctgtcaattaaagctgtgcttaaatataaatattccatattaaaaagcagtgcctttcattaaggatacaaaaaataatacttaaatacgccctctgcttttcgcaagtgaataaatgctacaatcgtgttctgggtctaccctgtgcatcccttgtaaggaaattctaatatccacattaacttgtaggttcatattgatctcactgacaagtttacttttgcacagtgctgacctattttctgacttttagacattatatttcatttccgccaacatgctgtgttcacttgaaagcgtctggcaagttttgacaaacccagtcttatttagacaactttggaaaatccaatattgacccacatttttttgtggctagtaagatttaatgccaaatatatgactgcactattgtgttttacactcatttataaaactgaaaataaattgaagtcatacatcttggcttttagctttaagtgacttaaaaattagaactctgagtgacttaaaaattaatttgagatgcaagtggtcaaaaatccatgtatttagacagaagctgaagtcgtatgtgattttcatttagcctcacaaaatccaagatttgatctcttaggaaattgggcatgttgaagaaatgaagatctgttggaggagatatggctgacctttgagtagatagtgctctcctgtgattctttgattctgcatggcagcattatgagctcttctataaactagcttaataatgagctctattctgaccatctattctggaacttggagtgggggtggggtaccacatcctcagaagtgaatgtgtacagtcggtgatagtacaactgagtaatggggcttcatacccttggcctctttttgactgctaagaatttggagaaggctattaatgaaggtaaggtaatgagccagtccaaatccctcactgtctggctaagagattgagccattccactttacagcccctaattcccttcttcccaactgcagcaacatttccaacagggacaaaaaggaagtgaaggaaaccacttcagtattgggatcaatagaaattcaagaggtagttcataatgaccttatatgtgacacaaatggaaatactctacacttctggcatgcttctctcccaaatatttagaacattagtgacaatatgaaaaactttgctgactgagctgatcaatggaatgtgaaggcagtatactttaaggctatttactttcacacagaatgtttatctattagtcagtttgtattctactcaaatgcagatagacgggtataatgttttcttgtgcatttgaaacctatcaaggagaaaataaaccattccactaaaatacataggccaaacaccatctgggaaagtgataaaagctatccagaggctatgctatgtaaaatagcaaggtcaatttacatgggttgcatagtacttggctatgcagttttcaaaagaacacatccaaaaaaaaaaaaaatccaaattagttcctataataggtctttgtaaatttaaatatatttgtgggttggaaaatacgtttttagagacatttagaatttctttctctaaaaatgtatccaactccaagcagaaagagacttctgtactcacattctcatgtttcttagaattgggtagcatgatcattgaatctgtattttgcaaagtgaaagggacgcagcttgttgaactattgaggccactaaagtaaagttctaatatatatatataaatataaaattagtgtgtgtgtttgtatgtgtgtatgtgtgtgtgttctttcatcaccacctagttgaactttaaaacagacgtctacttttcattattcagaagcaacttgttacttcctttcttcatatgtgcagagatacacatgatcatgttacaatttgaagtgttttaatgtgtttttttttcttttgaaacgtaaagccttcagttgttgaatcatctgccgatttttatatgaagcacattagcaaacctggagctattagtatttcagaattcacaaccagctgtacttgtgactaaccaacacatgaactgaagctcacactttgctaagacctttggttgacattcgattttgaacctgccagatgcatttgtgtgaaccagggatactgcatctttaatgaacaagtctctcctctttcccctgtttttaaatacaacacaagcagtgtagcactaggcactgcaattgtcaaagacaattagactggaagcaggaaaatttcacctccctgtctcagtgatatgtagaatgtcggcagcatgggtcagccttgccacagagttgtgtgagaatatatgaatcagtcctatagaatgttaaatatttataaaatggttctgtagtacaccaaggttgggagcacattcattccttcttgttgtcttatgatacaaaaaaaaaaaaaaaaaaagcaaaagtttatttctgggcttaaaactctccctctaatatctctctctcttttacccccattccccaaccattcttctctccatccctctcctctcctcttcctctctcttctctctctctctctctctctctgtctctaactctcgctctctcttgtatgtgggtgtgtgtgtgtatgagtttccactgtggattatatacacttgctagagaatattcatttcttttttttcttttttcatctgatgtatattcaaacattgttctttataaccatttctacctcattgctacatattgtacatgtagtatttatttgttgtctttttttgaatgtcatgcatttcgtaagaaaaagacttgtccttgaacttgaacagtctacctcagaaagactgtctttacactgaacagtattagcaacctaaatgataagacgcattagtgaagtgtggcagggtagataatgcacgagtacttgggatactgatggacttttaattgtattcataacacaagactgcttaaaagaacttaaaagaaattatgcactgtgtaggtcttcatcgaggtcccatttgggacattatatacagaatagagctttattcctatgtgcccatctctgagaaatgtgttagcattcccaagtattttacactggcaatctggctacttaagacaaacaaattcaaacaacatttttatattttgactgacaccctcagctcctaaatttaagagaaataatggtacttaactattttcaactatagtcttcagtgattgaaaatgccttcattttaattctgtgactcctgatataaattaagaaaaacaatgcagttgcaagggcctgcacaacactgaaaataaaccaaaaattaaaaatggcacttcccaaaggaattaacaaacgtggagtcatggtgcttgcaagttccataactgaaagcattttgtttctgatttccctttataacatgtatttgtttattgaagcaattgtacaactaatggcacattgaattactttgtatgaagtgttttatattatactatttattttagcattcgttctttttcttcaccagctctatattacagtagcaaaagaacacttagttttaaaaaatgctgaaaggggttcaccacccacccaatcgatgaatggacttttgaagttgcttgtcagcaaattgtggatattttacaaaagcaaatgaactgtgacaatccacaactcccacagatgtgaattcagaaatgcatctgaaactccggtatgcctgacaatctattctttaagtttcattaacaaagtggcatccaatcctttcacttacaattccttgcaggaatgtattgtctagaggctgtctagtagtgattaagagagggtttttgttttgttttatttgtttactgtattaggtgaggaatgccatatttcttgtcagccaacagtacttgtctgagacagaaatttaaaaaaagaaaaagaaacctaactaattaaaatttctgtgcactttgcttccctgaccatattgattttatttgcttaaattgaaacaatacgctggatttgaccagattttgaccccttgaaagaagaaaagccctatatagtacatgtttctttgggttattctagtactgtttccttatttgttctgcaaatttcaaatcatttttttgtgtgcattattttacatctgctgaaactaaatgtgttattattgcactcattaaaaatgaaacaatccatttctcttggaaaaaaatgacaagctttagatgatgaaagcttaaattatccatcacttgcaaaatgaattcatataatttgtgaacattattaatgtaaatgagacatttctgcttagattttttttattttgatgggatcattatatggttgatcatatgtgtgtaggaagctgctgtacaattaacttggagatctgaaaatgctttttgtcctcattgttgcagtttcaattgtaatccattgcatctcattttcttgggtgttggcactgtaatatattaaaaaaaaattcagtgctcagtattgtaacaactgtccctactgaatattccttttcataaatacttgctaccacagggaaattaagttttcatatagaataactagtttcagtagtaaccattgaagaattaaaaatgtggttcaaggcagatatttttatgaaaagttttctctattgtaaaatttgttgtatatggctatgctactatcatggaataagaaaagaacaagcatacctcaaataaaaaaaaattctgagttaaaaaaa

SEQ ID NO: 196552 - DNA, 2280 bp, Artificial Sequence
  derived and/or modified sequence
atgatcagcagcaccagcgtgtacggcctgaagatgcagtggacccccgagcacgcccagtggcccgagcagcacttcgacatcaccagcaccaccagaagccccgcccacaaggtggaggcctacagaggccacctgcagagaacctaccagtacgcctgggccaacgacgacatcagcgccctgaccgccagcaacctgctgaagaagtacgccgagaagtacagcggcatcctggagggccccgtggacagacccgtgctgagcaactacagcgacacccccagcggcctggtgaacggcagaaagaacgagagcgagccctggcagcccagcctgaacagcgaggccgtgtaccccatgaactgcgtgcccgacgtgatcaccgccagcaaggccggcgtgagcagcgccctgccccccgccgacgtgagcgccagcatcggcagcagccccggcgtggccagcaacctgaccgagcccagctacagcagcagcacctgcggcagccacaccgtgcccagcctgcacgccggcctgcccagccaggagtacgcccccggctacaacggcagctacctgcacagcacctacagcagccagcccgcccccgccctgcccagcccccaccccagccccctgcacagcagcggcctgctgcagcccccccccccccccccccccccccccgccctggtgcccggctacaacggcaccagcaacctgagcagctacagctaccccagcgccagctaccccccccagaccgccgtgggcagcggctacagccccggcggcgccccccccccccccagcgcctacctgcccagcggcatccccgcccccacccccctgccccccaccaccgtgcccggctacacctaccagggccacggcctgacccccatcgcccccagcgccctgaccaacagcagcgccagcagcctgaagagaaaggccttctacatggccggccagggcgacatggacagcagctacggcaactacagctacggccagcagagaagcacccagagccccatgtacagaatgcccgacaacagcatcagcaacaccaacagaggcaacggcttcgacagaagcgccgagaccagcagcctggccttcaagcccaccaagcagctgatgagcagcgagcagcagagaaagttcagcagccagagcagcagagccctgaccccccccagctacagcaccgccaagaacagcctgggcagcagaagcagcgagagcttcggcaagtacaccagccccgtgatgagcgagcacggcgacgagcacagacagctgctgagccaccccatgcagggccccggcctgagagccgccaccagcagcaaccacagcgtggacgagcagctgaagaacaccgacacccacctgatcgacctggtgaccaacgagatcatcacccagggcccccccgtggactggaacgacatcgccggcctggacctggtgaaggccgtgatcaaggaggaggtgctgtggcccgtgctgagaagcgacgccttcagcggcctgaccgccctgcccagaagcatcctgctgttcggccccagaggcaccggcaagaccctgctgggcagatgcatcgccagccagctgggcgccaccttcttcaagatcgccggcagcggcctggtggccaagtggctgggcgaggccgagaagatcatccacgccagcttcctggtggccagatgcagacagcccagcgtgatcttcgtgagcgacatcgacatgctgctgagcagccaggtgaacgaggagcacagccccgtgagcagaatgagaaccgagttcctgatgcagctggacaccgtgctgaccagcgccgaggaccagatcgtggtgatctgcgccaccagcaagcccgaggagatcgacgagagcctgagaagatacttcatgaagagactgctgatccccctgcccgacagcaccgccagacaccagatcatcgtgcagctgctgagccagcacaactactgcctgaacgacaaggagttcgccctgctggtgcagagaaccgagggcttcagcggcctggacgtggcccacctgtgccaggaggccgtggtgggccccctgcacgccatgcccgccaccgacctgagcgccatcatgcccagccagctgagacccgtgacctaccaggacttcgagaacgccttctgcaagatccagcccagcatcagccagaaggagctggacatgtacgtggagtggaacaagatgttcggctgcagccagtag

SEQ ID NO: 196553 - protein, 547 aa, Artificial Sequence
  derived and/or modified sequence
MRQKRKGDLSPAELMMLTIGDVIKQLIEAHEQGKDIDLNKVKTKTAAKYGLSAQPRLVDIIAAVPPQYRKVLMPKLKAKPIRTASGIAVVAVMCKPHRCPHISFTGNICVYCPGGPDSDFEYSTQSYTGYEPTSMRAIRARYDPFLQTRHRIEQLKQLGHSVDKVEFIVMGGTFMALPEEYRDYFIRNLHDALSGHTSNNIYEAVKYSERSLTKCIGITIETRPDYCMKRHLSDMLTYGCTRLEIGVQSVYEDVARDTNRGHTVKAVCESFHLAKDSGFKVVAHMMPDLPNVGLERDIEQFTEFFENPAFRPDGLKLYPTLVIRGTGLYELWKSGRYKSYSPSDLVELVARILALVPPWTRVYRVQRDIPMPLVSSGVEHGNLRELALARMKDLGIQCRDVRTREVGIQEIHHKVRPYQVELVRRDYVANGGWETFLSYEDPDQDILIGLLRLRKCSEETFRFELGGGVSIVRELHVYGSVVPVSSRDPTKFQHQGFGMLLMEEAERIAREEHGSGKIAVISGVGTRNYYRKIGYRLQGPYMVKMLK

SEQ ID NO: 196554 - protein, 455 aa, Artificial Sequence
  derived and/or modified sequence
MCKPHRCPHISFTGNICVYCPGGPDSDFEYSTQSYTGYEPTSMRAIRARYDPFLQTRHRIEQLKQLGHSVDKVEFIVMGGTFMALPEEYRDYFIRNLHDALSGHTSNNIYEAVKYSERSLTKCIGITIETRPDYCMKRHLSDMLTYGCTRLEIGVQSVYEDVARDTNRGHTVKAVCESFHLAKDSGFKVVAHMMPDLPNVGLERDIEQFTEFFENPAFRPDGLKLYPTLVIRGTGLYELWKSGRYKSYSPSDLVELVARILALVPPWTRVYRVQRDIPMPLVSSGVEHGNLRELALARMKDLGIQCRDVRTREVGIQEIHHKVRPYQVELVRRDYVANGGWETFLSYEDPDQDILIGLLRLRKCSEETFRFELGGGVSIVRELHVYGSVVPVSSRDPTKFQHQGFGMLLMEEAERIAREEHGSGKIAVISGVGTRNYYRKIGYRLQGPYMVKMLK

SEQ ID NO: 196555 - protein, 533 aa, Artificial Sequence
  derived and/or modified sequence
MMLTIGDVIKQLIEAHEQGKDIDLNKVKTKTAAKYGLSAQPRLVDIIAAVPPQYRKVLMPKLKAKPIRTASGIAVVAVMCKPHRCPHISFTGNICVYCPGGPDSDFEYSTQSYTGYEPTSMRAIRARYDPFLQTRHRIEQLKQLGHSVDKVEFIVMGGTFMALPEEYRDYFIRNLHDALSGHTSNNIYEAVKYSERSLTKCIGITIETRPDYCMKRHLSDMLTYGCTRLEIGVQSVYEDVARDTNRGHTVKAVCESFHLAKDSGFKVVAHMMPDLPNVGLERDIEQFTEFFENPAFRPDGLKLYPTLVIRGTGLYELWKSGRYKSYSPSDLVELVARILALVPPWTRVYRVQRDIPMPLVSSGVEHGNLRELALARMKDLGIQCRDVRTREVGIQEIHHKVRPYQVELVRRDYVANGGWETFLSYEDPDQDILIGLLRLRKCSEETFRFELGGGVSIVRELHVYGSVVPVSSRDPTKFQHQGFGMLLMEEAERIAREEHGSGKIAVISGVGTRNYYRKIGYRLQGPYMVKMLK

SEQ ID NO: 196556 - DNA, 1644 bp, Artificial Sequence
  derived and/or modified sequence
atgaggcaaaaacgcaaaggagacttgtctccggccgaattgatgatgttgacgatcggcgatgttatcaagcagctaatcgaggcccacgaacagggaaaggacatagatttaaataaggttaagacaaaaacagccgccaagtacggtttgagcgcccaaccaagactggttgacatcatcgccgcagtgcccccccagtatcgcaaggtcttaatgcctaagcttaaggccaagccaattcggacagctagtgggattgccgtggtggccgtgatgtgcaagcctcacagatgcccccatattagtttcacaggcaacatctgcgtgtactgtcccggaggtcctgactcagactttgaatattcaacccaatcttacaccggctatgaacccacatctatgcgcgccatacgagcccggtacgacccatttctgcagacccggcatcggatagaacagctcaaacagcttggacacagcgtagacaaagtggaatttattgtgatgggaggtacgtttatggccctacccgaggaatatagggattatttcattcgcaacctgcacgacgccctttcaggccatacgtccaacaatatatatgaggcagtgaagtattctgagcgctctctgacaaagtgcataggcatcacaatcgaaaccagacctgattactgcatgaagcgtcatttgagcgacatgctaacttacggctgcactcggctcgaaattggcgtccagtctgtgtatgaggacgtggccagggatactaaccgaggacacacagtgaaggccgtgtgcgagtccttccatctcgccaaggactccggattcaaggttgtggcacacatgatgcccgacctgcctaatgtgggcttggaacgggatatcgaacagttcaccgaatttttcgagaatcccgcttttcggcccgatggtctgaaattataccccacattggtgatccggggcacagggttatacgaattgtggaaatcgggccgctataagtcctacagccctagcgacttagtggaactggtggcacggatcctggccttagttcctccttggacccgtgtgtatcgggtccaaagggacatacccatgccattggtcagttctggcgtggagcatggcaacctccgggagttggccttggctcggatgaaagatctgggcatccaatgtagggacgtgagaacccgtgaggtgggcatacaggagatacaccataaggtgcgcccttaccaagtagaactggtgcgccgggattacgttgccaacggggggtgggagacctttctgtcgtatgaagatccagatcaggatatcctgatcgggttgctacgtcttcggaaatgtagcgaggaaacctttaggttcgaactcggcggaggcgtcagcatcgtgagggagctgcacgtgtacggctccgtcgtgcccgtttccagcagggaccctactaaatttcagcaccagggattcggtatgctcctcatggaagaggcggagcgcatcgctagggaggagcatggtagtgggaaaattgccgtaattagtggggtggggaccaggaactactatcgaaagattggttacaggctacaggggccttatatggtaaaaatgctgaaatag

SEQ ID NO: 196557 - DNA, 1644 bp, Artificial Sequence
  derived and/or modified sequence
atgaggcagaagaggaagggggacctgagccctgctgagctgatgatgctgaccatcggagatgtgatcaagcagctgattgaggcccacgagcagggcaaggacatcgacctgaacaaggtgaagaccaagacagctgccaagtatggcctgagcgcccagccccggctggtggacatcatcgctgctgtgcccccccagtacaggaaggtgctgatgcccaagctgaaggccaagcccatcagaacagccagcggcattgctgtggtggccgtgatgtgcaagccccaccgctgcccccacatctccttcaccggcaacatctgtgtgtactgccctgggggccctgacagcgactttgagtacagcacccagagctacacaggctatgagcccacctccatgagggccatccgggcccgctatgaccccttcctgcagaccaggcaccgcatcgagcagctgaagcagctgggccacagcgtggacaaggtggagttcatcgtgatgggcggcaccttcatggccctgcctgaggagtacagagactacttcatccggaacctgcatgatgccctgagcggccacaccagcaacaacatctatgaggccgtgaagtacagcgagaggagcctgaccaagtgcatcggcatcaccatcgagaccaggccagactactgcatgaagaggcacctgagtgacatgctgacctacggctgcacccggctggagattggagtgcagagcgtgtatgaagatgtggcccgggacaccaacagaggccacacagtgaaggctgtgtgtgagagcttccacctggccaaggacagcggcttcaaggtggtggcccacatgatgccagacctgcccaacgtgggcctggagcgggacatcgagcagttcacagagttctttgagaacccagccttccggccagatggcctgaagctgtaccccaccctggtgatccggggcaccggcctgtatgagctgtggaagagcggccgctacaagagctacagccccagcgacctggtggagctggtggcccgcatcctggccctggtgcccccctggaccagggtgtacagagtgcagagggacatccccatgcccctggtgagcagcggcgtggagcacggcaacctgcgggagctggccctggccaggatgaaggacctgggcatccagtgcagagatgtgaggacccgggaggtgggcatccaggagatccaccacaaggtgcggccctaccaggtggagctggtgcggcgggactatgtggccaacggcggctgggagaccttcctgtcctatgaggaccctgaccaggacatcctgattggcctgctgcggctgaggaaatgttctgaggagaccttccgctttgagctgggcggcggcgtgtccatcgtgcgggagctgcacgtgtatggctctgtggtgcctgtgagcagccgggaccccaccaagttccagcaccagggcttcggcatgctgctgatggaggaggccgagcgcatcgcccgggaggagcacggcagcggcaagattgctgtgatcagcggcgtgggcaccaggaactactacaggaagattggctaccgcctgcagggcccctacatggtgaagatgctgaagtag

SEQ ID NO: 196558 - DNA, 1644 bp, Artificial Sequence
  derived and/or modified sequence
atgcggcagaagcggaagggcgacctgagccccgccgagctgatgatgctgacaatcggcgacgtaatcaagcagctcattgaggcccacgagcagggcaaagacattgaccttaataaggtcaaaactaagacagccgccaaatatggactgtctgcgcaacctcggttagtggacattatcgccgccgttcctccccagtacagaaaagtcctgatgccgaaattgaaggcaaagcccatccgcaccgctagcgggatcgcagtggtggccgtgatgtgtaagccccacaggtgccctcacatctcattcacgggaaacatttgcgtttattgccccggtgggccggactctgattttgaatattcaacacagtcttacactgggtacgagccaactagcatgagggctatcagggcacggtacgatccattcctgcaaacacggcatcggatcgagcagctgaaacagctgggacattcagtcgataaggtggagttcatcgttatgggggggaccttcatggcactgccagaggagtatcgcgactactttatccgaaacctgcacgacgccctcagtggacacacttccaataacatctacgaggctgtgaagtatagcgaacgctcattgacaaagtgcatcgggattaccattgagactcggcccgactattgcatgaagcgacatctgagtgacatgctgacatacgggtgtactaggctggaaataggggtccagtccgtgtatgaggacgtagcacgagatacaaaccgtgggcatactgtgaaggcagtgtgcgagtccttccacctggctaaagactcagggttcaaagtggtggcccacatgatgccagacttacctaacgtgggtctggagagagacattgagcagtttacagaattttttgagaacccggcatttcgcccagatggtctgaaactgtaccccactcttgtcattagggggaccggattgtatgagttgtggaagagtggtcgatacaagtcttatagccccagcgaccttgtggaactagtcgcgcgcatcctggcattggtaccgccttggacacgagtttaccgcgtgcaaagagatatacccatgcctctcgtgtcttctggtgtcgagcacggaaatttgcgggagttggcccttgctagaatgaaggatctgggtattcagtgcagggacgttcgaaccagggaggtgggaattcaggaaatccatcataaggtgaggccatatcaggtagagttggtaaggcgggattacgtcgccaacggaggctgggaaacgtttctgtcttatgaagaccccgaccaagatattcttatcgggctgctccgactgagaaaatgttctgaggagacattcagatttgagctgggaggtggggtttccattgtccgagagctgcacgtctatggatctgtggttccagttagctctagagatcctactaaattccagcaccaggggtttggcatgcttttaatggaagaggccgagcgtatagccagggaggaacatggcagcggcaaaattgccgtcatatccggcgtcggcacgaggaactactataggaagatcggctatcggttgcagggtccctatatggtaaagatgctcaagtag

SEQ ID NO: 196559 - DNA, 1644 bp, Artificial Sequence
  derived and/or modified sequence
atgcgccaaaagaggaagggggaccttagccctgccgagctgatgatgcttaccatcggcgacgttataaaacaactgatcgaggcccacgagcagggaaaagacattgatttaaacaaagtgaaaaccaaaactgctgcaaagtacggcctgagcgcccaaccgagattagtggacatcattgcagccgtccctccacagtacagaaaagtgcttatgcccaagctgaaggctaagcctatccggactgcatctggaattgctgtggtcgcagtcatgtgtaagccccacaggtgtccccacattagttttaccggcaacatttgcgtgtactgccccggagggccagatagcgactttgaatactccacccaatcctatacaggctacgaacctacctctatgcgtgccatacgtgccaggtatgacccgtttctgcagacccgccaccgcatcgagcagctgaaacaactcgggcatagcgttgataaggttgaattcattgtgatggggggaactttcatggctttgccagaggagtacagggactactttatccggaacttacatgacgcactgagcggacacacgtccaataatatttacgaagccgttaagtacagcgagcgctctctaacaaaatgtattggaattactattgagacaagaccagactattgcatgaagaggcaccttagtgatatgctcacttacggctgcacccgccttgagatcggagtgcagagcgtgtacgaggacgtggcaagggatactaatagaggccacacagtgaaagccgtttgcgaatcatttcacctggcaaaggacagtgggttcaaggtcgtcgctcacatgatgcctgatctgccgaacgtagggctggagcgggatatcgaacagttcactgaattctttgagaatccagcatttaggccagacggtttaaaattataccctaccctcgtaatccggggtaccggcttgtatgaactgtggaagtccggaagatataagtcctacagtccctctgatctggtcgagttagtcgcacgaatattggcattggttcccccttggactcgagtctatcgggttcagagggatattcccatgcctctggtctccagcggcgtggagcacggtaacctgcgggagctggctctggctaggatgaaggacctaggtatacaatgtcgtgacgtcagaacccgagaggttgggatccaagaaattcatcataaagtgcgaccttatcaggtggagctggtcaggagagactacgtagccaatggcggttgggaaacatttctctcctatgaagacccagatcaagatatcctcataggactactgagactcaggaagtgttccgaagagacattcaggttcgagctgggcggaggcgtgtccatcgtcagagaactgcacgtgtatggatccgtagtgccagtatcgtccagagatcccactaaattccaacaccagggtttcggcatgctattgatggaagaggcagagcgcatcgccagagaggagcatggcagcggcaaaattgccgttatttcaggcgtaggcacaaggaattactaccgcaaaatcggctacaggttacagggtccttacatggtgaagatgctgaaatag

SEQ ID NO: 196560 - DNA, 1644 bp, Artificial Sequence
  derived and/or modified sequence
atgagacagaagagaaagggcgacctgagccccgccgagctgatgatgctgaccatcggcgacgtgatcaagcagctgatcgaggcccacgagcagggcaaggacatcgacctgaacaaggtgaagaccaagaccgccgccaagtacggcctgagcgcccagcccagactggtggacatcatcgccgccgtgcccccccagtacagaaaggtgctgatgcccaagctgaaggccaagcccatcagaaccgccagcggcatcgccgtggtggccgtgatgtgcaagccccacagatgcccccacatcagcttcaccggcaacatctgcgtgtactgccccggcggccccgacagcgacttcgagtacagcacccagagctacaccggctacgagcccaccagcatgagagccatcagagccagatacgaccccttcctgcagaccagacacagaatcgagcagctgaagcagctgggccacagcgtggacaaggtggagttcatcgtgatgggcggcaccttcatggccctgcccgaggagtacagagactacttcatcagaaacctgcacgacgccctgagcggccacaccagcaacaacatctacgaggccgtgaagtacagcgagagaagcctgaccaagtgcatcggcatcaccatcgagaccagacccgactactgcatgaagagacacctgagcgacatgctgacctacggctgcaccagactggagatcggcgtgcagagcgtgtacgaggacgtggccagagacaccaacagaggccacaccgtgaaggccgtgtgcgagagcttccacctggccaaggacagcggcttcaaggtggtggcccacatgatgcccgacctgcccaacgtgggcctggagagagacatcgagcagttcaccgagttcttcgagaaccccgccttcagacccgacggcctgaagctgtaccccaccctggtgatcagaggcaccggcctgtacgagctgtggaagagcggcagatacaagagctacagccccagcgacctggtggagctggtggccagaatcctggccctggtgcccccctggaccagagtgtacagagtgcagagagacatccccatgcccctggtgagcagcggcgtggagcacggcaacctgagagagctggccctggccagaatgaaggacctgggcatccagtgcagagacgtgagaaccagagaggtgggcatccaggagatccaccacaaggtgagaccctaccaggtggagctggtgagaagagactacgtggccaacggcggctgggagaccttcctgagctacgaggaccccgaccaggacatcctgatcggcctgctgagactgagaaagtgcagcgaggagaccttcagattcgagctgggcggcggcgtgagcatcgtgagagagctgcacgtgtacggcagcgtggtgcccgtgagcagcagagaccccaccaagttccagcaccagggcttcggcatgctgctgatggaggaggccgagagaatcgccagagaggagcacggcagcggcaagatcgccgtgatcagcggcgtgggcaccagaaactactacagaaagatcggctacagactgcagggcccctacatggtgaagatgctgaagtag

SEQ ID NO: 196561 - DNA, 3452 bp, Artificial Sequence
  derived and/or modified sequence
gagagaccatccacttccaccctttcacttaggcttcctggcgcagcctctatccaggaactctgtcccatagctgtactgcccaggtcgagctttctaaccccaagatgccactccgttcagacgttcccatcctccatccctgagacccggggcaggatcgcagcctaggggcctcacgggccgcctgctaccctgttagttgcaacacggggcggggcgtggctttgtgcacgtcggcttccgggaagagctttacgatacattgaccgacattttacgacaggcgggattgttttgtggctgtcagctttccccgtggtctgagtttgtggctgcatttttatctctggtggctctgctacggcggcgcagaaatgaggcagaagcggaaaggagatctcagccctgctgagctgatgatgctgactataggagatgttattaaacaactgattgaagcccacgagcaggggaaagacatcgatctaaataaggtgaaaaccaagacagctgccaaatatggcctttctgcccagccccgcctggtggatatcattgctgccgtccctcctcagtatcgcaaggtcttgatgcccaagttaaaggcgaaacccatcagaactgctagtgggattgctgtcgtggctgtgatgtgcaaaccccacagatgtccacacatcagttttacaggaaatatatgtgtatactgccctggtggacctgattctgattttgagtattccacccagtcttacactggctatgagccaacctccatgagagctatccgtgccagatatgaccctttcctacagacaagacaccgaatagaacagttaaaacaacttggtcatagtgtggataaagtggagtttattgtgatgggtggaacgtttatggcccttccagaagaatacagagattattttattcgaaatttacatgatgccttatcaggacatacttccaacaatatttacgaggcagtcaagtattctgagagaagcctcacaaagtgtattggaattactattgaaaccagaccagattactgcatgaagcgacatttaagtgacatgttgacctatggctgcacaaggctggagattggggtgcagagtgtttatgaagatgtggctagagacaccaacaggggccacactgtgaaggcagtgtgtgagtcatttcacctggccaaagattccggttttaaagtggtggcccatatgatgcctgacctgccaaacgtgggactagaaagagacattgaacagttcacagagttttttgagaaccctgcttttcgtcccgatgggctgaaactctatcctaccctggtgattcgtgggaccgggctttatgagctttggaaatcaggaagatataagagttactctcctagtgacctggttgaattggtggctcggatcctagccctcgtgcctccatggactcgagtgtaccgagtacagagggatattccaatgcctttagttagctcaggagtagagcatggtaacctgagagagctggcacttgcaagaatgaaagacctcggaatacagtgtcgagatgtgagaaccagagaagttggaatccaagaaattcatcacaaagtacggccataccaggttgaattggtaaggagagattatgttgcaaatggtggctgggaaacattcttgtcatacgaagacccagatcaagacattttgattggcctcctacgattacgcaagtgttcagaagaaactttccgtttcgaattgggtggaggtgtctccatagtacgagagctgcatgtgtatgggagtgtggtccctgtgagcagccgggatcctactaaatttcagcatcagggatttggcatgctgctgatggaggaagcagaaagaatagctagagaagaacatgggtctgggaaaatcgctgtgatatcaggggtcggcaccaggaattattatagaaagatcggctacagattacaaggcccgtacatggtgaagatgctgaaataatggccacaccagtccactcttctgcagtatcctccctggcagaacacggagaatcaggatttcttaaatactcaacagagaggctgagcagagcaaatggggggcttcaccctcatcccgcagctgcagagactggaaactgccttcaaggccacggctggtcatctgctgaccacaccccagatccgccctctcctgcgtgcaccccaaaaaatcacttgcgtttttgaggcttaaatcatctatccagtttctacattttgcatgaggcctgcaggtggcctattttgactcagacggtgaaaaaagcaaattaactcatttggacaccataactcatgcaataaaactgattgtcattcgaggagcaaacttaagagtagtttatttatataccctggggacagaaagtcaggttgaaacaggaaaaccaccagactctaatctcagccctttaacgacatacgcattggagcgcaagttaggaaaatgagcttttgttttcatggaaatcattctgattacagtgctgatgtttagaaataaatagcagtgtgactgggaaagaggaattgcagttgtgggggtgtgagcctggcagcagccagccagcagcctctcccaggcgggagtctaccatccgagacggcgatgacaaagagcttcattccacattctttgttatctctacttcccaccctcttggcaactacagagcagtgtgggcagccccaagtgtggtccccagagagcgtttggctttcctgtctgtctatcctgagcgggtggagtctcaggttgtgtgcccctaaatcaagatttgcttccacagaagccattacttgcaattttttttttttttctgagaaagtctcgctgtgtcacccaggctggagtgcagtggcgcaatctcactgcatcctccgcctcccgggttcaagcgattctcccgcctcagcctcctgagtagctgggattacaggcacccgccgctgctaatttttgtatttttagtagagatgggggtttcaccatattggtcaggctggtctcgaactcctgacctcaggtgatcaacccaccttggcctccctaaatgccgggattacaggcatgagccaccgctcccagcctttgattttttaaggtggattttggttgttataaatggagaaaggtaagagttcaagttcaacccgtgtgtgaaagcaaaacaatggaaaacaggattggcttcttcaaaggctcctcttgtagaactgcctctttgaaatttcgaggtaatctactttggagactctgcctggagagggtcagttcctaagttaaaagcatcgcttaaccttggctcctgtggcattttacaaaggtttaaaggaattgattcctctgaaagggcctgaaaataaaaagtctttaacatacaaagaa

SEQ ID NO: 196562 - DNA, 545 bp, Artificial Sequence
  derived and/or modified sequence
aatagtaaactgacatggcatactggtgggcatcttatggaaagttgcttccacccctgccctgtttcagctagtcctcaacttgatccagtgtccaaactctgcctccagaacagagtcccacttcctacctcacatggtctgtgacagagccccaggggatcctgagaacatgtgtccaaggagatctcagccctgctgagctgatgatgctgactataggagatgttattaaacaactgattgaagcccacgagcaggggaaagacatcgatctaaataaggtgaaaaccaagacagctgccaaatatggcctttctgcccagccccgcctggtggatatcattgctgccgtccctcctcagtatcgcaaggtcttgatgcccaagttaaaggcgaaacccatcagaactgctagtgggattgctgtcgtggctgtgatgtgcaaaccccacagatgtccacacatcagttttacaggaaatatatgtgtatactgccctggtggacctgattctgattttgagtattccacccagtcttac

SEQ ID NO: 196563 - DNA, 3158 bp, Artificial Sequence
  derived and/or modified sequence
cgaagcttcaggagacctatcctcatctgtgcaaggaggagtggccaactctggagcccaggctgttgcttcctggtctggtggtgaatcctccatagtctggagatctcagccctgctgagctgatgatgctgactataggagatgttattaaacaactgattgaagcccacgagcaggggaaagacatcgatctaaataaggtgaaaaccaagacagctgccaaatatggcctttctgcccagccccgcctggtggatatcattgctgccgtccctcctcagtatcgcaaggtcttgatgcccaagttaaaggcgaaacccatcagaactgctagtgggattgctgtcgtggctgtgatgtgcaaaccccacagatgtccacacatcagttttacaggaaatatatgtgtatactgccctggtggacctgattctgattttgagtattccacccagtcttacactggctatgagccaacctccatgagagctatccgtgccagatatgaccctttcctacagacaagacaccgaatagaacagttaaaacaacttggtcatagtgtggataaagtggagtttattgtgatgggtggaacgtttatggcccttccagaagaatacagagattattttattcgaaatttacatgatgccttatcaggacatacttccaacaatatttacgaggcagtcaagtattctgagagaagcctcacaaagtgtattggaattactattgaaaccagaccagattactgcatgaagcgacatttaagtgacatgttgacctatggctgcacaaggctggagattggggtgcagagtgtttatgaagatgtggctagagacaccaacaggggccacactgtgaaggcagtgtgtgagtcatttcacctggccaaagattccggttttaaagtggtggcccatatgatgcctgacctgccaaacgtgggactagaaagagacattgaacagttcacagagttttttgagaaccctgcttttcgtcccgatgggctgaaactctatcctaccctggtgattcgtgggaccgggctttatgagctttggaaatcaggaagatataagagttactctcctagtgacctggttgaattggtggctcggatcctagccctcgtgcctccatggactcgagtgtaccgagtacagagggatattccaatgcctttagttagctcaggagtagagcatggtaacctgagagagctggcacttgcaagaatgaaagacctcggaatacagtgtcgagatgtgagaaccagagaagttggaatccaagaaattcatcacaaagtacggccataccaggttgaattggtaaggagagattatgttgcaaatggtggctgggaaacattcttgtcatacgaagacccagatcaagacattttgattggcctcctacgattacgcaagtgttcagaagaaactttccgtttcgaattgggtggaggtgtctccatagtacgagagctgcatgtgtatgggagtgtggtccctgtgagcagccgggatcctactaaatttcagcatcagggatttggcatgctgctgatggaggaagcagaaagaatagctagagaagaacatgggtctgggaaaatcgctgtgatatcaggggtcggcaccaggaattattatagaaagatcggctacagattacaaggcccgtacatggtgaagatgctgaaataatggccacaccagtccactcttctgcagtatcctccctggcagaacacggagaatcaggatttcttaaatactcaacagagaggctgagcagagcaaatggggggcttcaccctcatcccgcagctgcagagactggaaactgccttcaaggccacggctggtcatctgctgaccacaccccagatccgccctctcctgcgtgcaccccaaaaaatcacttgcgtttttgaggcttaaatcatctatccagtttctacattttgcatgaggcctgcaggtggcctattttgactcagacggtgaaaaaagcaaattaactcatttggacaccataactcatgcaataaaactgattgtcattcgaggagcaaacttaagagtagtttatttatataccctggggacagaaagtcaggttgaaacaggaaaaccaccagactctaatctcagccctttaacgacatacgcattggagcgcaagttaggaaaatgagcttttgttttcatggaaatcattctgattacagtgctgatgtttagaaataaatagcagtgtgactgggaaagaggaattgcagttgtgggggtgtgagcctggcagcagccagccagcagcctctcccaggcgggagtctaccatccgagacggcgatgacaaagagcttcattccacattctttgttatctctacttcccaccctcttggcaactacagagcagtgtgggcagccccaagtgtggtccccagagagcgtttggctttcctgtctgtctatcctgagcgggtggagtctcaggttgtgtgcccctaaatcaagatttgcttccacagaagccattacttgcaattttttttttttttctgagaaagtctcgctgtgtcacccaggctggagtgcagtggcgcaatctcactgcatcctccgcctcccgggttcaagcgattctcccgcctcagcctcctgagtagctgggattacaggcacccgccgctgctaatttttgtatttttagtagagatgggggtttcaccatattggtcaggctggtctcgaactcctgacctcaggtgatcaacccaccttggcctccctaaatgccgggattacaggcatgagccaccgctcccagcctttgattttttaaggtggattttggttgttataaatggagaaaggtaagagttcaagttcaacccgtgtgtgaaagcaaaacaatggaaaacaggattggcttcttcaaaggctcctcttgtagaactgcctctttgaaatttcgaggtaatctactttggagactctgcctggagagggtcagttcctaagttaaaagcatcgcttaaccttggctcctgtggcattttacaaaggtttaaaggaattgattcctctgaaagggcctgaaaataaaaagtctttaacatacaaagaa

SEQ ID NO: 196564 - DNA, 656 bp, Artificial Sequence
  derived and/or modified sequence
ccaactctggagcccaggatgttgcttcccggtctggtggtgaatcctccatagtctggagatctcagccctgctgagctgatgatgctgactataggagatgttattaaacaactgattgaagcccacgagcaggggaaagacatcgatctaaataaggtgaaaaccaagacagctgccaaatatggcctttctgcccagccccgcctggtggatatcattgctgccgtccctcctcagtatcgcaaggtcttgatgcccaagttaaaggcgaaacccatcagaactgctagtgggattgctgtcgtggctgtgatgtgcaaaccccacagatgtccacacatcagttttacaggaaatatatgtgtatactgccctggtggacctgattctgattttgagtattccacccagtcttacactggctatgagccaacctccatgagagctatccgtgccagatatgaccctttcctacagacaagacaccgaatagaacagttaaaacaacttggtcatagtgtggataaagtggagtttattgtgatgggtggaacgtttatggcccttccagaagaatacagagattattttattcgaaatttacatgatgccttatcaggacatacttccaacaatatttacgaggcagtcaa

SEQ ID NO: 196565 - protein, 525 aa, Artificial Sequence
  derived and/or modified sequence
MALERLCSVLKVLLITVLVVEGIAVAQKTQDGQNIGIKHIPATQCGIWVRTSNGGHFASPNYPDSYPPNKECIYILEAAPRQRIELTFDEHYYIEPSFECRFDHLEVRDGPFGFSPLIDRYCGVKSPPLIRSTGRFMWIKFSSDEELEGLGFRAKYSFIPDPDFTYLGGILNPIPDCQFELSGADGIVRSSQVEQEEKTKPGQAVDCIWTIKATPKAKIYLRFLDYQMEHSNECKRNFVAVYDGSSSIENLKAKFCSTVANDVMLKTGIGVIRMWADEGSRLSRFRMLFTSFVEPPCTSSTFFCHSNMCINNSLVCNGVQNCAYPWDENHCKEKKKAGVFEQITKTHGTIIGITSGIVLVLLIISILVQVKQPRKKVMACKTAFNKTGFQEVFDPPHYELFSLRDKEISADLADLSEELDNYQKMRRSSTASRCIHDHHCGSQASSVKQSRTNLSSMELPFRNDFAQPQPMKTFNSTFKKSSYTFKQGHECPEQALEDRVMEEIPCEIYVRGREDSAQASISIDF

SEQ ID NO: 196566 - DNA, 1578 bp, Artificial Sequence
  derived and/or modified sequence
atggccctggagagactgtgcagcgtgctgaaggtgctgctgatcaccgtgctggtggtggagggcatcgccgtggcccagaagacccaggacggccagaacatcggcatcaagcacatccccgccacccagtgcggcatctgggtgagaaccagcaacggcggccacttcgccagccccaactaccccgacagctacccccccaacaaggagtgcatctacatcctggaggccgcccccagacagagaatcgagctgaccttcgacgagcactactacatcgagcccagcttcgagtgcagattcgaccacctggaggtgagagacggccccttcggcttcagccccctgatcgacagatactgcggcgtgaagagcccccccctgatcagaagcaccggcagattcatgtggatcaagttcagcagcgacgaggagctggagggcctgggcttcagagccaagtacagcttcatccccgaccccgacttcacctacctgggcggcatcctgaaccccatccccgactgccagttcgagctgagcggcgccgacggcatcgtgagaagcagccaggtggagcaggaggagaagaccaagcccggccaggccgtggactgcatctggaccatcaaggccacccccaaggccaagatctacctgagattcctggactaccagatggagcacagcaacgagtgcaagagaaacttcgtggccgtgtacgacggcagcagcagcatcgagaacctgaaggccaagttctgcagcaccgtggccaacgacgtgatgctgaagaccggcatcggcgtgatcagaatgtgggccgacgagggcagcagactgagcagattcagaatgctgttcaccagcttcgtggagcccccctgcaccagcagcaccttcttctgccacagcaacatgtgcatcaacaacagcctggtgtgcaacggcgtgcagaactgcgcctacccctgggacgagaaccactgcaaggagaagaagaaggccggcgtgttcgagcagatcaccaagacccacggcaccatcatcggcatcaccagcggcatcgtgctggtgctgctgatcatcagcatcctggtgcaggtgaagcagcccagaaagaaggtgatggcctgcaagaccgccttcaacaagaccggcttccaggaggtgttcgaccccccccactacgagctgttcagcctgagagacaaggagatcagcgccgacctggccgacctgagcgaggagctggacaactaccagaagatgagaagaagcagcaccgccagcagatgcatccacgaccaccactgcggcagccaggccagcagcgtgaagcagagcagaaccaacctgagcagcatggagctgcccttcagaaacgacttcgcccagccccagcccatgaagaccttcaacagcaccttcaagaagagcagctacaccttcaagcagggccacgagtgccccgagcaggccctggaggacagagtgatggaggagatcccctgcgagatctacgtgagaggcagagaggacagcgcccaggccagcatcagcatcgacttctag

SEQ ID NO: 196567 - DNA, 1578 bp, Artificial Sequence
  derived and/or modified sequence
atggcccttgaacggctgtgcagcgtcttaaaagtgttgctgataactgtgctagtcgtcgaggggatcgctgtagctcagaaaacccaagatgggcagaatatcggaatcaaacatatcccagccacccagtgcggcatttgggtcaggacctccaatggtggccattttgcttcccccaattacccagactcttatccaccgaataaggaatgcatttacattctggaagcggctccgcgacagaggattgagctgacctttgatgagcattactacatagaacccagtttcgaatgtcgcttcgaccaccttgaggtgcgcgacggcccgttcgggttctccccgttgatcgacagatattgcggtgttaagtccccaccccttatccggagtacagggaggtttatgtggatcaagttctcgagcgatgaagaactggagggacttggctttagagccaagtacagcttcatcccagatcctgattttacgtacttagggggtatactcaaccccatacctgactgtcaattcgaactcagcggggctgatggcattgtgcgctcttcccaggtggagcaggaagaaaaaacaaaacctggacaggccgttgattgtatatggacaatcaaggccacccccaaggcaaagatttacctgcggttcttggattatcaaatggaacattccaatgagtgcaagcggaatttcgtcgccgtgtacgacggtagttcgtctattgagaacctgaaagccaaattttgctctactgtggctaacgacgttatgctgaagaccgggattggggtgattcggatgtgggctgacgaaggctcacggctttccaggttccgcatgctcttcacatcttttgtagaaccaccatgtactagcagtaccttcttctgccacagcaacatgtgcatcaacaattcacttgtctgcaacggggtacaaaattgtgcatatccctgggatgaaaaccattgtaaggagaaaaagaaggcgggcgtctttgaacaaattacaaagacccatggaaccatcattgggataacttccggtatagtgctggtgctcttgatcatttcaatcctggtgcaagttaaacagcctagaaagaaggtaatggcgtgtaagacagcttttaataagaccggattccaagaagtcttcgatccaccacactatgagctcttcagtctgagagacaaagagatcagcgctgatctcgcagatttgagcgaggaactggacaattatcagaagatgcgccgtagctctaccgccagtcggtgcattcacgatcaccattgtggatcacaggcctctagtgtcaaacagagccgcaccaacctctccagcatggaattgccatttcggaatgattttgctcagccccagccaatgaagacatttaacagcacttttaagaaatctagctacaccttcaaacaagggcatgaatgccctgagcaagcgttggaagacagggttatggaggagattccgtgcgagatctacgtaagaggccgggaagatagtgcccaagcctccatctctatagatttctag

SEQ ID NO: 196568 - DNA, 1578 bp, Artificial Sequence
  derived and/or modified sequence
atggccctcgagcggctttgttcggtcctgaaagtccttctgatcacggttcttgtggttgaaggcattgcggtggcccagaaaacacaagacggccagaacattgggataaagcatattcccgctacgcaatgtggcatatgggtaaggacttcaaacggcggccacttcgccagcccgaattatccggactcttaccctccaaataaagagtgcatttacatcctggaggccgccccacggcagcgaatcgagctcacatttgacgagcattactatatcgagcctagcttcgagtgcagatttgatcacttagaggtccgggacggaccatttggcttctctccgctgattgaccggtattgtggtgtaaagagtccgcctctaattagatctaccgggcgcttcatgtggatcaagtttagtagcgacgaggaactcgagggcctagggtttcgagccaagtactcattcattcctgaccccgattttacgtacctgggcggtatcttgaacccaatacctgactgtcagttcgagctgtcaggagccgacgggatagtccgttcctctcaggtcgaacaggaggaaaaaacaaagccagggcaggccgtggattgtatatggactattaaagcaacaccgaaagcaaaaatatacttaagattccttgattaccagatggagcattccaacgaatgcaagcggaacttcgttgcggtgtatgatgggtcaagctcaatcgagaacttaaaggcaaaattctgttctaccgtagcgaacgacgtcatgctaaagaccggcataggagttataaggatgtgggcggacgagggatcccgcctaagcagattccgtatgctttttacttctttcgtggagccaccttgtaccagtagtaccttcttctgtcactccaacatgtgtatcaacaacagcctggtgtgcaatggcgtgcagaattgtgcttacccttgggatgaaaatcactgtaaggaaaagaagaaggccggagtctttgagcagatcacgaagacccacggtacaattatcgggatcacctctggaatcgtgctggtgctgctgattatctccatacttgtccaggtgaagcagccgagaaaaaaggtgatggcgtgtaaaaccgctttcaataagacaggattccaggaggtattcgacccaccccactacgagctctttagcctccgagataaggagatttctgctgacctggcagacttgagtgaagaactggataattaccaaaagatgaggagatcgagtaccgcctcacgttgtattcacgatcaccactgtggcagccaggcatctagtgtcaagcagtctagaaccaacttaagttctatggaactgccttttcgcaatgatttcgcacagccgcagcctatgaaaactttcaattcaacatttaaaaagagttcttatacttttaagcagggtcacgaatgtcctgaacaggccctcgaggatcgagtgatggaggagatcccctgtgagatttatgtgcggggacgtgaagattcagcccaggccagcatatctattgatttttag

SEQ ID NO: 196569 - DNA, 1578 bp, Artificial Sequence
  derived and/or modified sequence
atggccctggagcggctgtgcagcgtgctgaaggtgctgctgatcaccgtgctggtggtggagggcattgctgtggcccagaagacccaggacggccagaacatcggcatcaagcacatcccagccacccagtgtggcatctgggtgaggaccagcaatggaggccactttgccagccccaactacccagacagctacccacccaacaaggagtgcatctacatcctggaggccgccccccggcagagaattgagctgacctttgatgagcactactacatcgagcccagctttgaatgtagatttgaccacctggaggtgagagatggccccttcggcttcagccccctgattgaccgctactgcggcgtgaagagccccccactcatccgcagcacaggccgcttcatgtggatcaagttcagcagtgatgaggagctggagggcctgggcttccgggccaagtacagcttcatcccagaccctgacttcacctacctgggcggcatcctgaaccccatcccagactgccagtttgagctgagcggggctgatggcatcgtgcgcagcagccaggtggagcaggaggagaagaccaagccaggccaggccgtggactgcatctggaccatcaaggccacccccaaggccaagatctacctgcgcttcctggactaccagatggagcacagcaatgaatgcaagaggaactttgtggccgtgtatgatggcagcagcagcattgagaacctgaaggccaagttctgcagcacagtggccaatgatgtgatgctgaagacaggaattggagtcatccgcatgtgggcagatgagggcagccggctgagccgcttcaggatgctgttcaccagctttgtggagcccccctgcaccagcagcaccttcttctgccacagcaacatgtgcatcaacaacagcctggtgtgcaatggagtgcagaactgtgcctacccctgggatgagaaccactgcaaggagaagaagaaggccggcgtgtttgagcagatcaccaagacccacggcaccatcatcggcatcaccagcggcatcgtgctggtgctgctgatcatcagcatcctggtgcaggtgaagcagcccaggaagaaggtgatggcctgcaagacagccttcaacaagacaggcttccaggaggtgtttgatcctccccactatgagctgttcagcctgcgggacaaggagatctctgctgacctggccgacctgtctgaggagctggacaactaccagaagatgaggaggagcagcacagccagccgctgcatccatgaccaccactgcggcagccaggccagctctgtgaagcagagcaggaccaacctgagctccatggagctgcccttcagaaatgactttgcccagccccagcccatgaagaccttcaacagcaccttcaagaagagcagctacaccttcaagcagggccacgagtgcccagagcaggccctggaggacagagtgatggaggagatcccctgtgagatctacgtgcggggccgggaggacagcgcccaggccagcatcagcattgacttctag

SEQ ID NO: 196570 - DNA, 3547 bp, Artificial Sequence
  derived and/or modified sequence
acgcggcgctcgcgctccctccttaaatgagcctgggcgccccgcgcccgccacttcagtggatcccgcgccggggccgcgggcggagctgcctgccggtcccgcgccgcgcgtccgcactcctcggccctcgggcggtcgatgggacggggcgccgcggagcaggaggcggcgcccgtcggggtgctcgggccgcgcgggagcccactgtggggctcgggcatggcgggccgcaggacctgagctctcctcaggggagcggggaggcagctgctggccggcgatggggacggagtggggccgtcgccgccgcgccgagccgtgagcgccgagccaccgccgccgctacctcagcccttcgcgaagcgccgggcagctcgggaacatggccctggagcggctctgctcggtcctcaaagtgttgttaataacagtactggtagtggaagggattgccgtggcccaaaaaacccaagatggacaaaatattggaatcaagcatattcctgcaacccagtgtggcatttgggttcgaaccagcaatggaggtcattttgcttcgccaaattatcctgactcatatccaccaaacaaggagtgtatctacattttggaagctgctccacgtcaaagaatagagttgacctttgatgaacattattatatagaaccatcatttgagtgtcggtttgatcacttggaagttcgagatgggccatttggtttctctcctcttatagatcgttactgtggcgtgaaaagccctccattaattagatcaacagggagattcatgtggattaagtttagttctgatgaagagcttgaaggactgggatttcgagcaaaatattcatttattccagatccagactttacttacctaggaggtattttaaatcccattccagattgtcagttcgagctctcgggagctgatggaatagtgcgctctagtcaggtagaacaagaggagaaaacaaaaccaggccaagccgttgattgcatctggaccattaaagccactccaaaagctaagatttatttgaggttcctagattatcaaatggagcactcaaatgaatgcaagagaaacttcgttgcagtctatgatggaagcagttctattgaaaacctgaaggccaagttttgcagcactgtggccaatgatgtaatgcttaaaacaggaattggagtgattcgaatgtgggcagatgaaggtagtcggcttagcaggtttcgaatgctctttacttcctttgtggagcctccctgcacaagcagcactttcttttgccatagcaacatgtgcatcaataattctttagtctgtaatggtgtccaaaattgtgcatacccttgggatgaaaatcattgtaaagaaaagaaaaaagcaggagtatttgaacaaatcactaagactcatggaacaattattggcattacttcagggattgtcttggtccttctcattatttctattttagtacaagtgaaacagcctcgaaaaaaggtcatggcttgcaaaaccgcttttaataaaaccgggttccaagaagtgtttgatcctcctcattatgaactgttttcactaagggacaaagagatttctgcagacctggcagacttgtcggaagaattggacaactaccagaagatgcggcgctcctccaccgcctcccgctgcatccacgaccaccactgtgggtcgcaggcctccagcgtcaaacaaagcaggaccaacctcagttccatggaacttcctttccgaaatgactttgcacaaccacagccaatgaaaacatttaatagcaccttcaagaaaagtagttacactttcaaacagggacatgagtgccctgagcaggccctggaagaccgagtaatggaggagattccctgtgaaatttatgtcagggggcgagaagattctgcacaagcatccatatccattgacttctaatcttctgctaatggtgatgtgaattcttagggtgtgtacgtacgcagcctccagggcaccatactgtttccagcagccaacccttttctcccatcacaactacgaagaccttgatttaccgttaacctattgtatggtgatgtttttattctctcaggcagtctatatatgttaaaccaatcaaggaacttactctattcagtggaaacaataatcatctctattgcttggtgtcatttataggaagcactgccagttaaagagcattagaagaggtggttggatggagccaggctcaggctgcctcttcgttttagcaacaagaagactgctcttgactgataacagctctgtcaatattttgatgccacaataaacttgatttttctttacattccttttatttttcctttctctaaatttaatttgttttataagcctatcgttttaccatttcattttcttacataagtacaagtggttaatgtaccacatacttcagtataggcatttgttcttgagtgtgtcaaaatacagctagttactgtgccaattaagacccagttgtatttcacccatctgtttcttcttggctaatctctgtacttctgccttttaattactgggcccttattccttattttctgtgagaaataatagatgatatgatttattacctttcaattatatttttctcagttatactagaaaatttcataatcctgggatatatgtaccattgtcagctatgactaaaaatttgaaaaagataaaaatttctagcaagcctttgaagtttaccaagtatagtcacattcagtgacagcccattcattccagtaaagaatcatttcattcactttgggagaggcctataattacatttatttgcaatgtttctcttcgctagattgttacatagctcccattctgttggttttgcttacagcatatggtaaccaaggttagatgccagttaaaattccttagaaattggatgagccttgagattgcttcttaactgggacatgacatttttctagctcttatcaagaataacaacttccacttttttttaaactgcacttttgactttttttatggtataaaaacaataatttataaacataaaagctcattgtgttttttagacttttgatattatttgatactgtacaaactttattaaatcaagatgaaagacctacaggacagattcctttcagtgttcacatcagtggctttgtatgcaaatatgctgtgttggacctggacgctataacttattgtaaagaccttggaaatgtggacataagctctttctttccttttgttactgtatttagtttgtgataaatttttcactgtgtgatatttatgctctaaatcactacacaaatcccatattaaaatatacattgtacctgaccctttaatcatgttatttatgccaccaaggttgtggatcttaaggtatgtatggaaaggaactcatttatcaaattgtaagtaatacagacatgccatttaaaagaggtaaattcttgttttctatattttgttagtaaattctcaatgaaataa

SEQ ID NO: 196571 - DNA, 7481 bp, Artificial Sequence
  derived and/or modified sequence
acgcggcgctcgcgctccctccttaaatgagcctgggcgccccgcgcccgccacttcagtggatcccgcgccggggccgcgggcggagctgcctgccggtcccgcgccgcgcgtccgcactcctcggccctcgggcggtcgatgggacggggcgccgcggagcaggaggcggcgcccgtcggggtgctcgggccgcgcgggagcccactgtggggctcgggcatggcgggccgcaggacctgagctctcctcaggggagcggggaggcagctgctggccggcgatggggacggagtggggccgtcgccgccgcgccgagccgtgagcgccgagccaccgccgccgctacctcagcccttcgcgaagcgccgggcagctcgggaacatggccctggagcggctctgctcggtcctcaaagtgttgttaataacagtactggtagtggaagggattgccgtggcccaaaaaacccaagatggacaaaatattggaatcaagcatattcctgcaacccagtgtggcatttgggttcgaaccagcaatggaggtcattttgcttcgccaaattatcctgactcatatccaccaaacaaggagtgtatctacattttggaagctgctccacgtcaaagaatagagttgacctttgatgaacattattatatagaaccatcatttgagtgtcggtttgatcacttggaagttcgagatgggccatttggtttctctcctcttatagatcgttactgtggcgtgaaaagccctccattaattagatcaacagggagattcatgtggattaagtttagttctgatgaagagcttgaaggactgggatttcgagcaaaatattcatttattccagatccagactttacttacctaggaggtattttaaatcccattccagattgtcagttcgagctctcgggagctgatggaatagtgcgctctagtcaggtagaacaagaggagaaaacaaaaccaggccaagccgttgattgcatctggaccattaaagccactccaaaagctaagatttatttgaggttcctagattatcaaatggagcactcaaatgaatgcaagagaaacttcgttgcagtctatgatggaagcagttctattgaaaacctgaaggccaagttttgcagcactgtggccaatgatgtaatgcttaaaacaggaattggagtgattcgaatgtgggcagatgaaggtagtcggcttagcaggtttcgaatgctctttacttcctttgtggagcctccctgcacaagcagcactttcttttgccatagcaacatgtgcatcaataattctttagtctgtaatggtgtccaaaattgtgcatacccttgggatgaaaatcattgtaaagaaaagaaaaaagcaggagtatttgaacaaatcactaagactcatggaacaattattggcattacttcagggattgtcttggtccttctcattatttctattttagtacaagtgaaacagcctcgaaaaaaggtcatggcttgcaaaaccgcttttaataaaaccgggttccaagaagtgtttgatcctcctcattatgaactgttttcactaagggacaaagagatttctgcagacctggcagacttgtcggaagaattggacaactaccagaagatgcggcgctcctccaccgcctcccgctgcatccacgaccaccactgtgggtcgcaggcctccagcgtcaaacaaagcaggaccaacctcagttccatggaacttcctttccgaaatgactttgcacaaccacagccaatgaaaacatttaatagcaccttcaagaaaagtagttacactttcaaacagggacatgagtgccctgagcaggccctggaagaccgagtaatggaggagattccctgtgaaatttatgtcagggggcgagaagattctgcacaagcatccatatccattgacttctaatcttctgctaatggtgatgtgaattcttagggtgtgtacgtacgcagcctccagggcaccatactgtttccagcagccaacccttttctcccatcacaactacgaagaccttgatttaccgttaacctattgtatggtgatgtttttattctctcaggcagtctatatatgttaaaccaatcaaggaacttactctattcagtggaaacaataatcatctctattgcttggtgtcatttataggaagcactgccagttaaagagcattagaagaggtggttggatggagccaggctcaggctgcctcttcgttttagcaacaagaagactgctcttgactgataacagctctgtcaatattttgatgccacaataaacttgatttttctttacattccttttatttttcctttctctaaatttaatttgttttataagcctatcgttttaccatttcattttcttacataagtacaagtggttaatgtaccacatacttcagtataggcatttgttcttgagtgtgtcaaaatacagctagttactgtgccaattaagacccagttgtatttcacccatctgtttcttcttggctaatctctgtacttctgccttttaattactgggcccttattccttattttctgtgagaaataatagatgatatgatttattacctttcaattatatttttctcagttatactagaaaatttcataatcctgggatatatgtaccattgtcagctatgactaaaaatttgaaaaagataaaaatttctagcaagcctttgaagtttaccaagtatagtcacattcagtgacagcccattcattccagtaaagaatcatttcattcactttgggagaggcctataattacatttatttgcaatgtttctcttcgctagattgttacatagctcccattctgttggttttgcttacagcatatggtaaccaaggttagatgccagttaaaattccttagaaattggatgagccttgagattgcttcttaactgggacatgacatttttctagctcttatcaagaataacaacttccacttttttttaaactgcacttttgactttttttatggtataaaaacaataatttataaacataaaagctcattgtgttttttagacttttgatattatttgatactgtacaaactttattaaatcaagatgaaagacctacaggacagattcctttcagtgttcacatcagtggctttgtatgcaaatatgctgtgttggacctggacgctataacttattgtaaagaccttggaaatgtggacataagctctttctttccttttgttactgtatttagtttgtgataaatttttcactgtgtgatatttatgctctaaatcactacacaaatcccatattaaaatatacattgtacctgaccctttaatcatgttatttatgccaccaaggttgtggatcttaaggtatgtatggaaaggaactcatttatcaaattgtaagtaatacagacatgccatttaaaagaggtaaattcttgttttctatattttgttagtaaattctcaatgaaataagttgaagtttcactggatttcattaacttttaaatattacatatatgtgttttctcagattagtgaaaattgtgaccttaaatttaatacacatatactgcctcagagtgctttcttgtatcaaaatttttgttttttaaaaaagtagataatatttaggagacagaaaaacctatacataatgtattcatgatttaaatttttttaagtcagcctagtttcttgttttaaaaatataacgtggaaacatgaaaagacttgatgcatataatattcaatgaactaataccagagacagctaagttttttcagtagttatgctgaataagcattttagtaggtaacttacaccagctaacatttgaacagcataataaatacttaatataacaacaactatgatcttatgatgataaaagggaagttagcatattttctatgtaaaattattcattttttaaaatagctgttaaacctatatttaatctttagattataatagcaaataatacagtatgctaaactatagtcacttgtaactacatttttgtttttgaaatttgatttctatttataaggtcttgaagaggcctacaaaatacagagcctttaaagaagacataacagtaaaatagaagtacacagttttatacgagtcaatgtagcaagtaacatttagacagtaagtttggttctgaattttctggctgctaaaacactttttgcttttcacagtaaaaaaacttatgtgcagaggctaatttcctcttgaactacagcatgagggtctgtatataggaacatttcttcagaatgtaaaaaagatgcaaaatggagacagaggttataatggtgcttcttaacccagtgaaggcacaacttaatgtcgtctaggaacattggtttagggtcagtctgtattttcagggatagaactaaagaaccagatgatcaatagctaagccagccttagcctgtcacatgttatacaccttcattgaatcatagatgggcattagatctcatttatttattaaacttctctatgcttttggaagaggtaagaatggaactaataaatcttaggcattattgccagaataatgctaattgctgtatatacagcctttaatctttgagatcagtgagaaaactttataaattgcttactaaaatgaaagccataaaatttaataacagaagacatgaaatttagcaatcttgtggaattcattacacagtattaactgtcacgcagggtaccccacacagtgtcccagtgttgaacacaaaatgcaaatctggaagggataaatatcttcaattcagaaacagcattaagtatacctgtataatactgtcaccattatcttccatctgcaattcaccgcatcatcccccaaatgcccacagatctattgcaggaaacctactaatcccaacatctaaagcatgtaggaataagatgtgatattccttttgtgtgtggggagagtgtcaatctaaacgtttaacaaaaggcaaagaatgttcacatttcacatcacaaaagagatttcaaagactcctttaacccgacagcgcttatgtcagtgtctttgtcatgtttcatagaattgttagactttaaaagaacctcctgaaagtctgcctctgaacatttgtatggttctgccaatgtctgatgagaagaatgcttccctgtttgaggagtgtgttcactgatgagaggggacgggagaagcctggttgtgatttcaggaataattctcaaaggagattatactcttattgcaaaatggggtctgctatatattgttcatgtcactttattgcaagtgacatgaattatatgacattaaaaataatatgccttgaatcacactgattagacccagaaggatcattgagtttttggtggttttaaagatccaagaaagacctatctagcccaagtgtatgaatgagaagactgaagcccacagaagtgaactcagcaccagtgtctcaagaaccccagtactctggtttttttcttttttgagacggagtctcgctctgtcgcccaggctggagtgcagtggcgcgatctcggctcactgcaagctccgcctcccgggttcacgctattctcctgcctcagtctcccaagtagctgggactacaggcgcccgacaccatgcccggctaatttcttgtatttttagtagagacggggtttcaccgtgttagccaggatagtctcaatctcctgacctcgtgatccacccgcctcggcctcccaaagtgctgggattacaggcgtgagccaccgcgcctggccttctgtttttgtttttctgtttttttgttttttgagacagagtctcgctctgtcacccaggctagagtgcagtggcgtgatctcggctcactgcaagctccgcctcccgggttcatgccattctcctgtctcagcctctcgagtagctgggactacaggcgcccgccaccatgcccggctaattttttgtatttttagtagagacggggtttcaccatgttagccaggatggtctcgatctcctgacctcgtgatccgcccgcctcggcctcccaaagtgctgggattacaggagtgagccaaggcgcccagcccagctgtacgttttaaaagtcaagcacttctgtttagcagcccatgtaagcttgtcaatcattctgaattgaaatgtaatttattctgtaatttcttcaatgcattatatttccccttttctttaaatgtatgtaacattgtgttctacagttttgctgccatgattccttggcaccgtgaattcttactaagcaatgtttgttaacagtatacaggctcgatactaggcaggaagagctcctgtgttcttgcttttttgatcttttttaaatctaaaggagacgtgtattctagaaattaaatatttgtgtgccatatctcttgagttttggagaatgattggagtttgagttactgtaaataacaagattatcttggatattttagttttctgcaaaatcacttatgttttatatacctctgctaataattcaaaactctgaatttgctttactttaactttttaaaaatgtatttttgcaattggtttaatgactaccaaagcctaaaaagctaatgactagggtgcatgtttagtatgcactgtctagtgtaagctttttaaaagcagtagatttttattagagatgaacttccaggccatatgagaatatgcttaatcctagatttggcattttatagaaaagaattttgactcttgaactagaattaaaaacttgttctgatttccttgcttgcctcaatttctaaagtctagaagtggcaaataatttagatcacttataccaacagaatctgtatttccttccggggcaaagttggcatttcctatccactagcttccaaaatacaataatcctagttatgataagggcaactttattttattacacttagaaccattttatgttttcaaattcattaatcttcaagtgaagatgaactaaagaaaaaaatgcgttttgtcccaggttgcctgcaggttgcagtctgctgcatccggtcactgaagaggcagtgaggactgtcacagagtgggctggagagccaagctgttctttcggggtgcacagtgcaccagccataacacagcttagaaacatggatgagtatacctcaagacaggtgaacacggagtggggagcaaaagaaggcagaaactcctctgagtttcacaagcatcaggcacagatcagggcacagaggaagaagaaagaaggtttaccactggtctgtctctgtaaattgttacagagcaattttactttgtgttatttaggatcaagaaacaagtgttatttaaaagttctcttaccctccaacctttgtcatact

SEQ ID NO: 196572 - DNA, 1578 bp, Artificial Sequence
  derived and/or modified sequence
atggccctggagcggctgtgcagcgtgctgaaggtgctgctgatcacagtgctggtggtggaggggatagcagttgcacagaagacccaggacggccagaacattgggattaaacacatccctgccacacagtgcggcatatgggtcagaacatctaatggagggcactttgcgtcgcctaactacccagacagttacccacctaacaaggaatgtatatatatactggaagctgcaccccgccaacgaatcgagttaactttcgatgaacactactacatagagccaagcttcgagtgcagatttgaccatctagaagtccgggatggaccattcgggttctcgccgctgatcgaccgttattgcggtgtgaaatctccccccctgatccgatccaccggccggtttatgtggatcaagttctcaagtgatgaggagcttgaaggattaggatttcgcgctaaatactcttttatcccagatccagatttcacatatttgggcggtattctaaaccctatacccgattgtcaatttgaactgagcggcgctgacgggatcgtgcgtagcagtcaagtggaacaggaggagaagactaagccggggcaggccgtcgattgtatttggacgatcaaggcgacccctaaagccaaaatctatctcagatttctggattaccagatggagcacagtaatgagtgcaagcggaattttgtcgcagtgtacgacggctcctcgagcattgagaatttgaaagctaaattttgctccacagttgcgaacgatgtcatgctaaaaaccggcattggcgtcatccggatgtgggccgacgaggggagtcgcctgagccggttccgcatgctctttacctcattcgtggaacctccatgcacctcttccacttttttttgtcactccaatatgtgtatcaacaatagcctagtatgcaacggtgtccaaaactgcgcgtacccttgggacgagaaccattgtaaggaaaaaaaaaaggcaggtgtgttcgaacagatcacaaagactcacggtactattatcggcataacgtctggaatcgtcttggttctactgatcatctccatactggtacaagttaagcaacccagaaagaaggtgatggcctgtaagaccgcattcaacaaaacaggcttccaggaggtgtttgatccaccccattatgagttattctccctgcgcgacaaggagatttccgccgatctggccgatttatctgaagaactggacaattaccagaagatgcgccgttcctccacagcttcacggtgtattcatgaccaccattgtggttctcaagcgtcttccgtcaagcagagccggaccaacctgtcctctatggagctcccctttagaaatgattttgcacaaccccaaccaatgaagactttcaactccaccttcaaaaaatctagttatacatttaagcaaggacacgaatgtccggagcaggccctcgaagacagagttatggaggaaattccctgcgagatctacgtgcgaggaagggaagacagtgcacaagctagcatttctatcgacttttag

SEQ ID NO: 196573 - DNA, 1578 bp, Artificial Sequence
  derived and/or modified sequence
atggccctggagcggctgtgcagcgtgctgaaggtgctgctgatcaccgtgctggtggttgaaggcattgctgttgcccagaagacccaggacggacagaacatcggtataaagcacatccctgcaacccagtgtggaatttgggtaagaacctctaacggagggcactttgcatctccaaactatccagacagctacccccccaacaaggaatgtatttatatcctcgaggcagctccccggcaaagaattgagctgacgtttgacgaacactactacatcgagccgagtttcgagtgcagatttgatcacctggaggtgcgagacggccccttcggcttctcgccactcatcgaccgctactgtggggtgaagtccccgccattgatccggagcactggaaggtttatgtggataaagtttagctccgatgaagaactggagggcctggggttcagagcaaagtactcttttatcccagacccagactttacatacttaggtggcattctgaaccctatccctgactgccagttcgagctttcaggagctgacggaattgttcgctcttcccaagtggaacaagaggaaaaaaccaaaccagggcaggccgtggactgtatctggacgattaaggcaacccctaaggccaaaatctacctccgattcctggactatcaaatggagcattcaaatgagtgcaaacgaaacttcgtcgctgtttacgatggatcttcatcgattgaaaacctcaaggcgaagttctgttcaacggtcgcgaacgacgttatgctaaaaaccggcattggtgtgataagaatgtgggccgacgagggcagtagactctctagatttagaatgctcttcaccagttttgtcgaacctccttgtacaagttccacattcttttgccacagcaacatgtgtatcaataactccctggtatgcaatggggtgcaaaattgcgcttatccttgggatgaaaatcattgcaaggagaagaagaaggctggagtgttcgagcagatcactaagactcacggcactatcattgggatcacctcggggattgtgctggtgctgcttataataagcatcttggtccaagtgaaacaaccacgaaaaaaagtgatggcctgcaaaactgcttttaataaaactggtttccaggaggtatttgaccctccacactatgagctcttttcgctacgggacaaggagatttcggccgatctggccgacctgagcgaagaactggacaactaccaaaaaatgcggcgatcaagcacagcttctaggtgtatccacgaccatcattgcggctctcaggcgtcaagtgtcaagcagtcccgaaccaatttatccagtatggaattaccttttcgcaatgatttcgcccagccccagccgatgaagacttttaattccacgtttaaaaaatcttcctacactttcaaacagggacacgaatgccctgagcaggctctcgaggatagggtgatggaggaaataccatgtgagatctacgttcgaggtcgggaggactctgctcaggcatcaatttccatagacttttag

SEQ ID NO: 196574 - DNA, 1578 bp, Artificial Sequence
  derived and/or modified sequence
atggctcttgagcgcttgtgttcagtgttaaaggtgctcctgatcactgtattggtggtcgaaggaatcgccgtggcacagaaaacccaggacggtcagaacatcggtatcaagcacatccccgcaactcagtgcggcatctgggtgcgcacatccaatggcggacactttgcaagccctaattatccagactcttaccctcctaacaaggagtgcatatatatcctggaagccgcacccaggcaaaggatagagttgactttcgatgagcactattacattgagcccagcttcgagtgccgcttcgaccacttggaggtgcgagatggaccctttggcttcagtccgctcatcgatcgctactgtggcgtgaagagcccaccactcatcagatcgaccggtagattcatgtggataaaattttcgtcggacgaggaacttgagggactggggttccgggcaaagtacagcttcatacctgaccccgatttcacttacctcggtggaatcctgaatcctatcccagattgccagtttgaactcagtggcgctgatgggatcgtaaggagctcacaagttgaacaggaggagaaaacgaagccaggacaggctgtggattgtatctggactatcaaagccacccctaaggccaagatttatctgaggttcctggattaccaaatggaacatagtaatgagtgtaaaagaaattttgtcgcagtctacgacggaagctcaagcattgaaaatctgaaagctaaattctgttccactgtggcgaacgacgtaatgctgaagaccgggattggagtaatccgcatgtgggccgacgaggggtcccgtctctcgagatttcgcatgctgtttacctcattcgtagagcctccctgtaccagttccacattcttctgtcactccaatatgtgcatcaacaacagtctggtatgtaacggcgtccaaaactgtgcatacccatgggatgagaatcactgtaaggaaaagaaaaaagcgggtgtgtttgaacagatcactaagacacatggtacaatcatcgggatcacttctggtatagttttggtcttactgattatctctattctcgtacaagtgaagcagcctagaaagaaggttatggcttgtaagactgcatttaataaaactggttttcaggaagtattcgacccgccacattatgaactgttcagcttgagagacaaggaaatttccgctgacctggccgatctatctgaggagctcgacaactatcagaaaatgcgccgttcatcaacagcttcgcggtgtatacatgatcatcactgcggatcgcaggcttctagtgtgaaacagtctaggactaacctgtcctccatggagctcccttttaggaacgacttcgcccaaccacagcctatgaagacctttaattccacctttaagaaaagcagctacacttttaagcagggacacgaatgtcccgagcaggctctcgaggacagggtgatggaggaaattccctgtgaaatttacgtccgcggtcgggaagactcggcccaagccagtatcagtattgatttttag

SEQ ID NO: 196575 - DNA, 1578 bp, Artificial Sequence
  derived and/or modified sequence
atggccttagagcggctgtgttctgtgctgaaggtgctgcttatcacagtgctagttgttgaaggaatcgcggtggcgcagaaaacacaggacgggcagaacatagggattaaacatatacccgcaactcagtgcggtatctgggtgcggaccagcaacggcggacacttcgcctccccaaactacccagatagctacccccctaacaaggaatgtatctacatcctggaggccgctcctcggcagcggattgagcttacctttgacgaacactactacatcgagccatctttcgagtgccggttcgatcatctggaggttagggatggccctttcggcttcagcccattgattgatcgatattgcggtgtgaagagcccccctttgattcggtcaactggtcgatttatgtggataaaattcagcagcgatgaagaactggagggtctgggcttccgtgcgaagtacagctttatccccgatcctgattttacctatcttggcggtattttgaaccctattccggattgccagtttgagctcagtggagcagatgggatcgtgaggtcaagccaggtggaacaggaagagaagaccaagcccggacaggctgtcgattgtatctggactatcaaggcaaccccaaaggctaagatttacctgcgctttctcgactatcagatggagcattccaatgaatgcaagaggaattttgttgcggtgtacgacggctcatcttcaatcgaaaacctaaaagccaagttttgttctaccgttgccaatgacgtaatgctgaaaacaggcattggagtaatcagaatgtgggcagacgagggctccaggctgagccgctttcggatgctgttcacatcctttgttgagccgccttgtacctcatccacattcttttgtcactcgaacatgtgcatcaataactccttagtatgcaacggagttcaaaattgtgcttacccttgggatgaaaaccactgcaaggagaaaaaaaaggccggagtgtttgagcaaataaccaaaacccatggcactattattggaatcacttcaggaatcgttctcgtcttattaataatctctattctggtgcaggttaagcagcccagaaagaaggtgatggcgtgcaagacagctttcaataagactgggtttcaggaggtcttcgaccccccacactatgagttgttctccctgagagataaggagatttcggccgatctagctgatctgagcgaagaactggataattaccaaaagatgcggcgttcaagcactgcctccaggtgcattcacgatcatcactgtggaagccaagcatcctctgttaagcaaagccgaacaaacctatcctccatggaattgccttttcggaatgattttgcacagccacaacctatgaagacatttaacagtacatttaaaaagagcagttacaccttcaagcagggccacgaatgcccggaacaggctctcgaagatcgggtgatggaggagatcccctgcgaaatttacgtgcgagggagggaagattctgcccaggcatctattagcattgatttttag

SEQ ID NO: 196576 - protein, 385 aa, Artificial Sequence
  derived and/or modified sequence
MAAAAARWNHVWVGTETGILKGVNLQRKQAANFTAGGQPRREEAVSALCWGTGGETQMLVGCADRTVKHFSTEDGIFQGQRHCPGGEGMFRGLAQADGTLITCVDSGILRVWHDKDKDTSSDPLLELRVGPGVCRMRQDPAHPHVVATGGKENALKIWDLQGSEEPVFRAKNVRNDWLDLRVPIWDQDIQFLPGSQKLVTCTGYHQVRVYDPASPQRRPVLETTYGEYPLTAMTLTPGGNSVIVGNTHGQLAEIDLRQGRLLGCLKGLAGSVRGLQCHPSKPLLASCGLDRVLRIHRIQNPRGLEHKVYLKSQLNCLLLSGRDNWEDEPQEPQEPNKVPLEDTETDELWASLEAAAKRKLSGLEQPQGALQTRRRKKKRPGSTSP

SEQ ID NO: 196577 - protein, 38 aa, Artificial Sequence
  derived and/or modified sequence
  misc_feature (1)..(1): Xaa can be any naturally occurring amino acid
XWASLEAAAKRKLSGLEQPQGALQTRRRKKKRPGSTSP

SEQ ID NO: 196578 - protein, 57 aa, Artificial Sequence
  derived and/or modified sequence
MAAAAARWNHVWVGTETGILKGVNLQRKQAANFTAGGQPRREEAVSALCWGTGGETQ

SEQ ID NO: 196579 - DNA, 1158 bp, Artificial Sequence
  derived and/or modified sequence
atggccgccgccgccgccagatggaaccacgtgtgggtgggcaccgagaccggcatcctgaagggcgtgaacctgcagagaaagcaggccgccaacttcaccgccggcggccagcccagaagagaggaggccgtgagcgccctgtgctggggcaccggcggcgagacccagatgctggtgggctgcgccgacagaaccgtgaagcacttcagcaccgaggacggcatcttccagggccagagacactgccccggcggcgagggcatgttcagaggcctggcccaggccgacggcaccctgatcacctgcgtggacagcggcatcctgagagtgtggcacgacaaggacaaggacaccagcagcgaccccctgctggagctgagagtgggccccggcgtgtgcagaatgagacaggaccccgcccacccccacgtggtggccaccggcggcaaggagaacgccctgaagatctgggacctgcagggcagcgaggagcccgtgttcagagccaagaacgtgagaaacgactggctggacctgagagtgcccatctgggaccaggacatccagttcctgcccggcagccagaagctggtgacctgcaccggctaccaccaggtgagagtgtacgaccccgccagcccccagagaagacccgtgctggagaccacctacggcgagtaccccctgaccgccatgaccctgacccccggcggcaacagcgtgatcgtgggcaacacccacggccagctggccgagatcgacctgagacagggcagactgctgggctgcctgaagggcctggccggcagcgtgagaggcctgcagtgccaccccagcaagcccctgctggccagctgcggcctggacagagtgctgagaatccacagaatccagaaccccagaggcctggagcacaaggtgtacctgaagagccagctgaactgcctgctgctgagcggcagagacaactgggaggacgagccccaggagccccaggagcccaacaaggtgcccctggaggacaccgagaccgacgagctgtgggccagcctggaggccgccgccaagagaaagctgagcggcctggagcagccccagggcgccctgcagaccagaagaagaaagaagaagagacccggcagcaccagcccctag

SEQ ID NO: 196580 - DNA, 1158 bp, Artificial Sequence
  derived and/or modified sequence
atggcagccgctgctgcccggtggaatcacgtatgggtgggcacagagacgggtattctaaagggcgtgaatctgcagcggaaacaagccgctaatttcaccgcgggcgggcagccacggagggaagaagccgtgtcagcgctctgttggggtacaggcggcgaaacacagatgctggtgggttgtgccgacaggactgtgaaacatttttccactgaggacggtatcttccagggacagaggcactgccctggtggcgagggaatgtttcggggtttagctcaggctgacgggacactaatcacatgcgtggatagtggaattctccgggtctggcacgataaggacaaggacacaagcagcgaccctctgcttgaactgagagttgggccaggagtctgccgcatgcgccaggatcccgctcaccctcacgtggttgccacgggcgggaaggaaaacgctctgaaaatatgggatctgcagggctctgaagagcccgtattcagggcaaagaatgtccgcaacgattggctagacctgcgcgtcccaatttgggatcaggacatccagttcttaccaggctcccagaagttggtgacctgcaccgggtaccaccaggtcagagtgtacgatccagcttctccacaacggcgtccggtgctggaaactacttacggagagtacccattgaccgcaatgacactaactccaggcggtaatagtgtgattgtcggcaacactcacggacagttagccgagatagacctgagacaaggaaggctactgggctgtctgaaaggattagcaggctcagtgcggggtctgcaatgccatccttctaaaccactgttagcttcgtgtggactggacagagtgctcagaatacacaggatccagaatccgaggggactggagcataaagtctacctgaaatcacagctgaattgcctgctcctctcaggcagggataattgggaggacgagccacaggaaccacaggaacctaacaaagtgccgctcgaggacacggaaactgacgaactgtgggccagtcttgaagccgccgcaaagcgtaagttgtctggtctggaacaaccacagggggcacttcagactaggcgccgcaagaagaagcggcctgggtccacatccccctag

SEQ ID NO: 196581 - DNA, 1158 bp, Artificial Sequence
  derived and/or modified sequence
atggccgccgccgccgctcggtggaaccatgtgtgggtcggcacagaaacaggcatcttaaagggggtaaaccttcagcgtaagcaggcagcgaattttacggctggcggacagccccggcgagaagaggccgtttctgccctctgctggggtactgggggagaaacccaaatgcttgttggatgcgcagacaggacagtcaagcattttagcaccgaagatggcatcttccaggggcagaggcactgtcccggaggggaaggtatgtttcgcggtctggcccaggccgacggaacccttattacctgcgtggacagcggtattctacgggtgtggcacgacaaagacaaagatacatctagcgatcctttgttggagctgcgcgtaggcccaggcgtttgccggatgagacaggaccccgctcaccctcatgtcgtcgcaacaggtggcaaggagaacgcactgaaaatttgggatctgcagggcagcgaagagccagtctttagggcgaaaaacgtgcgcaacgattggctggatttgcgcgttcctatctgggatcaggatatccagttcctaccaggcagtcagaagctggtcacctgcacaggctatcaccaggtacgagtctatgaccccgcctcacctcaacgcaggcctgtgctggagactacctatggcgaatatcctctgactgcaatgacacttaccccaggcgggaacagcgtgatcgtggggaacactcatggtcagctcgctgagattgatctcagacagggacgccttttaggatgcctaaaagggctggcgggaagcgttagaggactgcagtgtcacccctccaaacctctgcttgcctcttgtggtctcgacagggtgctgcgcattcaccggatacagaatcccagaggcttagagcacaaagtgtacctaaaaagccagctcaattgtttactgctgtccggccgggataattgggaggacgagcctcaagagccccaggagcccaataaggtgcctctggaagatacagagactgacgaactctgggcctccctcgaagccgccgctaagaggaagctgtctggcctagagcagcctcagggcgctctgcaaaccaggagacgcaagaaaaaacggcctggttcgaccagtccatag

SEQ ID NO: 196582 - DNA, 1158 bp, Artificial Sequence
  derived and/or modified sequence
atggctgcagctgccgccaggtggaaccatgtgtgggttgggacagagaccgggattctcaagggagtcaacctgcagcgtaaacaagcagccaacttcacggccggaggccagccccgtagggaagaggctgtttccgctctttgctggggcactgggggagaaacacagatgcttgtcggctgcgcagaccgtacggtaaagcattttagtaccgaagatggcattttccagggccagaggcactgtcccggaggtgaaggcatgttcaggggtctggcccaagcggatgggacgctgatcacgtgcgtcgacagtggaattctgcgggtgtggcacgacaaagacaaagacacaagttcggatcctctgttggagctacgggtcggccccggagtgtgcagaatgcgccaggacccggcccaccctcatgtggtggccactggaggcaaagagaacgccctgaagatctgggacctccagggatccgaggagcctgtattcagagcgaaaaacgtgcggaacgactggcttgacctgagagtccctatctgggaccaggacatccagttcctcccaggaagccaaaagctcgtgacatgtacgggataccaccaggtgcgcgtgtacgaccccgcttctccccaacggcgacctgttctcgaaaccacctacggtgaatacccactcacggctatgaccctgacccctgggggcaatagtgttattgtgggtaacactcacgggcaactggccgaaatcgacttgcgccaaggccggcttcttggatgtttaaaaggtcttgcgggatccgtgcggggactgcagtgccacccgagtaagccacttctggcaagctgcggcttggacagagtgctgcggatccacagaattcagaatcccagaggactggagcacaaagtgtatttaaagtcacagcttaattgcctgctgctgtcaggacgggataactgggaagacgaaccgcaagaaccccaagagccaaataaagtgcctttagaggacactgagacagacgagctttgggcctccctggaagccgcagcaaagcggaagctgtccggcctcgagcagccacagggcgcgttgcaaacacgaagacgaaagaaaaagcgtcccggctccacaagtccctag

SEQ ID NO: 196583 - DNA, 1158 bp, Artificial Sequence
  derived and/or modified sequence
atggctgctgctgctgcccgctggaaccacgtgtgggtgggcacagaaacaggcatcctgaagggcgtgaacctgcagaggaagcaggccgccaacttcaccgctgggggccagccccggcgggaggaggccgtgtctgccctgtgctggggcaccggcggggagacccagatgctggtgggctgtgccgacagaacagtgaagcacttcagcacagaagatggcatcttccagggccagaggcactgccctggaggagagggcatgttccggggcctggcccaggctgatggcaccctcatcacctgtgtggacagcggcatcctgcgggtgtggcatgacaaggacaaggacaccagcagtgaccccctgctggagctgcgggtgggccctggggtgtgcaggatgaggcaggaccctgcccacccccacgtggtggccaccggcggcaaggaaaatgccctgaagatctgggacctgcagggcagcgaggagcccgtcttccgggccaagaatgtgagaaatgactggctggacctgcgggtgcccatctgggaccaggacatccagttcctgcccggcagccagaagctggtgacctgcaccggctaccaccaggtgcgggtgtatgaccctgccagcccccagaggaggcctgtgctggagaccacctatggagagtaccccctgacagccatgaccctgaccccaggcggcaacagcgtgattgtgggcaacacccacggccagctggccgagattgacctgcggcagggccgcctgctgggctgcctgaagggcctggccggctctgtgcggggcctgcagtgccaccccagcaagcccctgctggccagctgtggcctggacagagtgctgcgcatccaccgcatccagaacccccggggcctggagcacaaggtgtacctgaagagccagctgaactgcctgctgctgagcggccgggacaactgggaggatgagccccaggagccccaggagcccaacaaggtgcccctggaggacacagaaacagatgagctgtgggccagcctggaggccgccgccaagaggaagctgagcggcctggagcagccccagggcgccctgcagaccaggaggaggaagaagaagaggcctggcagcaccagcccctag

SEQ ID NO: 196584 - DNA, 1158 bp, Artificial Sequence
  derived and/or modified sequence
atggccgccgccgccgcccggtggaaccacgtgtgggtgggcaccgagactggcattctgaaaggagtcaatctgcaaaggaagcaagcagcaaactttaccgctggggggcagcctcgccgcgaggaggcagtatccgcactttgctggggcacaggcggcgagactcaaatgctcgtcggctgtgccgatcgaactgttaaacacttcagtaccgaagatggaatattccaaggacagcgccactgtccgggcggagaaggaatgtttagaggccttgcacaggccgatggaactttgattacttgcgtcgatagcggcattctgagggtctggcacgataaggataaggatacatcctccgatccattgctggagctgcgcgtgggtccgggggtgtgtaggatgagacaggaccccgcacaccctcacgtggtcgcaaccggggggaaagagaacgcgttgaaaatatgggacctgcaagggagcgaggaaccagtgtttcgggccaaaaacgttcgcaacgattggctggatctccgggtccccatatgggatcaagatattcagtttctgcccgggagccagaaactcgtgacttgcaccggatatcatcaggttcgggtgtacgacccagctagtcctcagcgcagaccggtgctggagacgacctatggggagtatccgcttactgctatgaccctaaccccaggcggaaactctgtcattgtggggaatactcacggtcagttagcggaaattgacttacggcagggccgcctcttaggctgccttaagggattggctgggtctgttaggggccttcagtgccatcccagtaagcctttgctcgcgtcatgcggcttggatagagtcctgcgcatacaccgaattcagaacccgcggggactggagcacaaggtgtatttgaagagccaattgaactgtctacttctttcaggccgagataattgggaggacgagccgcaggagcctcaggaacccaataaggtcccactggaagacacagaaacggacgagctttgggcctctctggaggccgcagctaagagaaagctgtcaggtttggaacagccccagggagcacttcaaactagacgtcggaaaaagaaacggccgggatccacgtcaccttag

SEQ ID NO: 196585 - DNA, 1158 bp, Artificial Sequence
  derived and/or modified sequence
atggccgccgccgccgcccggtggaaccacgtgtgggtgggcaccgagaccggaatcctgaaaggagtgaacctgcagaggaagcaagccgccaatttcacagcagggggacagccacgccgggaggaggcagtgtccgctctgtgttgggggaccgggggagagacccagatgctggtgggatgtgctgaccgaactgtgaaacatttcagcaccgaggatggaatcttccagggacagagacactgtcccggcggagagggcatgtttcgaggcctcgcccaggctgatgggacactcatcacgtgcgtggacagcggtatcttgagggtctggcatgacaaggacaaggacactagttccgaccctctgttggaactccgtgtcgggcccggggtttgccgaatgaggcaggatccggcgcacccacatgtggtggccactggaggcaaggagaacgccctgaaaatatgggatttgcagggctctgaggagcctgtgtttcgagcaaagaatgtcagaaatgactggctcgatttgcgagtgcctatttgggaccaagatatacagtttcttcccggctcccagaagcttgttacatgcactgggtaccaccaggttcgggtctacgaccctgcttccccacagaggaggccagtgcttgagacaacttacggtgaatacccactgacggcgatgaccctgacccccggcggcaacagtgtcatagtcggaaacacacacgggcagctggctgagatcgacttgagacagggacgcctgttgggatgcttaaaggggctggccggaagtgtgcggggcctccagtgccaccctagcaagcctcttctcgcaagctgtggcttagacagagtactccggatacatagaatccaaaatcccaggggactggaacataaggtatatctaaaatcacagcttaattgtcttctcttgtctgggcgagataattgggaagatgaaccccaggagccccaggaacctaataaagtccccttagaggacaccgaaactgacgagttgtgggccagcctcgaggcagctgccaagcgcaaactgagcggacttgaacagccgcagggtgccctccagaccaggagacgaaagaaaaagagacctggatctacttcaccgtag

SEQ ID NO: 196586 - DNA, 1158 bp, Artificial Sequence
  derived and/or modified sequence
atggccgccgccgccgcccggtggaaccacgtgtgggtgggcaccgaaaccggcattctcaagggcgttaacctccagagaaaacaggccgcgaacttcacagccggcggccaaccccggagagaggaggcagtcagcgccctttgttgggggaccggcggcgaaacccagatgctggtcggctgcgccgatcgcacggtgaaacatttctccaccgaggatgggattttccaaggtcagcggcattgtcccggcggggaaggcatgttccgtggcttggcacaggctgatggaacgctgattacttgtgtggattcaggaatcctgagggtttggcacgacaaggataaagacaccagtagcgatccactgttggagttgcgggtgggtccaggcgtctgccggatgaggcaggaccctgcacacccacatgtcgttgctaccggcggaaaggagaatgccctgaaaatctgggacttacaaggcagcgaagagccggtcttcagggcgaagaatgtgcgaaatgattggcttgacctgcgcgtgcctatttgggatcaggacattcagttcctgccaggctcacagaagcttgtgacatgcactggataccatcaagtaagagtgtatgatcccgcgagtccacagcggcggcccgtgcttgaaactacatacggtgaatatccgctgaccgccatgactctgacccctgggggcaattctgtgattgtcgggaatacgcacggacagctcgccgagattgacctgaggcagggccggctgttgggctgcctcaagggactcgcaggctccgtgagaggactccagtgccatccctccaagccgctgcttgcctcttgcggactggacagagttctcaggattcaccgcatacagaacccgcgcggtttagagcacaaggtatatctgaaaagccagttgaactgcctcctgttaagtggtagagataattgggaggatgaaccccaggagcctcaggagcctaataaagtcccgctagaggacacggaaactgatgagctgtgggctagcctggaggctgctgctaagcgcaaacttagcggacttgaacagcctcagggggcactgcagactcggcgccgcaagaagaaaagacctgggtccactagcccatag

SEQ ID NO: 196587 - DNA, 1158 bp, Artificial Sequence
  derived and/or modified sequence
atggcagccgcagcggcaaggtggaaccacgtgtgggtggggacagaaacaggcatccttaagggcgtgaacctccagagaaagcaggccgctaattttacagccggtggccagccaaggcgggaagaggcggtgtcagcgctctgctggggtacaggcggagaaactcagatgctcgttggttgcgccgaccgaactgtgaagcatttttcaaccgaagatggcatcttccaggggcagcgtcattgccccggaggggaaggaatgtttcgagggctcgcccaggctgacgggactctcattacgtgtgtggactcagggatactgcgggtttggcatgacaaagacaaggatacaagttctgacccactgctcgaacttcgagtcgggccaggcgtttgccgaatgcggcaggacccagcccatccacatgtggtggccacaggcggtaaggagaacgccctcaaaatctgggacctccaggggtcagaagagcctgttttcagggccaagaatgtgcgcaatgattggctggacctgagagtccctatatgggatcaggacatccagttcctcccaggatcgcagaaactggtcacgtgcacaggctaccaccaggtgagggtctacgaccccgcatcgccccagcggagaccggtgctggagactacatacggtgaataccccctcacggcaatgactctgactcccggagggaatagcgtgatcgtggggaatacgcatgggcaactggccgaaatcgatctacgtcaggggagattgctagggtgcctgaaaggacttgctggctccgtcagagggctgcaatgccacccgtctaagcccttgcttgcatcctgtggactggacagggtgcttcggattcacaggattcaaaatccaaggggccttgaacataaggtctatctgaagtctcaattgaattgcttactgctgagcggacgggataattgggaagatgaaccacaagaaccacaggagcccaacaaggtgccgctcgaagacacagagactgatgaactgtgggcatcccttgaagctgcagcgaagcgtaagcttagcggcttggagcagcctcagggggcactgcagactcgaaggagaaaaaagaaacggcctggatccacctcaccttag

SEQ ID NO: 196588 - DNA, 1158 bp, Artificial Sequence
  derived and/or modified sequence
atggccgctgccgctgcacgttggaatcacgtgtgggtgggcacagaaactggaattctgaagggagtgaacctccagaggaaacaggctgccaatttcacagccggtggacagcctcgcagagaggaggctgtgagtgcgttatgctggggaacaggcggtgaaacccagatgttggtgggctgtgcagataggacagtaaaacattttagtacagaagacggtattttccagggacagaggcactgtccaggaggggaaggcatgttccgtgggctggctcaggctgatggaaccctgatcacctgcgttgacagcggtatcctcagagtttggcacgataaggacaaagatacaagttcagacccccttcttgaactcagggtggggccaggcgtttgtagaatgaggcaggaccccgcacatccccacgtagtggccaccgggggaaaggaaaacgcgcttaagatctgggatctgcaaggttctgaggaaccggttttcagagcaaagaacgtgaggaatgactggctggatctccgggtccccatctgggaccaggatattcagtttttgcccggttctcagaagttggttacatgcacagggtaccatcaggtccgggtttacgaccccgcttcaccacagcgacggcctgtacttgagactacttacggcgagtatcctctgaccgccatgacactgacacccggaggcaactccgttatagtgggaaacacgcacgggcaacttgccgaaatagacctgcggcagggtaggctgctgggctgcctgaagggactggctggctctgtcagagggctgcagtgccacccgtctaagccactcctggcctcctgcggacttgaccgagtgctgaggatccaccgcattcagaatccacgcggactcgaacacaaggtgtacctgaagtcacaacttaactgcttgctcctgagcggtagagataattgggaggatgagccccaggaaccgcaggagcctaacaaagttcccctggaggacacggagactgacgagctgtgggcgtctctggaagccgcagccaagaggaagctgtcaggactggagcagcctcaaggagctctgcagacgaggcggaggaagaaaaaacggcctggttctacatctccttag

SEQ ID NO: 196589 - DNA, 1158 bp, Artificial Sequence
  derived and/or modified sequence
atggcggctgctgctgccagatggaatcatgtgtgggttgggaccgaaaccggcattctgaaaggagtcaatcttcagaggaagcaggctgccaacttcaccgccggtggacaacctagacgggaagaggcagtaagcgcgctctgctgggggaccgggggagagactcagatgcttgtcgggtgtgctgacaggactgtaaaacatttcagtactgaggatggcatcttccagggccagcggcattgccccggtggcgaagggatgtttagaggtctggcccaagcagacggtacgctgataacttgcgtggattctggaattttaagagtctggcacgataaagataaagatacaagttcagacccattactggaactgcgagtcggtcccggtgtctgccgaatgagacaggaccccgctcatccacatgtggtagccactggaggaaaagagaacgctttaaagatctgggacctgcagggttcagaggagcccgtgtttagggcgaaaaacgtgcggaacgactggctcgacctccgtgtgccgatttgggaccaggatattcagttcctgccagggagtcagaagctggtgacatgtactggttaccaccaggttagagtttacgacccagcgtctccccagcgtcgccctgtgctagagaccacttatggggaatatcccttgacggcaatgactcttacgccaggcggaaatagtgtcatcgttggcaacactcacggacaactggcggaaatagacctacggcagggacggctgctgggctgtctaaagggcctggcaggatccgtgaggggactccagtgccatccatccaaacctcttttggccagttgtggcctcgaccgggtactgcgcatccacagaattcaaaaccccagaggattggagcataaggtttacctgaagtcacagctgaactgcctcttactgagcggcagagataactgggaagacgagccccaggagcctcaggagcctaacaaagtacccctggaggacactgaaactgatgagttgtgggcttccctcgaggctgccgcaaagcgcaaactaagcggactggagcaaccacagggagctcttcagactcggaggcgcaagaagaagcgaccaggctctacatccccatag

SEQ ID NO: 196590 - DNA, 1289 bp, Artificial Sequence
  derived and/or modified sequence
agcaactacactgcgctgcatcggactcgacgcccgctggtgacgcacacgctgcgccggaagtgtgaactgtctgcctccaggctttgtcatggcggctgctgctgcacgctggaaccatgtgtgggtcggcaccgagactgggatcttgaaaggggtaaatcttcagcgaaaacaggcggcgaacttcacggccggaggacagccgcggcgcgaggaggcagtgagcgccctgtgttggggcaccggcggcgagacccagatgctggtgggctgcgcggacaggacggtgaagcacttcagcaccgaggatggcatattccagggtcagagacactgcccgggcggggagggcatgttccgtggcctcgcccaggccgacggcaccctcatcacatgtgtggattctgggattctcagagtctggcatgacaaggacaaggacacatcctctgacccactcctggaactgagagtgggccctggggtgtgtaggatgcgccaagacccagcacacccccatgtggttgccacaggtgggaaagagaatgctttgaagatatgggacctgcagggctctgaggaacctgtgttcagggccaagaacgtgcggaatgactggctggacttgcgggttcccatctgggaccaggacatacagtttctcccaggatcacagaagcttgtcacctgcacagggtaccaccaggtccgtgtttatgatccagcatccccccagcgccggccagtcctagagaccacctatggagagtacccactaacagccatgaccctcactccgggaggcaactcagtgattgtgggaaacactcatgggcagctggcagaaattgaccttcggcaagggcgtctactgggctgtctgaaggggctggcaggcagtgtgcgtgggttgcagtgccacccttcaaagcctctactagcctcctgtggcttggacagagtcttgaggatacacaggatccagaatccacggggtctggagcataaggtttatctcaagtctcaattgaactgcctcctcttgtcaggcagggacaactgggaggatgagccccaagagcctcaagaacccaacaaggtgcccctagaagacacagagacagatgaactttgggcatccttggaggcagctgccaagcggaagctctcgggtttggagcagccccaaggagctctccaaacgagacggagaaagaagaagcggcctgggtccaccagcccctgacgcccctgtgcccactttgtaaataaactgctgaacaccc

SEQ ID NO: 196591 - DNA, 1736 bp, Artificial Sequence
  derived and/or modified sequence
atcgcttctcggccttttggctaagatcaagtgtagtatctgttcttatcagtttaatatctgatacgtcctctatccgaggacaatatattaaatggatttttggaaataggagatggaataggagcttgctccgtccactccacgcatcgacctggtattgcagtacttccaggaacggtgcactctcccttcggggagagaacaaccgttgtttaatggaagatttcgatcagttaggtccagaacacatattacataatggagccgggagacagactagggctggcttgatccggccacgcagtccaggaaaggtgcttttcacccccaagtgcaaaatgatcaatgtattcttccgatctacataaacaagcacctcctggtttcattttcgtaaagcaaaacaagcatggaagctttactgtttcggctcttcaaacttccagcaactacactgcgctgcatcggactcgacgcccgctggtgacgcacacgctgcgccggaagtgtgaactgtctgcctccaggctttgtcatggcggctgctgctgcacgctggaaccatgtgtgggtcggcaccgagactgggatcttgaaaggggtaaatcttcagcgaaaacaggcggcgaacttcacggccggaggacagccgcggcgcgaggaggcagtgagcgccctgtgttggggcaccggcggcgagacccagatgctggtgggctgcgcggacaggacggtgaagcacttcagcaccgaggatggcatattccagggtcagagacactgcccgggcggggagggcatgttccgtggcctcgcccaggccgacggcaccctcatcacatgtgtggattctgggattctcagagtctggcatgacaaggacaaggacacatcctctgacccactcctggaactgagagtgggccctggggtgtgtaggatgcgccaagacccagcacacccccatgtggttgccacaggtgggaaagagaatgctttgaagatatgggacctgcagggctctgaggaacctgtgttcagggccaagaacgtgcggaatgactggctggacttgcgggttcccatctgggaccaggacatacagtttctcccaggatcacagaagcttgtcacctgcacagggtaccaccaggtccgtgtttatgatccagcatccccccagcgccggccagtcctagagaccacctatggagagtacccactaacagccatgaccctcactccgggaggcaactcagtgattgtgggaaacactcatgggcagctggcagaaattgaccttcggcaagggcgtctactgggctgtctgaaggggctggcaggcagtgtgcgtgggttgcagtgccacccttcaaagcctctactagcctcctgtggcttggacagagtcttgaggatacacaggatccagaatccacggggtctggagcataaggtttatctcaagtctcaattgaactgcctcctcttgtcaggcagggacaactgggaggatgagccccaagagcctcaagaacccaacaaggtgcccctagaagacacagagacagatgaactttgggcatccttggaggcagctgccaagcggaagctctcgggtttggagcagccccaaggagctctccaaacgagacggagaaagaagaagcggcctgggtccaccagcccctgacgcccctgtgcccactttgtaaataaactgctgaacaccc

SEQ ID NO: 196592 - DNA, 1366 bp, Artificial Sequence
  derived and/or modified sequence
tagtaataccagctgtaatcccagctacttgggaggctgaggcagaagaatcgcttgaacccgggaggcggaggttgagcaactacactgcgctgcatcggactcgacgcccgctggtgacgcacacgctgcgccggaagtgtgaactgtctgcctccaggctttgtcatggcggctgctgctgcacgctggaaccatgtgtgggtcggcaccgagactgggatcttgaaaggggtaaatcttcagcgaaaacaggcggcgaacttcacggccggaggacagccgcggcgcgaggaggcagtgagcgccctgtgttggggcaccggcggcgagacccagatgctggtgggctgcgcggacaggacggtgaagcacttcagcaccgaggatggcatattccagggtcagagacactgcccgggcggggagggcatgttccgtggcctcgcccaggccgacggcaccctcatcacatgtgtggattctgggattctcagagtctggcatgacaaggacaaggacacatcctctgacccactcctggaactgagagtgggccctggggtgtgtaggatgcgccaagacccagcacacccccatgtggttgccacaggtgggaaagagaatgctttgaagatatgggacctgcagggctctgaggaacctgtgttcagggccaagaacgtgcggaatgactggctggacttgcgggttcccatctgggaccaggacatacagtttctcccaggatcacagaagcttgtcacctgcacagggtaccaccaggtccgtgtttatgatccagcatccccccagcgccggccagtcctagagaccacctatggagagtacccactaacagccatgaccctcactccgggaggcaactcagtgattgtgggaaacactcatgggcagctggcagaaattgaccttcggcaagggcgtctactgggctgtctgaaggggctggcaggcagtgtgcgtgggttgcagtgccacccttcaaagcctctactagcctcctgtggcttggacagagtcttgaggatacacaggatccagaatccacggggtctggagcataaggtttatctcaagtctcaattgaactgcctcctcttgtcaggcagggacaactgggaggatgagccccaagagcctcaagaacccaacaaggtgcccctagaagacacagagacagatgaactttgggcatccttggaggcagctgccaagcggaagctctcgggtttggagcagccccaaggagctctccaaacgagacggagaaagaagaagcggcctgggtccaccagcccctgacgcccctgtgcccactttgtaaataaactgctgaacaccc

SEQ ID NO: 196593 - protein, 628 aa, Artificial Sequence
  derived and/or modified sequence
MDSGSSSSDSAPDCWDQVDMESPGSAPSGDGVSSAVAEAQREPLSSAFSRKLNVNAKPFVPNVHAAEFVPSFLRGPTQPPTLPAGSGSNDETCTGAGYPQGKRMGRGAPVEPSREEPLVSLEGSNSAVTMELSEPVVENGEVEMALEESWEHSKEVSEAEPGGGSSGDSGPPEESGQEMMEEKEEIRKSKSVIVPSGAPKKEHVNVVFIGHVDAGKSTIGGQIMFLTGMVDKRTLEKYEREAKEKNRETWYLSWALDTNQEERDKGKTVEVGRAYFETERKHFTILDAPGHKSFVPNMIGGASQADLAVLVISARKGEFETGFEKGGQTREHAMLAKTAGVKHLIVLINKMDDPTVNWSIERYEECKEKLVPFLKKVGFSPKKDIHFMPCSGLTGANIKEQSDFCPWYTGLPFIPYLDNLPNFNRSIDGPIRLPIVDKYKDMGTVVLGKLESGSIFKGQQLVMMPNKHNVEVLGILSDDTETDFVAPGENLKIRLKGIEEEEILPGFILCDPSNLCHSGRTFDVQIVIIEHKSIICPGYNAVLHIHTCIEEVEITALISLVDKKSGEKSKTRPRFVKQDQVCIARLRTAGTICLETFKDFPQMGRFTLRDEGKTIAIGKVLKLVPEKD

SEQ ID NO: 196594 - protein, 545 aa, Artificial Sequence
  derived and/or modified sequence
MDSGSNDETCTGAGYPQGKRMGRGAPVEPSREEPLVSLEGSNSAVTMELSEPVVENGEVEMALEESWEHSKEVSEAEPGGGSSGDSGPPEESGQEMMEEKEEIRKSKSVIVPSGAPKKEHVNVVFIGHVDAGKSTIGGQIMFLTGMVDKRTLEKYEREAKEKNRETWYLSWALDTNQEERDKGKTVEVGRAYFETERKHFTILDAPGHKSFVPNMIGGASQADLAVLVISARKGEFETGFEKGGQTREHAMLAKTAGVKHLIVLINKMDDPTVNWSIERYEECKEKLVPFLKKVGFSPKKDIHFMPCSGLTGANIKEQSDFCPWYTGLPFIPYLDNLPNFNRSIDGPIRLPIVDKYKDMGTVVLGKLESGSIFKGQQLVMMPNKHNVEVLGILSDDTETDFVAPGENLKIRLKGIEEEEILPGFILCDPSNLCHSGRTFDVQIVIIEHKSIICPGYNAVLHIHTCIEEVEITALISLVDKKSGEKSKTRPRFVKQDQVCIARLRTAGTICLETFKDFPQMGRFTLRDEGKTIAIGKVLKLVPEKD

SEQ ID NO: 196595 - DNA, 2844 bp, Artificial Sequence
  derived and/or modified sequence
ggttggggtttgggggaggagatccgctcacacacaagaggagagtgttgagccgccatatctgctgctgccgccgcagttgcgaatgcagcatcggcgcttagctgcctccgcggtgcagctaaggttcgtgtcgctaccccttggcccttcgctcttgctgccttaaccccgccggcggagcccgctcttctggcctgttgagcccgctccctcactgccacacagcaagttccgagaccatggattcgggcagcagcagcagcgactcggcgcccgattgctgggaccaggtggacatggaatccccggggtcggccccgagcggggatggagtctcctctgcggtggccgaggcccagcgcgagcccctcagctcggctttcagccgtaagctcaacgtcaacgccaagcccttcgtgcctaacgtacacgccgcggagttcgtgccgtccttcctgcggggcccgactcagccgcccaccctcccggccggctccggcagcaacgatgaaacctgcaccggcgcgggataccctcaaggtaaaaggatgggacggggggcacctgtggaaccttcccgagaggaaccgttagtgtcgcttgaaggttccaattcagccgttaccatggaactttcagaacctgttgtagaaaatggagaggtggaaatggccctagaagaatcatgggagcacagtaaagaagtaagtgaagccgagcctgggggtggttcctcgggagattcagggcccccagaagaaagtggccaggaaatgatggaggaaaaagaggaaataagaaaatccaaatctgtgatcgtaccctcaggtgcacctaagaaagaacacgtaaatgtagtattcattggccatgtagacgctggcaagtcaaccatcggaggacagataatgtttttgactggaatggttgacaaaagaacactggagaaatatgaaagagaagctaaggaaaaaaacagagaaacctggtatttgtcctgggccttagatacaaatcaggaggaacgagacaagggtaaaacagtcgaagtgggtcgtgcctattttgaaacagaaaggaaacatttcacaattttagatgcccctggccacaagagttttgtcccaaatatgattggtggtgcttctcaagctgatttggctgtgctggtcatctctgccaggaaaggagagtttgaaactggatttgaaaaaggtggacagacaagagaacatgcgatgttggcaaaaacggcaggggtaaaacatttaatagtgcttattaataagatggatgatcccacagtaaattggagcatcgagagatatgaagaatgtaaagaaaaactggtgccctttttgaaaaaagtaggcttcagtccaaaaaaggacattcactttatgccctgctcaggactgaccggagcaaatattaaagagcagtcagatttctgcccttggtacactggattaccatttattccgtatttggataacttgccaaacttcaacagatcaattgatggaccaataagactgccaattgtggataagtacaaagatatgggcactgtggtcctgggaaagctggaatccgggtccatttttaaaggccagcagctcgtgatgatgccaaacaagcacaatgtagaagttcttggaatactttctgatgatactgaaactgattttgtagccccaggtgaaaacctcaaaatcagactgaagggaattgaagaagaagagattcttccaggattcatactttgtgatcctagtaacctctgccattctggacgcacgtttgatgttcagatagtgattattgagcacaaatccatcatctgcccaggttataatgcggtgctgcacattcatacttgtattgaggaagttgagataacagcgttaatctccttggtagacaaaaaatcaggagaaaaaagtaagacacgaccccgcttcgtgaaacaagatcaagtatgcattgctcgtttaaggacagcaggaaccatctgcctcgagacgttcaaagattttcctcagatgggtcgttttactttaagagatgagggtaagaccattgcaattggaaaagttctgaaattggtcccagagaaggactaagcaattttcttgatgcctctgcaagatactgtgaggagaattgacagcaaaagttcaccacctactcttatttactgcccattgattgacttttcttcatattttgcaaagagaaatttcacagcaaaaattcatgttttgtcagctttctcatgttgagatctgttatgtcactgatgaatttaccctcaagtttccttcctctgtaccactctgcttccttggacaatatcagtaatagctttgtaagtgatgtggacgtaattgcctacagtaatgaaaaattaatgtactttaatttttcattttcttttaggatatttagaccacccttgttccacgcaaaccagagtgtgtcagtgtttgtgtgtgtgttaaaatgataactaacatgtgaataaaatactccatttgaaactcttcggttatttgaaatgcttttgaataatgtttaaatgtcattatgtaatgctattcaattagctttattactttctcaaatagttgaatatgttctatcacttaaaaacttaaaaactcttcaccacttactgttttaagtgaggaatttacaaacaatgcataagtgtgtattaaaggaataattttaattttgagaaaaaaacgtatgttaaggctcttcccagtgggctttgttttctctgtccaagtccagtcaataaaggagctcttctgcttccccacttgtgatttg

SEQ ID NO: 196596 - DNA, 1872 bp, Artificial Sequence
  derived and/or modified sequence
atatctgctgctgccgccgcagttgcgaatgcagcatcggcgcttagctgcctccgcggtgcagctaaggttcgtgtcgctaccccttggcccttcgctcttgctgccttaaccccgccggcggagcccgctcttctggcctgttgagcccgctccctcactgccacacagcaagttccgagaccatggattcgggcagcaacgatgaaacctgcaccggcgcgggataccctcaaggtaaaaggatgggacggggggcacctgtggaaccttcccgagaggaaccgttagtgtcgcttgaaggttccaattcagccgttaccatggaactttcagaacctgttgtagaaaatggagaggtggaaatggccctagaagaatcatgggagcacagtaaagaagtaagtgaagccgagcctgggggtggttcctcgggagattcagggcccccagaagaaagtggccaggaaatgatggaggaaaaagaggaaataagaaaatccaaatctgtgatcgtaccctcaggtgcacctaagaaagaacacgtaaatgtagtattcattggccatgtagacgctggcaagtcaaccatcggaggacagataatgtttttgactggaatggttgacaaaagaacactggagaaatatgaaagagaagctaaggaaaaaaacagagaaacctggtatttgtcctgggccttagatacaaatcaggaggaacgagacaagggtaaaacagtcgaagtgggtcgtgcctattttgaaacagaaaggaaacatttcacaattttagatgcccctggccacaagagttttgtcccaaatatgattggtggtgcttctcaagctgatttggctgtgctggtcatctctgccaggaaaggagagtttgaaactggatttgaaaaaggtggacagacaagagaacatgcgatgttggcaaaaacggcaggggtaaaacatttaatagtgcttattaataagatggatgatcccacagtaaattggagcatcgagagatatgaagaatgtaaagaaaaactggtgccctttttgaaaaaagtaggcttcagtccaaaaaaggacattcactttatgccctgctcaggactgaccggagcaaatattaaagagcagtcagatttctgcccttggtacactggattaccatttattccgtatttggataacttgccaaacttcaacagatcaattgatggaccaataagactgccaattgtggataagtacaaagatatgggcactgtggtcctgggaaagctggaatccgggtccatttttaaaggccagcagctcgtgatgatgccaaacaagcacaatgtagaagttcttggaatactttctgatgatactgaaactgattttgtagccccaggtgaaaacctcaaaatcagactgaagggaattgaagaagaagagattcttccaggattcatactttgtgatcctagtaacctctgccattctggacgcacgtttgatgttcagatagtgattattgagcacaaatccatcatctgcccaggttataatgcggtgctgcacattcatacttgtattgaggaagttgagataacagcgttaatctccttggtagacaaaaaatcaggagaaaaaagtaagacacgaccccgcttcgtgaaacaagatcaagtatgcattgctcgtttaaggacagcaggaaccatctgcctcgagacgttcaaagattttcctcagatgggtcgttttactttaagagatgagggtaagaccattgcaattggaaaagttctgaaattggtcccagagaaggactaagcaattttcttgatgcctctgcaagatactgtgaggagaattgacagca

SEQ ID NO: 196597 - DNA, 1887 bp, Artificial Sequence
  derived and/or modified sequence
atggattcaggctcctcatcctccgatagtgccccagactgttgggatcaggtggatatggaaagcccaggaagtgccccttctggtgatggggtgagtagcgcggtggctgaggcccagcgcgagcccctaagctccgcattttcgagaaagttgaacgttaatgccaaaccgttcgtgccgaatgtgcacgctgcggagttcgtaccatctttccttaggggcccgacgcagcctccgacgctccctgcaggttctgggtccaatgacgagacttgtaccggcgcgggctacccccaaggtaagcgtatgggtagaggcgccccggtggaacccagcagggaggagcccttggtttccctcgagggatccaattcagccgtgaccatggaactgagtgagccagtcgtcgaaaatggcgaggtcgagatggccctcgaggaatcatgggagcacagcaaagaagtgagcgaggctgaacctggcggcggatcctccggggacagcgggccgccagaagagtccgggcaggagatgatggaggagaaggaggagattcgcaagtctaagagcgtaatagttccctcaggcgcaccaaaaaaggagcatgtcaatgtagtttttatcggccacgtggatgctggcaaaagtactattgggggacagatcatgttcctgacaggtatggtcgacaagcggacactggagaagtacgagcgagaggccaaagagaagaacagagagacctggtacctgagctgggctttggacactaaccaagaagaaagggataaaggaaagaccgtggaggttggtcgcgcttatttcgagactgagaggaaacactttaccattctggatgcaccaggccataaatccttcgtgcccaacatgatcggtggcgctagtcaggctgatctggcggtactcgttatctccgcccgaaagggcgaattcgagacgggatttgaaaaaggcggccagaccagggagcacgcaatgctggcaaagaccgccggagttaagcatctgatcgtgctgatcaataaaatggacgatcccaccgttaactggtctatcgagaggtatgaggagtgcaaggagaagctggtcccctttctcaaaaaagtgggattcagtccgaagaaggacattcacttcatgccttgttctggactgaccggtgccaacataaaggagcagagtgacttttgcccctggtatacgggcctcccatttatcccgtacctggataatctgcccaatttcaatcggtctatcgacgggcctatccggttgcccatcgtggataagtacaaagatatgggtactgtggtcttggggaagctcgagagcggctctatatttaaaggccagcagctcgtgatgatgccaaataagcacaatgtcgaggtcctgggaatcctgagcgatgatacagaaaccgatttcgtcgctcctggcgagaatttgaaaattcggctgaaggggatagaggaggaggaaattctgcccgggttcattctctgtgatcctagtaatctttgccactccggacggactttcgacgttcagatcgtgataatcgagcacaagtcaatcatctgtccaggctataatgccgttctccatatccacacatgtatcgaggaagttgaaatcacggctctgatcagtttggttgataaaaagtccggagagaagtctaaaactcgccccagatttgtgaagcaggatcaggtgtgtattgcccgcctgaggactgccggaaccatttgcctggagaccttcaaggattttcctcagatgggtcggtttacccttagagatgaggggaagacaatcgccatcggaaaggtcctgaagcttgttccagagaaagactag

SEQ ID NO: 196598 - DNA, 1638 bp, Artificial Sequence
  derived and/or modified sequence
atggattccggttcaaacgatgagacctgcaccggcgccggctacccccagggcaagagaatgggccgcggggccccagtcgaaccgagtcgtgaagagcctctggtgagccttgaaggctctaatagcgcagtcacgatggagctgtcagagccagtggtagaaaacggcgaggtggagatggctctcgaagaaagctgggagcattccaaggaagtgtccgaggctgagcccgggggagggagtagtggcgatagcggccctcccgaggagagcggccaagaaatgatggaggaaaaggaggagatccggaaatcaaaaagtgtgatagtgccctccggcgccccgaagaaagagcacgtgaacgtcgtttttataggccacgtagatgccggtaagagcaccatcggtggacagatcatgtttttgacaggcatggtggacaaacggaccctggagaaatacgagcgggaagctaaagagaaaaaccgagagacctggtacctaagctgggcgctcgacacaaaccaggaagagcgagataaagggaaaaccgtggaggtcggcagagcctacttcgagaccgagagaaagcattttactattctggatgcaccgggtcataagtcttttgtccctaatatgatcggcggggctagccaggctgacctcgcagtgctggttatctctgccagaaaaggagagttcgaaaccgggttcgagaaagggggacagacgagggagcatgccatgctcgccaagactgccggcgtgaagcacctaatagtactgataaacaagatggatgatccaacggtgaactggtccatagagcgatacgaggagtgtaaggaaaagctcgttcctttcctgaagaaggttgggttctcccctaaaaaggacatacactttatgccctgcagcgggctgacgggcgccaacatcaaggaacaatctgacttctgtccctggtacaccgggcttccctttatcccatacctggataacctccccaacttcaataggtccattgacggaccaattagattgcccattgtggacaaatataaagacatgggtaccgtggttctgggaaaacttgagagtggcagcatctttaagggccaacagctagttatgatgcccaacaagcacaacgtcgaggtgttgggcattctgtcggacgacactgagaccgactttgtggctccgggtgagaatctcaagatccgtctgaaggggatcgaggaagaagaaatcctccccggtttcattttgtgcgacccctccaatctctgccactctggccgcacttttgacgtgcagattgtcattatcgaacataagtctatcatctgcccagggtacaacgcggtgcttcacatccacacatgcatcgaggaagttgagattactgctctgatctcattggtggacaagaaaagcggcgaaaagtcaaaaacacggcctcgttttgtcaagcaggaccaggtgtgcatcgcaaggctgcggaccgcagggacaatctgtctcgaaaccttcaaggacttcccccagatgggccgcttcacactccgcgacgagggaaagaccatcgcaatcggaaaggtgctgaaactggtacccgagaaagattag

SEQ ID NO: 196599 - DNA, 1887 bp, Artificial Sequence
  derived and/or modified sequence
atggattctggcagcagcagcagtgacagcgccccagactgctgggaccaggtggacatggagagccctggcagcgcccccagcggagatggagtgagcagcgctgtggccgaggcccagcgggagcccctgagcagcgccttcagcaggaagctgaatgtgaatgccaagccctttgtgcccaacgtgcatgctgctgagtttgtgcccagcttcctgcggggccccacccagccccccaccctgcctgctggcagcggcagcaatgatgagacctgcaccggggccggctacccccagggcaagaggatgggccgcggggcccctgtggagcccagccgggaggagcccctggtgtccctggagggcagcaacagcgctgtgaccatggagctgtctgagcctgtggtggagaatggagaggtggagatggccctggaggagagctgggagcacagcaaggaggtgtctgaggccgagcccggcggcggcagcagcggggacagcggccccccagaggagagcggccaggagatgatggaggagaaggaggagatcaggaagagcaagtctgtgattgtgcccagcggggcccccaagaaggagcacgtgaatgtggtgttcatcggccacgtggatgctgggaagagcaccatcggcggccagatcatgttcctgaccggcatggtggacaagaggaccctggagaagtatgaaagagaggccaaggagaagaaccgggagacctggtacctgtcctgggccctggacaccaaccaggaggagcgggacaagggcaagacagtggaggtgggccgggcctactttgaaacagagaggaagcacttcaccatcctggatgcccctggccacaagagctttgtgcccaacatgattggaggagccagccaggccgacctggccgtgctggtgatcagcgccaggaagggggagtttgaaacaggctttgagaagggcggccagacccgggagcacgccatgctggccaagacagctggggtgaagcacctgattgtgctgatcaacaagatggatgaccccaccgtgaactggagcattgaaagatatgaggagtgcaaggagaagctggtgcccttcctgaagaaggtgggcttcagccccaagaaggacatccacttcatgccctgcagcggcctgaccggggccaacatcaaggagcagagcgacttctgcccctggtacacaggcctgcccttcatcccctacctggacaacctgcccaacttcaacagaagcattgatggccccatccggctgcccatcgtggacaagtacaaggacatgggcaccgtggtgctgggcaagctggagagcggcagcatcttcaagggccagcagctggtgatgatgcccaacaagcacaacgtggaggtgctgggcatcctgagtgatgacacagaaacagactttgtggcccctggagagaacctgaagatccggctgaagggcatcgaggaggaggagatcctgcccggcttcatcctgtgtgaccccagcaacctgtgccacagcggccgcacctttgatgtgcagatcgtcatcatcgagcacaagagcatcatctgccccggctacaatgctgtgctgcacatccacacctgcatcgaggaggtggagatcacagccctgatcagcctggtggacaagaagtctggagagaagagcaagacccggcccaggtttgtgaagcaggaccaggtgtgcatcgcccggctgaggacagctggcaccatctgcctggagaccttcaaggacttcccccagatgggccgcttcaccctgagagatgagggcaagaccatcgccatcggcaaggtgctgaagctggtgcctgagaaggactag

SEQ ID NO: 196600 - DNA, 1638 bp, Artificial Sequence
  derived and/or modified sequence
atggattctggcagcaatgatgagacctgcacaggagctggctacccccagggcaagaggatgggccgcggggcccctgtggagcccagccgggaggagcccctggtgtccctggagggcagcaacagcgctgtgaccatggagctgtctgagcctgtggtggagaatggagaggtggagatggccctggaggagagctgggagcacagcaaggaggtgtctgaggccgagcccggcggcggcagcagcggggacagcggccccccagaggagagcggccaggagatgatggaggagaaggaggagatcaggaagagcaagagcgtcatcgtgcccagcggggcccccaagaaggagcacgtgaatgtggtgttcatcggccacgtggatgctgggaagagcaccatcggcggccagatcatgttcctgaccggcatggtggacaagaggaccctggagaagtatgagcgggaggccaaggagaagaaccgggagacctggtacctgtcctgggccctggacaccaaccaggaggagcgggacaagggcaagacagtggaggtgggccgggcctactttgaaacagagaggaagcacttcaccatcctggatgcccctggccacaagagctttgtgcccaacatgattggaggagccagccaggccgacctggccgtgctggtgatcagcgccaggaaaggagaatttgagaccggctttgagaagggcggccagacccgggagcacgccatgctggccaagacagctggggtgaagcacctgattgtgctgatcaacaagatggatgaccccaccgtgaactggagcattgaaagatatgaggagtgcaaggagaagctggtgcccttcctgaagaaggtgggcttcagccccaagaaggacatccacttcatgccctgcagcggcctgactggagccaacatcaaggagcagagcgacttctgcccctggtacacaggcctgcccttcatcccctacctggacaacctgcccaacttcaacagaagcattgatggccccatccggctgcccatcgtggacaagtacaaggacatgggcaccgtggtgctgggcaagctggagagcggcagcatcttcaagggccagcagctggtgatgatgcccaacaagcacaacgtggaggtgctgggcatcctgagtgatgacacagaaacagactttgtggcccctggagagaacctgaagatccggctgaagggcatcgaggaggaggagatcctgcccggcttcatcctgtgtgaccccagcaacctgtgccacagcggccgcacctttgatgtgcagatcgtcatcatcgagcacaagagcatcatctgccccggctacaatgctgtgctgcacatccacacctgcatcgaggaggtggagatcacagccctgatcagcctggtggacaagaagagcggggagaagagcaagacccggcccaggtttgtgaagcaggaccaggtgtgcatcgcccggctgaggacagctggcaccatctgcctggagaccttcaaggacttcccccagatgggccgcttcaccctgagagatgagggcaagaccatcgccatcggcaaggtgctgaagctggtgcctgagaaggactag

SEQ ID NO: 196601 - DNA, 1887 bp, Artificial Sequence
  derived and/or modified sequence
atggacagcggcagcagcagcagcgacagcgcccccgactgctgggatcaagtggatatggagtcaccggggtctgccccgtccggcgacggcgtgtcaagcgcagtcgcggaagcccagcgcgagccattaagctctgctttcagccggaaattgaatgtcaatgctaaaccctttgtgcccaatgtccatgcagcagaattcgtgccctcttttttgaggggacccacccaaccgccaacattgccagcaggatccggtagtaatgatgaaacatgtacaggggcaggctatccacaggggaagcggatggggcgcggcgctccggtcgagccttcacgcgaggaaccactcgtgagcctagagggctcaaacagtgccgtaaccatggaactgagcgaacccgtggtggaaaatggggaagtggagatggcattggaggaatcttgggagcacagtaaggaggtttcggaagccgagcctggcggagggtccagcggggactctggcccgccagaggagagtggccaggagatgatggaagaaaaggaagagatccggaagtcaaagagcgtgattgtaccctccggcgccccgaagaaggagcatgtgaacgtcgtcttcatcggccacgtcgatgctgggaagagcaccatcggcggccagatcatgtttctcacaggcatggtagataagagaacactggagaaatatgagagggaagctaaagagaagaaccgtgaaacatggtacttgtcatgggcccttgatactaaccaggaggagagagacaaaggcaagacagttgaggtgggccgcgcctacttcgagacagagcgcaaacactttacaatcctcgatgctccaggccataaaagtttcgtacctaatatgataggaggagcatcccaggcagatctcgccgtgctggttattagtgcgagaaagggcgagttcgaaacaggctttgaaaagggcgggcagactcgcgagcacgccatgcttgccaaaacagctggagtcaaacatctgatcgtcctaataaataagatggatgacccaacagtgaattggtccattgagcgctacgaggaatgcaaagaaaagttagtcccctttctcaaaaaggtgggattctcgcctaaaaaggatatccattttatgccatgctccggacttacaggtgcgaatattaaagaacaaagcgatttttgcccatggtacacgggcctccctttcatcccctacctggataacctgcctaactttaacaggagcatcgacgggccaattcgactgcctattgtcgacaaatacaaggatatgggcaccgtagtgttggggaagctcgagtctgggtccatctttaaggggcagcagttggtgatgatgcctaacaaacataatgtcgaggtgctggggatactgtctgacgacacagaaaccgatttcgtcgcaccaggcgagaacctgaagattcggctgaaggggatagaggaagaggagatcctgcccggctttatcctttgcgaccccagcaacctgtgccatagcgggaggacgttcgatgttcagattgtcattatcgagcacaaatccattatttgccctggctacaatgcagttctgcacatccacacgtgcattgaagaggtggagattactgctctcatctccctcgtcgacaagaaaagtggagaaaagtccaaaacccggccacgcttcgtaaaacaagatcaggtctgcattgctcgattgcgcacagccggcacaatttgcctcgagactttcaaggatttccctcaaatgggcaggttcaccctgcgcgacgaaggcaagacaatcgctatagggaaggtcctcaagttggttcccgaaaaggactag

SEQ ID NO: 196602 - DNA, 1638 bp, Artificial Sequence
  derived and/or modified sequence
atggacagcggcagcaacgacgagacctgcaccggcgccggctacccacaggggaagcgtatgggccggggcgccccagtggagccttctagagaggaacctctggtgagcttggaaggttccaattctgcagtgactatggagctgtctgagccagtagtggaaaacggtgaggtggaaatggcactggaggagtcttgggaacactctaaggaagtatcagaagcggaaccggggggcgggagcagcggtgatagcggcccccccgaagaaagcgggcaggagatgatggaagagaaggaagagattcgaaagtccaaatccgtgattgtgccatcaggtgccccgaaaaaggagcacgtgaatgtggtgtttattggacacgtggatgctgggaaatcaaccatcggaggacaaatcatgtttttgactgggatggtcgataagcggactttggagaaatacgaacgcgaagctaaagagaaaaatcgggaaacatggtatctttcgtgggcactggatactaaccaagaagaaagggataaaggcaagaccgtggaagtcggtagggcttatttcgagacagagagaaagcactttaccatcttggacgcacccgggcacaagtcttttgtgcccaacatgattggcggcgcctcacaggccgacctggctgttctggtgatttctgcacgaaagggagaatttgaaacaggatttgaaaaaggaggccaaacaagggaacacgccatgcttgccaaaacagccggagttaaacatctcatcgtgctgattaataagatggacgatcctactgtaaattggtccattgagcgttacgaagagtgcaaggaaaagctcgtgccgttcctgaaaaaagtcggcttcagtcccaaaaaggatattcatttcatgccgtgctctggcctgacgggcgccaatataaaagagcaaagcgatttttgtccatggtatacaggccttccctttatcccatatcttgataatctccccaatttcaacaggagtatcgacggccctattagattgcctatagtagacaagtataaagatatgggtaccgtggttctcggaaagcttgagtcaggaagcattttcaaaggccaacagttggtgatgatgccgaataagcataatgtcgaagtactcggcatcctaagtgacgacaccgaaaccgactttgttgctccaggggagaatcttaagatcaggttgaaaggcatcgaagaggaggaaatcctgcctggttttattctgtgtgatccttcaaacctgtgtcactccggtcgtacgtttgacgtgcagatagtgatcatagaacacaaatcaatcatatgtcccggctacaatgcagtactgcacatacacacatgcattgaggaggtggaaattaccgcgctgatttcactcgtggacaagaagagcggtgagaagtctaaaacacgccctcgcttcgtaaagcaggaccaggtatgtatagccaggctacgcactgccggaaccatctgtttagaaacatttaaagattttccccagatgggacgcttcaccctgagggatgaaggcaaaacaatcgccatcgggaaagtccttaaactggtgcccgaaaaagactag

SEQ ID NO: 196603 - DNA, 1887 bp, Artificial Sequence
  derived and/or modified sequence
atggactccggctcttcctcatccgatagcgcgccagattgttgggatcaagttgacatggagtcacccggatctgccccttcgggcgacggggtgtcatccgcggtggctgaggcacagcgggagcctctgagttctgcattttcccgcaagctaaatgtcaatgcgaaaccgttcgtacccaatgtgcacgccgcagaattcgtgccttcatttcttagaggcccaactcaaccacccacattgcccgcaggcagcggctctaatgatgagacctgtactggagccggttacccacaaggcaaaagaatggggaggggggcaccggtggaaccaagcagggaggagcctttagtgagcttggagggctctaactctgccgtcactatggaactgagcgagccagtggtggagaacggcgaagtagagatggccctggaagagagttgggagcatagcaaagaagtaagtgaggcagagccaggtgggggatcatctggagatagcggtcctcctgaggagtctgggcaagaaatgatggaggagaaggaagaaattcgcaagagcaaatctgtcatcgtgccttctggcgctccaaagaaagagcacgttaacgttgtctttattggacacgtggacgcagggaaaagtactatcgggggacagatcatgttcctgacaggcatggtcgacaaaagaacactggaaaagtacgagagggaggcgaaggagaagaacagggagacttggtatcttagctgggccctggatacaaaccaggaagaacgggacaagggcaaaaccgtagaggtgggccgagcctattttgagacggaacgcaagcacttcaccattctggacgcacccggacataaatcatttgtgcctaatatgataggaggcgctagccaggccgacctggctgtgttggtgatttccgctcgcaagggagaatttgaaaccgggtttgagaagggcggtcagacaagagaacatgccatgctcgccaagacagcaggcgtgaagcacctgattgtactgatcaacaagatggacgacccaaccgtaaattggtcaatcgagaggtacgaggaatgtaaggagaagcttgtcccttttctcaaaaaagtcggtttcagcccaaaaaaagacatccacttcatgccctgttctgggctgactggcgcaaatatcaaagagcagtccgatttctgcccctggtacaccggactgccattcatcccttatctggataacctgcctaatttcaatcgtagcatcgacggtcccattaggttgcctatcgtggataagtataaggatatggggacagtagtcttaggtaagctcgagtccggatccatttttaagggccagcagttagtgatgatgcccaataaacacaacgtcgaggtgctgggcatcctgtctgacgatactgagactgatttcgtagcgccaggagagaatctaaagatcaggctgaaaggcattgaagaggaggaaattctccccggatttatcctctgcgatcctagcaatctgtgccactccggacgtactttcgacgtgcaaattgtgattattgaacataagtcaattatatgccccggatataacgccgtgctgcacatccacacttgtatagaggaagtcgagataacagcactcataagccttgtagataaaaagagtggtgagaaatccaagaccagaccgcgattcgtgaaacaggatcaagtgtgcatcgcccgtctccgtactgccggaaccatctgcctcgagacgtttaaagactttccgcaaatgggcaggttcactttaagagacgagggcaagactattgccatcggaaaggtgttgaagctcgtcccagagaaggattag

SEQ ID NO: 196604 - DNA, 1638 bp, Artificial Sequence
  derived and/or modified sequence
atggactctgggagcaacgacgagacctgtaccggagcaggttacccacagggcaaacgcatggggaggggggctccggtggagcctagccgcgaggaaccccttgtctcgttggagggctccaactccgccgtcaccatggaactgagcgaacccgtggtggagaatggggaggttgagatggccctcgaggagagttgggagcatagcaaagaagtctctgaggcagaacctggcggaggttccagcggtgactcagggcctccagaggaaagcggccaagagatgatggaagagaaagaggagatacgcaagagcaaaagtgttatcgtgccgtccggcgctcctaagaaggagcacgtgaacgtggtttttatcggtcacgttgacgctggtaagagcaccatcggtggtcagatcatgtttctcacggggatggttgacaagaggactctggagaaatatgaacgggaagctaaagagaaaaatcgcgagacgtggtacctgtcttgggcccttgacacaaatcaggaggagagggataagggcaagacagtggaggtcggtagggcctacttcgaaactgagaggaagcacttcacgatcctggatgcccctgggcacaagtcttttgtgccaaacatgataggcggtgctagccaagctgatctggctgtcttggtgatcagcgcccgtaagggcgagttcgagaccggctttgagaaggggggacagacccgggaacacgctatgctggccaagacagccggagtcaagcatctgattgttctgattaataaaatggatgaccctacagttaattggagcatcgaaaggtacgaggagtgcaaggaaaagctggtcccattccttaaaaaagtgggcttttcacccaagaaagacatccattttatgccctgttctggcctgacaggagcaaatatcaaggagcagagcgacttctgtccttggtatactggccttccttttattccatacctggataatttaccaaattttaaccgtagtattgatggaccaattaggctgcctattgtggataaatacaaagacatgggcaccgtagtcctgggtaagttagaatcgggcagtattttcaaaggacagcaactcgtaatgatgcctaacaaacacaatgtagaggtgttgggcatcttgagtgacgatacagagaccgacttcgttgctcccggagagaacctgaaaattcggctcaaggggatcgaggaggaggagatactgcccggatttattctgtgtgacccctccaacctatgtcactccgggcgtacgttcgacgttcagattgtgataatcgagcacaaatccataatctgtcctggatataacgcagtgctgcacatccatacctgcatcgaggaagtagagatcacagccctcataagcttagtagataagaagagcggcgagaaatcgaagacaagacccagatttgtgaaacaggatcaagtgtgcatcgctcggctcagaaccgccggtactatctgccttgaaactttcaaggatttccctcagatgggcaggtttactctacgtgacgagggcaagaccatcgcaatcgggaaagttctgaaactggtaccggaaaaggactag

SEQ ID NO: 196605 - DNA, 1887 bp, Artificial Sequence
  derived and/or modified sequence
atggacagcggcagcagcagcagcgacagcgcccccgactgctgggaccaggtggacatggagagccccggcagcgcccccagcggcgacggcgtgagcagcgccgtggccgaggcccagagagagcccctgagcagcgccttcagcagaaagctgaacgtgaacgccaagcccttcgtgcccaacgtgcacgccgccgagttcgtgcccagcttcctgagaggccccacccagccccccaccctgcccgccggcagcggcagcaacgacgagacctgcaccggcgccggctacccccagggcaagagaatgggcagaggcgcccccgtggagcccagcagagaggagcccctggtgagcctggagggcagcaacagcgccgtgaccatggagctgagcgagcccgtggtggagaacggcgaggtggagatggccctggaggagagctgggagcacagcaaggaggtgagcgaggccgagcccggcggcggcagcagcggcgacagcggcccccccgaggagagcggccaggagatgatggaggagaaggaggagatcagaaagagcaagagcgtgatcgtgcccagcggcgcccccaagaaggagcacgtgaacgtggtgttcatcggccacgtggacgccggcaagagcaccatcggcggccagatcatgttcctgaccggcatggtggacaagagaaccctggagaagtacgagagagaggccaaggagaagaacagagagacctggtacctgagctgggccctggacaccaaccaggaggagagagacaagggcaagaccgtggaggtgggcagagcctacttcgagaccgagagaaagcacttcaccatcctggacgcccccggccacaagagcttcgtgcccaacatgatcggcggcgccagccaggccgacctggccgtgctggtgatcagcgccagaaagggcgagttcgagaccggcttcgagaagggcggccagaccagagagcacgccatgctggccaagaccgccggcgtgaagcacctgatcgtgctgatcaacaagatggacgaccccaccgtgaactggagcatcgagagatacgaggagtgcaaggagaagctggtgcccttcctgaagaaggtgggcttcagccccaagaaggacatccacttcatgccctgcagcggcctgaccggcgccaacatcaaggagcagagcgacttctgcccctggtacaccggcctgcccttcatcccctacctggacaacctgcccaacttcaacagaagcatcgacggccccatcagactgcccatcgtggacaagtacaaggacatgggcaccgtggtgctgggcaagctggagagcggcagcatcttcaagggccagcagctggtgatgatgcccaacaagcacaacgtggaggtgctgggcatcctgagcgacgacaccgagaccgacttcgtggcccccggcgagaacctgaagatcagactgaagggcatcgaggaggaggagatcctgcccggcttcatcctgtgcgaccccagcaacctgtgccacagcggcagaaccttcgacgtgcagatcgtgatcatcgagcacaagagcatcatctgccccggctacaacgccgtgctgcacatccacacctgcatcgaggaggtggagatcaccgccctgatcagcctggtggacaagaagagcggcgagaagagcaagaccagacccagattcgtgaagcaggaccaggtgtgcatcgccagactgagaaccgccggcaccatctgcctggagaccttcaaggacttcccccagatgggcagattcaccctgagagacgagggcaagaccatcgccatcggcaaggtgctgaagctggtgcccgagaaggactag

SEQ ID NO: 196606 - DNA, 1638 bp, Artificial Sequence
  derived and/or modified sequence
atggacagcggcagcaacgacgagacctgcaccggcgccggctacccccagggcaagagaatgggcagaggcgcccccgtggagcccagcagagaggagcccctggtgagcctggagggcagcaacagcgccgtgaccatggagctgagcgagcccgtggtggagaacggcgaggtggagatggccctggaggagagctgggagcacagcaaggaggtgagcgaggccgagcccggcggcggcagcagcggcgacagcggcccccccgaggagagcggccaggagatgatggaggagaaggaggagatcagaaagagcaagagcgtgatcgtgcccagcggcgcccccaagaaggagcacgtgaacgtggtgttcatcggccacgtggacgccggcaagagcaccatcggcggccagatcatgttcctgaccggcatggtggacaagagaaccctggagaagtacgagagagaggccaaggagaagaacagagagacctggtacctgagctgggccctggacaccaaccaggaggagagagacaagggcaagaccgtggaggtgggcagagcctacttcgagaccgagagaaagcacttcaccatcctggacgcccccggccacaagagcttcgtgcccaacatgatcggcggcgccagccaggccgacctggccgtgctggtgatcagcgccagaaagggcgagttcgagaccggcttcgagaagggcggccagaccagagagcacgccatgctggccaagaccgccggcgtgaagcacctgatcgtgctgatcaacaagatggacgaccccaccgtgaactggagcatcgagagatacgaggagtgcaaggagaagctggtgcccttcctgaagaaggtgggcttcagccccaagaaggacatccacttcatgccctgcagcggcctgaccggcgccaacatcaaggagcagagcgacttctgcccctggtacaccggcctgcccttcatcccctacctggacaacctgcccaacttcaacagaagcatcgacggccccatcagactgcccatcgtggacaagtacaaggacatgggcaccgtggtgctgggcaagctggagagcggcagcatcttcaagggccagcagctggtgatgatgcccaacaagcacaacgtggaggtgctgggcatcctgagcgacgacaccgagaccgacttcgtggcccccggcgagaacctgaagatcagactgaagggcatcgaggaggaggagatcctgcccggcttcatcctgtgcgaccccagcaacctgtgccacagcggcagaaccttcgacgtgcagatcgtgatcatcgagcacaagagcatcatctgccccggctacaacgccgtgctgcacatccacacctgcatcgaggaggtggagatcaccgccctgatcagcctggtggacaagaagagcggcgagaagagcaagaccagacccagattcgtgaagcaggaccaggtgtgcatcgccagactgagaaccgccggcaccatctgcctggagaccttcaaggacttcccccagatgggcagattcaccctgagagacgagggcaagaccatcgccatcggcaaggtgctgaagctggtgcccgagaaggactag

SEQ ID NO: 196607 - protein, 485 aa, Artificial Sequence
  derived and/or modified sequence
MAAAVPDEAVARDVQRLLVQFQDEGGQLLGSPFDVPVDITPDRLQLVCNALLAQEDPLPLAFFVHDAEIVSSLGKTLESQAVETEKVLDIIYQPQAIFRVRAVTRCTSSLEGHSEAVISVAFSPTGKYLASGSGDTTVRFWDLSTETPHFTCKGHRHWVLSISWSPDGRKLASGCKNGQILLWDPSTGKQVGRTLAGHSKWITGLSWEPLHANPECRYVASSSKDGSVRIWDTTAGRCERILTGHTQSVTCLRWGGDGLLYSASQDRTIKVWRAHDGVLCRTLQGHGHWVNTMALSTDYALRTGAFEPAEASVNPQDLQGSLQELKERALSRYNLVRGQGPERLVSGSDDFTLFLWSPAEDKKPLTRMTGHQALINQVLFSPDSRIVASASFDKSIKLWDGRTGKYLASLRGHVAAVYQIAWSADSRLLVSGSSDSTLKVWDVKAQKLAMDLPGHADEVYAVDWSPDGQRVASGGKDKCLRIWRR

SEQ ID NO: 196608 - protein, 461 aa, Artificial Sequence
  derived and/or modified sequence
MAAAVPDEAVARDVQRLLVQFQDEGGQLLGSPFDVPVDITPDRLQLVCNALLAQEDPLPLAFFVHDAEIVSSLGKTLESQAVETEKVLDIIYQPQAIFRVRAVTRCTSSLEGHSEAVISVAFSPTGKYLASGSGDTTVRFWDLSTETPHFTCKGHRHWVLSISWSPDGRKLASGCKNGQILLWEPLHANPECRYVASSSKDGSVRIWDTTAGRCERILTGHTQSVTCLRWGGDGLLYSASQDRTIKVWRAHDGVLCRTLQGHGHWVNTMALSTDYALRTGAFEPAEASVNPQDLQGSLQELKERALSRYNLVRGQGPERLVSGSDDFTLFLWSPAEDKKPLTRMTGHQALINQVLFSPDSRIVASASFDKSIKLWDGRTGKYLASLRGHVAAVYQIAWSADSRLLVSGSSDSTLKVWDVKAQKLAMDLPGHADEVYAVDWSPDGQRVASGGKDKCLRIWRR

SEQ ID NO: 196609 - DNA, 1458 bp, Artificial Sequence
  derived and/or modified sequence
atggctgccgcggtgcccgatgaggctgtggctagggacgtgcagaggttactggtccaattccaggatgagggcgggcaactactcggcagcccgtttgatgtgccggtggacataacacccgatcgcttgcagctcgtgtgcaacgcattgctggctcaggaagatcctctgcctttggccttcttcgtccatgatgcagagatcgtaagctctttaggaaagaccctggaatcacaggccgttgaaaccgaaaaagttttagacatcatttaccaaccccaggccatcttcagggtgcgtgccgtgactaggtgtaccagcagcttggaggggcacagtgaagccgtgattagcgtcgctttcagtcccacaggcaagtatctggcctccggctctggtgatacaaccgtcagattctgggatctgagtactgagacacctcactttacctgtaagggacacaggcactgggtgctgagcatatcttggagtcccgatggtcgcaagttggctagtggttgcaaaaacggtcaaatcctgctatgggatcctagcactggaaaacaagtgggccgaacactggctggccactctaagtggatcaccggcttgagttgggagccgctgcatgccaatcccgagtgtaggtatgtggccagcagtagtaaggacggtagtgtacgtatctgggacacgactgcgggcaggtgcgaacggattctgactggccatactcagtctgtgacgtgtctgcgttggggcggcgatgggcttctttacagcgcctcacaggatcgcaccattaaagtgtggcgcgcacatgatggggtcctgtgtaggaccttgcaggggcacgggcactgggtgaacactatggctctgagtaccgactacgcacttcggacaggcgcatttgagcccgccgaagcaagtgtcaatccccaggatctccaggggagtttgcaggaactgaaggagcgcgcgctcagcaggtataatctcgttaggggccaaggtccagagagattggtgagcggtagcgacgactttacccttttcctctggtctcctgccgaggacaagaagccattaactagaatgactgggcatcaagctctcataaaccaggtcctcttcagtcccgatagcaggattgtcgcctcagcttctttcgataaatcgataaagctgtgggatggtcggactggcaaataccttgcatctttgcgtggtcacgtggccgcagtgtatcaaattgcctggagcgctgactcccgcctgctcgtctccggctctagtgacagtaccctgaaagtgtgggacgtcaaggcccagaagcttgccatggacctgccgggccatgctgatgaggtctacgccgtcgattggtctcccgatgggcagcgcgtggcctccgggggcaaggacaaatgtctgcgtatctggcggcgatag

SEQ ID NO: 196610 - DNA, 1386 bp, Artificial Sequence
  derived and/or modified sequence
atggcagccgctgtgcccgacgaggcagtcgctagggacgttcagcgcttgctggtacagttccaagatgaggggggccagctgctggggagccccttcgacgttccggtggacataacacctgaccgtctgcagttagtctgtaacgcgctgctcgcccaggaggacccactcccacttgcattcttcgtgcacgacgccgagatcgtgtcctcccttggcaaaaccctcgagtcacaagccgtcgagacagagaaggttctggatatcatataccagcctcaggccatattcagggtacgagccgtcacacgctgtacctcttcgctggaaggccatagtgaggccgttatatctgttgccttctcccctaccggtaaatatctggcctcaggcagtggggacactaccgtccggttctgggatctatctacagaaaccccgcatttcacctgcaagggccatcggcattgggttctgagcattagttggtctcctgatgggaggaagctggcttccggttgcaaaaatggacagattctgttatgggagccactgcacgccaacccagagtgtcggtatgtggcatcctcgagcaaggatggctctgtccgcatttgggacaccaccgccggtcggtgtgagaggatcctgactgggcatacacagtccgtgacatgcttgaggtggggcggggatggtctgctgtacagcgccagccaggatcggaccataaaagtgtggagggcgcatgatggggtgctgtgtcggaccctacaggggcacggccattgggtgaacacgatggccttaagcaccgactacgccttgaggaccggagcgtttgaaccggcggaagcaagtgtgaatccacaggaccttcaaggatcgctccaagagttgaaggaacgggccctgagcagatacaatttggtgagaggacagggccctgagcgattggtgtcaggaagcgatgatttcacactttttctttggtcccccgctgaggataagaaacctctcacccggatgaccggccaccaggcgctgataaatcaggtactcttttcccccgacagtaggattgttgcctccgcctcattcgataaaagtatcaagttatgggatggccgtactgggaagtacttagcttcgctcaggggtcacgtggccgctgtgtaccaaatcgcctggagtgcggatagccgtctcctggtttccggatctagcgattccactctcaaggtctgggatgtgaaggcacagaagctggcaatggacctgcctggtcatgcagatgaggtttatgctgtggactggagccctgacgggcagagggtggcctcaggaggaaaggacaagtgcctgcgcatatggcgaagatag

SEQ ID NO: 196611 - DNA, 2707 bp, Artificial Sequence
  derived and/or modified sequence
ctctttctcctccacgtggggacgcaggatggcggcagcagtgccggtgggtgtgcgtggatgggggcggggggcgtcgccgcggggcgctagggcccgggtccctgaggcctgagagaggcgaagtggggcccttctgggcgggcgaccagactgactcccgccccacttgctcgcgcaggacgaggcggtggcgcgcgatgtgcagcggttgctagtgcagttccaggatgagggcgggcagctgctgggttccccgttcgacgtgcccgtggacatcaccccggacaggctgcagctcgtgtgcaacgcgctactggcccaggaggatcccctgccactggctttctttgtccacgatgctgagatcgtctcctcactggggaagacgttggagtcccaggcagtggagacagagaaggtcctagacatcatctaccagccacaggctatcttcagagtccgggctgtgactcgctgcaccagctccttggagggtcacagtgaggcagtcatttctgtggccttcagccctacgggaaagtacctggccagtggctctggagacaccaccgtgcgcttctgggatctcagcacagagacaccacatttcacatgcaagggacacagacactgggtccttagtatatcctggtctccagatggcaggaagctggcctcaggctgcaagaatggccagattctcctctgggacccaagcacagggaagcaggtgggcaggaccctcgctggccacagcaagtggatcacaggcctgagctgggagcccctccatgcgaaccctgagtgccgctatgtggccagcagctccaaggatggcagtgtgcggatctgggacacaactgcaggccgctgtgagcgcatcctcaccgggcacacccagtcggtcacctgtctccggtggggaggggacgggcttctctactctgcctcccaggaccgcaccatcaaagtctggagagctcatgacggtgtgctgtgccggactctgcaaggccacggccactgggtgaacaccatggccctcagcactgactatgccctgcgcactggggcctttgaacctgctgaggcctcagttaatccccaagacctccaaggatccttgcaggagttgaaggagagggctctgagccgatacaacctcgtgcggggccagggtccagagaggctggtgtctggctccgacgacttcaccttattcctgtggtccccagcagaggacaaaaagcctctcactcggatgacaggacaccaagctctcatcaaccaggtgctcttctctcctgactcccgcatcgtggctagtgcctcctttgacaagtccatcaagctgtgggatggcaggacgggcaagtacctggcttccctacgcggccacgtggctgccgtgtaccagattgcgtggtcagctgacagtcggctcctggtcagcggcagcagtgacagcacactgaaggtgtgggatgtgaaggcccagaagctggccatggacctgcccggccacgcggatgaggtatatgctgttgactggagtccagatggccagagagtggcaagtggtgggaaggacaaatgcctccggatatggaggagatgagacggcccgaagttctctctgacccccacctcgactcggcctctgccagctgccttccctgccagagaacaaaggctgagatggcagtgcacacaccctccccaccagtggggacctgagaatgcgtgtggcctgctgtcctcgatagaccggaatggggttttcccacagatccccgcctgtggcacaccccagagccagaaatcgaaggtcacaggaagttgtcactgaacttggcccgtgtctgctactctgtaccttgctggtacagacaggggtggtgggcagccaggctctatgagtgggcccctagtgtcagctctgtacagggtcagatcccaggttctatgaccaaataagtaacttaagttttgtgtgttgggttctaattccttgtcctagaatccccatgactcaatcaaggactgtgctaaatgagattgtccagcccccgcccttgcactggactacgccaaaaccacactgaccaggcacttgccttccctctcttcccccgtgttggtaagagagaggccagttgtgatagtggccaaggagaatctagggctgtattgttgtccactgcagtaggcaccggccacatgtgactgctggcatgaaatagaagtgcagttcctccatcgcactgggtaaggcctccagtattggacagcacacagaaaggttttcatcatcaagagagttctgctggtcagccctgctccaggggatgcctctgccttcgcatagcacactgcttgaggccctgccaggcaccaagcactgccctgggcccatgggatagagcggggaaggtgatggctcttccagaggattccctcagatggggaggcagcagtatgagctctgagcagaagtgggtattgttgatacagaggaagttctttgccacgagaactttcaagcagtgaaaggaattcccatcaggactcagaccccaggccgagatcttgccctgaatgtaccctgcctctgctttctcctgcatcccatgctaagcagggtcatggtctgaactactcagattggatttccaaaccatccttgtataaactgctcagaact

SEQ ID NO: 196612 - DNA, 2576 bp, Artificial Sequence
  derived and/or modified sequence
ctctttctcctccacgtggggacgcaggatggcggcagcagtgccggacgaggcggtggcgcgcgatgtgcagcggttgctagtgcagttccaggatgagggcgggcagctgctgggttccccgttcgacgtgcccgtggacatcaccccggacaggctgcagctcgtgtgcaacgcgctactggcccaggaggatcccctgccactggctttctttgtccacgatgctgagatcgtctcctcactggggaagacgttggagtcccaggcagtggagacagagaaggtcctagacatcatctaccagccacaggctatcttcagagtccgggctgtgactcgctgcaccagctccttggagggtcacagtgaggcagtcatttctgtggccttcagccctacgggaaagtacctggccagtggctctggagacaccaccgtgcgcttctgggatctcagcacagagacaccacatttcacatgcaagggacacagacactgggtccttagtatatcctggtctccagatggcaggaagctggcctcaggctgcaagaatggccagattctcctctgggacccaagcacagggaagcaggtgggcaggaccctcgctggccacagcaagtggatcacaggcctgagctgggagcccctccatgcgaaccctgagtgccgctatgtggccagcagctccaaggatggcagtgtgcggatctgggacacaactgcaggccgctgtgagcgcatcctcaccgggcacacccagtcggtcacctgtctccggtggggaggggacgggcttctctactctgcctcccaggaccgcaccatcaaagtctggagagctcatgacggtgtgctgtgccggactctgcaaggccacggccactgggtgaacaccatggccctcagcactgactatgccctgcgcactggggcctttgaacctgctgaggcctcagttaatccccaagacctccaaggatccttgcaggagttgaaggagagggctctgagccgatacaacctcgtgcggggccagggtccagagaggctggtgtctggctccgacgacttcaccttattcctgtggtccccagcagaggacaaaaagcctctcactcggatgacaggacaccaagctctcatcaaccaggtgctcttctctcctgactcccgcatcgtggctagtgcctcctttgacaagtccatcaagctgtgggatggcaggacgggcaagtacctggcttccctacgcggccacgtggctgccgtgtaccagattgcgtggtcagctgacagtcggctcctggtcagcggcagcagtgacagcacactgaaggtgtgggatgtgaaggcccagaagctggccatggacctgcccggccacgcggatgaggtatatgctgttgactggagtccagatggccagagagtggcaagtggtgggaaggacaaatgcctccggatatggaggagatgagacggcccgaagttctctctgacccccacctcgactcggcctctgccagctgccttccctgccagagaacaaaggctgagatggcagtgcacacaccctccccaccagtggggacctgagaatgcgtgtggcctgctgtcctcgatagaccggaatggggttttcccacagatccccgcctgtggcacaccccagagccagaaatcgaaggtcacaggaagttgtcactgaacttggcccgtgtctgctactctgtaccttgctggtacagacaggggtggtgggcagccaggctctatgagtgggcccctagtgtcagctctgtacagggtcagatcccaggttctatgaccaaataagtaacttaagttttgtgtgttgggttctaattccttgtcctagaatccccatgactcaatcaaggactgtgctaaatgagattgtccagcccccgcccttgcactggactacgccaaaaccacactgaccaggcacttgccttccctctcttcccccgtgttggtaagagagaggccagttgtgatagtggccaaggagaatctagggctgtattgttgtccactgcagtaggcaccggccacatgtgactgctggcatgaaatagaagtgcagttcctccatcgcactgggtaaggcctccagtattggacagcacacagaaaggttttcatcatcaagagagttctgctggtcagccctgctccaggggatgcctctgccttcgcatagcacactgcttgaggccctgccaggcaccaagcactgccctgggcccatgggatagagcggggaaggtgatggctcttccagaggattccctcagatggggaggcagcagtatgagctctgagcagaagtgggtattgttgatacagaggaagttctttgccacgagaactttcaagcagtgaaaggaattcccatcaggactcagaccccaggccgagatcttgccctgaatgtaccctgcctctgctttctcctgcatcccatgctaagcagggtcatggtctgaactactcagattggatttccaaaccatccttgtataaactgctcagaactagca

SEQ ID NO: 196613 - DNA, 1462 bp, Artificial Sequence
  derived and/or modified sequence
acgtggggacgcaggatggcggcagcagtgccggacgaggcggtggcgcgcgatgtgcagcggttgctagtgcagttccaggatgagggcgggcagctgctgggttccccgttcgacgtgcccgtggacatcaccccggacaggctgcagctcgtgtgcaacgcgctactggcccaggaggatcccctgccactggctttctttgtccacgatgctgagatcgtctcctcactggggaagacgttggagtcccaggcagtggagacagagaaggtcctagacatcatctaccagccacaggctatcttcagagtccgggctgtgactcgctgcaccagctccttggagggtcacagtgaggcagtcatttctgtggccttcagccctacgggaaagtacctggccagtggctctggagacaccaccgtgcgcttctgggatctcagcacagagacaccacatttcacatgcaagggacacagacactgggtccttagtatatcctggtctccagatggcaggaagctggcctcaggctgcaagaatggccagattctcctctgggagcccctccatgcgaaccctgagtgccgctatgtggccagcagctccaaggatggcagtgtgcggatctgggacacaactgcaggccgctgtgagcgcatcctcaccgggcacacccagtcggtcacctgtctccggtggggaggggacgggcttctctactctgcctcccaggaccgcaccatcaaagtctggagagctcatgacggtgtgctgtgccggactctgcaaggccacggccactgggtgaacaccatggccctcagcactgactatgccctgcgcactggggcctttgaacctgctgaggcctcagttaatccccaagacctccaaggatccttgcaggagttgaaggagagggctctgagccgatacaacctcgtgcggggccagggtccagagaggctggtgtctggctccgacgacttcaccttattcctgtggtccccagcagaggacaaaaagcctctcactcggatgacaggacaccaagctctcatcaaccaggtgctcttctctcctgactcccgcatcgtggctagtgcctcctttgacaagtccatcaagctgtgggatggcaggacgggcaagtacctggcttccctacgcggccacgtggctgccgtgtaccagattgcgtggtcagctgacagtcggctcctggtcagcggcagcagtgacagcacactgaaggtgtgggatgtgaaggcccagaagctggccatggacctgcccggccacgcggatgaggtatatgctgttgactggagtccagatggccagagagtggcaagtggtgggaaggacaaatgcctccggatatggaggagatgagacggcccgaagttctctctgacccccacctcgactcggcctctgccagctgccttccctg

SEQ ID NO: 196614 - DNA, 5286 bp, Artificial Sequence
  derived and/or modified sequence
ggacgcaggatggcggcagcagtgccggtgggtgtgcgtggatgggggcggggggcgtcgccgcggggcgctagggcccgggtccctgaggcctgagagaggcgaagtggggcccttctgggcgggcgaccagactgactcccgccccacttgctcgcgcaggacgaggcggtggcgcgcgatgtgcagcggttgctagtgcagttccaggatgagggcgggcagctgctgggttccccgttcgacgtgcccgtggacatcaccccggacaggctgcagctcgtgtgcaacgcgctactggcccaggaggatcccctgccactggctttctttgtccacgatgctgagatcgtctcctcactggggaagacgttggagtcccaggcagtggagacagagaaggtcctagacatcatctaccagccacaggctatcttcagagtccgggctgtgactcgctgcaccagctccttggagggtcacagtgaggcagtcatttctgtggccttcagccctacgggaaagtacctggccagtggctctggagacaccaccgtgcgcttctgggatctcagcacagagacaccacatttcacatgcaagggacacagacactgggtccttagtatatcctggtctccagatggcaggaagctggcctcaggctgcaagaatggccagattctcctctgggacccaagcacagggaagcaggtgggcaggaccctcgctggccacagcaagtggatcacaggcctgagctgggagcccctccatgcgaaccctgagtgccgctatgtggccagcagctccaaggatggcagtgtgcggatctgggacacaactgcaggccgctgtgagcgcatcctcaccgggcacacccagtcggtcacctgtctccggtggggaggggacgggcttctctactctgcctcccaggaccgcaccatcaaagtctggagagctcatgacggtgtgctgtgccggactctgcaaggccacggccactgggtgaacaccatggccctcagcactgactatgccctgcgcactggggcctttgaacctgctgaggcctcagttaatccccaagacctccaaggatccttgcaggagttgaaggagagggctctgagccgatacaacctcgtgcggggccagggtccagagaggctggtgtctggctccgacgacttcaccttattcctgtggtccccagcagaggacaaaaagcctctcactcggatgacaggacaccaagctctcatcaaccaggtgctcttctctcctgactcccgcatcgtggctagtgcctcctttgacaagtccatcaagctgtgggatggcaggacgggcaagtacctggcttccctacgcggccacgtggctgccgtgtaccagattgcgtggtcagctgacagtcggctcctggtcagcggcagcagtgacagcacactgaaggtgtgggatgtgaaggcccagaagctggccatggacctgcccggccacgcggatgaggtatatgctgttgactggagtccagatggccagagagtggcaagtggtgggaaggacaaatgcctccggatatggaggagatgagacggcccgaagttctctctgacccccacctcgactcggcctctgccagctgccttccctgccagagaacaaaggctgagatggcagtgcacacaccctccccaccagtggggacctgagaatgcgtgtggcctgctgtcctcgatagaccggaatggggttttcccacagatccccgcctgtggcacaccccagagccagaaatcgaaggtcacaggaagttgtcactgaacttggcccgtgtctgctactctgtaccttgctggtacagacaggggtggtgggcagccaggctctatgagtgggcccctagtgtcagctctgtacagggtcagatcccaggttctatgaccaaataagtaacttaagttttgtgtgttgggttctaattccttgtcctagaatccccatgactcaatcaaggactgtgctaaatgagattgtccagcccccgcccttgcactggactacgccaaaaccacactgaccaggcacttgccttccctctcttcccccgtgttggtaagagagaggccagttgtgatagtggccaaggagaatctagggctgtattgttgtccactgcagtaggcaccggccacatgtgactgctggcatgaaatagaagtgcagttcctccatcgcactgggtaaggcctccagtattggacagcacacagaaaggttttcatcatcaagagagttctgctggtcagccctgctccaggggatgcctctgccttcgcatagcacactgcttgaggccctgccaggcaccaagcactgccctgggcccatgggatagagcggggaaggtgatggctcttccagaggattccctcagatggggaggcagcagtatgagctctgagcagaagtgggtattgttgatacagaggaagttctttgccacgagaactttcaagcagtgaaaggaattcccatcaggactcagaccccaggccgagatcttgccctgaatgtaccctgcctctgctttctcctgcatcccatgctaagcagggtcatggtctgaactactcagattggatttccaaaccatccttgtataaactgctcagaactagcatcttgctccttcttaccctcctccacccttgtctgtgcttttgggttttgcgcgtcacctagctgtggtgcttggcctccaccttgcacatatctgcagtgaggctacataagaagcgaacaaaactatcagccactgagctccttggtgccagctgtttgtctgctgtgctctcagactgcaccaggcctggaaggttctcaagctccaaaacttttgatgaggaaacaacataagaaatgattagcccatgccctcacatctagtaagagaaagctgggattaaaccaggccctgccccaaagcttattgtgcactttgtaccacatccctccgtccagagctcaagctagtttgacagttcatgggccaccacgtctgtccatgacagctatttctgtatttttctggtgtaagagccttttagtcttagagcaccagtctccctgttcccctaccccgccccactggggaaggggtgatggcagcatcctattgcctagctgcctgttttctatctccccacccatgtagactctgtcctggtggaagctaggaggtgggtgccagccagcccatctgaggctgtctgcagcataaagcagactttagggtgctggatgacctgcagttctttaatgagggacctagacccagcccagatttggaggaggagggagtctagcagctgtgggcagtggctgagcctggcatggcctggcctgagatgcctccaggtgaatggggcccctatgtagccttggccccagcccaggggtggggtgcccataccactctgccagaccccgggcccgcagggtgctggtggtatggtaggtctcatggctctggtttctgagggcctggggttgaagctgaaagtaggtgaggggtgtcctggggccctcccccttaacagggaaataggtattccagatcctccagcctccgcatctcctccggcccgatggacacgatcttttgccggggttccttgcgccgcacggtgatctggatggggtagttctcaggaaagctgctgaagtcagtggccagggttgcaaactgaagtgaaacaagaaaacccttcagagttccttcccagatctgaacctggctctctctctgtctctatcaccccttttttttctgtctgctgactcagaccttaaacagccttatccaacctagccattgacgcaggaaacaggtgcaaagatgcatgactcaagcctgtacctcctcattatgggatatttccaaccaaagggctgtctgtactcaggcctctatacccccatacccctaccccatacccaggctgttcccttcttcgtccccctttagcctcttgtcttccctatttctttcaatgcccttgacttcccagcctactcacaatcatgggcactgaattgcagagtctaaaaaccaatggctttggaaggggaacattatagtgatgttgaaaaatacattcgtttgcattcctagtgggccccagagtggcttaatccttaaacctcccagaagcatgcattctggaattgatgcttcttgacccaggcagaaggaaagctagccagatgagtcatgtgggcataggggtgttcccaacctccaaagccctggttccctggctttggacttctctccacccccaaggcccctcttttcccagggctcactttgtagggcttgcaccacttccccaccccagctgtgttggctgcacggacactgaggcagtaacacgtgttaggctttagctccatcagcttgacagtagtgcccaaaatcttgttgaagatccatggacgattctttgcctcgggcaactcattctcctgtgtcttggccacctcctgtaacaggagctggtagaaactgaccggctgcttgcccaaggcgtaggtccaggaaatctaggggaagagagagccccgaggcttcctcagatatgtcctgtccttcctgtcccttcaccctcccaactggggtcaggacgtcccatgcccatcccctgctcctgctggggcccaggcaggtcagatggaaggtgcaaggtactgcagcactgagtgtggaacccctgccccgaagcatgtactactctcctgggcagccccacccactttagggtacaccctcattccatatttcttatacgccaggggtcctcaacccttgggccaccaactgatagcagtccatggcctgttaggaactggatagcacagcaggaggagattggtgggcgagcaagcgaagcttcatctgtatttacagctgctccccacggctcagggtaccacctgagctctgcctcctgtcagatcagcagaggcattagattcccataggcacgtgaaccctattgtgaattgtatgggagggatctaagttgaatgctccttatgagaatctaatgcctgatgatctgtcattgtctcccatcacccccaaatgggaccctctcgttgcaggaaaacaagctcagggctcccacagtttctacattatggtgagttgtataattatttcattatatattacaatgtaataataatagaaataaagtacacaataaatgt

SEQ ID NO: 196615 - DNA, 1458 bp, Artificial Sequence
  derived and/or modified sequence
atggctgctgctgtgcctgatgaagctgtggccagagatgtgcagaggctgctggtgcagttccaggatgaaggaggccagctgctgggcagcccctttgatgtgcctgtggacatcaccccagaccggctgcagctggtgtgcaatgccctgctggcccaggaggaccccctgcccctggccttctttgtgcatgatgctgagatcgtgagcagcctgggcaagaccctggagagccaggccgtggagacagagaaggtgctggacatcatctaccagccccaggccatcttccgggtgcgggctgtgacccgctgcaccagcagcctggagggccacagcgaggccgtcatctctgtggccttcagccccaccgggaagtacctggccagcggcagcggggacaccaccgtgcgcttctgggacctgagcacagagaccccccacttcacctgcaagggccaccgccactgggtgctgagcatctcctggagcccagatggcaggaagctggccagcggctgcaagaatggccagatcctgctgtgggaccccagcacaggcaagcaggtgggccgcaccctggccggccacagcaagtggatcaccggcctgtcctgggagcccctgcacgccaacccagaatgtcgctacgtggccagcagcagcaaggatggctctgtgcgcatctgggacaccacagctggccgctgtgagcgcatcctgaccggccacacccagagcgtgacctgcctgcgctggggcggagatggcctgctgtacagcgccagccaggacaggaccatcaaggtgtggagggcccatgatggagtgctgtgcaggaccctgcagggccacggccactgggtgaacaccatggccctgagcacagattatgccctgaggactggagcctttgagcctgctgaggcctctgtgaacccccaggacctgcagggcagcctgcaggagctgaaggagcgggccctgagccgctacaacctggtgcggggccagggccctgagcggctggtgtctggcagtgatgacttcaccctcttcctgtggagccctgctgaggacaagaagcccctgaccaggatgacaggccaccaggccctgatcaaccaggtgctcttctccccagacagccgcatcgtggccagcgccagctttgacaagagcatcaagctgtgggatggccgcacaggcaagtacctggccagcctgcggggccacgtggccgctgtgtaccagatcgcctggagcgctgacagccggctgctggtgtctggcagcagtgacagcaccctgaaggtgtgggatgtgaaggcccagaagctggccatggacctgcccggccacgcagatgaggtgtatgctgtggactggagcccagatggccagagggtggccagcggcggcaaggacaagtgcctgcgcatctggaggaggtag

SEQ ID NO: 196616 - DNA, 1386 bp, Artificial Sequence
  derived and/or modified sequence
atggctgctgctgtgcctgatgaagctgtggccagagatgtgcagaggctgctggtgcagttccaggatgaaggaggccagctgctgggcagcccctttgatgtgcctgtggacatcaccccagaccggctgcagctggtgtgcaatgccctgctggcccaggaggaccccctgcccctggccttctttgtgcatgatgctgagatcgtgagcagcctgggcaagaccctggagagccaggccgtggagacagagaaggtgctggacatcatctaccagccccaggccatcttccgggtgcgggctgtgacccgctgcaccagcagcctggagggccacagcgaggccgtcatctctgtggccttcagccccaccgggaagtacctggccagcggcagcggggacaccaccgtgcgcttctgggacctgagcacagagaccccccacttcacctgcaagggccaccgccactgggtgctgagcatctcctggagcccagatggcaggaagctggccagcggctgcaagaatggccagatcctgctgtgggagcccctgcacgccaacccagaatgtcgctacgtggccagcagcagcaaggatggctctgtgcgcatctgggacaccacagctggccgctgtgagcgcatcctgaccggccacacccagagcgtgacctgcctgcgctggggcggagatggcctgctgtacagcgccagccaggacaggaccatcaaggtgtggagggcccatgatggagtgctgtgcaggaccctgcagggccacggccactgggtgaacaccatggccctgagcacagattatgccctgaggactggagcctttgagcctgctgaggcctctgtgaacccccaggacctgcagggcagcctgcaggagctgaaggagcgggccctgagccgctacaacctggtgcggggccagggccctgagcggctggtgtctggcagtgatgacttcaccctcttcctgtggagccctgctgaggacaagaagcccctgaccaggatgacaggccaccaggccctgatcaaccaggtgctcttctccccagacagccgcatcgtggccagcgccagctttgacaagagcatcaagctgtgggatggccgcacaggcaagtacctggccagcctgcggggccacgtggccgctgtgtaccagatcgcctggagcgctgacagccggctgctggtgtctggcagcagtgacagcaccctgaaggtgtgggatgtgaaggcccagaagctggccatggacctgcccggccacgcagatgaggtgtatgctgtggactggagcccagatggccagagggtggccagcggcggcaaggacaagtgcctgcgcatctggaggaggtag

SEQ ID NO: 196617 - DNA, 1458 bp, Artificial Sequence
  derived and/or modified sequence
atggccgccgccgtgcccgacgaggccgtggcccgggacgtgcagcgtctattggtgcaattccaagacgaaggcggccaactcctgggcagcccattcgacgtcccggtagacatcactcctgataggttacaactggtgtgcaacgcacttctggcgcaggaagaccccctccctttagccttttttgtgcatgacgcagagattgtgagcagcctggggaagaccttggaatcgcaggctgtagagactgagaaggtcctggacattatctaccagccacaagcaatctttcgcgtgcgagcggtgacacgctgcacttcatccctggaagggcactcagaagccgttatctcagtggctttctccccgaccggcaaatatctggcgtcaggatctggtgacactacggtgcgcttttgggatcttagcacagagactccacatttcacatgcaaaggccaccgccattgggtgttgtctatcagctggtccccggacgggcggaagctggcgtccggctgtaaaaacggccagatcctcctttgggacccttctactgggaaacaggtgggccgtacactggccggtcattctaagtggattactggtctttcttgggagccgttgcatgccaatcccgagtgccgctacgtggcttcctcatccaaagatggctctgtgaggatatgggataccacagccggaagatgtgagaggatcctgactggacatacacagtctgttacctgcctgcgctggggcggggatggtttgctttatagtgcttctcaggacaggactataaaggtttggcgggcccacgacggcgtcctttgccggacccttcagggacacggacattgggtaaacacgatggcactgtccacggattacgctctgaggacaggtgcctttgaaccagccgaagctagcgtcaacccacaagacttgcaaggtagcttacaggagcttaaagaacgtgctctgagtagatacaacttggtcagaggtcaagggcccgaaagacttgtcagcggttccgacgattttaccttgtttctgtggagtccagccgaggacaagaagcccttgacccggatgaccggccaccaagctctcataaaccaggtactgttcagtcccgattcaaggatcgtggcttctgccagctttgacaaaagcattaaattgtgggacggacgcaccgggaaatatttagcgagtttacgggggcacgtcgctgccgtgtatcaaattgcctggagcgctgattcccggctcctggtctcaggcagcagcgatagtaccttgaaggtatgggacgtcaaggcccagaagctggctatggatctgcctgggcacgccgacgaggtttatgccgtggattggagtcccgacggccaacgcgttgcctccggaggaaaggataaatgcctcaggatctggcgacgttag

SEQ ID NO: 196618 - DNA, 1386 bp, Artificial Sequence
  derived and/or modified sequence
atggccgccgccgtgcccgacgaggccgtggcccgggacgtgcagcgactgctagtgcagtttcaggacgaaggcggtcaactgcttggtagcccttttgacgtaccagtggacattacccccgaccgactgcagctggtgtgcaatgccttgttggctcaggaagatccactgcctctggccttctttgtccacgatgccgagatagtctcgtcactggggaagacccttgagtcccaggctgtggagactgaaaaggtgctagatataatttaccaacctcaggccatattcagagttcgggccgttacccgctgtacttccagcctggagggtcactccgaagcggtcatctctgtcgctttcagcccaactggcaaatatctggcctcaggctctggggatactacagtccgattttgggatttgagcacggagacgcctcacttcacatgcaagggacatcgccactgggtgttgtccatctcatggagcccagacggccgcaagctagcctccgggtgtaaaaatggccagatcctgctatgggagccgctgcacgcgaatcctgaatgtagatatgtggctagctctagcaaagatgggagtgtgaggatttgggatacaaccgccggacggtgcgagcgcatcctcaccggccacacccagagtgtcacctgtctcagatggggaggcgacggcctgttgtactctgcgtcccaggaccgtacaattaaggtctggagggcgcatgacggcgtgctgtgccggactctacagggccacggccactgggttaacactatggccctgtcaactgattacgccttaaggactggcgccttcgaacccgcagaggcctcagttaacccccaagacttacaggggagtttacaagagttgaaggaaagagcgctgtccagatataatttagttaggggtcagggcccagagcggctggtctccgggtcagacgattttaccctcttcttgtggtcaccggccgaagataaaaaacccctgaccagaatgaccggccaccaggctctcattaatcaagtgctcttctcgcctgacagccgaattgtggcttctgctagctttgataagagtatcaaactgtgggacggccgaactgggaagtatctggctagcctacgaggtcatgtggcggccgtgtaccagatcgcttggtccgccgattcccggctcctcgtgtcaggatctagcgactccaccctcaaggtttgggatgtgaaggcacaaaagttagcaatggatctgccgggacatgcggacgaggtttacgccgtcgattggtcacccgatgggcagcgggttgccagtgggggcaaagacaaatgcctgcgaatctggagacgttag

SEQ ID NO: 196619 - DNA, 1458 bp, Artificial Sequence
  derived and/or modified sequence
atggccgcagccgtaccagatgaagctgtggccagggacgtacagagactgctagtccagtttcaagatgaagggggacagctgctcggaagtccgtttgatgtacccgtggacataactccagacagactccagctggtttgcaatgccctgttagcgcaggaagatcccttaccattggcgttctttgtccacgatgctgagattgtgtcgagtctgggtaagaccttagaatctcaggccgtcgagactgagaaagtgttggatattatttatcaacctcaggccatttttcgggtgcgggcagtgacccgttgcacgagtagtcttgagggtcacagcgaggctgtgatctcggtggctttctcaccaactggcaaatatctagcttccggaagtggtgacactaccgtgcggttctgggatctgagcactgagacccctcactttacctgtaaagggcatagacattgggtcctgtcaatcagctggtcccctgatggccgtaaactggctagtggttgcaagaatgggcaaattttgctgtgggaccccagtaccggaaagcaagttgggagaaccctcgcaggacacagtaagtggatcaccggccttagttgggagccgctgcacgctaatcccgagtgccgctatgtcgccagctcctcaaaggacgggtctgtgcggatttgggacactacagcgggaaggtgcgagcgaattttgaccggccatacacagtcggtgacttgcttgcgttgggggggagatgggctgctgtattcagcctctcaagaccggaccataaaagtctggcgggctcatgacggtgtcctgtgccgcactctgcaagggcatggccactgggtgaatactatggccctgtccacagactacgctcttcggaccggggctttcgaacctgcagaggcctcggtgaacccccaagaccttcaaggctctttgcaagagctgaaggaaagagccttaagcagatacaatctggttagagggcagggacctgaacggctggtgtccgggtccgacgactttaccctcttcttatggagtccagctgaagacaaaaagccgttgactcgaatgacgggccaccaggccctgataaatcaggtactgttttcacctgacagccggatcgtcgcgtcagcgagctttgataaatccatcaagctgtgggacggcagaacaggtaaatacttggccagtttaagaggacatgttgctgcggtgtatcagatcgcctggagcgccgactcaaggcttctggtgtcaggatcatcagattctacacttaaggtgtgggatgtcaaggctcagaagctggccatggatttacccggacacgcagacgaagtctacgctgtggactggtccccagacgggcagcgagtggcatccggcggtaaggataaatgcctgaggatctggaggagatag

SEQ ID NO: 196620 - DNA, 1386 bp, Artificial Sequence
  derived and/or modified sequence
atggccgctgcggtgccagatgaagcagttgcccgagatgttcagaggctcctcgttcagttccaggatgagggagggcagctgctaggatcaccctttgacgtacccgtggacatcacgcccgacaggctccagctggtctgtaacgcactgttagctcaagaagaccccttgcctctggcctttttcgtccacgatgcagaaatcgtgagctctctgggtaagaccctggaaagtcaggctgtagaaacggagaaagtactagatattatctaccagccacaggccatctttcgggtgagagcagtgaccaggtgtaccagtagcctcgaaggccactccgaggcggtgatctccgttgccttctcccctacaggcaagtatcttgcatctggcagtggcgataccaccgttcgcttttgggacctcagtacagaaacaccccatttcacctgcaaagggcacaggcactgggtgctgagcatatcttggagtccagacggacggaagttagcttctggctgtaagaatggacagatcttactgtgggagcctcttcatgccaatccagagtgtcgatacgtggcatcttcatccaaggacgggagcgtccgcatatgggacacaactgccggaagatgtgaacgaatcttgacaggccacactcagagcgtgacctgtctgcgctggggcggagacggattgctctactccgccagccaggatcgcaccataaaagtgtggcgagcccacgatggggtgctgtgtagaacactgcagggccatgggcattgggtcaatacgatggcactgtccacagattatgcgctacggacgggggcatttgaacccgctgaggcttccgtaaacccacaagacctgcagggatctcttcaggagctaaaggagcgcgctctaagccgctataacttagtcagaggacagggcccagaacggctggtaagtggaagtgatgattttacactgttcctctggtcccccgctgaggacaagaagcccctgacgcggatgactggtcaccaggctctgatcaaccaagtgctgttctctccagattccaggattgtagccagtgcatcttttgacaaaagcattaaactctgggacggccgaacagggaagtacctggcttcactcagggggcatgtggctgccgtctaccagatcgcctggagtgcagattcaaggctactggtgagtggatcttccgacagcacacttaaagtgtgggatgtgaaggctcagaaacttgctatggacctgccaggacacgctgacgaggtctacgctgtggattggtcccctgacggacagagagtggcatcaggaggtaaagacaaatgcctgcgaatatggagacggtag

SEQ ID NO: 196621 - DNA, 1458 bp, Artificial Sequence
  derived and/or modified sequence
atggccgccgccgtgcccgacgaggccgtggccagagacgtgcagagactgctggtgcagttccaggacgagggcggccagctgctgggcagccccttcgacgtgcccgtggacatcacccccgacagactgcagctggtgtgcaacgccctgctggcccaggaggaccccctgcccctggccttcttcgtgcacgacgccgagatcgtgagcagcctgggcaagaccctggagagccaggccgtggagaccgagaaggtgctggacatcatctaccagccccaggccatcttcagagtgagagccgtgaccagatgcaccagcagcctggagggccacagcgaggccgtgatcagcgtggccttcagccccaccggcaagtacctggccagcggcagcggcgacaccaccgtgagattctgggacctgagcaccgagaccccccacttcacctgcaagggccacagacactgggtgctgagcatcagctggagccccgacggcagaaagctggccagcggctgcaagaacggccagatcctgctgtgggaccccagcaccggcaagcaggtgggcagaaccctggccggccacagcaagtggatcaccggcctgagctgggagcccctgcacgccaaccccgagtgcagatacgtggccagcagcagcaaggacggcagcgtgagaatctgggacaccaccgccggcagatgcgagagaatcctgaccggccacacccagagcgtgacctgcctgagatggggcggcgacggcctgctgtacagcgccagccaggacagaaccatcaaggtgtggagagcccacgacggcgtgctgtgcagaaccctgcagggccacggccactgggtgaacaccatggccctgagcaccgactacgccctgagaaccggcgccttcgagcccgccgaggccagcgtgaacccccaggacctgcagggcagcctgcaggagctgaaggagagagccctgagcagatacaacctggtgagaggccagggccccgagagactggtgagcggcagcgacgacttcaccctgttcctgtggagccccgccgaggacaagaagcccctgaccagaatgaccggccaccaggccctgatcaaccaggtgctgttcagccccgacagcagaatcgtggccagcgccagcttcgacaagagcatcaagctgtgggacggcagaaccggcaagtacctggccagcctgagaggccacgtggccgccgtgtaccagatcgcctggagcgccgacagcagactgctggtgagcggcagcagcgacagcaccctgaaggtgtgggacgtgaaggcccagaagctggccatggacctgcccggccacgccgacgaggtgtacgccgtggactggagccccgacggccagagagtggccagcggcggcaaggacaagtgcctgagaatctggagaagatag

SEQ ID NO: 196622 - DNA, 1386 bp, Artificial Sequence
  derived and/or modified sequence
atggccgccgccgtgcccgacgaggccgtggccagagacgtgcagagactgctggtgcagttccaggacgagggcggccagctgctgggcagccccttcgacgtgcccgtggacatcacccccgacagactgcagctggtgtgcaacgccctgctggcccaggaggaccccctgcccctggccttcttcgtgcacgacgccgagatcgtgagcagcctgggcaagaccctggagagccaggccgtggagaccgagaaggtgctggacatcatctaccagccccaggccatcttcagagtgagagccgtgaccagatgcaccagcagcctggagggccacagcgaggccgtgatcagcgtggccttcagccccaccggcaagtacctggccagcggcagcggcgacaccaccgtgagattctgggacctgagcaccgagaccccccacttcacctgcaagggccacagacactgggtgctgagcatcagctggagccccgacggcagaaagctggccagcggctgcaagaacggccagatcctgctgtgggagcccctgcacgccaaccccgagtgcagatacgtggccagcagcagcaaggacggcagcgtgagaatctgggacaccaccgccggcagatgcgagagaatcctgaccggccacacccagagcgtgacctgcctgagatggggcggcgacggcctgctgtacagcgccagccaggacagaaccatcaaggtgtggagagcccacgacggcgtgctgtgcagaaccctgcagggccacggccactgggtgaacaccatggccctgagcaccgactacgccctgagaaccggcgccttcgagcccgccgaggccagcgtgaacccccaggacctgcagggcagcctgcaggagctgaaggagagagccctgagcagatacaacctggtgagaggccagggccccgagagactggtgagcggcagcgacgacttcaccctgttcctgtggagccccgccgaggacaagaagcccctgaccagaatgaccggccaccaggccctgatcaaccaggtgctgttcagccccgacagcagaatcgtggccagcgccagcttcgacaagagcatcaagctgtgggacggcagaaccggcaagtacctggccagcctgagaggccacgtggccgccgtgtaccagatcgcctggagcgccgacagcagactgctggtgagcggcagcagcgacagcaccctgaaggtgtgggacgtgaaggcccagaagctggccatggacctgcccggccacgccgacgaggtgtacgccgtggactggagccccgacggccagagagtggccagcggcggcaaggacaagtgcctgagaatctggagaagatag

SEQ ID NO: 196623 - protein, 640 aa, Artificial Sequence
  derived and/or modified sequence
MVSNPVHGLPFLPGTSFKDSTKTAFHRSQTLSYRNGYAIVRRPTVGIGGDRLQFNQLSQAELDELASKAPVLTYGQPKQAPPADFIPAHVAFDKKVLKFDAYFQEDVPMSTEEQYRIRQVNIYYYLEDDSMSVIEPVVENSGILQGKLIKRQRLAKNDRGDHYHWKDLNRGINITIYGKTFRVVDCDQFTQVFLESQGIELNPPEKMALDPYTELRKQPLRKYVTPSDFDQLKQFLTFDKQVLRFYAIWDDTDSMYGECRTYIIHYYLMDDTVEIREVHERNDGRDPFPLLMNRQRVPKVLVENAKNFPQCVLEISDQEVLEWYTAKDFIVGKSLTILGRTFFIYDCDPFTRRYYKEKFGITDLPRIDVSKREPPPVKQELPPYNGFGLVEDSAQNCFALIPKAPKKDVIKMLVNDNKVLRYLAVLESPIPEDKDRRFVFSYFLATDMISIFEPPVRNSGIIGGKYLGRTKVVKPYSTVDNPVYYGPSDFFIGAVIEVFGHRFIILDTDEYVLKYMESNAAQYSPEALASIQNHVRKREAPAPEAESKQTEKDPGVQELEALIDTIQKQLKDHSCKDNIREAFQIYDKEASGYVDRDMFFKICESLNVPVDDSLVKELIRMCSHGEGKINYYNFVRAFSN

SEQ ID NO: 196624 - DNA, 1923 bp, Artificial Sequence
  derived and/or modified sequence
atggtgtctaaccccgtacatggtctgcctttccttcctgggaccagcttcaaggactcgacaaagacagcttttcaccgatcccagactctctcatacaggaacgggtacgcaattgttcggcgccctaccgtagggatcgggggagatcggctccaattcaatcagctgagccaggccgagctcgatgaattagctagcaaagcaccggtgctgacatacggccagccaaagcaggcgccaccagcagattttattcctgcacacgtggctttcgacaagaaagtgctcaagtttgacgcctacttccaggaggatgttcccatgtccacagaggagcagtatcggatccgacaggtgaatatttactactaccttgaagatgactccatgagtgtaatcgagcctgtggtggagaactcaggaatcctgcaaggaaaactgattaagaggcaacggctcgcgaaaaatgaccgcggggatcattatcattggaaagacctgaatagaggcattaatatcaccatctacggaaagaccttccgagtggtcgactgtgaccaattcactcaagtgtttttagagtcacaaggtattgagctcaatccaccagagaagatggcattggacccgtatacagaactccgcaaacagcctctcagaaaatacgtgaccccctctgacttcgatcagctcaagcagttcctgacattcgacaagcaggtgctgcggttctacgcaatctgggatgataccgattccatgtacggtgagtgtcgcacttatatcatccactattatctcatggacgataccgtggagatccgggaagtgcatgaacggaacgacggccgcgacccctttccactcctaatgaaccgccaaagagttcccaaggtcttagttgaaaatgcaaagaattttcctcagtgcgttttggaaatctctgaccaagaagtgctcgagtggtacactgccaaagattttattgtcggcaaaagcctgacaatcctgggccggacattctttatctacgactgtgacccttttacacgccgttattataaagagaagtttgggattacggacttgccgagaatcgacgtgagtaagcgagagcctcctcctgtaaagcaggagctcccaccctataacggcttcgggctcgttgaggactctgcacagaattgttttgctctgatccccaaggcgcctaaaaaagacgtgatcaagatgcttgtgaatgataacaaagtgctccgatatttggcagtgctggagagtcccataccggaggacaaggatcggaggttcgtcttcagctatttccttgctaccgatatgatctccatttttgaaccacccgtgcggaacagcggtatcatcggcggcaaatacctgggtaggactaaggttgtcaagccctatagcaccgttgacaatcccgtctactacgggcctagcgatttcttcattggagccgtaatagaggtgtttggacacaggttcattattctggacaccgacgagtacgtgctcaagtatatggagtcgaatgcagcccagtacagtccagaggcattggcttccatacagaatcacgttcggaaacgcgaagcccctgctccagaggcagaatccaagcagacggagaaggatcctggggtgcaggagctggaggctcttatcgacaccatacagaagcaactgaaagaccactcctgcaaggacaacatcagagaagctttccagatctacgacaaggaagcctctggatacgtggaccgcgatatgtttttcaaaatatgcgaaagcctcaatgttcctgtggacgatagtttggtgaaagagttaattagaatgtgtagtcacggagagggtaaaataaactattacaacttcgtgagggccttctctaattag

SEQ ID NO: 196625 - DNA, 1923 bp, Artificial Sequence
  derived and/or modified sequence
atggtgagcaaccctgtgcacggcctgcccttcctgcccggcaccagcttcaaggacagcaccaagacagccttccacaggagccagaccctgagctacagaaatggctacgccatcgtgagaagacccaccgtgggcattggaggagaccggctgcagttcaaccagctgagccaggccgagctggatgagctggccagcaaggcccctgtgctgacctacggccagcccaagcaggcccctcctgctgacttcatcccagcccacgtggcctttgacaagaaggtgctgaagtttgatgcctacttccaggaggatgtgcccatgagcacagaggagcagtaccgcatccggcaggtgaacatctactactacctggaggatgacagcatgtctgtcatcgagcctgtggtggagaacagcggcatcctgcagggcaagctgatcaagaggcagaggctggccaagaatgacagaggagaccactaccactggaaggacctgaacagaggcatcaacatcaccatctacggcaagaccttccgggtggtggactgtgaccagttcacccaggtgttcctggagagccagggcatcgagctgaaccccccagagaagatggccctggacccctacacagagctgaggaagcagcccctgaggaaatatgtgacccccagcgactttgaccagctgaagcagttcctgacctttgacaagcaggtgctgcgcttctacgccatctgggatgacacagacagcatgtacggggagtgcaggacctacatcatccactactacctgatggatgacacagtggagatccgggaggtgcatgaaagaaatgatggccgggaccccttccccctgctgatgaaccggcagagggtgcccaaggtgctggtggagaatgccaagaacttcccccagtgtgtgctggagatcagtgaccaggaggtgctggagtggtacacagccaaggacttcatcgtgggcaagagcctgaccatcctgggccgcaccttcttcatctatgactgtgaccccttcacccggcgctactacaaggagaagtttggcatcacagacctgcccagaattgatgtgtccaagcgggagcccccacctgtgaagcaggagctgcccccctacaatggatttggcctggtggaggacagcgcccagaactgctttgccctgatccccaaggcccccaagaaggatgtgatcaagatgctggtgaatgacaacaaggtgctgcgctacctggccgtgctggagagccccatccctgaggacaaggacagaagatttgtgttctcctacttcctggccacagacatgatcagcatctttgagccccctgtgagaaattctggcatcatcggcggcaagtacctgggccgcaccaaggtggtgaagccctacagcacagtggacaaccctgtgtactacggccccagcgacttcttcatcggggccgtcatcgaggtgtttggccaccgcttcatcatcctggacacagatgaatatgtgctgaagtacatggagagcaatgctgcccagtacagccctgaggccctggccagcatccagaaccacgtgaggaagcgggaggccccagcccctgaggccgagagcaagcagacagagaaggaccccggggtgcaggagctggaggccctgattgacaccatccagaagcagctgaaggaccacagctgcaaggacaacatccgggaggccttccagatctatgacaaggaggccagcggctacgtggaccgggacatgttcttcaagatctgtgagagcctgaatgtgcctgtggatgacagcctggtgaaggagctgatccgcatgtgcagccacggggagggcaagatcaactactacaactttgtgcgggccttcagcaactag

SEQ ID NO: 196626 - DNA, 1923 bp, Artificial Sequence
  derived and/or modified sequence
atggtgagcaaccccgtgcacggcctgcccttcctgcccggcaccagctttaaagactccaccaaaacggccttccacagatcccagacactgagttatcgtaacggctatgccatcgtcagacggcccacagtcggtattgggggggatcgcctgcagttcaaccagctctcacaggcagaacttgatgagcttgccagcaaagcccccgtcttaacatacggccaaccaaaacaagcgccgcctgccgatttcatccccgcccacgtggctttcgacaaaaaggtgctcaagttcgacgcctatttccaagaagatgtgcctatgtccacagaagagcagtatcgcattagacaggtcaacatatactactacctggaggatgactctatgtccgtgattgaaccagtggtcgaaaactctggaattctgcagggaaaacttataaaaaggcagcgcctggctaagaacgataggggggaccactatcactggaaagatcttaacagagggatcaatatcacaatttacggtaaaaccttcagagtggtggattgcgaccagtttacccaggtctttttagagagccaagggatcgagctgaatcctcccgaaaagatggctctggacccatacaccgagctgcgcaagcagccactgaggaaatacgttacgccatctgatttcgaccaactcaaacaattcctaacatttgacaaacaggttctcagattttatgcaatctgggacgataccgattcaatgtacggcgagtgccgcacatatataattcactactatctcatggacgacacagtcgagattcgggaagtgcatgagcgtaatgacggccgggatcctttccctttgctgatgaatcgccagagagtccctaaagtcctagttgaaaacgcgaaaaatttccctcagtgcgtactggaaattagtgaccaggaggtcctggagtggtacaccgcaaaggactttattgttggcaagtccttgaccattctgggaagaacctttttcatttatgattgcgacccattcacacgcaggtattacaaggagaaatttggaataacagatctccccagaatcgacgtgagcaaacgtgaacccccacctgtgaagcaagagctgcctccttacaacggatttgggctagtagaggactcagcgcaaaactgcttcgcactcatccccaaagccccgaagaaggatgtgatcaagatgttagtcaacgataataaagtgttacggtatctggcggtcttggagtcccccattcctgaggacaaagaccggcgtttcgtgttcagctattttctggctacagacatgataagcatttttgaacctcctgtgcgcaattctggaataatcggaggaaagtacctaggaagaacgaaggttgtgaagccctattctacagttgataatcccgtgtactatggccctagtgacttcttcataggggctgtgattgaagtgtttggccaccgcttcattattctggacaccgatgagtacgtgctgaagtacatggaaagtaacgcggcccaatactcaccagaggctctggcatcgattcagaaccatgtgcgcaagagggaagctccggccccagaagccgagtctaagcagacggagaaagaccctggggtgcaagagttggaggctcttatcgataccattcagaaacagctcaaggaccactcgtgtaaagacaatattagggaggctttccagatctatgataaagaagcgagcggatatgtcgatcgggacatgttcttcaagatatgcgagtcgttaaatgtacctgttgacgactccctcgtgaaggagctgatccggatgtgctcgcatggagagggcaagatcaactactacaacttcgtgagggcattcagcaactag

SEQ ID NO: 196627 - DNA, 1923 bp, Artificial Sequence
  derived and/or modified sequence
atggtgagcaaccctgtacacgggctgcccttccttcccggaacctcatttaaggactcgacgaaaacggccttccaccgctctcagacactgtcataccgaaacggatatgccatcgttcggaggcccaccgtcggcatcggcggagaccgcctgcaattcaatcagctgtcccaagcagagttagacgaactggccagcaaggcgcctgtactgacatacggtcagcctaaacaggccccacctgccgacttcattccagcccatgtagcgtttgacaagaaggtcttgaaatttgacgcgtatttccaagaggacgtaccaatgagtaccgaagaacagtaccggattcggcaggtcaacatctactattatctcgaggacgattctatgagcgtcatcgaaccggtcgtcgaaaatagtggaattctgcagggtaagctcatcaagagacaaaggctggctaagaacgaccggggtgaccactaccactggaaggatcttaatcggggaatcaacattacaatttatggcaaaaccttccgtgtcgtggactgcgaccagttcacacaggtgtttttggagagccaggggattgagctgaaccctcccgaaaagatggcgctggacccttacaccgaactgcgtaaacagcccctgcgtaaatacgtcacaccaagcgacttcgaccaactgaagcagtttctgacctttgacaagcaggtgttacggttttatgcaatctgggatgatactgactctatgtacggtgagtgccgcacctatattattcactattatctgatggatgacaccgtcgagataagggaagtccatgagcgcaacgacggtagggatcccttcccactgctgatgaacaggcagcgggtgcctaaggtcctggtcgaaaatgccaagaattttccacagtgcgtcttggagatttccgatcaggaagtccttgagtggtacaccgcaaaggattttattgttggtaagtctctaacgatattgggaagaacattttttatctacgattgtgacccgtttactcgtcgctattacaaggaaaagtttgggataacagatctgccacgcatcgacgtttctaagagagaacctccacccgttaagcaagagctccccccttacaatggcttcggtttggtggaggacagtgctcagaactgttttgccctgataccaaaggcccctaagaaggatgtgattaagatgctggtcaacgacaacaaggtcctgcggtatctggctgtgctggagtcacctattcccgaggacaaagacagaagattcgtcttcagctacttccttgctacggatatgatatccatcttcgaacctccagtgcggaattccggcataatagggggtaaatatttgggacggaccaaagtggtgaagccatacagcaccgtcgataatccggtctattacggaccttcggatttttttattggagccgttatcgaggtctttggtcaccggttcattattctggacacagacgaatacgtgctaaagtacatggagtcaaacgccgcacagtactcgccagaagctctggcgtcgatacagaatcacgttaggaagcgcgaggcgccagctcccgaggcggaatcaaaacagaccgagaaggatcctggcgtgcaggaactggaggcacttattgatactatacagaagcagctgaaagatcactcctgcaaggacaatatcagagaagcattccagatatatgataaagaggcctctggctatgtggatagagacatgtttttcaagatttgtgagtctctaaatgttcctgtggatgatagcttagtaaaggagctgatcaggatgtgttcacacggtgaggggaaaatcaattattacaacttcgttagggcattctccaactag

SEQ ID NO: 196628 - DNA, 1923 bp, Artificial Sequence
  derived and/or modified sequence
atggtgagcaaccccgtgcacggcctgcccttcctgcccggcaccagcttcaaggacagcaccaagaccgccttccacagaagccagaccctgagctacagaaacggctacgccatcgtgagaagacccaccgtgggcatcggcggcgacagactgcagttcaaccagctgagccaggccgagctggacgagctggccagcaaggcccccgtgctgacctacggccagcccaagcaggccccccccgccgacttcatccccgcccacgtggccttcgacaagaaggtgctgaagttcgacgcctacttccaggaggacgtgcccatgagcaccgaggagcagtacagaatcagacaggtgaacatctactactacctggaggacgacagcatgagcgtgatcgagcccgtggtggagaacagcggcatcctgcagggcaagctgatcaagagacagagactggccaagaacgacagaggcgaccactaccactggaaggacctgaacagaggcatcaacatcaccatctacggcaagaccttcagagtggtggactgcgaccagttcacccaggtgttcctggagagccagggcatcgagctgaacccccccgagaagatggccctggacccctacaccgagctgagaaagcagcccctgagaaagtacgtgacccccagcgacttcgaccagctgaagcagttcctgaccttcgacaagcaggtgctgagattctacgccatctgggacgacaccgacagcatgtacggcgagtgcagaacctacatcatccactactacctgatggacgacaccgtggagatcagagaggtgcacgagagaaacgacggcagagaccccttccccctgctgatgaacagacagagagtgcccaaggtgctggtggagaacgccaagaacttcccccagtgcgtgctggagatcagcgaccaggaggtgctggagtggtacaccgccaaggacttcatcgtgggcaagagcctgaccatcctgggcagaaccttcttcatctacgactgcgaccccttcaccagaagatactacaaggagaagttcggcatcaccgacctgcccagaatcgacgtgagcaagagagagcccccccccgtgaagcaggagctgcccccctacaacggcttcggcctggtggaggacagcgcccagaactgcttcgccctgatccccaaggcccccaagaaggacgtgatcaagatgctggtgaacgacaacaaggtgctgagatacctggccgtgctggagagccccatccccgaggacaaggacagaagattcgtgttcagctacttcctggccaccgacatgatcagcatcttcgagccccccgtgagaaacagcggcatcatcggcggcaagtacctgggcagaaccaaggtggtgaagccctacagcaccgtggacaaccccgtgtactacggccccagcgacttcttcatcggcgccgtgatcgaggtgttcggccacagattcatcatcctggacaccgacgagtacgtgctgaagtacatggagagcaacgccgcccagtacagccccgaggccctggccagcatccagaaccacgtgagaaagagagaggcccccgcccccgaggccgagagcaagcagaccgagaaggaccccggcgtgcaggagctggaggccctgatcgacaccatccagaagcagctgaaggaccacagctgcaaggacaacatcagagaggccttccagatctacgacaaggaggccagcggctacgtggacagagacatgttcttcaagatctgcgagagcctgaacgtgcccgtggacgacagcctggtgaaggagctgatcagaatgtgcagccacggcgagggcaagatcaactactacaacttcgtgagagccttcagcaactag

SEQ ID NO: 196629 - DNA, 2231 bp, Artificial Sequence
  derived and/or modified sequence
agcgttaccatggatcctggaggtgcccgcgaacactgcttgtcgcctgggcaaccggagaggacgaagcaggacctaggtggcggcggtggtaccggctgcaatggtgtccaatcccgtgcatggcttgccctttcttccgggcacgtcctttaaggactctacgaaaacagccttccacagaagtcagacgctgagctacaggaacggctatgcaattgttcgacgtccaacagttgggataggcggagaccggctccagttcaaccagctgtcccaggctgagctggatgagttggccagtaaggcaccagtcttaacttatggccaacctaaacaagccccacctgcggattttattcctgcgcatgtggcctttgacaaaaaggtactgaaatttgatgcctatttccaagaagatgttcctatgtcaactgaggaacagtataggatccgtcaggtgaacatttactattatctagaagatgacagcatgtctgtcatagagcctgttgtagaaaattctggaatccttcaaggcaagttaataaaacgccagcggctagccaagaatgaccggggtgaccattaccattggaaagacctaaatcgaggaataaacatcacaatttatggcaaaactttccgcgttgttgactgtgaccaattcacacaggtatttttagaaagccaaggaattgagttaaatccaccagagaagatggctcttgatccttacactgaactccgaaaacagcctcttcgtaagtatgtcaccccatcagactttgatcaactcaagcaatttctcacctttgacaaacaggtccttcgattctatgcaatctgggatgatacagacagcatgtatggtgaatgtcggacctacatcattcattactatcttatggatgatacggtggaaattcgagaggtccacgaacggaatgatgggagagatcctttcccactcctaatgaaccgccagcgtgtgcccaaagttttggtggaaaatgcaaagaacttccctcagtgtgtgctagaaatctctgaccaagaagtgttggaatggtatactgctaaagacttcattgttgggaagtcactcactatccttgggagaactttcttcatttatgattgtgatccatttactcgacggtattacaaagagaagtttggaatcactgatttaccacgtattgatgtgagcaagcgggaaccacctccagtaaaacaggagttgcctccttataacggttttggactagtggaagattctgctcagaattgttttgctctcattccaaaagctccaaaaaaagacgttattaaaatgctggtgaatgataacaaggtgcttcgttatttggctgtactggaatcccccatcccagaagacaaagaccgcagatttgtcttctcttactttctagctaccgacatgatcagtatctttgagcctcctgttcgcaattctggtatcattgggggcaagtaccttggcaggactaaagttgttaaaccatactctacagtggacaaccctgtctactatggccccagtgacttcttcattggtgctgtgattgaagtgtttggtcaccggttcatcatccttgatacagacgagtatgttttgaaatacatggagagcaacgctgcccagtattcaccagaagcactcgcgtcaattcagaaccatgtccgaaagcgagaagcgcctgctccagaagcagaaagcaagcaaactgaaaaggatccaggcgtgcaggaattggaagcattaatagacacaattcagaagcaactgaaagatcactcatgcaaagacaacattcgtgaggcatttcaaatttatgacaaggaagcttcaggatatgtggacagagacatgttctttaaaatctgtgaatcgcttaacgtcccagtggatgactccttggttaaggagttaatcaggatgtgctctcatggagaaggcaaaattaactactataactttgttcgtgctttctcaaactgacctgctgatgagaaaatgcaagacaatttttgatactggaactatgctttgaaatacaccttacactcttcatagaggcatttacagggttcctgaagttttatttctgttttggttcttctttcactcctactgaagtcgaaactaaattggatctaataggatctaagattggtgccttatttagggtgataggggtatagca

SEQ ID NO: 196630 - protein, 213 aa, Artificial Sequence
  derived and/or modified sequence
MVQSCSAYGCKNRYDKDKPVSFHKFPLTRPSLCKEWEAAVRRKNFKPTKYSSICSEHFTPDCFKRECNNKLLKENAVPTIFLCTEPHDKKEDLLEPQEQLPPPPLPPPVSQVDAAIGLLMPPLQTPVNLSVFCDHNYTVEDTMHQRKRIHQLEQQVEKLRKKLKTAQQRCRRQERQLEKLKEVVHFQKEKDDVSERGYVILPNDYFEIVEVPA

SEQ ID NO: 196631 - DNA, 642 bp, Artificial Sequence
  derived and/or modified sequence
atggtgcagagctgcagcgcctacggctgcaagaacagatacgacaaggacaagcccgtgagcttccacaagttccccctgaccagacccagcctgtgcaaggagtgggaggccgccgtgagaagaaagaacttcaagcccaccaagtacagcagcatctgcagcgagcacttcacccccgactgcttcaagagagagtgcaacaacaagctgctgaaggagaacgccgtgcccaccatcttcctgtgcaccgagccccacgacaagaaggaggacctgctggagccccaggagcagctgccccccccccccctgcccccccccgtgagccaggtggacgccgccatcggcctgctgatgccccccctgcagacccccgtgaacctgagcgtgttctgcgaccacaactacaccgtggaggacaccatgcaccagagaaagagaatccaccagctggagcagcaggtggagaagctgagaaagaagctgaagaccgcccagcagagatgcagaagacaggagagacagctggagaagctgaaggaggtggtgcacttccagaaggagaaggacgacgtgagcgagagaggctacgtgatcctgcccaacgactacttcgagatcgtggaggtgcccgcctag

SEQ ID NO: 196632 - DNA, 642 bp, Artificial Sequence
  derived and/or modified sequence
atggtgcagagctgttctgcatacggctgtaaaaatcggtacgacaaagataaacctgtttccttccacaaattccccctgacaagaccatctctttgcaaggaatgggaggccgccgttcgaaggaaaaatttcaagcctacaaagtacagctcaatttgttcggagcactttactccggattgcttcaagcgcgagtgcaataacaagctgttaaaggagaacgcagtgcccaccatttttctgtgtacggagccccacgacaaaaaggaggacctcttggagcctcaggagcagttaccaccgccacctttgcctccaccagtttcgcaagtcgacgctgccattggacttctgatgccccctctccagacccccgtcaatctgagtgtgttttgcgaccataactataccgtggaggacaccatgcaccagagaaagaggatacatcagcttgagcaacaggtggagaagcttaggaaaaaactcaagactgctcagcagcggtgtaggcgacaggagcggcagctggaaaaacttaaggaggttgttcactttcagaaggaaaaagatgatgtatcggagcgaggatacgtcattctccccaacgactactttgaaatcgtagaggtacctgcctag

SEQ ID NO: 196633 - DNA, 642 bp, Artificial Sequence
  derived and/or modified sequence
atggtgcagagctgcagcgcctacggctgcaagaacagatatgacaaggacaagcctgtgtccttccacaagttccccctgacccggcccagcctgtgcaaggagtgggaggccgctgtgcggaggaagaacttcaagcccaccaagtacagcagcatctgcagcgagcacttcaccccagactgcttcaagcgggagtgcaacaacaagctgctgaaggaaaatgctgtgcccaccatcttcctgtgcacagagccccatgacaagaaggaggacctgctggagccccaggagcagctgcccccaccacccctgcccccacctgtgtcccaggtggatgctgccatcggcctgctgatgccacccctgcagacccctgtgaacctgagcgtcttctgtgaccacaactacacagtggaggacaccatgcaccagaggaagaggatccaccagctggagcagcaggtggagaagctgaggaagaagctgaagacagcccagcagcgctgccggcggcaggagcggcagctggagaagctgaaggaggtggtgcacttccagaaggagaaggatgatgtgtctgagcggggctacgtgatcctgcccaatgactactttgagatcgtggaggtgcctgcctag

SEQ ID NO: 196634 - DNA, 642 bp, Artificial Sequence
  derived and/or modified sequence
atggtgcagagctgcagcgcctacggctgcaagaaccggtacgacaaagataagccggtgagctttcacaagtttccacttacccggccatcattgtgtaaggaatgggaggcagctgtgagaaggaagaatttcaaacctaccaaatatagcagcatctgctccgagcatttcaccccagactgcttcaaaagggagtgtaataataagctgctgaaagaaaacgcggtgccgacaatcttcctgtgtacagagccccacgacaagaaggaagacctcctcgagccccaggagcagttgcctcccccccccttgcctccccccgttagtcaagtcgacgccgccattggtttgcttatgccaccactccagacaccggtaaatctttctgtcttttgtgaccataattataccgtggaggataccatgcatcaaagaaagcgcatccatcaactcgaacagcaggtggagaagttgcgtaagaaactaaaaaccgcccagcagaggtgcagacgccaggaacgacagctggagaagcttaaggaagtggtgcatttccaaaaggaaaaagatgacgtgtctgagagaggatatgtgattctccccaatgactactttgaaatcgtggaagtaccggcttag

SEQ ID NO: 196635 - DNA, 642 bp, Artificial Sequence
  derived and/or modified sequence
atggtacaatcgtgttcagcgtatggatgcaaaaacaggtacgacaaggataagccagttagcttccacaaattcccgctgactagaccatcactttgcaaggaatgggaggccgcagtccgcaggaaaaatttcaagcccaccaaatattcctccatttgttccgaacattttacccctgactgcttcaaacgcgagtgtaacaataagctgctgaaagagaacgcggtgccaactattttcttgtgcaccgaaccgcatgataaaaaggaggacctgctcgagccacaggaacagctgccaccgcctccactcccccctcccgtgtctcaagtggacgctgccatcggcctgctcatgccaccactccagactccggtgaacctgtccgtcttttgcgaccacaattacactgtagaagacaccatgcaccagcggaaacgaatccaccagctagagcagcaggtggagaaacttagaaaaaagttgaaaaccgcccagcagcggtgtcggcgacaggagaggcaactcgagaagctgaaagaagtcgtgcacttccagaaagaaaaagacgatgtgtcggagcgcggttacgtgattctccctaatgattatttcgaaattgtggaggtgcctgcatag

SEQ ID NO: 196636 - DNA, 2161 bp, Artificial Sequence
  derived and/or modified sequence
gaagctgcctccgccatcttggagatgggagacgggcgatggctgtggtccttctgctaatgcaaacaacaaaacgggcacactagtcacccccgagggaggccaccatcactgtaactgttggccaaagctacaaaagaagcgagggaatccaaccgagcgcagcgacactgagaacagcttcccctgccttctgcggcggcagaagtgaagtgcctgaggaccggaaggatggtgcagtcctgctccgcctacggctgcaagaaccgctacgacaaggacaagcccgtttctttccacaagtttcctcttactcgacccagtctttgtaaagaatgggaggcagctgtcagaagaaaaaactttaaacccaccaagtatagcagtatttgttcagagcactttactccagactgctttaagagagagtgcaacaacaagttactgaaagagaatgctgtgcccacaatatttctttgtactgagccacatgacaagaaagaagatcttctggagccacaggaacagcttcccccacctcctttaccgcctcctgtttcccaggttgatgctgctattggattactaatgccgcctcttcagacccctgttaatctctcagttttctgtgaccacaactatactgtggaggatacaatgcaccagcggaaaaggattcatcagctagaacagcaagttgaaaaactcagaaagaagctcaagaccgcacagcagcgatgcagaaggcaagaacggcagcttgaaaaattaaaggaggttgttcacttccagaaagagaaagacgacgtatcagaaagaggttatgtgattctaccaaatgactactttgaaatagttgaagtaccagcataaaaaaatgaaatgtgtattgatttctaatggggcaataccacatatcctcctctagcctgtaaaggagtttcatttaaaaaaataacatttgattacttatataaaaacagttcagaatatttttttaaaaaaaattctatatatactgtaaaattataaatttttttgtttgtaatttcaggttttttacattttaacaaaatattttaaaagttataaactaacctcagacctctaatgtaagttggtttcaagattggggattttggggtttttttttagtatttatagaaataatgtaaaaataaaaagtaaagagaatgagaacagtgtggtaaaagggtgatttcagtttaaaacttaaaattagtactgttttattgagagaatttagttatattttaaatcagaagtatgggtcagatcatgggacataacttcttagaatatatatatacatatgtacatattctcatatgtaaagtcacaaggttcatttatctttctgaatcagttatcaaagataaattggcaagtcagtacttaagaaaaaagatttgattatcatcacagcagaaaaaagtcattgcatatctgatcaataacttcagattctaagagtggattttttttttttacatgggctcctattttttcccctactgtcttgcattataaaattagaagtgtattttcagtggaagaaacatttttcaataaataaagtaaggcattgtcatcaatgaagtaattaaaactgggacctgatctatgatacgcttttttctttcattacaccctagctgaaggacatccagttccccagctgtagttatgtatctgccttcaagtctctgacaaatgtgctgtgttagtagagtttgatttgtatcatatgataatcttgcacttgactgagttgggacaaggcttcacataaaaaattatttcttcacttttaacacaagttagaaattatatcccatttagttaagtgcgtgatttatattcagaacaacctactatgtagcgtttattttactgaatgtggagatttaaacactgaggtttctgttcaaactgtgagttctgttctttgtgagaaattttacatatattggaagtgaaaatatgttctgagtaaacaaatattgctatgggagttatctttttagatttagaataactgttccaatgataattattacttttatatttcaaagtacactaagatcgttgaagagcaatagaacctttaagacagtattaaaggtgtgaaacaatggca

SEQ ID NO: 196637 - DNA, 1943 bp, Artificial Sequence
  derived and/or modified sequence
ggagatgggagacgggcgatggctgtggtccttctgctaatgcaaacaacaaaacgggcacactagtcacccccgagggaggccaccatcactgtaactgttggccaaagctacaaaagaagcgagggaatccaaccgagcgcagcgacactgagaacagcttcccctgccttctgcggcggcagaagtgaagtgcctgaggaccggaaggatggtgcagtcctgctccgcctacggctgcaagaaccgctacgacaaggacaagcccgtttctttccacaaaaagaagatcttctggagccacaggaacagcttcccccacctcctttaccgcctcctgtttcccaggttgatgctgctattggattactaatgccgcctcttcagacccctgttaatctctcagttttctgtgaccacaactatactgtggaggatacaatgcaccagcggaaaaggattcatcagctagaacagcaagttgaaaaactcagaaagaagctcaagaccgcacagcagcgatgcagaaggcaagaacggcagcttgaaaaattaaaggaggttgttcacttccagaaagagaaagacgacgtatcagaaagaggttatgtgattctaccaaatgactactttgaaatagttgaagtaccagcataaaaaaatgaaatgtgtattgatttctaatggggcaataccacatatcctcctctagcctgtaaaggagtttcatttaaaaaaataacatttgattacttatataaaaacagttcagaatatttttttaaaaaaaattctatatatactgtaaaattataaatttttttgtttgtaatttcaggttttttacattttaacaaaatattttaaaagttataaactaacctcagacctctaatgtaagttggtttcaagattggggattttggggtttttttttagtatttatagaaataatgtaaaaataaaaagtaaagagaatgagaacagtgtggtaaaagggtgatttcagtttaaaacttaaaattagtactgttttattgagagaatttagttatattttaaatcagaagtatgggtcagatcatgggacataacttcttagaatatatatatacatatgtacatattctcatatgtaaagtcacaaggttcatttatctttctgaatcagttatcaaagataaattggcaagtcagtacttaagaaaaaagatttgattatcatcacagcagaaaaaagtcattgcatatctgatcaataacttcagattctaagagtggattttttttttttacatgggctcctattttttcccctactgtcttgcattataaaattagaagtgtattttcagtggaagaaacatttttcaataaataaagtaaggcattgtcatcaatgaagtaattaaaactgggacctgatctatgatacgcttttttctttcattacaccctagctgaaggacatccagttccccagctgtagttatgtatctgccttcaagtctctgacaaatgtgctgtgttagtagagtttgatttgtatcatatgataatcttgcacttgactgagttgggacaaggcttcacataaaaaattatttcttcacttttaacacaagttagaaattatatcccatttagttaagtgcgtgatttatattcagaacaacctactatgtagcgtttattttactgaatgtggagatttaaacactgaggtttctgttcaaactgtgagttctgttctttgtgagaaattttacatatattggaagtgaaaatatgttctgagtaaacaaatattgctatgggagttatctttttagatttagaataactgttccaatgataattattacttttatatttcaaagtacactaagatcgttgaagagcaatagaacctttaagacagtattaaaggtgtgaaacaatgg

SEQ ID NO: 196638 - protein, 582 aa, Artificial Sequence
  derived and/or modified sequence
MAVPGVGLLTRLNLCARRRTRVQRPIVRLLSCPGTVAKDLRRDEQPSGSVETGFEDKIPKRRFSEMQNERREQAQRTVLIHCPEKISENKFLKYLSQFGPINNHFFYESFGLYAVVEFCQKESIGSLQNGTHTPSTAMETAIPFRSRFFNLKLKNQTSERSRVRSSNQLPRSNKQLFELLCYAESIDDQLNTLLKEFQLTEENTKLRYLTCSLIEDMAAAYFPDCIVRPFGSSVNTFGKLGCDLDMFLDLDETRNLSAHKISGNFLMEFQVKNVPSERIATQKILSVLGECLDHFGPGCVGVQKILNARCPLVRFSHQASGFQCDLTTNNRIALTSSELLYIYGALDSRVRALVFSVRCWARAHSLTSSIPGAWITNFSLTMMVIFFLQRRSPPILPTLDSLKTLADAEDKCVIEGNNCTFVRDLSRIKPSQNTETLELLLKEFFEYFGNFAFDKNSINIRQGREQNKPDSSPLYIQNPFETSLNISKNVSQSQLQKFVDLARESAWILQQEDTDRPSISSNRPWGLVSLLLPSAPNRKSFTKKKSNKFAIETVKNLLESLKGNRTENFTKTSGKRTISTQT

SEQ ID NO: 196639 - protein, 712 aa, Artificial Sequence
  derived and/or modified sequence
MAWAKKVGGRAGQGRSLSRCDPIILDPEWLYGPPEGEGGPEGVGGETRASIHPPLRTGRHHQKVNHNIRGPEGSAKDAAPGGGGHHQAGPGQRGDEDGALQHLCGGGGGVGVSVGRGTGTSVAAEHPSLQVKLLELQELVLRLAGDHNEGHGKFLAAAQNPADDPAPGAPAPQELGAADKQGGFEDKIPKRRFSEMQNERREQAQRTVLIHCPEKISENKFLKYLSQFGPINNHFFYESFGLYAVVEFCQKESIGSLQNGTHTPSTAMETAIPFRSRFFNLKLKNQTSERSRVRSSNQLPRSNKQLFELLCYAESIDDQLNTLLKEFQLTEENTKLRYLTCSLIEDMAAAYFPDCIVRPFGSSVNTFGKLGCDLDMFLDLDETRNLSAHKISGNFLMEFQVKNVPSERIATQKILSVLGECLDHFGPGCVGVQKILNARCPLVRFSHQASGFQCDLTTNNRIALTSSELLYIYGALDSRVRALVFSVRCWARAHSLTSSIPGAWITNFSLTMMVIFFLQRRSPPILPTLDSLKTLADAEDKCVIEGNNCTFVRDLSRIKPSQNTETLELLLKEFFEYFGNFAFDKNSINIRQGREQNKPDSSPLYIQNPFETSLNISKNVSQSQLQKFVDLARESAWILQQEDTDRPSISSNRPWGLVSLLLPSAPNRKSFTKKKSNKFAIETVKNLLESLKGNRTENFTKTSGKRTISTQT

SEQ ID NO: 196640 - protein, 219 aa, Artificial Sequence
  derived and/or modified sequence
MQNERREQAQRTVLIHCPEKISENKFLKYLSQFGPINNHFFYESFGLYAVVEFCQKESIGSLQNGTHTPSTAMETAIPFRSRFFNLKLKNQTSERSRVRSSNQLPRSNKQLFELLCYAESIDDQLNTLLKEFQLTEENTKLRYLTCSLIEDMAAAYFPDCIVRPFGSSVNTFGKLGCDLDMFLDLDETRNLSAHKISGNFLMEFQVKNVPSERIATQKI

SEQ ID NO: 196641 - protein, 150 aa, Artificial Sequence
  derived and/or modified sequence
DLRRDEQPSGSVETGFEDKIPKRRFSEMQNERREQAQRTVLIHCPEKISENKFLKYLSQFGPINNHFFYESFGLYAVVEFCQKESIGSLQNGTHTPSTAMETAIPFRSRFFNLKLKNQTSERSRVRSSNQLPRSNKQLFELLCYAESVSF

SEQ ID NO: 196642 - DNA, 1749 bp, Artificial Sequence
  derived and/or modified sequence
atggccgtccctggggttggacttctgacccgactgaatttatgtgcacgccggagaacccgtgtgcagagaccgattgttaggctcctctcttgtcccggaacagtggctaaggaccttcgacgagatgagcagccctcaggatcagtggagactggattcgaagataaaatacctaaacggcggttctcagagatgcagaacgaacggcgtgagcaggcgcaacggactgtgctgatccactgcccggagaaaattagtgaaaataagttccttaagtacctatctcagttcggacccatcaataaccacttcttctatgaaagcttcggcctctatgccgtggtggaattttgtcaaaaggagtccatagggtctctgcagaatggcacacacactccttctacggcaatggagactgcaatacctttcaggagccggtttttcaacctaaagctgaagaatcagacctccgagaggagcagagtgagatcctccaaccagttgccacgctccaataaacagctattcgagcttctgtgctatgcagaatccattgatgatcaattgaatactctcctgaaggagtttcagctgacagaggagaatacaaaactcaggtaccttacgtgttctctgattgaagatatggcagcagcttatttcccggattgcatcgtgaggccattcggatcctcagtcaacaccttcgggaagctgggatgcgacttagatatgttcttagaccttgatgaaacgcggaatctgagcgcacacaaaatctcagggaactttcttatggaattccaagtaaagaacgtcccctccgagcggatcgctactcagaaaatactgagcgttctgggggaatgtcttgatcatttcgggcctggatgtgtgggagtccagaagatcttgaatgcacgctgtcccctggtcaggttcagccaccaggcatctggctttcagtgcgatctgactactaataatcgtatcgcactaacatcctccgagctcctgtacatatacggagcattagacagtcgggtgcgagctcttgtgttttcggtgcggtgctgggcccgcgcccactccctcaccagctcgattccaggggcgtggattacaaatttctctctgaccatgatggtcattttcttccttcagcgtagatcccccccgatcctgcctacacttgattctctcaaaacactggctgatgccgaagataagtgtgtcatcgagggcaataactgcactttcgtgcgggatctatcccggatcaaaccatcccagaataccgagacacttgaactgctcctgaaggagttcttcgagtatttcggcaatttcgcatttgacaaaaatagtattaacatcaggcaaggcagggagcagaataaaccagactcatcacctctatacatccagaatccgttcgagaccagcttaaacatcagcaagaacgtttcacagagtcaactccagaaattcgtcgatctggcaagggagtcagcgtggatactccaacaggaggataccgaccgtccgtcaatctctagtaatcgcccctggggcttggtttcattactccttccctccgcaccaaatcggaagtcttttacaaagaagaaatccaacaagtttgcaattgagacagttaaaaatttactggagagcctcaaaggaaaccggactgaaaacttcacgaagactagcggcaagagaacaataagcacacaaacatag

SEQ ID NO: 196643 - DNA, 2139 bp, Artificial Sequence
  derived and/or modified sequence
atggcctgggcgaagaaggttggcgggagagctgggcagggtcgttctttgtcacgatgcgacccaattattctggaccccgaatggctctacggtccacccgaaggggagggagggcccgaaggggtaggaggagaaacccgggcatcaatccatcccccgcttcgcactggaaggcaccaccagaaggtcaatcacaacatcagaggacctgagggaagtgccaaggacgccgctccggggggcggcgggcaccatcaggccggcccaggccaaaggggcgacgaagatggagcactgcaacacctatgtggtggcggcggtggagtcggtgtgtcagtcgggagagggaccggtactagcgtggccgctgagcacccaagcctgcaggtcaagttactggaactacaggagcttgtgctcagactggctggagaccacaacgagggacacgggaagtttctcgccgcagcccagaacccggctgatgaccccgcacccggtgcacccgcccctcaggaacttggcgccgccgacaaacagggcggattcgaggataagatcccaaagaggcggttttccgagatgcagaatgagaggagggaacaggcccagaggaccgttcttatccactgccctgaaaagatcagcgaaaataaattcctgaaatacctatcccaatttgggcctataaacaaccacttcttttatgagtcctttggcctctacgctgtggtcgagttctgtcagaaggagtctatcggcagcctccagaatggaacccatacaccgtccaccgcaatggaaactgccatcccctttcgtagtaggttcttcaacttgaagttgaagaatcaaacttccgaacgttctcgagtccggtcttctaatcagctgccacggtctaataaacagctctttgaattgctttgctacgcggaatcaatcgatgatcagctgaacaccctgcttaaggagttccaactcacagaggagaataccaagctccgctatttaacatgttcattaatcgaagatatggctgccgcttatttcccagactgcatcgtaaggccctttggctccagcgtgaatacctttggcaagctcggatgcgacctggatatgtttttggacctggacgagaccagaaatctgtccgcccataagatctcgggtaatttcttgatggaatttcaggttaagaatgtcccaagcgagaggattgccacccagaagatcctttctgtactcggcgagtgtctggaccattttgggcccggttgtgtgggtgtccagaaaattttgaacgcacgttgtcctctggtgagatttagccatcaagccagcggcttccagtgcgacctcacaaccaacaatcggatcgcactgacttcttcggagctcctttacatttacggtgcgctcgacagtagggtacgggcactggtgtttagcgtgcggtgctgggccagggctcactcactcacatcctctatcccgggcgcctggatcactaatttcagccttaccatgatggtaatattttttctacaaagacggtcccctcctattctacctactctggactctctgaagacactggctgatgcagaggacaaatgcgtgatcgaggggaataactgtacctttgtgagagatctctcacgaatcaaaccatctcaaaacactgaaacccttgagctgcttttaaaggaattcttcgagtatttcggaaactttgcctttgataagaatagcattaacatccgccaaggcagagaacagaacaaacctgattctagtccattgtacattcagaacccttttgaaacctccctcaacatctctaagaacgtctcccagagccagctgcaaaagttcgtggatctggcccgagaatcagcttggattctacagcaagaagataccgatagacctagcatctcttctaatcgcccttggggcctggtctcactgctgctgcctagcgccccgaacaggaaatcctttaccaaaaagaagtccaacaagtttgcgattgagactgtcaagaatttgctggagagcctgaaagggaaccggactgagaactttaccaagacaagtggcaagcggacaatctctacccagacatag

SEQ ID NO: 196644 - DNA, 660 bp, Artificial Sequence
  derived and/or modified sequence
atgcaaaacgaacggcgggagcaggctcagaggactgttcttattcattgtcctgagaagatatcggaaaacaagtttttgaagtatctgagtcagttcggacctattaacaaccacttcttctacgagagctttggcctgtatgcagtcgtcgaattctgtcagaaagagtccatcgggagtcttcagaatggcacccatacgccatctactgctatggaaacggccatcccatttcgaagtcgtttctttaacttaaaattaaaaaatcagaccagcgagcgcagcagggtacgctcctccaatcagttacctcgcagtaataagcagcttttcgagctgctgtgttacgccgagtcaatcgacgaccagctgaatactctgctcaaagaatttcaactgactgaggaaaacacgaaactcagatacttgacatgcagtttgatcgaagacatggcagcggcttacttccctgattgcattgtgcggcctttcggatcctctgtgaacactttcgggaaactggggtgcgacctcgatatgttccttgatctcgatgaaactcgcaacctctctgctcacaagatctcggggaatttcttgatggagtttcaggttaagaacgtaccgagtgagagaatcgccactcagaagatatag

SEQ ID NO: 196645 - DNA, 453 bp, Artificial Sequence
  derived and/or modified sequence
gatctgcggcgggatgaacagccttccgggtccgtggaaacaggctttgaagataagattccaaaacggagattctccgaaatgcagaatgagagaagagagcaggctcagaggaccgtattaatccactgtccagagaaaattagtgagaataaattcttaaaatatctatcacagtttggacccataaataaccactttttttacgagtcctttggcctttatgccgtcgtcgagttctgccaaaaggaaagtatcggttcccttcagaacggaacccacacaccaagcaccgctatggaaactgccataccgtttagatctcggttcttcaatctgaagcttaagaaccagaccagtgaacgtagccgcgtgaggtcttccaaccagctgcctagaagcaacaaacaactattcgagctgttgtgctatgctgagtctgtatccttctag

SEQ ID NO: 196646 - DNA, 1749 bp, Artificial Sequence
  derived and/or modified sequence
atggctgtgcctggggtgggcctgctgacccggctgaacctgtgtgcccggcggaggaccagggtgcagaggcccatcgtgcggctgctgagctgccccggcaccgtggccaaggacctgcggagagatgagcagcccagcggctctgtggagaccggctttgaggacaagatccccaagaggcgcttcagcgagatgcagaatgaaagaagagagcaggcccagaggacagtgctgatccactgcccagagaagatcagcgagaacaagttcctgaagtacctgagccagtttggccccatcaacaaccacttcttctatgagagctttggcctgtatgctgtggtggagttctgccagaaggagagcatcggcagcctgcagaatggcacccacacccccagcacagccatggagacagccatccccttccgcagccgcttcttcaacctgaagctgaagaaccagaccagcgagaggagccgggtgcgcagcagcaaccagctgcccaggagcaacaagcagctgtttgagctgctgtgctacgccgagagcattgatgaccagctgaacaccctgctgaaggagttccagctgacagaggagaacaccaagctgcgctacctgacctgcagcctgattgaggacatggctgctgcctacttcccagactgcatcgtgcggcccttcggcagctctgtgaacaccttcggcaagctgggctgtgacctggacatgttcctggacctggatgagaccaggaacctgagcgcccacaagatcagcggcaacttcctgatggagttccaggtgaagaatgtgcccagcgagagaattgccacccagaagatcctgtctgtgctgggggagtgcctggaccactttggacctggctgtgtgggcgtgcagaagatcctgaatgcccgctgccccctggtgcgcttcagccaccaggccagcggcttccagtgtgacctgaccaccaacaaccgcatcgccctgaccagcagcgagctgctgtacatctatggagccctggacagccgggtgcgggccctggtgttttctgtgcgctgctgggcccgggcccacagcctgaccagcagcatccctggggcctggatcaccaacttcagcctgaccatgatggtgatcttcttcctgcagaggaggagcccccccatcctgcccaccctggacagcctgaagaccctggctgatgctgaagataaatgtgtgattgagggcaacaactgcacctttgtgcgggacctgagccgcatcaagcccagccagaacacagagaccctggagctgctgctgaaggagttctttgagtacttcggcaactttgcctttgacaagaacagcatcaacatccggcagggccgggagcagaacaagccagacagcagccccctgtacatccagaacccctttgagaccagcctgaacatcagcaagaatgtgtcccagagccagctgcagaagtttgtggacctggcccgggagagcgcctggatcctgcagcaggaggacacagaccggcccagcatcagcagcaaccggccctggggcctggtgtccctgctgctgcccagcgcccccaacaggaagagcttcaccaagaagaagagcaacaagtttgccattgaaacagtgaagaacctgctggagagcctgaagggcaacagaacagagaacttcaccaagaccagcggcaagaggaccatcagcacccagacctag

SEQ ID NO: 196647 - DNA, 2139 bp, Artificial Sequence
  derived and/or modified sequence
atggcctgggccaagaaggtgggcggccgggccggccagggccgcagcctgagccgctgtgaccccatcatcctggaccctgagtggctgtatggccccccagagggggagggcggccctgagggcgtgggcggggagacccgggccagcatccacccccccctgaggacaggccgccaccaccagaaggtgaaccacaacatccggggccctgagggcagcgccaaggatgctgcccctgggggcggcggccaccaccaggccggccctggccagagaggagatgaagatggagccctgcagcacctgtgtggcggcggcggcggcgtgggcgtgtctgtgggccggggcaccggcacctctgtggccgctgagcaccccagcctgcaggtgaagctgctggagctgcaggagctggtgctgcggctggccggggaccacaatgaaggacatggcaagttcctggccgccgcccagaacccagcagatgatcctgcccctggggccccagccccccaggagctgggcgctgctgacaagcagggcggctttgaggacaagatccccaagaggcgcttcagcgagatgcagaatgaaagaagagagcaggcccagaggacagtgctgatccactgcccagagaagatcagcgagaacaagttcctgaagtacctgagccagtttggccccatcaacaaccacttcttctatgagagctttggcctgtatgctgtggtggagttctgccagaaggagagcatcggcagcctgcagaatggcacccacacccccagcacagccatggagacagccatccccttccgcagccgcttcttcaacctgaagctgaagaaccagaccagcgagaggagccgggtgcgcagcagcaaccagctgcccaggagcaacaagcagctgtttgagctgctgtgctacgccgagagcattgatgaccagctgaacaccctgctgaaggagttccagctgacagaggagaacaccaagctgcgctacctgacctgcagcctgattgaggacatggctgctgcctacttcccagactgcatcgtgcggcccttcggcagctctgtgaacaccttcggcaagctgggctgtgacctggacatgttcctggacctggatgagaccaggaacctgagcgcccacaagatcagcggcaacttcctgatggagttccaggtgaagaatgtgcccagcgagagaattgccacccagaagatcctgtctgtgctgggggagtgcctggaccactttggacctggctgtgtgggcgtgcagaagatcctgaatgcccgctgccccctggtgcgcttcagccaccaggccagcggcttccagtgtgacctgaccaccaacaaccgcatcgccctgaccagcagcgagctgctgtacatctatggagccctggacagccgggtgcgggccctggtgttttctgtgcgctgctgggcccgggcccacagcctgaccagcagcatccctggggcctggatcaccaacttcagcctgaccatgatggtgatcttcttcctgcagaggaggagcccccccatcctgcccaccctggacagcctgaagaccctggctgatgctgaagataaatgtgtgattgagggcaacaactgcacctttgtgcgggacctgagccgcatcaagcccagccagaacacagagaccctggagctgctgctgaaggagttctttgagtacttcggcaactttgcctttgacaagaacagcatcaacatccggcagggccgggagcagaacaagccagacagcagccccctgtacatccagaacccctttgagaccagcctgaacatcagcaagaatgtgtcccagagccagctgcagaagtttgtggacctggcccgggagagcgcctggatcctgcagcaggaggacacagaccggcccagcatcagcagcaaccggccctggggcctggtgtccctgctgctgcccagcgcccccaacaggaagagcttcaccaagaagaagagcaacaagtttgccattgaaacagtgaagaacctgctggagagcctgaagggcaacagaacagagaacttcaccaagaccagcggcaagaggaccatcagcacccagacctag

SEQ ID NO: 196648 - DNA, 660 bp, Artificial Sequence
  derived and/or modified sequence
atgcagaatgaaagaagagagcaggcccagaggacagtgctgatccactgcccagagaagatcagcgagaacaagttcctgaagtacctgagccagtttggccccatcaacaaccacttcttctatgagagctttggcctgtatgctgtggtggagttctgccagaaggagagcatcggcagcctgcagaatggcacccacacccccagcacagccatggagacagccatccccttccgcagccgcttcttcaacctgaagctgaagaaccagaccagcgagaggagccgggtgcgcagcagcaaccagctgcccaggagcaacaagcagctgtttgagctgctgtgctacgccgagagcattgatgaccagctgaacaccctgctgaaggagttccagctgacagaggagaacaccaagctgcgctacctgacctgcagcctgattgaggacatggccgccgcctacttcccagactgcatcgtgcggcccttcggcagctctgtgaacaccttcggcaagctgggctgtgacctggacatgttcctggacctggatgagaccaggaacctgagcgcccacaagatcagcggcaacttcctgatggagttccaggtgaagaatgtgcccagcgagcgcatcgccacccagaagatctag

SEQ ID NO: 196649 - DNA, 453 bp, Artificial Sequence
  derived and/or modified sequence
gacctgcggagagatgagcagcccagcggctctgtggagaccggctttgaggacaagatccccaagaggcgcttcagcgagatgcagaatgaaagaagagagcaggcccagaggacagtgctgatccactgcccagagaagatcagcgagaacaagttcctgaagtacctgagccagtttggccccatcaacaaccacttcttctatgagagctttggcctgtatgctgtggtggagttctgccagaaggagagcatcggcagcctgcagaatggcacccacacccccagcacagccatggagacagccatccccttccgcagccgcttcttcaacctgaagctgaagaaccagaccagcgagaggagccgggtgcgcagcagcaaccagctgcccaggagcaacaagcagctgtttgagctgctgtgctacgccgagagcgtgtccttctag

SEQ ID NO: 196650 - DNA, 2572 bp, Artificial Sequence
  derived and/or modified sequence
agcttcgcgctagtgctgttttttttttttttttttttttagcaatggcggttcccggcgtggggctcttgacccgtttgaacctgtgtgcccggagaagaactcgagtccagcggcctatcgtcaggcttttgagttgcccaggaactgtggccaaagaccttaggagagacgagcagccttcagggagcgtggagacaggctttgaagacaagattcccaaaaggagattctctgagatgcaaaatgaaagacgagaacaggcacagcggactgttttaatacattgcccagagaaaatcagtgaaaacaagtttcttaaatatttatcccaatttggacctattaataatcatttcttctatgaaagctttggtctctatgctgtcgtagaattttgccaaaaggaaagcataggttcactgcagaatgggactcatactccaagcacggccatggagactgcaattccattcagatcacgtttcttcaatctgaagttgaaaaaccagacttctgaacggtcacgcgtacggtcaagtaatcagttgccacgttcaaacaagcagctttttgaattactttgttatgcagaaagtatagacgatcagctgaacactctcttgaaggagttccagctaacagaggagaacactaagctccgatatctcacctgttctcttattgaagacatggccgccgcgtattttccagactgcatagtcagaccctttggctcctcagtcaacacttttgggaagttaggatgtgatttggacatgtttttggatctagatgaaaccagaaacctcagcgctcacaagatctcaggaaattttctgatggaatttcaagtgaaaaatgttccttcagaaagaattgcaactcagaagatcctgtctgtgttaggagagtgccttgaccactttggccctggctgtgtgggtgtgcaaaaaatattaaatgcccggtgtccgctcgtgaggttctcacaccaggcctccggatttcagtgtgatttgactacgaacaataggattgccttgacaagttccgaactcctttatatatatggtgccctagactcaagagtgagagccttggtgttcagtgtacggtgctgggctcgagcacattcactaacaagtagtattcctggtgcatggattacaaatttctcccttacaatgatggtcatcttttttctccagagaagatcaccccctattcttccaacactagattccttaaaaaccctagcagatgcagaagataaatgtgtaatagaaggcaacaactgcacatttgttcgtgacttgagtagaattaaaccttcacagaacacagaaacattagaattactactgaaggaattttttgagtattttggcaattttgctttcgataaaaattccataaatattcgacagggaagggagcaaaacaaacctgattcttctcctctgtacattcagaatccatttgaaacttctctcaacataagcaaaaatgtaagtcaaagccagctgcaaaaatttgtagatttggcccgagaaagtgcctggattttacaacaggaagatacagatcgaccttccatatcaagtaatcggccctgggggctggtatccctattgctaccatctgctccaaacagaaagtcctttaccaagaagaaaagcaataagtttgcaattgaaacagtcaaaaacttgctagaatctttaaaaggtaacagaacagaaaatttcacaaaaaccagtgggaagagaacaattagtactcagacatgatggctgctacattgtgtaaagaactgggcttagcctatcaaatggtctgtggacttacttggaaaaactgatttgaaactttcacagatctcagctttcatctgatgtcacttttcatgatcttctcattggcccccttaacctggtctgaagttctgggatgttttcagtttgatcagtctgatactcagtggcactttattaaaacatcagctgtggagtgtggcggtgcacacctgtagtcccagctgctcaggaggctgaggcaggaggatctcttgagcccaggattttgaatccatcgtggacaacatagcaagattccatctctaaaaaaaatgaaaataaacataagccacaaggaatgggtgaaagattattgtaatgtgctttaactaaataggtaaatatactaaacaaatgctaaaactcagttttaggatgaaaccattgttgatatccacatcagtccctgtttagaaaacatttaaaatgacttttagttatgtacagtacgttggcaatgaatacattaagcttcaaaatttggtagtgctctcgaatatgtatatttgtatttttcaagcgaagttctcttattcacatataaattaaagtgggttggtactgatatcaaaaaatgtttatgtttttagaacagacatttcagtcactgcattcttaggtattccaaaccaaatatgatgacatcaatagattgcattttaaaaatattgtttgatttttctattttcaaaaataaaattctgtttctaact

SEQ ID NO: 196651 - DNA, 5947 bp, Artificial Sequence
  derived and/or modified sequence
atggcatgggccaagaaggttgggggcagagcagggcagggcaggtcgctctcaagatgtgaccccattattttggatccagagtggctttatggacctcctgaaggagaaggtggacctgaaggagtgggtggagaaactagagcttcgatccatccacctctcaggacaggcagacaccatcagaaagtaaatcacaacatacgagggccagagggcagcgccaaagacgcggcaccaggaggaggaggacatcatcaggctggcccaggacaaagaggagatgaagatggggcattgcagcacctctgtgggggtgggggtggggtgggtgtgagcgtgggcaggggcactggcaccagcgtggcagctgagcacccctcccttcaggtgaaactgctggagctgcaggagctggtgttgcggcttgcaggcgatcacaacgaggggcatggcaaattcctggccgctgcccagaaccctgctgatgatcctgctccaggggccccagcccctcaggagcttggggctgctgacaagcagggtggctttgaagacaagattcccaaaaggagattctctgagatgcaaaatgaaagacgagaacaggcacagcggactgttttaatacattgcccagagaaaatcagtgaaaacaagtttcttaaatatttatcccaatttggacctattaataatcatttcttctatgaaagctttggtctctatgctgtcgtagaattttgccaaaaggaaagcataggttcactgcagaatgggactcatactccaagcacggccatggagactgcaattccattcagatcacgtttcttcaatctgaagttgaaaaaccagacttctgaacggtcacgcgtacggtcaagtaatcagttgccacgttcaaacaagcagctttttgaattactttgttatgcagaaagtatagacgatcagctgaacactctcttgaaggagttccagctaacagaggagaacactaagctccgatatctcacctgttctcttattgaagacatggccgccgcgtattttccagactgcatagtcagaccctttggctcctcagtcaacacttttgggaagttaggatgtgatttggacatgtttttggatctagatgaaaccagaaacctcagcgctcacaagatctcaggaaattttctgatggaatttcaagtgaaaaatgttccttcagaaagaattgcaactcagaagatcctgtctgtgttaggagagtgccttgaccactttggccctggctgtgtgggtgtgcaaaaaatattaaatgcccggtgtccgctcgtgaggttctcacaccaggcctccggatttcagtgtgatttgactacgaacaataggattgccttgacaagttccgaactcctttatatatatggtgccctagactcaagagtgagagccttggtgttcagtgtacggtgctgggctcgagcacattcactaacaagtagtattcctggtgcatggattacaaatttctcccttacaatgatggtcatcttttttctccagagaagatcaccccctattcttccaacactagattccttaaaaaccctagcagatgcagaagataaatgtgtaatagaaggcaacaactgcacatttgttcgtgacttgagtagaattaaaccttcacagaacacagaaacattagaattactactgaaggaattttttgagtattttggcaattttgctttcgataaaaattccataaatattcgacagggaagggagcaaaacaaacctgattcttctcctctgtacattcagaatccatttgaaacttctctcaacataagcaaaaatgtaagtcaaagccagctgcaaaaatttgtagatttggcccgagaaagtgcctggattttacaacaggaagatacagatcgaccttccatatcaagtaatcggccctgggggctggtatccctattgctaccatctgctccaaacagaaagtcctttaccaagaagaaaagcaataagtttgcaattgaaacagtcaaaaacttgctagaatctttaaaaggtaacagaacagaaaatttcacaaaaaccagtgggaagagaacaattagtactcagacatgatggctgctacattgtgtaaagaactgggcttagcctatcaaatggtctgtggacttacttggaaaaactgatttgaaactttcacagatctcagctttcatctgatgtcacttttcatgatcttctcattggcccccttaacctggtctgaagttctgggatgttttcagtttgatcagtctgatactcagtggcactttattaaaacatcagctgtggagtgtggcggtgcacacctgtagtcccagctgctcaggaggctgaggcaggaggatctcttgagcccaggattttgaatccatcgtggacaacatagcaagattccatctctaaaaaaaatgaaaataaacataagccacaaggaatgggtgaaagattattgtaatgtgctttaactaaataggtaaatatactaaacaaatgctaaaactcagttttaggatgaaaccattgttgatatccacatcagtccctgtttagaaaacatttaaaatgacttttagttatgtacagtacgttggcaatgaatacattaagcttcaaaatttggtagtgctctcgaatatgtatatttgtatttttcaagcgaagttctcttattcacatataaattaaagtgggttggtactgatatcaaaaaatgtttatgtttttagaacagacatttcagtcactgcattcttaggtattccaaaccaaatatgatgacatcaatagattgcattttaaaaatattgtttgatttttctattttcaaaaataaaattctgtttctaactaaaatgtgatattcccagtattccttcacatctcttttgagaactcccctcttcctgcaggaaagagacatatttgtctctcagtatatgcagaaaattggttccaggaccatccacgtacacccagatctgcacacactgaactccttcagtcctgtggagcccgtgcatgggagaattccaccttgcacataagcagattttgcatcctgtgaaagtactgtattttctttctttcttttttttttttttttttttttgagacagagtctcgctctgtcgcccaggctagagtgcagtggcgcaatctcggctcactgcaagctctgcctcccaggttcacgccattctcctgcctcagcctctctgagtagctgggactataggtgcccgccaccacgcccggacaatttttttgtatttttagtagagacagggtttcaccatggtctcgatctcccgacctcgtgatcagcccacctcaacctcccaaagtgctgggattacaagcgtgagccaccatgcctggccgagaatactgtattttcaatccaagtttggttggaaaaaatctgtgtgtaaatggacttcgcagttgaaacccatgttgttcaatgggcaactgtatattgaaatttaatttccattacattctctgtggagcaacttttttgctttgtttcgttttgtttctgagacggagttttgctcttgttgcccaggctggggtgcaatggcacaatctcagctcactgcaacctccgcctcccggattcaagtgattctcctgcctcagctgggattacaggcgcccaccaccaagcccagctaatttttgtagttttagtagggacagggtttcaccatgttggccaggctgatctcgaactcctgacctcaggtgatcgcccaccttggccttccaaagtgttggaattacaggcgtgagccactgcacctggcttctgtggagtaactttctatttaagaagcaagtaaggcctgggcatagcggcacatgcctgtagtcccaggtacttgggaggccgaggcacaaggactgcttgaacctgggaggcagaggctgcagtgagctgagatcacagcactgtactccatcctgggcgacagtgagactctctcaaaggaaaagaagcaagtagtatagtgtttaaaaacagacttgagcgagactggctcaatgacaagttactcagtctcttggggcccctgtttgatctgtaaaatggggatcatgatcagatcaatgtgaggattaagcgagggatgtaggaaaatgctaggtcagtgcattttcctggcgcgaagtaaatgttacttctctttaactgttgcctttcggtgtttgtggtatgtaattaccttttttgctactcaaaattcagatttagagtttgtagtactttaaaaatttttcccatttaaattttatgtcagaaattataatgggttctgcatgggatattttaagaaactcagcattgttatgaagcaaatgaattctgtgtccttgtgtctgtgctattggattgcacatttgacaccaacaaatatcagtgttctgtacaggcgatgtctttaaaagccatttttcatttgttctttattttgttgggctagaaatccatattgatttaaaaagcttaaaaagcataaaccacttaagggtttctaaatgaaatttttttttctgttcacagatatttagtcagatattttcttttttaggttggtgctaggtgtaatatggttatttaagcacataaagtatgtgtatgggttagcattttcttttctttttggtaatttgtaggacagccttgacactaggctgttttacttttcagaatcagatttaattatgtgattaattttaaatctacaaagacttgttttttgtttttttttttgagagcaaatcttgctctgtcacccaggctagactgcagtggtgcgatctcggctcactgcaacctctgcctcctgggttcaagcgatactcctgccccagcctcccaagtaactgggattacaggcgcctgccaccatgcctagctaatttttgtatgttagtagagacggggtttcaccatgttggccaggctggtcttgaattcctgacctcaagtgatctacctgtctcagcctctcaaagtgctgggattacaggttacaggtgtgagccaccgcacctggcctacaaagacccttttttttttttttttttgagatgggtctccctctgtcacccaggctggagagtgcagtgatcttggctcactgaaacctccacttcccgggttcaggtgattcttctgcctcagcctcctgagtagctgggattacaggtgcatgccaccacacctggctaagttttctatttttagtagagatggggttttactctgttggccaggctggtctcgaactcctgacctcaggtgacctgcccacctcgccctcccaaaatgctgggattacaggcatgagccaccacgcctggctgcaaagaccttttaatacacagttttaaagtctgttcaactgaatatagactacagacaaatatattttctcataactttagtgtatcacaacccagatttttaaaatatttttattacgtgatagtgataactagcaattatttgtcattgctgtttcttaattaaaaataattgcaatgttaagtaaaacttttttcaagtttttttcttctataactattactaggctttcattcagtagctttcacctgtaatgagttttactaagtatgtgaaagtaattttgataggagactacccagatcaaaacgatttcagctatagcccactagtataattcctggagctattatccatctttagaaaatttgagaattagccagagactttctaggaaataacgattagcctgaaacgttataggaaaactgtgtgtaattatctcattcaccttcagttaccataaaggagaagggaaaataaagttgagttgaaataaga

SEQ ID NO: 196652 - DNA, 816 bp, Artificial Sequence
  derived and/or modified sequence
gatctctgtaggggaacccagggtcgccgccgttgctgaggcagaagtgagatgtgtgatgtttgtttggggcgactcctgtgtacagtaatggagttgtttagacttccatgaaattcaggctttgaagacaagattcccaaaaggagattctctgagatgcaaaatgaaagacgagaacaggcacagcggactgttttaatacattgcccagagaaaatcagtgaaaacaagtttcttaaatatttatcccaatttggacctattaataatcatttcttctatgaaagctttggtctctatgctgtcgtagaattttgccaaaaggaaagcataggttcactgcagaatgggactcatactccaagcacggccatggagactgcaattccattcagatcacgtttcttcaatctgaagttgaaaaaccagacttctgaacggtcacgcgtacggtcaagtaatcagttgccacgttcaaacaagcagctttttgaattactttgttatgcagaaagtatagacgatcagctgaacactctcttgaaggagttccagctaacagaggagaacactaagctccgatatctcacctgttctcttattgaagacatggccgccgcgtattttccagactgcatagtcagaccctttggctcctcagtcaacacttttgggaagttaggatgtgatttggacatgtttttggatctagatgaaaccagaaacctcagcgctcacaagatctcaggaaattttctgatggaatttcaagtgaaaaatgttccttcagaaagaattgcaactcagaagatc

SEQ ID NO: 196653 - DNA, 695 bp, Artificial Sequence
  derived and/or modified sequence
gaccttaggagagacgagcagccttcagggagcgtggagacaggctttgaagacaagattcccaaaaggagattctctgagatgcaaaatgaaagacgagaacaggcacagcggactgttttaatacattgcccagagaaaatcagtgaaaacaagtttcttaaatatttatcccaatttggacctattaataatcatttcttctatgaaagctttggtctctatgctgtcgtagaattttgccaaaaggaaagcataggttcactgcagaatgggactcatactccaagcacggccatggagactgcaattccattcagatcacgtttcttcaatctgaagttgaaaaaccagacttctgaacggtcacgcgtacggtcaagtaatcagttgccacgttcaaacaagcagctttttgaattactttgttatgcagaaagtgtaagtttttaggtgtacctcaacttttagaactatgtatttttttatgaacaataaagattcctgtaaaatgttcaagctacattattgtttaatgggtatagatcttcagttttacaaggtgaaaagagttacggagatgaatcgtggtggtggatgcataatgagatgaaggaaagtttttttctatttctagctttctaagaatgtcgtcatgctcaacacattgagtagatgttgagttttgacatttg

SEQ ID NO: 196654 - DNA, 1749 bp, Artificial Sequence
  derived and/or modified sequence
atggccgtgcccggcgtgggcctgctgacccggctgaacctgtgcgcaagacgccgtacccgcgttcagagaccaattgttcggctgctctcttgccccggaactgtggcaaaggacctgcggagggacgagcagccaagtgggtcagtcgagacaggatttgaggacaagatccctaagcgacgtttctctgaaatgcagaatgagcgtagagagcaagcccagaggactgttttgatccactgccctgagaagatttcagaaaacaaattccttaaatacctaagccaattcggacccattaacaatcacttcttttatgagtctttcggcctgtatgcagtcgttgagttctgtcagaaagaatctattggttctctccagaatggcacacacaccccttccacagcaatggagaccgccattccctttcgctccaggtttttcaacttgaagctaaaaaatcaaacctctgagaggtctcgcgtccgctcatctaaccagctgcctcgctcaaacaaacaactcttcgaactactctgttacgccgagtctattgacgaccagcttaacacgctgttaaaggagttccagcttacagaggaaaacaccaagctgcggtatctgacttgcagtctgatcgaggacatggccgccgcctatttcccagattgcattgtccggcctttcggtagctcggtcaacaccttcggtaaactggggtgtgatttagatatgttcctggatttggatgagacccggaacctgagcgcccataagatcagcggaaatttccttatggaattccaggtaaaaaacgtcccttccgagaggattgctactcagaagattctctctgtgcttggggagtgcctcgatcactttgggccaggctgtgtaggcgttcagaaaattctcaacgccagatgtccactcgtgcgtttcagccatcaagcctcaggattccagtgtgacctcactacaaacaatcgaattgctctgacttcttctgagcttctgtatatttacggggccttagacagcagggtgagggcacttgtcttcagtgtgagatgctgggcaagagcccacagtctgacatcatcaatccccggggcttggattaccaacttttccctgacgatgatggtcattttcttcctgcagcgacgcagtccacccatccttccgacactggacagcctcaagaccttggctgatgctgaagataagtgcgtaattgaaggaaacaattgcacatttgtgcgcgatctgagtagaataaaaccaagccaaaataccgaaaccctggagttgctgctcaaagagtttttcgaatacttcggtaattttgcgtttgataagaacagcattaatatccgccaagggcgggagcagaacaaacccgatagctcaccgctttatatacaaaaccccttcgagacgagcctgaacattagcaagaatgtgagccagagccagcttcaaaaattcgtggatcttgctagggaatcagcttggatattgcagcaggaggacaccgatcgaccttctatatcctctaatcgaccctggggactagtttccctcctgctccctagtgctccaaacagaaagagctttacgaagaagaaatctaataaatttgctatagaaacggttaagaatttgcttgagtcccttaaaggaaaccgaacagaaaatttcactaagaccagcggaaaaaggactatatccactcagacgtag

SEQ ID NO: 196655 - DNA, 2139 bp, Artificial Sequence
  derived and/or modified sequence
atggcctgggccaagaaggtgggcggccgggccggccagggccggtcactgagtcgatgcgatccgataatcctggacccggagtggctttacggtccccccgagggcgaaggtgggcccgaaggggtaggcggcgaaacccgggcctcaatccacccccccctgcgtacgggccgacatcatcagaaggtgaaccataatatccgtgggccagaaggaagtgcgaaagatgctgccccagggggggggggccatcaccaagctggccccggccagcggggtgacgaagatggagcgctgcagcacctgtgcggcgggggtggcggggtcggagtgtctgtgggaaggggtacagggacctctgtcgcagcagaacaccctagcttgcaggttaagctgcttgagctgcaggaactggtcttgcggctggcaggcgatcacaacgaaggacatgggaagtttttagccgccgcacagaatcctgcagacgacccggcccctggagcacctgcgccccaggagctcggggctgccgacaaacagggaggctttgaggataagatccctaagcgcagattttctgagatgcagaacgaaaggcgcgaacaagcccagcggacagtgctcattcattgtcccgagaagatcagcgagaacaagttcttgaagtacttgagccagttcggccccattaacaatcacttcttctatgagtcattcggtctctacgctgtggtggaattttgccagaaggaaagcatcggctcacttcagaacggcacacacacgcctagcactgctatggaaacagccattccattccgctcacgttttttcaacctgaagctcaaaaatcaaacaagcgaacgttctcgcgtgcgctccagcaaccagctaccacggagcaacaagcagctgttcgaactgctgtgttacgccgagtcaatcgacgatcagctgaacactcttcttaaagagttccagctgactgaggaaaacacgaagctccggtatctcacatgtagcttgatagaggatatggccgcagcttatttcccagactgcatagtgcgaccttttggcagctctgtcaacaccttcggcaagctggggtgtgatctcgacatgttcctcgatctggacgagactaggaatctcagcgcccataagatttcaggcaactttctgatggaatttcaggtcaagaatgtacccagtgagagaattgccacgcaaaagatcctctctgttctgggggaatgcttggatcatttcggccccggatgcgtaggcgttcaaaaaattctcaacgccagatgccctttggtaagattcagtcatcaggcgtctggctttcaatgcgatcttaccaccaataacaggatcgctctaacgtcgtctgagctgctgtacatttacggcgctctcgatagccgcgtgcgcgcactggtgttctctgtgagatgctgggcccgcgcacacagtctgacaagtagcattccgggagcgtggatcaccaacttcagcctcaccatgatggtgatttttttcctccaaaggcgaagcccccccatcctcccaacattggattctttgaaaacattggccgacgcagaggacaagtgtgttatagaaggaaacaactgcacttttgtccgagacttgagccgaatcaaaccaagtcagaatacggagaccctggagttacttttaaaggaatttttcgagtatttcggtaattttgccttcgacaagaactcaatcaatattcgacagggacgggagcagaacaagccagactcatcgcccctgtacatccaaaacccctttgaaaccagccttaacataagtaagaacgtgtcgcagtcgcagctccagaagttcgtggacctggcccgcgagtccgcatggatcctccagcaggaagacaccgacaggccgtccattagcagtaatcggccctggggactggtgtccctgctgcttccatctgcccctaacagaaagagctttactaagaaaaagagcaataagtttgctatagagactgtgaagaatctcctggagtcgctgaagggcaatagaaccgagaactttacaaaaacctctgggaagcggactatctccacgcaaacgtag

SEQ ID NO: 196656 - DNA, 660 bp, Artificial Sequence
  derived and/or modified sequence
atgcagaacgagcggcgggagcaggcccagcggaccgtgctgatccattgtcccgagaagatctccgagaacaagttcctaaagtatctgtctcagttcgggccgataaataatcactttttttatgagtcttttgggctctatgctgtagtcgagttctgtcaaaaagagtctataggcagcctgcaaaacggaacgcacactcctagcactgccatggagacagctataccgttccgcagccggttctttaatctgaagctcaagaatcaaactagtgaaagatcccgggtccgctcctcaaatcagctgcctcggagcaataagcagctcttcgaactgctttgttacgctgagtctatcgatgaccagctgaatacacttctgaaggaattccagctgactgaagagaacaccaaactgcgttatctgacatgctctctcattgaagacatggctgccgcctactttcccgactgtattgtgagaccctttgggtcatcagtaaatacttttggcaagttgggatgtgacctggacatgtttcttgacttggatgaaacaaggaacctctcagcacacaagatcagtggcaactttctgatggagtttcaggtaaaaaatgtgccttccgagagaattgcgacacagaagatctag

SEQ ID NO: 196657 - DNA, 453 bp, Artificial Sequence
  derived and/or modified sequence
gacctgcggcgggacgagcagcccagcggcagcgtggagaccggcttcgaagacaaaattcccaagcggcggttttccgagatgcaaaatgaaagacgggagcaggcacagaggactgtgctcattcactgccctgagaaaataagcgaaaacaaatttctgaaatatctgtcgcagtttgggccaattaataaccactttttttacgagtcctttggactgtatgccgtggtcgaattctgccagaaagaatcaattggatcgctgcagaatgggacccacacccccagcactgcaatggagacagccataccattcagatctcgattttttaaccttaagctgaagaaccagactagcgagcgcagccgtgtgcgctccagtaatcaattgccacgcagtaataagcagctttttgaattactctgctatgctgagtcagtgagcttctag

SEQ ID NO: 196658 - DNA, 1749 bp, Artificial Sequence
  derived and/or modified sequence
atggccgtccctggtgttggcctgctgacccgcttgaacctgtgtgcacggagacgcacgcgggtgcaaagaccgatcgtgaggctgctctcatgtcccggaaccgtggcgaaggatcttcgcagagacgagcagcccagcggatctgtggagaccggattcgaagacaaaattcctaagcggcgattttccgagatgcagaatgagcgccgagaacaggcccagcgcacagttctaatccactgtcccgagaagatctccgaaaacaaatttctgaaatatctatctcagttcggaccaattaacaaccacttcttttacgaatccttcggtctgtacgcggtcgtggaattctgccagaaagaatcaattggatctctgcagaacggaacccacaccccctctactgccatggaaactgccattccatttagatctcgtttcttcaatctgaagctaaaaaaccaaacctcagaacggtcccgcgttagatcgtctaatcagctgcctagatcaaacaagcaattgtttgaactcttatgctacgcagagtcaatagatgaccaattgaacacgttgctcaaggagtttcagttgacggaggagaacactaaactccgctacctcacttgctctcttattgaggatatggccgctgcatacttcccagattgtatcgtgcgcccttttggatcatcggtcaatacatttgggaagcttggctgcgatctcgacatgttcctcgacttagatgaaactcggaatttatctgcccacaaaatttctggtaatttcctgatggagtttcaggtgaagaacgttccttcagaaagaattgccacccagaaaatcttgtctgtgctgggggaatgtctggaccatttcgggcctgggtgcgtgggcgtgcagaaaatattgaatgcacgctgcccattggtgagattcagccaccaggccagcggattccagtgcgacctcaccactaataatcgtatagcgctgaccagctccgagctgctatatatctatggagcactagattctagggtcagggctcttgtgttttccgtcaggtgctgggccagggcgcactccttaacctcttcaatacccggagcttggattacaaatttttccctcacaatgatggttattttcttcctgcagcggcgtagcccccctatcctgccgacactggactctcttaaaacgctagctgacgccgaagacaaatgtgtcatcgagggcaacaattgtacattcgtgcgcgacctctccaggatcaagccctcccagaacaccgaaactctggaactgctgctcaaggagttcttcgagtattttgggaattttgcctttgataagaactccatcaatattcggcagggtagagaacaaaataaacccgattccagcccactgtatatccagaacccgttcgagacatctctgaatatctcgaaaaatgtcagtcagtcacagctccagaagttcgtagatttagcaagagagtccgcctggatcctgcagcaggaagacactgacagacctagtatttcaagcaatcgcccatggggacttgtctccctgctactcccatctgctcccaatcgaaagagttttaccaagaagaagtcaaacaagtttgccatagaaacagtgaaaaaccttctggagtctctgaaaggtaacagaacggaaaatttcacaaagacgtcagggaaaaggaccataagtactcagacttag

SEQ ID NO: 196659 - DNA, 2139 bp, Artificial Sequence
  derived and/or modified sequence
atggcttgggcaaagaaggtgggcggtcgggctggacagggaagatctctgtcacgatgtgatccaattattctcgaccccgagtggctgtacggccctcctgaaggcgagggagggccagagggggtggggggagaaacccgagcgagtattcatcctcccctgcggacaggcaggcaccatcaaaaagtcaaccataacattaggggccctgaaggctcagccaaagacgctgcacctggcggaggcggtcatcaccaggctgggccagggcaaagaggggatgaggatggagctctacagcacctgtgcggcggtgggggaggagtcggagtgagcgtgggcagaggcacgggcactagtgtggctgccgagcatccatccctccaggtaaaattgctggaactacaagagctggtcctgcgcctggcaggtgatcacaatgaaggccacggtaaattcctggcggctgcccagaatccagcagacgaccccgctccgggagcccctgcaccccaggaattgggtgcggcagataagcagggtggattcgaagacaagatccccaaacgacgcttctcagaaatgcagaacgaacgtcgcgagcaggctcagcgcacagtgctcatacactgtcctgaaaaaatatctgaaaataaattcctgaagtacctcagccagttcggcccaatcaataaccacttcttctatgagtcgtttgggctttatgcagtggtagaattttgccagaaagagagcatcgggtccctacagaatggcacccataccccctcgacagcaatggaaaccgctatccctttcagatctaggttctttaatctaaagctcaagaatcagacgagcgagaggagccgcgtacgtagttctaaccagctgccccgtagcaataaacaactttttgagctgctctgttatgcggagagtattgatgatcagcttaacaccctgttgaaggaatttcagctcacggaagagaacacaaagctgcgatacctgacctgtagcctgattgaagatatggccgctgcatacttccccgattgcatcgtgaggccattcgggagcagcgtaaacacctttgggaagctgggctgcgatctagatatgttcctggatctggacgaaacacgaaacctgtctgctcataagatttctggcaactttcttatggagttccaggttaaaaacgtaccttctgagaggatcgcaacccagaaaatcctaagtgtcctgggtgagtgtctggatcatttcggacccggatgtgtgggcgtgcagaaaatcctcaacgccagatgccctctcgttcgatttagtcatcaagcctcgggattccaatgtgatctgaccacaaacaaccgaatcgccctgacctcaagcgaattgctgtacatctacggggcactggatagtagggtcagagctctagtgtttagcgtcaggtgttgggctcgtgcgcatagcctcaccagtagtattcccggtgcttggatcacaaacttcagcctgaccatgatggttatattctttctccagcgcagaagcccaccaatcttgcccactctcgacagtctgaaaaccctggccgatgccgaagacaagtgtgttattgagggaaataattgtacatttgtgcgggaccttagtcggatcaagcccagccagaacaccgagacactggaacttctgctcaaggaatttttcgagtacttcgggaacttcgcattcgataaaaattcaattaacattcggcagggaagggaacaaaataaacccgacagtagcccactttacattcaaaatcccttcgaaacatctctgaatatttccaagaatgtctcacaaagtcagttgcagaagttcgtcgatctcgccagggaatcggcctggattctgcagcaggaagacacggaccggccaagtatcagtagcaaccgcccatggggacttgtgagcctcctgctcccatccgccccaaaccgaaaatcgttcacaaagaagaagtctaacaagttcgctatcgaaactgtgaagaacctcctggaatccctgaagggaaaccggactgagaacttcacaaaaacatctggaaagcgaacaataagcacacaaacctag

SEQ ID NO: 196660 - DNA, 660 bp, Artificial Sequence
  derived and/or modified sequence
atgcaaaatgagcgcagggagcaggctcaaaggaccgttctcattcattgtcctgagaaaattagcgagaacaaattcctcaagtatcttagccagttcggcccaattaataaccattttttttatgagtcctttgggctgtatgcggttgtggaattttgtcagaaggaatcgattggatctctgcaaaacgggacccacaccccctcaacggcaatggaaacagctatcccattccgaagtcgttttttcaacctcaaactcaagaaccagacttcggagcgcagtagagtgcgatccagtaatcaattaccaaggagtaacaagcagctcttcgagctcttatgttatgcagaatccattgacgatcagttaaacacattacttaaagagttccagctgactgaggagaatacaaagttaagatatctgacgtgcagcctgattgaggacatggctgccgcatacttcccagattgcatagtgcgcccttttgggtcaagcgtgaacacttttgggaagttgggttgcgaccttgacatgtttctggatttggacgagaccaggaacctgtccgctcacaagattagtggtaactttctcatggaattccaggtcaaaaacgtccccagcgaacggatcgctacacagaaaatctag

SEQ ID NO: 196661 - DNA, 453 bp, Artificial Sequence
  derived and/or modified sequence
gatcttaggcgggacgagcaacccagcggaagtgtcgagaccggttttgaagacaagattcctaaacggagattttccgaaatgcagaacgagaggcgcgagcaggcccagcggacagtactgatacattgccccgagaagatttctgagaacaaattcctgaaatacctctctcagtttggtccaatcaacaatcacttcttttatgaaagttttggtctgtatgccgtggtggagttttgtcagaaagagagcatcgggtctctccagaatggcacccatacacccagcaccgctatggagaccgcaatcccatttcgatccaggtttttcaaccttaagctgaaaaaccagactagcgagcggagcagggtgaggagcagcaaccagctgcccaggtccaacaagcagctcttcgaattgctgtgttacgctgagagtgtgagcttctag

SEQ ID NO: 196662 - DNA, 1749 bp, Artificial Sequence
  derived and/or modified sequence
atggccgtgcccggcgtgggcctgctgaccagactgaacctgtgcgccagaagaagaaccagagtgcagagacccatcgtgagactgctgagctgccccggcaccgtggccaaggacctgagaagagacgagcagcccagcggcagcgtggagaccggcttcgaggacaagatccccaagagaagattcagcgagatgcagaacgagagaagagagcaggcccagagaaccgtgctgatccactgccccgagaagatcagcgagaacaagttcctgaagtacctgagccagttcggccccatcaacaaccacttcttctacgagagcttcggcctgtacgccgtggtggagttctgccagaaggagagcatcggcagcctgcagaacggcacccacacccccagcaccgccatggagaccgccatccccttcagaagcagattcttcaacctgaagctgaagaaccagaccagcgagagaagcagagtgagaagcagcaaccagctgcccagaagcaacaagcagctgttcgagctgctgtgctacgccgagagcatcgacgaccagctgaacaccctgctgaaggagttccagctgaccgaggagaacaccaagctgagatacctgacctgcagcctgatcgaggacatggccgccgcctacttccccgactgcatcgtgagacccttcggcagcagcgtgaacaccttcggcaagctgggctgcgacctggacatgttcctggacctggacgagaccagaaacctgagcgcccacaagatcagcggcaacttcctgatggagttccaggtgaagaacgtgcccagcgagagaatcgccacccagaagatcctgagcgtgctgggcgagtgcctggaccacttcggccccggctgcgtgggcgtgcagaagatcctgaacgccagatgccccctggtgagattcagccaccaggccagcggcttccagtgcgacctgaccaccaacaacagaatcgccctgaccagcagcgagctgctgtacatctacggcgccctggacagcagagtgagagccctggtgttcagcgtgagatgctgggccagagcccacagcctgaccagcagcatccccggcgcctggatcaccaacttcagcctgaccatgatggtgatcttcttcctgcagagaagaagcccccccatcctgcccaccctggacagcctgaagaccctggccgacgccgaggacaagtgcgtgatcgagggcaacaactgcaccttcgtgagagacctgagcagaatcaagcccagccagaacaccgagaccctggagctgctgctgaaggagttcttcgagtacttcggcaacttcgccttcgacaagaacagcatcaacatcagacagggcagagagcagaacaagcccgacagcagccccctgtacatccagaaccccttcgagaccagcctgaacatcagcaagaacgtgagccagagccagctgcagaagttcgtggacctggccagagagagcgcctggatcctgcagcaggaggacaccgacagacccagcatcagcagcaacagaccctggggcctggtgagcctgctgctgcccagcgcccccaacagaaagagcttcaccaagaagaagagcaacaagttcgccatcgagaccgtgaagaacctgctggagagcctgaagggcaacagaaccgagaacttcaccaagaccagcggcaagagaaccatcagcacccagacctag

SEQ ID NO: 196663 - DNA, 2139 bp, Artificial Sequence
  derived and/or modified sequence
atggcctgggccaagaaggtgggcggcagagccggccagggcagaagcctgagcagatgcgaccccatcatcctggaccccgagtggctgtacggcccccccgagggcgagggcggccccgagggcgtgggcggcgagaccagagccagcatccacccccccctgagaaccggcagacaccaccagaaggtgaaccacaacatcagaggccccgagggcagcgccaaggacgccgcccccggcggcggcggccaccaccaggccggccccggccagagaggcgacgaggacggcgccctgcagcacctgtgcggcggcggcggcggcgtgggcgtgagcgtgggcagaggcaccggcaccagcgtggccgccgagcaccccagcctgcaggtgaagctgctggagctgcaggagctggtgctgagactggccggcgaccacaacgagggccacggcaagttcctggccgccgcccagaaccccgccgacgaccccgcccccggcgcccccgccccccaggagctgggcgccgccgacaagcagggcggcttcgaggacaagatccccaagagaagattcagcgagatgcagaacgagagaagagagcaggcccagagaaccgtgctgatccactgccccgagaagatcagcgagaacaagttcctgaagtacctgagccagttcggccccatcaacaaccacttcttctacgagagcttcggcctgtacgccgtggtggagttctgccagaaggagagcatcggcagcctgcagaacggcacccacacccccagcaccgccatggagaccgccatccccttcagaagcagattcttcaacctgaagctgaagaaccagaccagcgagagaagcagagtgagaagcagcaaccagctgcccagaagcaacaagcagctgttcgagctgctgtgctacgccgagagcatcgacgaccagctgaacaccctgctgaaggagttccagctgaccgaggagaacaccaagctgagatacctgacctgcagcctgatcgaggacatggccgccgcctacttccccgactgcatcgtgagacccttcggcagcagcgtgaacaccttcggcaagctgggctgcgacctggacatgttcctggacctggacgagaccagaaacctgagcgcccacaagatcagcggcaacttcctgatggagttccaggtgaagaacgtgcccagcgagagaatcgccacccagaagatcctgagcgtgctgggcgagtgcctggaccacttcggccccggctgcgtgggcgtgcagaagatcctgaacgccagatgccccctggtgagattcagccaccaggccagcggcttccagtgcgacctgaccaccaacaacagaatcgccctgaccagcagcgagctgctgtacatctacggcgccctggacagcagagtgagagccctggtgttcagcgtgagatgctgggccagagcccacagcctgaccagcagcatccccggcgcctggatcaccaacttcagcctgaccatgatggtgatcttcttcctgcagagaagaagcccccccatcctgcccaccctggacagcctgaagaccctggccgacgccgaggacaagtgcgtgatcgagggcaacaactgcaccttcgtgagagacctgagcagaatcaagcccagccagaacaccgagaccctggagctgctgctgaaggagttcttcgagtacttcggcaacttcgccttcgacaagaacagcatcaacatcagacagggcagagagcagaacaagcccgacagcagccccctgtacatccagaaccccttcgagaccagcctgaacatcagcaagaacgtgagccagagccagctgcagaagttcgtggacctggccagagagagcgcctggatcctgcagcaggaggacaccgacagacccagcatcagcagcaacagaccctggggcctggtgagcctgctgctgcccagcgcccccaacagaaagagcttcaccaagaagaagagcaacaagttcgccatcgagaccgtgaagaacctgctggagagcctgaagggcaacagaaccgagaacttcaccaagaccagcggcaagagaaccatcagcacccagacctag

SEQ ID NO: 196664 - DNA, 660 bp, Artificial Sequence
  derived and/or modified sequence
atgcagaacgagagaagagagcaggcccagagaaccgtgctgatccactgccccgagaagatcagcgagaacaagttcctgaagtacctgagccagttcggccccatcaacaaccacttcttctacgagagcttcggcctgtacgccgtggtggagttctgccagaaggagagcatcggcagcctgcagaacggcacccacacccccagcaccgccatggagaccgccatccccttcagaagcagattcttcaacctgaagctgaagaaccagaccagcgagagaagcagagtgagaagcagcaaccagctgcccagaagcaacaagcagctgttcgagctgctgtgctacgccgagagcatcgacgaccagctgaacaccctgctgaaggagttccagctgaccgaggagaacaccaagctgagatacctgacctgcagcctgatcgaggacatggccgccgcctacttccccgactgcatcgtgagacccttcggcagcagcgtgaacaccttcggcaagctgggctgcgacctggacatgttcctggacctggacgagaccagaaacctgagcgcccacaagatcagcggcaacttcctgatggagttccaggtgaagaacgtgcccagcgagagaatcgccacccagaagatctag

SEQ ID NO: 196665 - DNA, 453 bp, Artificial Sequence
  derived and/or modified sequence
gacctgagaagagacgagcagcccagcggcagcgtggagaccggcttcgaggacaagatccccaagagaagattcagcgagatgcagaacgagagaagagagcaggcccagagaaccgtgctgatccactgccccgagaagatcagcgagaacaagttcctgaagtacctgagccagttcggccccatcaacaaccacttcttctacgagagcttcggcctgtacgccgtggtggagttctgccagaaggagagcatcggcagcctgcagaacggcacccacacccccagcaccgccatggagaccgccatccccttcagaagcagattcttcaacctgaagctgaagaaccagaccagcgagagaagcagagtgagaagcagcaaccagctgcccagaagcaacaagcagctgttcgagctgctgtgctacgccgagagcgtgagcttctag

SEQ ID NO: 196666 - protein, 326 aa, Artificial Sequence
  derived and/or modified sequence
MATNFSDIVKQGYVKMKSRKLGIYRRCWLVFRKSSSKGPQRLEKYPDEKSVCLRGCPKVTEISNVKCVTRLPKETKRQAVAIIFTDDSARTFTCDSELEAEEWYKTLSVECLGSRLNDISLGEPDLLAPGVQCEQTDRFNVFLLPCPNLDVYGECKLQITHENIYLWDIHNPRVKLVSWPLCSLRRYGRDATRFTFEAGRMCDAGEGLYTFQTQEGEQIYQRVHSATLAIAEQHKRVLLEMEKNVRLLNKGTEHYSYPCTPTTMLPRSAYWHHITGSQNIAEASSYAGEGYGAAQASSETDLLNRFILLKPKPSQGDSSEAKTPSQ

SEQ ID NO: 196667 - DNA, 981 bp, Artificial Sequence
  derived and/or modified sequence
atggccactaatttcagcgacattgtgaaacagggctacgttaaaatgaaatctaggaagttagggatctaccgtagatgttggttggtgttccggaagtcctcatcaaaaggcccccagagactcgagaagtaccctgatgagaagagtgtgtgtttgcggggatgtcccaaggtgactgaaatttcgaacgtgaaatgcgtgacacgcttgccaaaagagacaaaacggcaggctgtggcgattatttttaccgatgatagcgctcgtactttcacctgtgattcagaattagaagcagaggaatggtataaaacgctttcagtggagtgcctgggcagtcgcctcaatgacatatctctgggagagcctgacttattggcgcccggagtgcagtgcgaacagaccgacagatttaacgtttttctgctgccttgtccaaatctggatgtatatggagagtgcaagctccagattacgcacgagaatatctacctgtgggacatacataacccccgggttaaattggtgtcttggcctctttgttcgctgcgacggtacggccgggacgccacgcggttcactttcgaggcagggcggatgtgcgacgcaggagaggggctctacacgttccagacccaagagggagaacaaatctatcagcgagttcacagcgcaactctagcaattgccgagcagcacaaacgggtcctattagaaatggaaaagaatgttcggctattgaacaagggtacggaacactactcctacccctgtactcccaccacaatgctgcctcgatccgcctactggcaccatattaccggctctcagaacattgcagaagcgtcgtcctacgcaggggagggatatggagcggcccaggccagctcagaaaccgatctgctgaatcgcttcattttgctgaagccaaaaccgagccaaggcgactcctcagaagccaaaacgccctcccagtag

SEQ ID NO: 196668 - DNA, 981 bp, Artificial Sequence
  derived and/or modified sequence
atggccaccaacttcagtgacatcgtgaagcagggctacgtgaagatgaagagcaggaagctgggcatctaccgccgctgctggctggtgttcaggaagagcagcagcaagggcccccagaggctggagaagtacccagatgagaagtctgtgtgcctgcggggctgccccaaggtgacagagatcagcaatgtgaagtgtgtgacccggctgcccaaggagaccaagaggcaggccgtggccatcatcttcacagatgacagcgcccggaccttcacctgtgacagcgagctggaggccgaggagtggtacaagaccctgtctgtggagtgcctgggcagccggctgaatgacatcagcctgggggagccagacctgctggcccctggggtgcagtgtgagcagacagaccgcttcaacgtgttcctgctgccctgccccaacctggatgtgtatggagagtgcaagctgcagatcacccatgagaacatctacctgtgggacatccacaacccccgggtgaagctggtgtcctggcccctgtgcagcctgcggcgctatggaagagatgccacccgcttcacctttgaggccggccgcatgtgtgatgctggggagggcctgtacaccttccagacccaggagggggagcagatctaccagagggtgcacagcgccaccctggccatcgccgagcagcacaagagggtgctgctggagatggagaagaatgtgcggctgctgaacaagggcacagagcactacagctacccctgcacccccaccaccatgctgcccaggtctgcctactggcaccacatcaccggcagccagaacattgctgaggccagcagctatgctggggagggctatggagctgcccaggccagcagcgagacagacctgctgaaccgcttcatcctgctgaagcccaagcccagccagggcgacagcagcgaggccaagacccccagccagtag

SEQ ID NO: 196669 - DNA, 981 bp, Artificial Sequence
  derived and/or modified sequence
atggccaccaacttcagcgacatcgtgaagcagggctacgtgaagatgaagtcgcggaagttaggcatctaccggaggtgttggctcgtctttaggaagagttccagcaaaggaccccagaggctagagaaataccctgatgagaagtccgtttgtctacgcggctgccccaaggtgactgaaatcagcaacgtgaagtgcgtgacacggcttccgaaggagacaaagaggcaggccgttgcaattatctttactgacgactccgctcggactttcacttgtgacagtgaactagaggcggaggagtggtacaaaacattatcagtagaatgcttaggcagcagacttaatgacatttctctcggcgagcccgatttgctcgctcccggagtacaatgcgagcaaaccgaccggtttaacgtgttccttctgccctgccctaacttggatgtctacggggagtgtaaactgcagatcacccatgagaatatctatctgtgggatatccacaaccctagggtgaagcttgtcagctggcctctttgcagcctcaggcgctacggcagagatgccacacggtttacatttgaggccggccgcatgtgtgatgccggagagggactgtacactttccaaacccaggaaggcgaacaaatctatcagcgggtccactctgccactctagcaatcgctgagcaacacaaacgggtcctgttggagatggagaagaacgtgcggctgctcaacaagggtaccgaacactactcctacccctgcacacccacgacaatgttaccacgttccgcttattggcaccacattacagggtcccagaacattgctgaggcctcctcatacgccggggagggctacggggccgctcaggcttccagcgagacagacttattgaaccgcttcatcctgctgaagcctaagcctagtcagggggattcttcggaggctaagacccctagccagtag

SEQ ID NO: 196670 - DNA, 981 bp, Artificial Sequence
  derived and/or modified sequence
atggcaacaaatttctctgacatagtgaagcaggggtacgtgaaaatgaagtcacgtaaattggggatataccgccgttgctggcttgttttccgcaaaagctcatctaagggaccacagcgtctcgaaaaatatcctgatgagaaatccgtgtgcctgcggggatgtcccaaagtcactgaaatcagtaacgtcaagtgcgtaaccaggctcccaaaggagaccaaaagacaggcagtggccattatatttaccgacgacagcgcaaggacttttacttgcgactctgagttagaagctgaagagtggtacaagaccctgtccgtagaatgcctgggctcacggctaaacgatatctcactgggcgaacctgacctacttgcccctggtgtgcagtgtgaacagactgacagattcaacgtcttcttgctcccctgcccaaatctggacgtgtatggggagtgtaagctccagattacccatgagaacatttacctgtgggacatccacaatcctagggtgaagcttgtcagctggcctctgtgttcactgcgaagatacggacgtgatgccaccagattcacatttgaggcgggtcggatgtgcgatgcaggcgaaggactatacacattccagacacaggagggggagcagatctatcagcgggttcactccgccacactggcgatcgctgagcagcataagagggttttgctcgagatggagaaaaatgtgcggctgctcaataaggggaccgagcattattcatatccctgcacacctaccacaatgctgccgcgatcggcctactggcatcacataaccggaagccaaaacatcgctgaggcttcctcatacgctggagagggttatggagctgcccaagcctcttccgagaccgacctgcttaaccgcttcatcctcctcaagccgaaacctagccagggggacagtagcgaggccaagaccccatctcagtag

SEQ ID NO: 196671 - DNA, 981 bp, Artificial Sequence
  derived and/or modified sequence
atggccaccaacttcagcgacatcgtgaagcagggctacgtgaagatgaagagcagaaagctgggcatctacagaagatgctggctggtgttcagaaagagcagcagcaagggcccccagagactggagaagtaccccgacgagaagagcgtgtgcctgagaggctgccccaaggtgaccgagatcagcaacgtgaagtgcgtgaccagactgcccaaggagaccaagagacaggccgtggccatcatcttcaccgacgacagcgccagaaccttcacctgcgacagcgagctggaggccgaggagtggtacaagaccctgagcgtggagtgcctgggcagcagactgaacgacatcagcctgggcgagcccgacctgctggcccccggcgtgcagtgcgagcagaccgacagattcaacgtgttcctgctgccctgccccaacctggacgtgtacggcgagtgcaagctgcagatcacccacgagaacatctacctgtgggacatccacaaccccagagtgaagctggtgagctggcccctgtgcagcctgagaagatacggcagagacgccaccagattcaccttcgaggccggcagaatgtgcgacgccggcgagggcctgtacaccttccagacccaggagggcgagcagatctaccagagagtgcacagcgccaccctggccatcgccgagcagcacaagagagtgctgctggagatggagaagaacgtgagactgctgaacaagggcaccgagcactacagctacccctgcacccccaccaccatgctgcccagaagcgcctactggcaccacatcaccggcagccagaacatcgccgaggccagcagctacgccggcgagggctacggcgccgcccaggccagcagcgagaccgacctgctgaacagattcatcctgctgaagcccaagcccagccagggcgacagcagcgaggccaagacccccagccagtag

SEQ ID NO: 196672 - DNA, 2803 bp, Artificial Sequence
  derived and/or modified sequence
gtcccagccggagccccagccggagcccgatccctagccctgcggccgcgcctccctcgccgtccccgcctggagcccggcgccgccgccgccctgccgcccccgccagccgcgccgtgacgcgggcatgagcctgctccgcggcgccgctgagcaggcgctcctggcccgggcctcggcgcccagcaggcgcggggcgaaggagctgctagaacaatgctgaggcgggtgaggtgaggagcagcccctcgcggcagccccgacagagtgtctggaacaggtgattggaggagccggagacccaggcacctgggcatccttcccctcgcctctgccaggccccgcgcccctaaaaggtgggaaaaccatggcgaccaatttcagtgacatcgtcaagcaaggctacgtgaagatgaagagcaggaagctcgggatctaccggaggtgctggctggtgttccggaaatcctccagcaaggggccccagcggctggagaagtatccagatgagaagtcggtgtgcctccggggctgccccaaggtgactgagatcagcaacgtcaagtgtgttacgcggctccccaaggagaccaagcggcaggcggtggccatcatattcactgatgactcggcacgtaccttcacctgcgactcagagctagaggcagaggagtggtacaagacactatctgtggagtgtctggggtcccgcctcaacgacatcagtctgggagaacctgacctcctggccccaggggtgcagtgtgaacagacagatcgcttcaatgtcttcctgctgccctgccccaacctggacgtgtatggcgagtgcaagctgcagatcacccacgagaacatctacctctgggacatccacaacccccgtgtgaagctcgtctcgtggcccctctgctcactgcgccgctatggccgggatgccacacgctttaccttcgaggctggccggatgtgtgatgctggggaaggactctataccttccagacacaagagggggagcagatttaccagcgcgtccacagtgccaccctggccatcgcagagcagcacaagcgggtcctgctggaaatggagaagaacgtgaggctgctgaacaagggcacggaacattactcgtatccctgcacacccacgaccatgctgccgcgcagtgcctactggcaccacatcactggttcccagaacatcgccgaagcctccagctatgctggtgaggggtatggggcagcccaggccagctcggaaacagacctcctcaacagattcatcctgctaaagccaaagcccagccagggggacagcagtgaggccaagaccccatcccagtgaccacagtgctggcgagcaccgatgactgctgggggctgcctgctgcggggctggctgcagtgtaccgtggacagcctcagggggctgtcggccaagagcctggagaaagggagcaagctgccccctccttgcccccaaggatgaggctggactgaggcaaagggctggccacaccacctgagcatgtgtgaggggttggagctaccgtgggactatatactgttaatgattttaatatatatggcttatgacatactctgtatcaatgagatcccctcaccctcaccccatccttccccaccaatacacacaaattttttaatcccatgaccaggccacggtcaaggctgtttttgagtatgagtgcagtcgtgtccatcctccatggcacagccctcctgctgccaggacctgcttgaactaccagggccacaggagggggataatcagagcttgaggctggcactctgactgctggcttttcccagacagcccaagggccggaacagcaggtggcttctcagttcctctgggcctggagtgacacaggaaggatctgcacttcctctgtgctgcttgccagccttgcagttggagttttaagcagaggtgacatctggttgacgcctcaggtgaaaatctggttttaaaatgtaacttctgcacaggctccttcctgctttgtaggctgggaagatgcccctggggtaggggtgctgattacctcagccatgtggaggaaggctggagcttgttcctgccccaggaataggccaggagggaaggccgcagcaggactgccgtggggagcacccctgctgcccccctctcactgaccaggggtggacaatgcccaagcagagggagcccccttgccctgtttggccaccctctggccagccaaaagcactctgaaaccaagaccttcccatttcctcctccccacatggtgctgaggctccctgctgcaatgcaattaaagcaattgattttctagtgctggtatttgttgactaccatgcagaagggctatctttctattcacgtcaaacttttggttgtgtggggttttttgttgttttttgggttttgttttttaatactttagggtcctgatttgtgggaacagaccttcttgtaaataaccactatttgagttgtggcaggaggatgataaagcacgcggcccctcccaaaggagcccttgagctagggaggtggtgcagtcagcctcgctctcaacgtgacccggggaatgaccacccagagggatgagctagcctgtagaggggaactggggtccaaaggtctttggggagggaggcagagctggctggctcagctaagtggcacgatgacgcatgaaggagattatgttgtgctctttattgccaaaaataaacacttttaaaaagacaacttctgttaatcaataaatatcctttcctttctgta

SEQ ID NO: 196673 - protein, 237 aa, Artificial Sequence
  derived and/or modified sequence
MLHCFGGGILSCLLLAEPPLKFLANHTNILLASSIWYITFFCPHDLVSQGYSYLPVQLLASGMKEVTRTWKIVGGVTHANSYYKNGWIVMIAIGWARGAGGTIITNFERLVKGDWKPEGDEWLKMSYPAKVTLLGSVIFTFQHTQHLAISKHNLMFLYTIFIVATKITMMTTQTSTMTFAPFEDTLSWMLFGWQQPFSSCEKKSEAKSPSNGVGSLASKPVDVASDNVKKKHTKKNE

SEQ ID NO: 196674 - protein, 291 aa, Artificial Sequence
  derived and/or modified sequence
MDSPWDELALAFSRTSMFPFFDIAHYLVSVMAVKRQPGAAALAWKNPISSWFTAMLHCFGGGILSCLLLAEPPLKFLANHTNILLASSIWYITFFCPHDLVSQGYSYLPVQLLASGMKEVTRTWKIVGGVTHANSYYKNGWIVMIAIGWARGAGGTIITNFERLVKGDWKPEGDEWLKMSYPAKVTLLGSVIFTFQHTQHLAISKHNLMFLYTIFIVATKITMMTTQTSTMTFAPFEDTLSWMLFGWQQPFSSCEKKSEAKSPSNGVGSLASKPVDVASDNVKKKHTKKNE

SEQ ID NO: 196675 - protein, 35 aa, Artificial Sequence
  derived and/or modified sequence
MLHCFGGGILSCLLLAEPPLKFLANHTNILLASSI

SEQ ID NO: 196676 - DNA, 876 bp, Artificial Sequence
  derived and/or modified sequence
atggacagcccctgggacgagctggccctggccttcagcagaaccagcatgttccccttcttcgacatcgcccactacctggtgagcgtgatggccgtgaagagacagcccggcgccgccgccctggcctggaagaaccccatcagcagctggttcaccgccatgctgcactgcttcggcggcggcatcctgagctgcctgctgctggccgagccccccctgaagttcctggccaaccacaccaacatcctgctggccagcagcatctggtacatcaccttcttctgcccccacgacctggtgagccagggctacagctacctgcccgtgcagctgctggccagcggcatgaaggaggtgaccagaacctggaagatcgtgggcggcgtgacccacgccaacagctactacaagaacggctggatcgtgatgatcgccatcggctgggccagaggcgccggcggcaccatcatcaccaacttcgagagactggtgaagggcgactggaagcccgagggcgacgagtggctgaagatgagctaccccgccaaggtgaccctgctgggcagcgtgatcttcaccttccagcacacccagcacctggccatcagcaagcacaacctgatgttcctgtacaccatcttcatcgtggccaccaagatcaccatgatgaccacccagaccagcaccatgaccttcgcccccttcgaggacaccctgagctggatgctgttcggctggcagcagcccttcagcagctgcgagaagaagagcgaggccaagagccccagcaacggcgtgggcagcctggccagcaagcccgtggacgtggccagcgacaacgtgaagaagaagcacaccaagaagaacgagtag

SEQ ID NO: 196677 - DNA, 876 bp, Artificial Sequence
  derived and/or modified sequence
atggattctccttgggatgaactcgctctcgcattctcaagaacatcaatgtttcccttttttgacatagcgcattacctcgtttccgtgatggctgtgaaacgccagcctggtgccgctgcgttggcgtggaagaatcctattagctcttggtttacagccatgcttcactgttttggtggtggaatcctgtcatgcctgctgctggctgaacctcctttaaagttccttgccaaccatacaaacatcctgctggcctcatcaatttggtacatcacttttttctgtcctcacgatctggtgagccagggttactcctatctccccgtccaactgctggcctctggcatgaaggaggtgactcgaacgtggaaaatcgtggggggcgtcactcatgccaactcctactacaagaacgggtggattgtaatgattgccatcggatgggctaggggggccggagggacgatcataactaatttcgagaggttggtgaaaggtgattggaagcccgagggcgacgaatggcttaagatgtcatatccggccaaggtgaccctgttaggttcagttatctttacatttcagcacacccagcatttagcaataagcaaacataacttgatgtttctgtatacaatcttcatagtcgccactaagatcacgatgatgaccacgcaaacgtcaacaatgacttttgctcctttcgaggacacgttgagttggatgttgttcgggtggcagcagccgttttcctcatgcgaaaagaaatctgaagccaaaagtccctctaacggcgtagggagcctggcgtccaaacctgttgatgttgcaagcgataatgtgaaaaagaagcacaccaagaagaacgagtag

SEQ ID NO: 196678 - DNA, 876 bp, Artificial Sequence
  derived and/or modified sequence
atggacagcccctgggatgagctggccctggccttcagcaggacctccatgttccccttctttgatattgcccactacctggtgtctgtgatggctgtgaagaggcagcctggagctgctgccctggcctggaagaaccccatcagctcctggttcaccgccatgctgcactgctttggaggcggcatcctgagctgcctgctgctggccgagccccccctgaagttcctggccaaccacaccaacatcctgctggccagcagcatctggtacatcaccttcttctgcccccatgacctggtgtcccagggctacagctacctgcctgtgcagctgctggccagcggcatgaaggaggtgaccaggacctggaagatcgtgggcggcgtgacccacgccaacagctactacaagaatggctggatcgtgatgattgccatcggctgggcccggggagctgggggcaccatcatcaccaactttgagcggctggtgaagggggactggaagccagaaggagatgagtggctgaagatgagctacccagccaaggtgaccctgctgggcagcgtcatcttcaccttccagcacacccagcacctggccatcagcaagcacaacctgatgttcctgtacaccatcttcatcgtggccaccaagatcaccatgatgaccacccagaccagcaccatgacctttgccccctttgaggacaccctgtcctggatgctgtttggctggcagcagcccttcagcagctgtgagaagaagtctgaggccaagagccccagcaatggagtgggcagcctggccagcaagcctgtggatgtggccagtgacaacgtgaagaagaagcacaccaagaagaatgaatag

SEQ ID NO: 196679 - DNA, 876 bp, Artificial Sequence
  derived and/or modified sequence
atggacagcccctgggacgagctggccctggccttcagccggacctcaatgttccccttctttgatatagctcactatctggtcagcgtcatggcagtgaagaggcagccaggagccgctgctctagcatggaaaaatcccatctcttcttggtttacggccatgctgcattgttttggtggcggtattttgagctgtcttttattggcagagccccctctcaagtttctggcaaatcataccaatatacttctggcctcaagtatatggtacatcaccttcttttgcccccacgatctagtatcccagggatattcgtatctgccggtgcaactcctggcgtccggaatgaaagaagtgactaggacctggaaaatcgttgggggggtaactcatgcaaactcctactacaagaatggttggatcgtgatgatcgctataggctgggcaagaggggcaggtggaactataatcaccaattttgaaagattggtgaaaggggactggaaaccagagggcgatgagtggctgaaaatgtcctatcccgccaaggtaaccctcctgggatcagtaatttttacatttcaacacacgcagcatctggctatttcaaaacataaccttatgttcttgtacacaatcttcatcgtagctaccaaaatcacaatgatgactactcaaacatctacaatgacattcgctccctttgaagacactctgtcttggatgctctttggttggcagcagcccttctcctcttgcgaaaaaaagagtgaagccaagtcgccaagcaatggtgttggatctcttgcctccaaaccagtggacgttgccagcgataacgttaaaaaaaagcacaccaaaaaaaacgaatag

SEQ ID NO: 196680 - DNA, 876 bp, Artificial Sequence
  derived and/or modified sequence
atggatagcccctgggacgagctggcactggccttttctagaactagcatgttcccattcttcgatatagcccactatctggtgtccgtcatggcagtaaagagacaacccggtgcagccgctcttgcgtggaaaaacccaatctctagctggtttacagctatgcttcactgctttggaggaggtatcctgtcctgtcttttacttgctgaacccccactgaaattcctcgccaaccatacgaacatactcctggctagcagcatctggtatattacctttttttgccctcacgatctggttagccagggttactcatacttgcctgtccagttgcttgctagcgggatgaaggaggtcacacgcacctggaagatagtcggaggtgttacccatgccaattcttactataaaaatggctggattgtgatgatcgctattggatgggcccgaggcgcagggggaacaataataaccaatttcgaacgtcttgtcaaaggggactggaaacctgagggagacgaatggctgaaaatgtcgtatcccgctaaggtcacattgctgggcagcgtgatcttcacattccaacacacacagcatcttgcaatctccaagcacaatcttatgtttttgtatacaatcttcatcgtggcaacaaaaataaccatgatgactacacagaccagcacgatgacttttgcaccattcgaggacactctgagctggatgttgttcggctggcagcagcccttttcctcatgtgaaaaaaaatcagaggccaagagcccatccaacggagtagggtcacttgcgtcaaagcccgtcgatgttgctagcgataacgtgaagaaaaagcacacaaagaagaatgaatag

SEQ ID NO: 196681 - DNA, 3956 bp, Artificial Sequence
  derived and/or modified sequence
gcagtgtttcctccacaggggtctcagtctgggctctaaagagctcctccaccaagtttctaaattttaataatttcagcctattgttcccccagagtagtaactgctttctggaactgaactctgtgataatgtagtatttactttttgccttttcaataacctagttaacaattttatacctactgagttctatttaaataatggtattttctatctcctgactggacagatacccaggagtagggtttgaacttcctactttctggtttgcatatatcttattaagataactaaagtacttgctacttgccagtcttcagacccggtcagtgtaatgtcatcagtgcagcagatcagtgtgatgtgtgatttctcaatgtgatcaaaatctctggactattttagagagcaagagtgttaacatagacctgaagcaagactgtaatggttgaacaaagcacaaagtgcttctgagattttttgcaaattaataggaagaaaaaagcatttgcttccaagttataagaattgtgttgatttgaccccgtaaaaatactacatcttgaatactagctgcaattacagtcacgacctttctgtgtttataattcatagctattctccaagatccatctgtcttatatttagatcaaacaggagcagctgcattggcatggaagaatcctatttcaagctggtttactgctatgctccactgttttggtggaggaattttatcctgtctactgcttgcagagcctccattgaagtttcttgcaaaccacactaacatattactggcatcttcaatctggtatattacatttttttgcccgcatgacctagtttcccagggctattcatatctacctgttcaactactggcttcgggaatgaaggaagtgaccagaacttggaaaatagtaggtggagtcacacatgctaatagctattacaaaaatggctggatagtcatgatagctattggatgggcccgaggtgcaggtggtaccattataacgaattttgagaggttggtaaaaggagattggaaaccagaaggtgatgaatggctgaagatgtcataccctgccaaggtaaccctgctggggtcagttatcttcacattccagcacacccagcatctggcaatatcaaagcataatcttatgttcctttataccatctttattgtggccacaaagataaccatgatgactacacagacttctactatgacatttgctccttttgaggatacattgagttggatgctatttggctggcagcagccgttttcatcatgtgagaagaaaagtgaagcaaagtcaccttccaatggcgttgggtcattggcctcaaagccggtagatgttgcctcagataatgttaaaaagaaacatactaagaagaatgaataaatttacgtgatgagctctacaaggccaaaaattttttttcttatctacctgttatattgtgctaatttttctatgtatgtgatgtgaaatgaagactatatatatggaatggaggtgacagaaagaaagaaattctttgtttgagggagacttcccctttctggattgtatttgtagagtgttacgagtgtatcatgtgattatgctttaccggtataagagattctgttgtgattatttgaatagttttatattaataaaagaagacaaaattttttaaatgttagaaaaagcagatctgtcattgcaaagtaacaaaaattttaagcttttaaaaatgtagatttttcatatttttaaaatttgaatctatttgagctttagttcagcagaattaaatttttacttgacattatcattaaaattgctaggtatggagaacaattcctattttattttgaacactgagaagagtaaacttttcctaaaacactttatattataaatgaaaataaattgctagtttatattttagatataaacatcatattttttattaatacctacatcaaatggaaaatatctgaaattttttttccatagcaggtattttctactagaagtagttttactacttttcatttagaacagagtatgagtcttaatctgaagtctttttcatgcccttgttttaaaaaaactactttttttggcctcaaaaaaatcaagggtgtaatttttaataaattgttaatcctatgttttgtaattttcattttaggagcttgacttatttttttctctctcataaaaacacatttgttttaattgtaggagaaattttctcagcattttgcatgttctttctaatctttgttggtctgaatatattggtagtaattactgtaattattcaacaaaaagcatatccgttcaaaaatttttccactatgtcttttttctagtggctactgttttagttttctagttgaatatctctgacaagctttcgtatggttttgttatattttcatctacatgtaatgtgttattaattttattaaatgaaaactaatcaccttcatgtggaaatgctctgagaattgtccttaggcatttggtagtaaccagctaaccaagaagaaacagagaaaccagaacttcatatggcagtccatttagatgaagaatgatgatataaaatctggttccttcttagcaaaataaaaaacaaacaagaaaagatactaaatgatgttaattttcttactttatgatttagaagtccagttataatattaaaactctgtgacatagtttcttttaccaaaaccatgaacctactccccgtatcaggtattttcgatggtttagaagtactcaagtcacatcacattcaagttagaagttttttttttgttgttgttattttaaatttttaacaaatataaacaccagcagatactattacttgcttaaaaaattgggagggggcacttttcatagtcttggaatgctaagaagttttatttttaatattgtgacagaaagctttaagtatttaagagctctgtattatatttgatactcttacagttaaaaacttttcaaaattaatacattgttaattattgaccagttttgaagtttgggtttaactgtagttgaaatggaaggactcttgttttacacttgtattaaagataaatttattaaaataagttatttagcaccaatggagtattacattatttttatgttttatatttttcttgaggtagagtttcagaactcatctagtattttgactaatatagtatatattcagtgattactgttcaaatgggacattggtagaaactttattaatctatgcaagtatcctataaccctcaattcaaggctcttttgtaaaaaatgtactggagaacatggcttaggcctgaaacccatcctgaatctattcaggtcacctgtagagtcttgacttggatttgcaaagcagattgttagactccttacccaatgtgaagtgtgaataaggcctataggcctgcctcacacagctaatcagaggtggcactgagaaagtcaagtcctaataggtctccttaaaaaaaaaaaggagacaaaaagctggcaagaacatgagccagcttccctcagtgctgtcactctcaagtaaaacatggccaaatgaatatcaaactggtttatcagattagtcactcttccttactgagggagtatcaagtaagggctggagagagaccagatatgtggagttgttggctttcagtggaaatggtagcctccctgtgggtagagaccaaaaggtagagagatgacagaagggagactctgattagtgtattttttttttgtctattccttaaagcccagacacctttccattaaaatctacttcaaatcacaagttgattacaattgagtggaacatcccatgttgtaaatggaataatgtgttcagaatgctctttctttcccccaataaagccctttatagtgttt

SEQ ID NO: 196682 - DNA, 3525 bp, Artificial Sequence
  derived and/or modified sequence
gctggagccggcgcggaggagcgggcggccgcggctgtgccctctcctactcctcaccgcgcgagcgcggggaaccagtagccgcggctgcttcggttgccgcggtcggtggtcgttatggattctccatgggacgagttggctctggccttctcccgcacgtccatgtttcccttttttgacatcgcgcactatctagtgtcagtgatggcggtgaaacgtcagccgggagcagctgcattggcatggaagaatcctatttcaagctggtttactgctatgctccactgttttggtggaggaattttatcctgtctactgcttgcagagcctccattgaagtttcttgcaaaccacactaacatattactggcatcttcaatctggtatattacatttttttgcccgcatgacctagtttcccagggctattcatatctacctgttcaactactggcttcgggaatgaaggaagtgaccagaacttggaaaatagtaggtggagtcacacatgctaatagctattacaaaaatggctggatagtcatgatagctattggatgggcccgaggtgcaggtggtaccattataacgaattttgagaggttggtaaaaggagattggaaaccagaaggtgatgaatggctgaagatgtcataccctgccaaggtaaccctgctggggtcagttatcttcacattccagcacacccagcatctggcaatatcaaagcataatcttatgttcctttataccatctttattgtggccacaaagataaccatgatgactacacagacttctactatgacatttgctccttttgaggatacattgagttggatgctatttggctggcagcagccgttttcatcatgtgagaagaaaagtgaagcaaagtcaccttccaatggcgttgggtcattggcctcaaagccggtagatgttgcctcagataatgttaaaaagaaacatactaagaagaatgaataaatttacgtgatgagctctacaaggccaaaaattttttttcttatctacctgttatattgtgctaatttttctatgtatgtgatgtgaaatgaagactatatatatggaatggaggtgacagaaagaaagaaattctttgtttgagggagacttcccctttctggattgtatttgtagagtgttacgagtgtatcatgtgattatgctttaccggtataagagattctgttgtgattatttgaatagttttatattaataaaagaagacaaaattttttaaatgttagaaaaagcagatctgtcattgcaaagtaacaaaaattttaagcttttaaaaatgtagatttttcatatttttaaaatttgaatctatttgagctttagttcagcagaattaaatttttacttgacattatcattaaaattgctaggtatggagaacaattcctattttattttgaacactgagaagagtaaacttttcctaaaacactttatattataaatgaaaataaattgctagtttatattttagatataaacatcatattttttattaatacctacatcaaatggaaaatatctgaaattttttttccatagcaggtattttctactagaagtagttttactacttttcatttagaacagagtatgagtcttaatctgaagtctttttcatgcccttgttttaaaaaaactactttttttggcctcaaaaaaatcaagggtgtaatttttaataaattgttaatcctatgttttgtaattttcattttaggagcttgacttatttttttctctctcataaaaacacatttgttttaattgtaggagaaattttctcagcattttgcatgttctttctaatctttgttggtctgaatatattggtagtaattactgtaattattcaacaaaaagcatatccgttcaaaaatttttccactatgtcttttttctagtggctactgttttagttttctagttgaatatctctgacaagctttcgtatggttttgttatattttcatctacatgtaatgtgttattaattttattaaatgaaaactaatcaccttcatgtggaaatgctctgagaattgtccttaggcatttggtagtaaccagctaaccaagaagaaacagagaaaccagaacttcatatggcagtccatttagatgaagaatgatgatataaaatctggttccttcttagcaaaataaaaaacaaacaagaaaagatactaaatgatgttaattttcttactttatgatttagaagtccagttataatattaaaactctgtgacatagtttcttttaccaaaaccatgaacctactccccgtatcaggtattttcgatggtttagaagtactcaagtcacatcacattcaagttagaagttttttttttgttgttgttattttaaatttttaacaaatataaacaccagcagatactattacttgcttaaaaaattgggagggggcacttttcatagtcttggaatgctaagaagttttatttttaatattgtgacagaaagctttaagtatttaagagctctgtattatatttgatactcttacagttaaaaacttttcaaaattaatacattgttaattattgaccagttttgaagtttgggtttaactgtagttgaaatggaaggactcttgttttacacttgtattaaagataaatttattaaaataagttatttagcaccaatggagtattacattatttttatgttttatatttttcttgaggtagagtttcagaactcatctagtattttgactaatatagtatatattcagtgattactgttcaaatgggacattggtagaaactttattaatctatgcaagtatcctataaccctcaattcaaggctcttttgtaaaaaatgtactggagaacatggcttaggcctgaaacccatcctgaatctattcaggtcacctgtagagtcttgacttggatttgcaaagcagattgttagactccttacccaatgtgaagtgtgaataaggcctataggcctgcctcacacagctaatcagaggtggcactgagaaagtcaagtcctaataggtctccttaaaaaaaaaaaggagacaaaaagctggcaagaacatgagccagcttccctcagtgctgtcactctcaagtaaaacatggccaaatgaatatcaaactggtttatcagattagtcactcttccttactgagggagtatcaagtaagggctggagagagaccagatatgtggagttgttggctttcagtggaaatggtagcctccctgtgggtagagaccaaaaggtagagagatgacagaagggagactctgattagtgtattttttttttgtctattccttaaagcccagacacctttccattaaaatctacttcaaatcacaagttgattacaattgagtggaacatcccatgttgtaaatggaataatgtgttcagaatgctctttctttcccccaataaagccctttatagtgttt

SEQ ID NO: 196683 - protein, 570 aa, Artificial Sequence
  derived and/or modified sequence
MAGGAREVLTLQLGHFAGFVGAHWWNQQDAALGRATDSKEPPGELCPDVLYRTGRTLHGQETYTPRLILMDLKGSLSSLKEEGGLYRDKQLDAAIAWQGKLTTHKEELYPKNPYLQDFLSAEGVLSSDGVWRVKSIPNGKGSSPLPTATTPKPLIPTEASIRVWSDFLRVHLHPRSICMIQKYNHDGEAGRLEAFGQGESVLKEPKYQEELEDRLHFYVEECDYLQGFQILCDLHDGFSGVGAKAAELLQDEYSGRGIITWGLLPGPYHRGEAQRNIYRLLNTAFGLVHLTAHSSLVCPLSLGGSLGLRPEPPVSFPYLHYDATLPFHCSAILATALDTVTVPYRLCSSPVSMVHLADMLSFCGKKVVTAGAIIPFPLAPGQSLPDSLMQFGGATPWTPLSACGEPSGTRCFAQSVVLRGIDRACHTSQLTPGTPPPSALHACTTGEEILAQYLQQQQPGVMSSSHLLLTPCRVAPPYPHLFSSCSPPGMVLDGSPKGAAVESIPVFGALCSSSSLHQTLEALARDLTKLDLRRWASFMDAGVEHDDVAELLQELQSLAQCYQGGDSLVD

SEQ ID NO: 196684 - protein, 147 aa, Artificial Sequence
  derived and/or modified sequence
MAGGAREVLTLQLGHFAGFVGAHWWNQQDAALGRATDSKEPPGELCPDVLYRTGRTLHGQETYTPRLILMDLKGSLSSLKEEGGLYRDKQLDAAIAWQGKLTTHKEELYPKNPYLQDFLSAEVRASVLNFLTRCHNLRVSIGAGSAE

SEQ ID NO: 196685 - DNA, 1713 bp, Artificial Sequence
  derived and/or modified sequence
atggctggcggggctcgggaagtgctgacactgcagcttggacacttcgcgggtttcgttggcgcccattggtggaaccaacaggatgcggcccttggtcgcgcaactgattccaaggagcccccgggggaactttgccctgatgtcttgtatagaactggccggacccttcacgggcaagaaacctatacgccacgtttgattctcatggacttgaaggggtcgctgtccagcctgaaggaggagggcggtctgtatcgggataagcaactggacgcggccattgcttggcaaggaaagctcacaacacacaaggaagaactgtacccaaagaacccgtatctgcaggactttcttagtgccgagggcgtgctcagtagtgacggcgtgtggagggtgaagtcaatcccaaacggcaagggaagttcgccacttcctacggcaacaacacctaaaccgttgattcccacagaggcctccatcagggtctggtccgacttcttgcgcgtgcatctgcatcctaggagtatctgcatgattcaaaagtataatcacgacggcgaggcagggcgtctggaggcttttggtcagggagaatcagttttaaaggaacctaaataccaagaagagctggaggatcgacttcatttttatgtggaagaatgcgattatctccaaggattccagattctgtgcgacctccatgatggctttagcggcgtaggagccaaggcagccgagcttctccaggacgaatatagtggaaggggcatcatcacctggggactcttgccaggaccctatcaccgcggcgaggcgcagaggaatatatatcgcctgctcaatactgctttcgggctcgtgcaccttactgcccactcatccctggtgtgcccacttagcctaggaggaagcctgggcctgaggcctgagccccccgtgagctttccgtacctgcattacgacgcaacactcccatttcattgttcagccattctggctacagccctcgacacagtcaccgtcccctacagattgtgcagtagtccagttagcatggtgcatctggccgacatgctatctttctgcggaaaaaaggtcgttactgctggcgccattattccctttcctttggcaccgggccagtccctgccagattctctgatgcagttcggaggtgcaacgccctggacacccctcagcgcttgcggagagccttctggcacacggtgcttcgctcaatccgtcgtgctgcggggaatcgaccgtgcctgtcatacgtctcaactcaccccgggtaccccccctccaagcgctctccatgcctgtaccactggggaagagatcctggcacaatatctgcagcaacagcaacctggagtgatgtcatcgtcccatcttctgctcacaccgtgtagagtcgcacccccatatcctcatctgttctcgagctgtagccctcccggaatggttctggatgggagccccaagggcgctgccgtagagagcatacccgtgttcggagccctgtgcagctcatctagcctgcaccagactctggaggctttggctagagacctaactaaactggacctgcggagatgggcttcttttatggacgccggagttgagcacgacgacgtggcggagctgctccaggagctgcaaagcctggctcagtgctaccagggaggcgacagcctagtcgattag

SEQ ID NO: 196686 - DNA, 1713 bp, Artificial Sequence
  derived and/or modified sequence
atggccggcggggcccgggaggtgctgaccctgcagctgggccactttgctggctttgtgggcgcccactggtggaaccagcaggatgctgccctgggccgggccacagacagcaaggagcccccaggagagctgtgcccagatgtgctgtacagaactggaagaaccctgcacggccaggagacctacacccccaggctcatcctgatggacctgaagggcagcctgagcagcctgaaggaggagggcggcctgtacagagacaagcagctggatgctgccatcgcctggcagggcaagctgaccacccacaaggaggagctgtaccccaagaacccctacctgcaggacttcctgtctgctgagggcgtgctgagcagtgatggagtgtggagggtgaagagcatccccaacgggaagggcagcagccccctgcccacagccaccacccccaagcccctcatccccacagaggccagcatccgggtgtggagcgacttcctgcgggtgcacctgcaccccaggagcatctgcatgatccagaagtacaaccatgatggagaggccggccgcctggaggccttcggccagggcgagagcgtgctgaaggagcccaagtaccaggaggagctggaggaccggctgcacttctacgtggaggagtgtgactacctgcagggcttccagatcctgtgtgacctgcatgatggcttctctggagtgggcgccaaggctgctgagctgctgcaggatgagtacagcggccggggcatcatcacctggggcctgctgcccggcccctaccacagaggagaggcccagaggaacatctaccgcctgctgaacacagccttcggcctggtgcacctgacagcccacagcagcctggtgtgccccctgagcctgggcggcagcctgggcctgcggcctgagccccctgtgtccttcccctacctgcactatgatgccaccctgcccttccactgcagcgccatcctggccacagccctggacacagtgacagtgccctaccgcctgtgcagcagccctgtgtccatggtgcacctggccgacatgctgtccttctgtgggaagaaggtggtgacagctggggccatcatccccttccccctggcccctggccagagcctgcctgacagcctgatgcagtttggaggagccaccccctggacccccctgagcgcctgtggggagcccagcggcacccgctgctttgcccagagcgtggtgctgcggggcatcgaccgggcctgccacaccagccagctgaccccaggcaccccaccacccagcgccctgcacgcctgcaccactggagaggagatcctggcccagtacctgcagcagcagcagcccggggtgatgagcagcagccacctgctgctgaccccctgccgggtggccccaccctacccccacctgttcagcagctgcagccccccaggcatggtgctggatggcagccccaagggagctgctgtggagagcatccctgtgtttggagccctgtgcagcagcagcagcctgcaccagaccctggaggccctggcccgggacctgaccaagctggacctgcggcgctgggccagcttcatggatgctggggtggagcatgatgatgtggccgagctgctgcaggagctgcagagcctggcccagtgctaccagggcggggacagcctggtggactag

SEQ ID NO: 196687 - DNA, 1713 bp, Artificial Sequence
  derived and/or modified sequence
atggccggcggcgcccgggaggtgctgaccctgcagctgggccactttgcgggcttcgttggggcacattggtggaatcagcaggacgcagcattgggacgtgccactgattccaaagaaccgcccggcgaactatgccccgacgtcctttatcggactggccgtacactgcatggccaggaaacctatacacctagattaattctcatggatctcaaaggctccctgtcatctttaaaagaggaaggcgggctataccgagataagcagctagacgcagctattgcttggcaggggaagctcacaacccacaaagaagagttgtaccccaagaacccctatctgcaggatttcctgagcgcggaaggcgttctctcctcagatggggtgtggcgggtgaaatctatccccaacggtaaaggctcaagccccctgcctacagccactaccccgaagccgttaatccctaccgaagcaagtatccgcgtgtggtctgactttctgcgagttcacttgcatcccagaagtatctgtatgatccagaagtacaaccacgacggggaagccgggcggctggaagcattcggccaaggcgagtcagtgttgaaggaaccgaagtaccaggaggaacttgaagacaggctacatttttacgttgaagagtgtgactatctgcaaggatttcagattctgtgtgatctgcacgacggattcagcggggtgggtgcaaaggcggcggagcttcttcaagacgagtactcgggccgcggtatcattacttgggggttgctgccagggccctatcaccgaggcgaagcccaaagaaacatttacagattactcaatacggccttcgggctggtacatctgacggctcatagtagcctggtgtgtcccctgagtcttgggggctctctggggctgagaccagagccaccagtgtcttttccttacttgcattacgacgctactctccctttccattgttcagctattctggcaacagctttggataccgtgacagtgccatataggctgtgctcttcccctgtgagtatggtacacttggccgatatgttatcattttgtgggaagaaggtagttacagcaggcgccatcattccattcccacttgcccccggccagtccttgcccgatagtctcatgcagtttggcggggccacgccttggacacctctgtctgcctgtggcgagccaagtggaacccggtgctttgcccagagcgtggtgttacgtgggatcgaccgggcctgtcatacatcgcagttgactcctggcactcctccaccatccgctctacatgcatgcacaaccggcgaggaaattctggcacagtacttacagcagcagcagcctggggtaatgagctcttcccatttactgcttacaccatgtagggtggctcctccttatccccatctcttcagtagctgtagccccccagggatggtgctagacggatcacccaaaggggccgcagttgagagcatcccggtttttggggcattatgttcctcgagcagcttacatcaaactctcgaggccctggcccgggatctaacgaaactggatctacgacggtgggcctctttcatggatgccggggtggagcatgatgatgtggctgaactgcttcaggagctccagagtctcgcacagtgctatcagggaggcgactccttagtggattag

SEQ ID NO: 196688 - DNA, 1713 bp, Artificial Sequence
  derived and/or modified sequence
atggcaggcggagcacgggaggtcctgacgttacagttgggccacttcgccggatttgtgggggcacattggtggaatcaacaggatgcagccctgggcagagctactgatagcaaggagcctcccggagaattgtgtcctgacgtcctttaccgtacgggtagaacactgcatggacaagagacctacactcccaggctgattctcatggacctgaaggggagcctgagctcattgaaggaggaaggtggactgtaccgagataagcagcttgacgcagccatagcatggcagggaaaactgaccacccacaaggaagagctttacccaaaaaatccctacttacaagatttcctatccgcagaaggtgtgctgtcttccgatggagtctggcgagttaaaagtatccctaacggaaaagggtcgtcaccactgccaacagctacaacccccaagccactgatcccaactgaggcctctataagggtttggagcgatttccttcgcgtccacctgcaccccaggtccatttgcatgattcagaagtacaaccatgatggagaggcaggacggctagaagctttcggacaaggtgagtcggttcttaaggaaccaaaatatcaagaagagctggaggacaggctgcatttttacgtggaggagtgtgattacctgcaaggcttccaaattctgtgcgacctgcacgatggcttcagtggcgttggcgctaaggccgcagagctcctccaggatgagtacagtggtcgcggtattataacctggggcctgctgccgggaccgtatcatcgaggtgaagcccagcgcaacatttaccgactattgaataccgcttttgggttggttcacttgaccgctcactctagcctcgtctgccccttgtccctgggcggtagcctgggattgagaccagagcccccagtgagtttcccctatcttcattacgatgcaactcttccttttcattgcagtgctatactggccactgctttagacacagttacggtaccataccggctgtgtagtagccccgtctctatggtacacctcgctgacatgctgtctttttgtggtaaaaaggtggtaactgcgggagccatcattccgtttccgctcgccccaggccaatctctgcctgatagtctgatgcagtttggcggagctacaccctggactccactgagcgcatgtggcgagccgtcagggactcgctgctttgcccagagtgtggttctccggggaatcgaccgcgcttgtcatacttcacagctcacccccggtactcccccaccgtcagctctccatgcatgcacgaccggcgaggagatactggcccagtatctgcagcagcagcagccaggagtgatgtcatcaagtcacctcttactgactccttgtcgcgtggcccctccatatcctcacctgttttcttcgtgttcccccccaggcatggtgctggacggtagcccaaagggcgcagcagtggaatcaatcccagtgttcggggctctttgcagctcatctagtctccaccaaacactagaggcccttgcaagagacttgacgaaattggatctgcgcaggtgggcgtcttttatggatgccggagtggagcatgacgacgtcgctgagctgctgcaagagctccagtcgctcgcccaatgctaccagggtggtgactccttggtggattag

SEQ ID NO: 196689 - DNA, 2431 bp, Artificial Sequence
  derived and/or modified sequence
ggcggccccgtggagcagcgcagtatggcgggcggggcccgggaggtgctcacactgcagttgggacattttgccggtttcgtgggcgcgcactggtggaaccagcaggatgctgcgctgggccgagcgaccgattccaaggagcccccgggagagctgtgccccgacgtcctgtatcgtacgggccggacgctgcacggccaggagacctacacgccgcgactcatcctcatggatctgaagggtagtttgagctccctaaaagaggaaggtggactctacagggacaaacagttggatgctgcaatagcatggcaggggaagctcaccacacacaaagaggaactctatcccaagaacccttatctccaagactttctgagtgcagagggagtgctgagtagtgatggtgtctggagggtcaaatccattcccaatggcaaaggttcctcaccactccccaccgctacaactccaaaaccacttatccctacagaggccagcatcagggtctggtcagacttcctcagagtccatctccatccccggagcatctgtatgattcagaagtacaaccacgatggggaagcaggtcggctggaggcttttggccaaggggaaagtgtcctaaaggaacccaagtaccaggaagagctggaggacaggctgcatttctacgtggaggaatgtgactacttgcagggcttccagatcctgtgtgacctgcacgatggcttctctggggtaggcgcgaaggcggcagagctgctacaagatgaatattcagggcggggaataataacctggggcctgctacctggtccctaccatcgtggggaggcccagagaaacatctatcgtctattaaacacagcttttggtctcgtgcacctgactgctcacagctctcttgtctgccccttgtccttgggtgggagcctgggcctgcgacccgagccacctgtcagcttcccttacctgcattatgatgccactctgcccttccactgcagtgccatcctggctacagccctggacacagtcactgttccttatcgcctgtgttcctctccagtttccatggttcatctggctgacatgctgagcttctgtgggaaaaaggtggtgacagcaggagcaatcatccctttccccttggctccaggccagtcccttcctgattccctgatgcagtttggaggagccaccccatggaccccactgtctgcatgtggggagccttctggaacacgttgctttgcccagtcagtggtgctgaggggtatagacagagcatgccacacaagccagctcaccccagggacacctccaccctctgcccttcatgcatgtaccactggggaagaaatcttggctcagtatttacaacagcagcagcctggagtcatgagttcttcccatctgctgctgactccctgcagggtggctcctccttacccccacctcttctcaagctgcagtccaccgggtatggttctggatggttcccccaagggagcagcagtggagagcatcccagtgtttggggcactgtgttcctcttcgtccctgcaccagaccctggaagccttggccagagacctcaccaaactcgacttgcggcgctgggccagcttcatggatgctggagtggagcacgatgacgtagcagagctgctgcaggagctacaaagcctggcccagtgctaccagggtggtgacagcctcgtggactaaagttcccagtgtgggagaaaggagctagtttgcaataaaaacagctggatgcaggagcccagtgtcttcatgcagaggagctcaatgtcgcgggactagctacaccaacatatgcactttttacatttagaaacactgtgattagaccacagaacaataaatatgtgccatcagaccaaaaaaaagtagagaaaggagctgaactccactctcgatgctacttacagaggacatctgtaaagtcttcataaaagaccttgaatgatgcctaggatggcagagcccctgggtcctactccatcctccagcctttgtccttgtcctggcctcctgctctccagatctgtaaactgggctcaaggactgtacaagcagagtacaactacccgcctccccggtgccagggcgcctgttgggtttggtcctgtgtagatgattcccagagtctcattcatccagctcctcttcagacagaaggtccccatggtcagacagctggtctgcattgctggtactggttgcatcatcctcatcctcagagctggcttcacaggcagtgtggaagagctgcatgagttctcgaaaatggtgggaaacctaagaaaggaggagggctgtattcactgatccttagtaacatgttaacatttatgaagcactatatattgatttgcaaaatcttttgtttattcca

SEQ ID NO: 196690 - DNA, 887 bp, Artificial Sequence
  derived and/or modified sequence
aatcggctaggagcagcgagcggcgcggctgaggcgcggcggccccgtggagcagcgcagtatggcgggcggggcccgggaggtgctcacactgcagttgggacattttgccggtttcgtgggcgcgcactggtggaaccagcaggatgctgcgctgggccgagcgaccgattccaaggagcccccgggagagctgtgccccgacgtcctgtatcgtacgggccggacgctgcacggccaggagacctacacgccgcgactcatcctcatggatctgaagggtagtttgagctccctaaaagaggaaggtggactctacagggacaaacagttggatgctgcaatagcatggcaggggaagctcaccacacacaaagaggaactctatcccaagaacccttatctccaagactttctgagtgcagaggtgagggcctctgtcctgaactttttaacccggtgccacaacctgagggtctccataggggcagggagtgctgagtagtgatggtgtctggagggtcaaatccattcccaatggcaaaggttcctcaccactccccaccgctacaactccaaaaccacttatccctacagaggccagcatcagggtctggtcagacttcctcagagtccatctccatccccggagcatctgtatgattcagaagtacaaccacgatggggaagcaggtcggctggaggcttttggccaaggggaaagtgtcctaaaggaacccaagtaccaggaagagctggaggacaggctgcatttctacgtggaggaatgtgactacttgcagggcttccagatcctgtgtgacctgcacgatggcttctctggggtaggcgcgaaggcggcagagctgctacaagatgaatattca

SEQ ID NO: 196691 - DNA, 1713 bp, Artificial Sequence
  derived and/or modified sequence
atggccggcggcgccagagaggtgctgaccctgcagctgggccacttcgccggcttcgtgggcgcccactggtggaaccagcaggacgccgccctgggcagagccaccgacagcaaggagccccccggcgagctgtgccccgacgtgctgtacagaaccggcagaaccctgcacggccaggagacctacacccccagactgatcctgatggacctgaagggcagcctgagcagcctgaaggaggagggcggcctgtacagagacaagcagctggacgccgccatcgcctggcagggcaagctgaccacccacaaggaggagctgtaccccaagaacccctacctgcaggacttcctgagcgccgagggcgtgctgagcagcgacggcgtgtggagagtgaagagcatccccaacggcaagggcagcagccccctgcccaccgccaccacccccaagcccctgatccccaccgaggccagcatcagagtgtggagcgacttcctgagagtgcacctgcaccccagaagcatctgcatgatccagaagtacaaccacgacggcgaggccggcagactggaggccttcggccagggcgagagcgtgctgaaggagcccaagtaccaggaggagctggaggacagactgcacttctacgtggaggagtgcgactacctgcagggcttccagatcctgtgcgacctgcacgacggcttcagcggcgtgggcgccaaggccgccgagctgctgcaggacgagtacagcggcagaggcatcatcacctggggcctgctgcccggcccctaccacagaggcgaggcccagagaaacatctacagactgctgaacaccgccttcggcctggtgcacctgaccgcccacagcagcctggtgtgccccctgagcctgggcggcagcctgggcctgagacccgagccccccgtgagcttcccctacctgcactacgacgccaccctgcccttccactgcagcgccatcctggccaccgccctggacaccgtgaccgtgccctacagactgtgcagcagccccgtgagcatggtgcacctggccgacatgctgagcttctgcggcaagaaggtggtgaccgccggcgccatcatccccttccccctggcccccggccagagcctgcccgacagcctgatgcagttcggcggcgccaccccctggacccccctgagcgcctgcggcgagcccagcggcaccagatgcttcgcccagagcgtggtgctgagaggcatcgacagagcctgccacaccagccagctgacccccggcacccccccccccagcgccctgcacgcctgcaccaccggcgaggagatcctggcccagtacctgcagcagcagcagcccggcgtgatgagcagcagccacctgctgctgaccccctgcagagtggcccccccctacccccacctgttcagcagctgcagcccccccggcatggtgctggacggcagccccaagggcgccgccgtggagagcatccccgtgttcggcgccctgtgcagcagcagcagcctgcaccagaccctggaggccctggccagagacctgaccaagctggacctgagaagatgggccagcttcatggacgccggcgtggagcacgacgacgtggccgagctgctgcaggagctgcagagcctggcccagtgctaccagggcggcgacagcctggtggactag

SEQ ID NO: 196692 - protein, 1224 aa, Artificial Sequence
  derived and/or modified sequence
MLPYTVNFKVSARTLTGALNAHNKAAVDWGWQGLIAYGCHSLVVVIDSITAQTLQVLEKHKADVVKVKWARENYHHNIGSPYCLRLASADVNGKIIVWDVAAGVAQCEIQEHAKPIQDVQWLWNQDASRDLLLAIHPPNYIVLWNADTGTKLWKKSYADNILSFSFDPFDPSHLTLLTSEGIVFISDFSPSKPPSGPGKKVYISSPHSSPAHNKLATATGAKKALNKVKILITQEKPSAEFITLNDCLQLAYLPSKRNHMLLLYPREILILDLEVNQTVGVIAIERTGVPFLQVIPCFQRDGLFCLHENGCITLRVRRSYNNIFTTSNEEPDPDPVQELTYDLRSQCDAIRVTKTVRPFSMVCCPVNENAAALVVSDGRVMIWELKSAVCNRNSRNSSSGVSPLYSPVSFCGIPVGVLQNKLPDLSLDNMIGQSAIAGEEHPRGSILREVHLKFLLTGLLSGLPAPQFAIRMCPPLTTKNIKMYQPLLAVGTSNGSVLVYHLTSGLLHKELSIHSCEVKGIEWTSLTSFLSFATSTPNNMGLVRNELQLVDLPTGRSIAFRGERGNDESAIEMIKVSHLKQYLAVVFRDKPLELWDVRTCTLLREMSKNFPTITALEWSPSHNLKSLRKKQLATREAMARQTVVSDTELSIVESSVISLLQEAESKSELSQNISAREHFVFTDIDGQVYHLTVEGNSVKDSARIPPDGSMGSITCIAWKGDTLVLGDMDGNLNFWDLKGRVSRGIPTHRSWVRKIRFAPGKGNQKLIAMYNDGAEVWDTKEVQMVSSLRSGRNVTFRILDVDWCTSDKVILASDDGCIRVLEMSMKSACFRMDEQELTEPVWCPYLLVPRASLALKAFLLHQPWNGQYSLDISHVDYPENEEIKNLLQEQLNSLSNDIKKLLLDPEFTLLQRCLLVSRLYGDESELHFWTVAAHYLHSLSQEKSASTTAPKEAAPRDKLSNPLDICYDVLCENAYFQKFQLERVNLQEVKRSTYDHTRKCTDQLLLLGQTDRAVQLLLETSADNQHYYCDSLKACLVTTVTSSGPSQSTIKLVATNMIANGKLAEGVQLLCLIDKAADACRYLQTYGEWNRAAWLAKVRLNPEECADVLRRWVDHLCSPQVNQKSKALLVLLSLGCFFSVAETLHSMRYFDRAALFVEACLKYGAFEVTEDTEKLITAIYADYARSLKNLGFKQGAVLFASKAGAAGKDLLNELESPKEEPIEE

SEQ ID NO: 196693 - DNA, 3675 bp, Artificial Sequence
  derived and/or modified sequence
atgctgccctacaccgtgaacttcaaggtgagcgccagaaccctgaccggcgccctgaacgcccacaacaaggccgccgtggactggggctggcagggcctgatcgcctacggctgccacagcctggtggtggtgatcgacagcatcaccgcccagaccctgcaggtgctggagaagcacaaggccgacgtggtgaaggtgaagtgggccagagagaactaccaccacaacatcggcagcccctactgcctgagactggccagcgccgacgtgaacggcaagatcatcgtgtgggacgtggccgccggcgtggcccagtgcgagatccaggagcacgccaagcccatccaggacgtgcagtggctgtggaaccaggacgccagcagagacctgctgctggccatccacccccccaactacatcgtgctgtggaacgccgacaccggcaccaagctgtggaagaagagctacgccgacaacatcctgagcttcagcttcgaccccttcgaccccagccacctgaccctgctgaccagcgagggcatcgtgttcatcagcgacttcagccccagcaagccccccagcggccccggcaagaaggtgtacatcagcagcccccacagcagccccgcccacaacaagctggccaccgccaccggcgccaagaaggccctgaacaaggtgaagatcctgatcacccaggagaagcccagcgccgagttcatcaccctgaacgactgcctgcagctggcctacctgcccagcaagagaaaccacatgctgctgctgtaccccagagagatcctgatcctggacctggaggtgaaccagaccgtgggcgtgatcgccatcgagagaaccggcgtgcccttcctgcaggtgatcccctgcttccagagagacggcctgttctgcctgcacgagaacggctgcatcaccctgagagtgagaagaagctacaacaacatcttcaccaccagcaacgaggagcccgaccccgaccccgtgcaggagctgacctacgacctgagaagccagtgcgacgccatcagagtgaccaagaccgtgagacccttcagcatggtgtgctgccccgtgaacgagaacgccgccgccctggtggtgagcgacggcagagtgatgatctgggagctgaagagcgccgtgtgcaacagaaacagcagaaacagcagcagcggcgtgagccccctgtacagccccgtgagcttctgcggcatccccgtgggcgtgctgcagaacaagctgcccgacctgagcctggacaacatgatcggccagagcgccatcgccggcgaggagcaccccagaggcagcatcctgagagaggtgcacctgaagttcctgctgaccggcctgctgagcggcctgcccgccccccagttcgccatcagaatgtgcccccccctgaccaccaagaacatcaagatgtaccagcccctgctggccgtgggcaccagcaacggcagcgtgctggtgtaccacctgaccagcggcctgctgcacaaggagctgagcatccacagctgcgaggtgaagggcatcgagtggaccagcctgaccagcttcctgagcttcgccaccagcacccccaacaacatgggcctggtgagaaacgagctgcagctggtggacctgcccaccggcagaagcatcgccttcagaggcgagagaggcaacgacgagagcgccatcgagatgatcaaggtgagccacctgaagcagtacctggccgtggtgttcagagacaagcccctggagctgtgggacgtgagaacctgcaccctgctgagagagatgagcaagaacttccccaccatcaccgccctggagtggagccccagccacaacctgaagagcctgagaaagaagcagctggccaccagagaggccatggccagacagaccgtggtgagcgacaccgagctgagcatcgtggagagcagcgtgatcagcctgctgcaggaggccgagagcaagagcgagctgagccagaacatcagcgccagagagcacttcgtgttcaccgacatcgacggccaggtgtaccacctgaccgtggagggcaacagcgtgaaggacagcgccagaatcccccccgacggcagcatgggcagcatcacctgcatcgcctggaagggcgacaccctggtgctgggcgacatggacggcaacctgaacttctgggacctgaagggcagagtgagcagaggcatccccacccacagaagctgggtgagaaagatcagattcgcccccggcaagggcaaccagaagctgatcgccatgtacaacgacggcgccgaggtgtgggacaccaaggaggtgcagatggtgagcagcctgagaagcggcagaaacgtgaccttcagaatcctggacgtggactggtgcaccagcgacaaggtgatcctggccagcgacgacggctgcatcagagtgctggagatgagcatgaagagcgcctgcttcagaatggacgagcaggagctgaccgagcccgtgtggtgcccctacctgctggtgcccagagccagcctggccctgaaggccttcctgctgcaccagccctggaacggccagtacagcctggacatcagccacgtggactaccccgagaacgaggagatcaagaacctgctgcaggagcagctgaacagcctgagcaacgacatcaagaagctgctgctggaccccgagttcaccctgctgcagagatgcctgctggtgagcagactgtacggcgacgagagcgagctgcacttctggaccgtggccgcccactacctgcacagcctgagccaggagaagagcgccagcaccaccgcccccaaggaggccgcccccagagacaagctgagcaaccccctggacatctgctacgacgtgctgtgcgagaacgcctacttccagaagttccagctggagagagtgaacctgcaggaggtgaagagaagcacctacgaccacaccagaaagtgcaccgaccagctgctgctgctgggccagaccgacagagccgtgcagctgctgctggagaccagcgccgacaaccagcactactactgcgacagcctgaaggcctgcctggtgaccaccgtgaccagcagcggccccagccagagcaccatcaagctggtggccaccaacatgatcgccaacggcaagctggccgagggcgtgcagctgctgtgcctgatcgacaaggccgccgacgcctgcagatacctgcagacctacggcgagtggaacagagccgcctggctggccaaggtgagactgaaccccgaggagtgcgccgacgtgctgagaagatgggtggaccacctgtgcagcccccaggtgaaccagaagagcaaggccctgctggtgctgctgagcctgggctgcttcttcagcgtggccgagaccctgcacagcatgagatacttcgacagagccgccctgttcgtggaggcctgcctgaagtacggcgccttcgaggtgaccgaggacaccgagaagctgatcaccgccatctacgccgactacgccagaagcctgaagaacctgggcttcaagcagggcgccgtgctgttcgccagcaaggccggcgccgccggcaaggacctgctgaacgagctggagagccccaaggaggagcccatcgaggagtag

SEQ ID NO: 196694 - DNA, 3675 bp, Artificial Sequence
  derived and/or modified sequence
atgctcccttacacagtgaatttcaaagtttccgcacgcaccttgactggggcacttaatgcgcacaacaaagctgcagtggactggggatggcaaggtctgatagcttacgggtgccatagtctggtggtagtcatcgacagcatcaccgctcaaaccctgcaggtgcttgaaaaacacaaggcggatgtggtcaaagtgaagtgggctcgtgagaactaccatcacaatattggatccccatactgtctcagactagcgtccgcggacgtcaacgggaaaattattgtgtgggatgtggccgcgggtgtggcccagtgcgaaattcaagagcacgccaaacctatccaggacgttcaatggctgtggaatcaggatgccagtcgggacttgttgctggccatccacccacctaactacatcgtgctctggaacgcggataccgggacgaaactttggaaaaaatcatatgcggacaacattctcagtttcagcttcgacccctttgatccttcacatctgacactgcttacttctgaggggattgttttcatttctgatttctctccgtctaaaccaccttccggacctggaaaaaaggtgtatattagctccccacattcctccccagctcataataaattggccacagcgaccggagcgaagaaagctctcaataaggtgaaaatcctgatcacccaggaaaagccctctgcagaatttatcacactgaatgattgcctgcagctggcttatctgccttctaagcgaaaccacatgttgctcctgtatcctcgagagattctaattctggacctagaagttaaccagacagtgggtgttatcgcgatcgaaaggacaggagttcccttcctgcaggtgatcccttgcttccaaagggacggccttttctgtctccacgaaaatggctgcataaccctccgggtaagacggtcctataacaacatctttaccacgagtaacgaagaaccagatcccgatcccgttcaagagctgacttacgacctaaggtcccagtgcgacgccattagagtaacgaagaccgtcagacccttctctatggtgtgctgtcccgtcaacgaaaacgcagcggccttagtcgtgtctgacggccgggtgatgatttgggagttgaaatcagccgtctgtaacagaaattcgaggaattcttcaagtggcgtgtctccactgtattctcctgtctccttttgtgggatcccggtgggagtgctgcagaataagttgcccgatctgtccctggataacatgatcgggcaatctgccattgcaggcgaggagcaccctagaggatctattcttagggaggtgcaccttaagttcttactgaccggcctcctgagcggcctcccggctccccaatttgccatccgcatgtgcccccccctcacaacaaagaatatcaagatgtatcagcccctgcttgcagtcggcacatcaaatggaagtgttctggtgtaccacctaacttctgggcttctgcacaaagaactgtccattcatagctgcgaggttaaaggcattgagtggacatccctgacttccttcctgtcatttgcaacatccacacctaacaacatgggactggttcgtaatgaattgcaactcgttgatttgccaaccggtcggagcattgcatttagaggtgaaagaggcaatgacgaaagcgctattgagatgatcaaagtctcacacctgaaacagtatttggctgtggtgtttagagataaacccctggaactctgggacgtccgaacttgcacgttactcagggaaatgagcaaaaacttcccgactatcacggctctggagtggagtccaagccataacctgaaaagtctgcgtaaaaagcaattggctacacgcgaggcaatggctaggcagaccgtagtatcggatacagagttgagcattgtggagtcaagcgtaataagtctgctacaagaagccgaatctaaatcagaactgtctcagaacatttctgctcgagagcacttcgtcttcaccgatatcgatgggcaggtttatcatttaaccgtggagggcaattctgttaaggactcagcacggatcccgcccgatggtagtatggggtccatcacttgtattgcctggaaaggagacactctggtgctgggcgacatggacgggaacctgaacttctgggacttaaaaggcagagtaagtcgcggcatccccactcatcgatcatgggtcaggaaaatccggtttgcaccagggaagggaaaccagaaactgattgctatgtataacgacggcgccgaagtatgggatactaaagaagtccagatggtcagcagcctgaggtctggacggaacgtgacattccggatcctggacgtggattggtgtacctcagataaagttatactggcctctgacgatggatgtatccgagttttagaaatgagtatgaagagtgcatgtttccggatggacgaacaggaactgacagaaccagtgtggtgcccctacctccttgtaccacgagcctccctcgcactaaaggctttcctcctgcaccagccgtggaatggccagtatagcttagacatatcccatgttgattatcccgaaaatgaggaaatcaaaaacctgctacaagagcagctgaatagtttgtcaaacgacatcaagaaactcctactcgaccctgaatttacattattgcaacggtgtctcctggtttctaggctgtacggcgacgaaagcgaattgcatttttggactgtcgctgctcattatctgcattctctgtcacaggagaaatcggcatcgaccactgctcccaaggaagctgccccacgggacaaactgtccaaccccctggacatatgctatgatgtcttgtgcgaaaatgcttactttcagaaattccagctcgagagagtcaatctgcaggaggtcaagaggtctacctatgaccatactcgcaaatgtacagaccagttgttgttacttgggcagacagatcgagccgtccagctgctcctggagacctcagcagataatcagcattactattgcgactctttaaaagcatgtttggtgacaaccgtaacctcctctggcccctctcagtccacaatcaagctggtagcaacaaatatgatagcaaatggcaagctcgctgagggcgttcagctgctgtgcctgattgataaggcggcggacgcttgccgctacctgcagacctatggagagtggaacagggccgcatggttggcaaaagtgagactcaatccggaagaatgcgccgacgttctacgaaggtgggtggaccacctgtgttccccacaggtcaatcagaaatccaaggctttgctggtgctcctgtcgctgggctgtttctttagtgtagctgagaccctccactcgatgcggtactttgacagagccgcactcttcgttgaggcatgtctgaaatatggagcatttgaggtgacagaagatacagagaagcttatcactgctatctatgccgattacgcccgaagcctcaagaacctcgggttcaagcagggcgctgtccttttcgcttctaaagcgggcgccgcaggcaaggacttactgaacgaacttgagtcccccaaggaagagcctattgaagagtag

SEQ ID NO: 196695 - DNA, 3675 bp, Artificial Sequence
  derived and/or modified sequence
atgctgccctacacagtgaacttcaaggtgtctgcccggaccctgaccggggccctgaatgcccacaacaaggctgctgtggactggggctggcagggcctgattgcctacggctgccacagcctggtggtggtgattgacagcatcacagcccagaccctgcaggtgctggagaagcacaaggcagatgtggtgaaggtgaagtgggcccgggagaactaccaccacaacatcggcagcccctactgcctgcggctggccagcgcagatgtgaatggcaagatcatcgtgtgggatgtggccgccggcgtggcccagtgtgagatccaggagcacgccaagcccatccaggatgtgcagtggctgtggaaccaggatgccagccgggacctgctgctggccatccacccccccaactacatcgtgctgtggaatgctgacaccggcaccaagctgtggaagaagagctatgctgacaacatcctgtccttctcctttgacccctttgaccccagccacctgaccctgctgaccagcgagggcatcgtgttcatcagtgacttcagccccagcaagcccccatctggccctgggaagaaggtgtacatcagcagcccccacagcagccctgcccacaacaagctggccacagccactggagccaagaaggccctgaacaaggtgaagatcctgatcacccaggagaagcccagcgctgagttcatcaccctgaatgactgcctgcagctggcctacctgcccagcaagaggaaccacatgctgctgctgtacccccgggagatcctgatcctggacctggaggtgaaccagacagtgggcgtcatcgccatcgagaggactggagtgcccttcctgcaggtgatcccctgcttccagagagatggcctcttctgcctgcatgaaaatggctgcatcaccctgcgggtgagaagaagctacaacaacatcttcaccaccagcaatgaggagccagaccctgaccctgtgcaggagctgacctatgacctgcggagccagtgtgatgccatccgggtgaccaagacagtgcggcccttctccatggtgtgctgccctgtgaatgaaaatgctgctgccctggtggtgtctgatggccgggtgatgatctgggagctgaagtctgctgtgtgcaacagaaacagcaggaacagcagcagtggagtgagccccctgtacagccctgtgtccttctgtggcatccctgtgggcgtgctgcagaacaagctgcctgacctgagcctggacaacatgattggccagagcgccatcgccggggaggagcacccccggggcagcatcctgcgggaggtgcacctgaagttcctgctgaccggcctgctgagcggcctgcctgccccccagtttgccatccgcatgtgcccccccctgaccaccaagaacatcaagatgtaccagcccctgctggccgtgggcaccagcaatggatctgtgctggtgtaccacctgaccagcggcctgctgcacaaggagctgagcatccacagctgtgaggtgaagggcatcgagtggaccagcctgaccagcttcctgagctttgccaccagcacccccaacaacatgggcctggtgagaaatgagctgcagctggtggacctgcccaccggccgcagcatcgccttccggggggagagaggaaatgatgaaagtgccatcgagatgatcaaggtgagccacctgaagcagtacctggccgtggtgttccgggacaagcccctggagctgtgggatgtgaggacctgcaccctgctgcgggagatgagcaagaacttccccaccatcacagccctggagtggagccccagccacaacctgaagagcctgaggaagaagcagctggccacccgggaggccatggcccggcagacagtggtgtctgacacagagctgagcatcgtggagagcagcgtcatcagcctgctgcaggaggccgagagcaagtctgagctgagccagaacatcagcgcccgggagcactttgtgttcacagacattgatggccaggtgtaccacctgactgtggagggcaacagcgtgaaggacagcgcccgcatccccccagatggctccatgggcagcatcacctgcatcgcctggaagggggacaccctggtgctgggggacatggatggcaacctgaacttctgggacctgaagggccgggtgtcccggggcatccccacccaccgctcctgggtgaggaagatccgctttgcccctggaaaaggaaaccagaagctgattgccatgtacaatgatggagctgaggtgtgggacaccaaggaggtgcagatggtgagcagcctgcggagcggcagaaatgtgaccttccgcatcctggatgtggactggtgcaccagtgacaaggtgatcctggccagtgatgatggctgcatccgggtgctggagatgtccatgaagagcgcctgcttcaggatggatgagcaggagctgacagagcctgtgtggtgcccctacctgctggtgccccgggccagcctggccctgaaggccttcctgctgcaccagccctggaatggccagtacagcctggacatcagccacgtggactacccagaaaatgaggagatcaagaacctgctgcaggagcagctgaacagcctgagcaatgacatcaagaagctgctgctggaccctgagttcaccctgctgcagcgctgcctgctggtgtcccggctgtatggagatgagagcgagctgcacttctggacagtggccgcccactacctgcacagcctgagccaggagaagagcgccagcaccacagcccccaaggaggccgccccccgggacaagctgagcaaccccctggacatctgctatgatgtgctgtgtgaaaatgcctacttccagaagttccagctggagcgggtgaacctgcaggaggtgaagaggagcacctatgaccacaccaggaaatgtacagaccagctgctgctgctgggccagacagacagagctgtgcagctgctgctggagaccagcgctgacaaccagcactactactgtgacagcctgaaggcctgcctggtgaccaccgtgaccagcagcggccccagccagagcaccatcaagctggtggccaccaacatgattgccaacgggaagctggccgagggcgtgcagctgctgtgcctgattgacaaggctgctgatgcctgccgctacctgcagacctacggggagtggaacagagctgcctggctggccaaggtgcggctgaaccctgaggagtgtgctgatgtgctgcggcgctgggtggaccacctgtgcagcccccaggtgaaccagaagagcaaggccctgctggtgctgctgagcctgggctgcttcttctctgtggccgagaccctgcacagcatgagatactttgacagagctgccctgtttgtggaggcctgcctgaagtatggagcctttgaggtgacagaggacacagagaagctgatcacagccatctatgctgactatgcccggagcctgaagaacctgggcttcaagcagggcgctgtgctgtttgccagcaaggccggggccgccggcaaggacctgctgaatgagctggagagccccaaggaggagcccatcgaggagtag

SEQ ID NO: 196696 - DNA, 3675 bp, Artificial Sequence
  derived and/or modified sequence
atgctgccctacaccgtgaacttcaaggtgagcgcccggaccctgaccggcgccctgaacgcccataacaaagctgctgttgactggggttggcagggcctgatagcctatgggtgtcatagcctcgtggtcgtcattgattccattactgcccaaaccctacaggtcctggagaaacacaaggctgacgtcgtgaaggtaaagtgggcaagagagaattaccatcacaacattggctcgccatactgtttgcggctcgcgagcgctgatgtgaatggcaaaattatcgtgtgggatgtggccgccggagttgcccagtgcgaaattcaggagcacgcaaagcctatccaggacgtccagtggctctggaaccaagatgctagcagagacttgttgctggctatacacccacccaactacatcgtgctgtggaacgccgacactgggacgaagctgtggaagaaaagctacgcggacaatatcctgtctttttcttttgatccctttgatccctcacaccttacgctcctgacatctgagggtatcgtgtttatcagcgatttttcaccgtctaagcccccaagcgggccaggcaaaaaagtgtatatcagctcaccacattcatcccccgcacacaataaactggcaaccgctacaggagccaaaaaggccctaaataaggtcaaaatcctaatcacacaagagaagcccagcgccgaattcatcaccctgaatgattgtctgcagctggcctacctgccgtctaagaggaatcacatgcttctcttatatcccagggaaatcctgatattggacctggaggtgaaccaaacagtcggggtcatcgctatcgagaggacaggcgttccctttctgcaagttatcccctgttttcaacgagatggtttgttctgtctgcacgagaatggttgcattaccctgcgtgtccgccggagttataataatatcttcaccactagcaatgaggaaccagaccctgatccggtccaggagctgacttacgacttaaggtcccagtgtgacgcaattagggtgacgaaaaccgtgagaccattcagtatggtctgctgtcctgtgaatgaaaatgcagctgctctcgtggtgtctgatgggcgagtaatgatttgggagttgaagagtgctgtctgcaacaggaattcacggaactcttctagtggggtctctcccctctattcaccagtgagcttctgcgggattcctgtcggcgtcctgcaaaataaattgccagatctaagtctggataacatgatcggccaatcagccattgcaggagaagaacaccctagaggatctattcttcgggaagttcatcttaagttcttgctgacaggtctcctgtctgggctgccagcgccccagtttgccatacggatgtgcccacccctgaccaccaaaaacattaaaatgtaccagcctctgctcgcggtaggtaccagcaatggatctgtcctggtgtatcacctgaccagtggtctcctgcacaaggagctgtccattcactcctgcgaggttaaggggattgaatggacttcccttactagtttcctgtcctttgcgactagcactcccaacaatatgggtctggtacgcaacgaattacagcttgttgacctgcccaccggaagatccattgcctttaggggagagcggggcaacgacgaaagcgcaatagagatgattaaggtgtcccacctcaagcagtatcttgctgtggttttccgcgataaacctctggaactgtgggacgtccgcacttgtacacttctgagagaaatgtctaagaatttccctacgataacagcgttagaatggagcccttctcataacctaaagtccctgagaaagaagcagctggccactcgagaagctatggccagacagactgtcgtaagtgataccgagctgagcattgtggaatcctctgtgatctccctgctgcaggaagctgaaagcaagtccgagctctctcagaatatcagcgcccgtgagcatttcgtgtttacagatatcgatggccaggtctaccacctgacagtagaagggaactcagtgaaggatagcgctagaattccgccagatggctcaatgggctccattacctgcattgcctggaagggggacacactcgtgctgggggacatggacggcaatctgaacttctgggatctgaagggtagagtcagcaggggaatccctacacatcgctcctgggtgcgcaaaatcaggtttgcacccggtaagggcaaccagaaacttatcgccatgtataacgatggtgcagaagtatgggatacaaaggaagtccagatggtgagcagcctcagatctgggcgaaacgtcaccttcaggatcttggacgtcgattggtgcacctctgataaagtgattctcgcatcggatgacggctgcatacgggtgcttgagatgtccatgaaatcagcctgcttccgcatggacgagcaggaactgacagagcccgtgtggtgcccttacctcctcgtgcctagggcctcacttgccctgaaagcgttcctcctacaccagccttggaatggacaatattccctcgacatatctcatgtagattatcccgagaacgaggaaattaagaatctgctacaggagcagttgaattccctctctaacgacatcaaaaaacttctactggatccggagtttaccctcctccaaaggtgcctgcttgtcagcaggttgtatggtgatgagtccgagctacatttctggaccgtggcggcccattacctgcactcactctcccaggagaagagtgctagtaccaccgcccctaaggaggcggcgcctagagataaacttagcaatcctttggatatctgctacgatgtcctgtgcgagaacgcctacttccagaagtttcagctggaaagggtcaacttacaggaagtgaagagaagtacttatgaccatacccgcaaatgcacggaccaattgttgctgctcggccagactgacagggcagtgcagctactccttgagacttctgcagacaatcaacactactattgtgatagcctaaaagcctgtctcgttaccacggtgacttccagcggccccagccagtcgaccataaagttggtggcaaccaacatgattgcaaacggcaaactagcggagggtgtgcagctcctgtgtttgatcgacaaagccgctgatgcctgccgctacctacaaacctatggagagtggaaccgcgcagcctggcttgccaaggtcaggttaaatccggaggagtgtgcagatgtcctgcgccgatgggtcgaccacctctgctctcctcaggtgaatcagaaaagtaaggccctgttagtgctgctgtcacttggttgttttttcagcgtggccgaaacactccactcaatgcggtatttcgatcgcgccgcgctctttgtggaggcttgtctgaagtatggcgccttcgaagtaacagaagacactgaaaagctgattaccgccatttacgctgattacgccagatccctgaagaacctcggcttcaagcagggcgcggtgctgtttgcgagcaaagccggagccgcagggaaagacttgctgaacgaactcgagagtccgaaagaagagccgatcgaggaatag

SEQ ID NO: 196697 - DNA, 3675 bp, Artificial Sequence
  derived and/or modified sequence
atgttgccttataccgtcaactttaaagttagcgccagaaccctgactggggcacttaacgcacataacaaagcagcagtggactggggttggcagggtctcattgcatatggctgtcactcgctggtcgtagtcattgattccatcactgcccagactctgcaagtcttggaaaagcacaaagctgatgtggttaaggtgaagtgggctagagagaattaccaccacaatatcggttccccctactgtctcagactggcatctgctgacgtgaatggaaaaatcatcgtttgggatgtagccgctggtgttgcccagtgcgagattcaggagcacgcgaagccaatccaagatgtgcagtggctgtggaatcaggatgccagccgtgacctcctcctagccatccacccgccaaattacattgtgttgtggaacgctgacacaggcactaaactatggaaaaaatcctatgccgacaacattctttccttttctttcgacccctttgacccatcacatctcacgctcctgacttcggaagggattgtgttcatctcagacttcagcccttctaagcctccgtctggtccaggaaaaaaagtctacatctcttcgcctcattcatcacctgctcacaataagctggcgaccgccaccggtgcaaagaaggcactaaataaggtgaagattctgatcacgcaggagaaacctagcgctgagttcatcaccttgaacgattgcttacaactcgcatatctgccgtctaagaggaatcatatgcttctgttatacccacgagaaatcctcatcctggatttggaagtaaatcagactgtgggggtcatcgcgatcgaacgcaccggggtgcccttcctgcaggtgatcccgtgtttccaacgggatggcttattctgtctgcatgagaacggatgcataaccttgcgggtgaggcggtcctacaacaacatcttcactacatccaatgaagaacccgatcctgaccctgtccaagaactcacctatgatttacgctcccagtgtgacgctattcgcgtgacgaagaccgtgaggccgtttagcatggtttgctgccctgtcaacgaaaacgcggcagccctggtggtgtccgacggtcgcgtcatgatatgggaactcaagagtgccgtctgtaaccggaactcccggaattccagcagcggtgtttcccctttatactcacctgtgtcattttgcgggataccagttggtgtgctgcaaaataagctgccagatctatcattggataacatgatcggacaaagcgctatcgcaggagaagagcatccacgtgggagcatccttcgggaagtacacctaaagttcctgttaaccggcctgctgtccggattgcccgcaccccagttcgccattaggatgtgtccccctcttaccacaaaaaatatcaagatgtaccagccgttgctggctgttgggacctctaacggcagtgtgctggtgtatcacctaacctccggtctgctccataaagaactctccattcatagttgcgaggtgaaggggattgagtggacgtcgctgacatcattcctctcattcgctacctcaactccaaacaatatgggactggtgcgcaacgagctccagctggtggatctgccaacaggaaggagcatagctttccgcggagaaaggggtaacgatgaaagtgccatcgaaatgatcaaagtgtcacatttaaaacagtatctcgcagtggtgtttcgcgataagcctctagagctgtgggacgtgcgtacgtgtacgcttctaagggagatgagcaaaaatttccccacaatcactgctctagagtggagcccaagtcacaatcttaaatcgctcagaaagaaacaattagcgacccgggaggccatggcacggcagaccgtcgtgtccgatacagaactcagcattgtggaatcttctgtaataagtttgttgcaagaagcagaaagcaagtcagagttatcccaaaacatttctgccagggagcactttgtgttcactgatattgacgggcaggtgtaccaccttacagtggagggtaatagcgtcaaagattctgcccgaattcccccagatggatctatgggttctattacttgcatcgcatggaagggggacaccctcgtgttgggcgacatggatggaaatctcaatttctgggaccttaaaggacgcgtctcccggggtataccaacacataggtcttgggtgaggaagattcgattcgcccctggcaaaggaaatcagaaactgattgctatgtacaatgacggcgctgaggtttgggatacgaaggaagtacagatggttagctccctgagatcgggtaggaatgtgacatttaggattcttgatgtggactggtgcaccagcgataaggtgattctagcatcagatgatggctgtattcgggtgttagagatgtctatgaagagtgcctgtttcagaatggatgaacaggagttgaccgagccagtgtggtgcccatatttgctggtgccaagggcatccctcgccttgaaggcatttttgttgcaccagccctggaatggacaatacagtttggacatttcccacgtggactatccagagaatgaggagattaagaatctgctgcaggagcagctaaacagcctctcaaacgacataaaaaagctgctgctcgatcccgagtttactctgcttcagcggtgtctgctggtgtctcgcctctacggggacgagtctgagctccatttctggacagtcgcagcccattacctgcatagtctgtcccaagaaaagtccgcctctacgaccgctcccaaggaagccgctcctcgcgacaaactctcaaacccacttgacatctgctatgatgttctgtgtgaaaatgcctactttcagaagttccagctggagcgggtaaacctccaggaggtcaaacgatcaacttacgatcacactcgaaagtgtacggatcaattattgttgcttggccagacagatagagcagtccagctgctgctcgagactagtgctgataaccaacactattactgcgattcacttaaggcttgcctggtgactactgtcacctcttcagggccttctcaaagtaccatcaagttggtcgccactaacatgatagctaatggtaaattagcagaaggagtgcagctgctctgcctgattgataaagccgctgacgcatgcagatacctccagacctacggcgaatggaatcgggctgcctggctggcaaaggtgcgcttaaaccccgaagagtgtgccgacgtcctgcgcagatgggtggatcatctctgtagcccccaggtcaatcaaaaaagtaaggcattgctggtgcttctaagcctgggctgcttcttcagcgtcgccgagacactgcattccatgcgttattttgaccgggcagccctgtttgttgaggcttgcctgaaatatggagcgttcgaggtcaccgaagatacggagaaattaattaccgcaatctatgctgattacgccaggtcgctgaagaatcttgggttcaagcaaggtgcggtgctgtttgccagtaaagcaggggcagccggaaaggacctactgaatgagttggagtctccaaaggaagagccgatcgaagagtag

SEQ ID NO: 196698 - DNA, 4724 bp, Artificial Sequence
  derived and/or modified sequence
cgcctaagcggcggaactctggagagtgcggaacctaggatcctaggaaactgaaggcaacggaacctgggggcgatggaatccgggagcggtggaacccggagcctgtagaacttgaatctagaggaacctgacagcggcgccgagggggccacccggactctgtttggaacggaagcacagtgtccgccgcttcctggttgcgggtcagcgcccaggtcctgggctggccgccgggatgttgccctacacagtgaacttcaaggtgtcggcgcgcaccctcacgggggccctcaacgcccacaacaaggcggcggtggactggggctggcaaggtttaattgcttatggatgtcattcacttgtggtagtgattgattccattactgcccaaactcttcaagttttagaaaagcataaagctgatgttgtaaaggttaaatgggccagggaaaactatcaccataacattggctcaccatattgcttacggttagcttctgctgatgtcaatgggaagatcatcgtctgggatgtagcagcaggagtagctcagtgtgagatccaagagcatgccaagcctatccaggatgttcagtggttgtggaatcaagatgcttcccgcgatttactgcttgctatccacccgccaaattacattgtgctctggaatgccgacactggcaccaaactatggaagaagagctatgcagataacattctttctttttcttttgacccttttgatccctcacatttaactttgcttaccagcgagggtattgttttcatctcagacttctccccatccaagcctccctcaggccctgggaaaaaagtttacatatccagcccacactctagcccagctcataacaagctggccacagccacaggtgccaagaaagctctaaataaagtaaaaattttaatcactcaagagaaacctagtgctgaattcataactctcaatgattgccttcagttggcatacctgccttcaaaaaggaatcacatgttgttgctctatcctcgagagattttaatccttgaccttgaggtgaatcagacggtgggtgtgattgcaatagaacgcacaggagttccatttttacaggtaataccctgctttcagcgtgatggtttattttgtctacatgaaaatggttgtataactttacgtgttcgaagatcttataataacatttttaccacttcaaatgaggaaccagatccagatccagttcaggagcttacctatgatttacgaagccagtgtgatgcaatcagggtgacaaaaaccgtccgtcccttcagtatggtgtgctgtcctgtcaatgagaatgcagccgccctcgtagtgagtgatggcagggtcatgatatgggaactcaagtctgcagtttgtaatcgaaattcacggaacagtagttctggtgtgtcacctttatattcaccagtgtctttctgtggaattcctgtaggagtgctacagaataaactcccagacctttccttagataacatgattgggcaaagtgcaattgctggggaagaacatcccagaggttcaattctgcgggaagtgcacctcaagttcctgctgacgggactgctttcaggactgcccgcaccacagtttgctattcgtatgtgtccaccgttgaccacaaaaaacatcaagatgtatcagccactgctggctgttggtacaagtaatggttctgtcctggtgtaccatctcaccagtggtctgctacacaaagagttaagcatccactcatgtgaagtcaagggtattgaatggacaagtttgactagttttctttcttttgctacctcaacaccaaacaatatgggattagtgagaaatgaacttcaactggttgatcttccaacaggtaggagcattgcttttcgtggtgaaagaggcaatgatgaatctgccatcgaaatgattaaagtatctcatttgaagcagtatttggcagtcgtattcagagataaacccctggagctatgggatgttaggacttgtacccttcttagagagatgtccaaaaacttccctacaataactgctttggagtggtcaccatctcacaacttgaagagcctgagaaagaagcaacttgcaactcgagaggccatggcccgccagaccgtagtctcagacacagagctgagtattgttgaatcatctgtgatcagcttgctgcaggaggcagaaagtaaatctgaacttagtcagaacatctctgcccgggaacattttgtatttaccgatattgatggccaagtgtatcatctcactgttgaaggaaactcagtaaaagacagtgctcggattccaccagatggaagtatgggtagtattacctgcatcgcttggaaaggtgatacattagtgcttggagatatggatggaaatttaaatttctgggacttgaaaggcagagtatccagaggaatacccacacaccgaagttgggtgaggaagattcgttttgctcctggtaaaggaaatcaaaaattaatagcaatgtacaatgatggagctgaagtgtgggatactaaagaggttcagatggtgagcagtttaagaagtggcagaaatgtgacctttcgtatattggatgtggactggtgtacgtcagataaagtgatcttggcctcagatgatgggtgcatcagagtcctagagatgtctatgaagtctgcgtgctttagaatggatgaacaagagttaaccgagcctgtgtggtgcccctatctccttgttccaagggcctctcttgccttgaaagccttcttattacaccagccttggaatggacagtattctttggacatttctcatgttgactatccagaaaatgaagaaataaagaatctcctccaagaacagttgaattcattgtctaatgacataaagaaactgttgcttgatccagaattcactctcttgcagaggtgcctgcttgtttcaaggctctatggtgatgaatcggagctgcacttctggactgtcgctgcccactacctgcacagcttatcccaggaaaagtcagccagcacaacagctcctaaagaagctgctcctcgagacaaactgagcaacccactggatatatgctatgacgtgctctgtgaaaatgcctactttcagaaatttcagctagaaagggttaatctgcaggaagtgaaacggtcaacttatgatcatacaaggaaatgtacagaccagctactgctcttgggtcaaacagacagagctgtgcagttgctgttggaaacaagtgcagataaccagcattattactgtgattcactgaaagcctgtttagtcactactgtcacctcgtcaggcccctctcagagcaccattaagttggtggcaacgaatatgattgccaatggcaaattggcagagggcgttcagttgctctgcctgatagataaggctgcagacgcctgccgctacctgcagacatacggcgagtggaatcgggctgcatggctggcaaaagtccgtttgaatcctgaggagtgtgccgatgttttaaggcggtgggttgaccacctttgttctccacaagtcaatcagaaatcaaaggctctcctggttctcctctctctgggctgcttttttagcgtggcagagacgcttcacagcatgagatactttgatagagcagccttatttgtggaagcttgcctcaagtatggagcatttgaagtcactgaggacacagagaaactcatcactgctatatatgcagattatgcccggagtttgaagaacctcggttttaagcagggagcagttctctttgcttcaaaagccggagcagctggcaaagacttattgaatgagcttgagtcccccaaggaagaacccattgaagagtgacagcttaataaatgccagggaatctgacctggaaggcagatgggagggggctggtctggctgtggccaccgtcacagtccaggatgaagaggagtacagggtcctgtgagctgtttgaccactgttctaagactatgtgtgcccaaaagcacataagcatctatgttgagagtaagtttgtatcctgcgttggtctcagaaagaacgtgaatgcttaagattttgaaagtacataatattttatactttgggagagagctttaagagtccctggaaatactttttaatttttttaacttaaaattcaagagactgaatcacttttctcattgattaaatgtaaagattattgagaaacctatagtaaatgaaatttgtgagatgttttctcaaatatatgctgtgcctgtacttatatacagtctttcaagagagatacaaacaaggcagaaacatttaaactagtattaaaggtagtttaccaaagcattttttgttttcttaccttgaaaacacagaaccgttaattccttggtttaagcagttgctaagttttgtaattttaggctcagaggaccataggaggttttaagatttatgtttagtccgataggtgaggtctttgatattttgaattttaactccttttatgatacatcacagtaacctcatttttgaagtctttctttgtactttaatgttctctctgttctaatagttgaagtatgagatgtaactattataaactgttgctgaaaacataaatgtctgtaacttacaaacatgataaataaattaaaaattccatcca

SEQ ID NO: 196699 - protein, 708 aa, Artificial Sequence
  derived and/or modified sequence
MANEEDDPVVQEIDVYLAKSLAEKLYLFQYPVRPASMTYDDIPHLSAKIKPKQQKVELEMAIDTLNPNYCRSKGEQIALNVDGACADETSTYSSKLMDKQTFCSSQTTSNTSRYAAALYRQGELHLTPLHGILQLRPSFSYLDKADAKHREREAANEAGDSSQDEAEDDVKQITVRFSRPESEQARQRRVQSYEFLQKKHAEEPWVHLHYYGLRDSRSEHERQYLLCPGSSGVENTELVKSPSEYLMMLMPPSQEEEKDKPVAPSNVLSMAQLRTLPLADQIKILMKNVKVMPFANLMSLLGPSIDSVAVLRGIQKVAMLVQGNWVVKSDILYPKDSSSPHSGVPAEVLCRGRDFVMWKFTQSRWVVRKEVATVTKLCAEDVKDFLEHMAVVRINKGWEFILPYDGEFIKKHPDVVQRQHMLWTGIQAKLEKVYNLVKETMPKKPDAQSGPAGLVCGDQRIQVAKTKAQQNHALLERELQRRKEQLRVPAVPPGVRIKEEPVSEEGEEDEEQEAEEEPMDTSPSGLHSKLANGLPLGRAAGTDSFNGHPPQGCASTPVARELKAFVEATFQRQFVLTLSELKRLFNLHLASLPPGHTLFSGISDRMLQDTVLAAGCKQILVPFPPQTAASPDEQKVFALWESGDMSDQHRQVLLEIFSKNYRVRRNMIQSRLTQECGEDLSKQEVDKVLKDCCVSYGGMWYLKGTVQS

SEQ ID NO: 196700 - DNA, 2127 bp, Artificial Sequence
  derived and/or modified sequence
atggccaatgaggaggacgaccctgttgtgcaggagatcgatgtctatctggctaagtcactggctgagaaactgtatctgtttcaataccccgttaggcccgcctctatgacatacgatgacatacctcacctatccgcgaagatcaaaccaaaacaacagaaggttgagctcgagatggccatagacacgctgaatcccaactattgtaggtccaagggggagcagattgccttgaacgtggacggcgcctgcgccgatgagactagtacgtatagttcgaaactcatggacaagcagacattctgttcctctcagactaccagcaacacgtcccgttacgctgctgccctgtaccggcagggggaattgcacctgacgcccctgcacggtatactgcagctgcgaccctctttttcttacctggacaaggcagatgctaagcacagagaacgtgaagccgccaatgaggcgggcgatagcagccaagacgaggccgaggatgacgttaagcagattaccgtcagattctctaggcccgagtctgagcaggctagacagaggcgcgtccagtcttacgagttcctacaaaagaaacatgccgaagagccatgggttcacctacactactatggtctgcgggactctagatcggagcacgagaggcagtacctcttatgtccaggcagcagcggcgtggaaaacacagagctggtcaagtcccccagtgaatatctgatgatgctgatgcctccgtcgcaggaagaggagaaagacaagccagtcgctccttccaacgtcctgtcaatggctcagctgagaaccttgcctctggcagaccagattaaaattttgatgaaaaacgtgaaagttatgccatttgccaacctgatgtccctccttggacctagtatcgatagcgtggctgtgctgcgtggaatccagaaggtcgctatgctcgtccagggaaactgggtggtgaagtcagatattctgtaccccaaagatagctcttccccacacagtggtgtgcccgccgaagttttgtgtcggggcagagacttcgtgatgtggaagttcacgcagtcaagatgggtcgtacgcaaggaggttgccacggtgaccaaactgtgcgcggaggacgtaaaggacttccttgagcacatggccgtggtgcggataaacaaaggatgggagttcatcttaccatacgatggggagttcatcaaaaaacatccagatgtggtgcaaaggcagcacatgttgtggacgggcatccaggcaaaactggaaaaagtgtataacctggtcaaggaaactatgccgaagaaacccgacgcgcagtcagggcccgcgggcttggtgtgcggggaccagagaatccaggtagctaagacaaaagctcaacagaaccatgccctgttggagcgtgaattgcagcggcggaaagagcagcttcgcgttcctgccgtacctccaggcgttcggatcaaagaagagccagtttccgaagagggcgaggaggacgaggagcaggaggcagaggaagagccaatggatacctcaccaagtggactccattctaaattggccaacggcctcccgctgggcagagctgctggaacagacagcttcaatgggcaccctcctcagggatgcgcctctaccccggtggctagggagttgaaagcttttgtggaagccacgttccagagacaattcgttctcactctaagcgagctcaagagactttttaatctgcacctggcatctctgcctccaggccacaccctatttagtggaatctcggacaggatgctgcaagacaccgtccttgcagcgggctgcaaacagattctggtgcctttccccccccagaccgcggcctcccccgatgagcagaaggtgttcgcgctttgggaaagcggggacatgagcgatcaacacaggcaggtgcttctggagattttttccaagaattacagagtgagacgaaatatgattcagtctcgcctcacacaggagtgcggagaagatctgtcgaaacaggaggttgataaggtcctgaaagactgctgtgtgtcttacggcggcatgtggtacctgaaaggcacagtacagtcttag

SEQ ID NO: 196701 - DNA, 2127 bp, Artificial Sequence
  derived and/or modified sequence
atggccaatgaagaagatgatcctgtggtgcaggagattgatgtgtacctggccaagagcctggccgagaagctgtacctgttccagtaccctgtgcggcctgcctccatgacctatgatgacatcccccacctgagcgccaagatcaagcccaagcagcagaaggtggagctggagatggccatcgacaccctgaaccccaactactgccgcagcaaaggagagcagatcgccctgaatgtggatggagcctgtgctgatgagaccagcacctacagcagcaagctgatggacaagcagaccttctgcagcagccagaccaccagcaacaccagccgctatgctgctgccctgtaccggcagggcgagctgcacctgacccccctgcacggcatcctgcagctgcggcccagcttctcctacctggacaaggcagatgccaagcaccgggagcgggaggccgccaatgaggccggggacagcagccaggatgaagcagaagatgatgtgaagcagatcaccgtgcgcttcagcaggcctgagagcgagcaggcccggcagaggagagtgcagagctatgagttcctgcagaagaagcatgctgaggagccctgggtgcacctgcactactacggcctgcgggacagccgctctgagcacgagcggcagtacctgctgtgccccggcagcagtggagtggagaacacagagctggtgaagagccccagcgagtacctgatgatgctgatgccacccagccaggaggaggagaaggacaagcctgtggcccccagcaatgtgctgtccatggcccagctgcggaccctgcccctggccgaccagatcaagatcctgatgaagaatgtgaaggtgatgccctttgccaacctgatgagcctgctgggccccagcattgattctgtggccgtgctgcggggcatccagaaggtggccatgctggtgcagggcaactgggtggtgaagagtgacatcctgtaccccaaggacagcagcagcccccacagcggcgtgcctgctgaggtgctgtgccggggccgggactttgtgatgtggaagttcacccagagccgctgggtggtgaggaaggaggtggccaccgtgaccaagctgtgtgccgaggatgtgaaggacttcctggagcacatggctgtggtgcgcatcaacaagggctgggagttcatcctgccctatgatggagagttcatcaagaagcacccagatgtggtgcagaggcagcacatgctgtggacaggcatccaggccaagctggagaaggtgtacaacctggtgaaggagaccatgcccaagaagccagatgcccagagcggccctgctggcctggtgtgtggggaccagaggatccaggtggccaagaccaaggcccagcagaaccacgccctgctggagcgggagctgcagaggaggaaggagcagctgcgggtgcctgctgtgcccccaggagtgcgcatcaaggaggagcctgtgtctgaggagggggaggaggatgaggagcaggaggccgaggaggagcccatggacaccagccccagcggcctgcacagcaagctggccaacggcctgcccctgggccgggccgccggcacagacagcttcaacggccaccccccccagggctgtgccagcacccctgtggcccgggagctgaaggcctttgtggaggccaccttccagaggcagtttgtgctgaccctgtctgagctgaagaggctcttcaacctgcacctggccagcctgcccccaggccacaccctcttcagcggcatcagtgacaggatgctgcaggacacagtgctggccgccggctgcaagcagatcctggtgcccttccccccccagacagctgccagcccagatgagcagaaggtgtttgccctgtgggagagcggggacatgtctgaccagcaccggcaggtgctgctggagatcttcagcaagaactacagagtgagaagaaacatgatccagagccggctgacccaggagtgtggggaggacctgagcaagcaggaggtggacaaggtgctgaaggactgctgcgtgtcctatggaggcatgtggtacctgaagggcaccgtgcagagctag

SEQ ID NO: 196702 - DNA, 2127 bp, Artificial Sequence
  derived and/or modified sequence
atggccaacgaggaggacgaccccgtggtgcaggagatcgacgtgtacctagccaaatcacttgccgagaagctttacctgttccaataccccgtcaggcccgcgtcgatgacctacgatgacattccccatctcagcgcaaagattaaacccaagcaacagaaagtggagctggagatggccatagatactctgaacccaaattattgtcgctcgaagggtgagcagatcgctctgaatgtggatggtgcttgcgccgacgagacctcaacctattcgagcaagttaatggacaaacaaaccttttgtagctctcaaaccacatccaacacttcgcgttatgctgccgctctgtatcgccagggagagctgcacctcacgcccctccacggtatcctgcagttgagaccgtcctttagctacctcgataaagcagatgcaaagcaccgcgagcgagaagcggcaaatgaggcgggcgacagttcccaagacgaagcggaagacgacgtgaagcagatcacagtgcgcttttctagaccagagtctgagcaggcccgacagagaagagtccaaagctacgaatttctccaaaaaaaacacgcagaggaaccatgggtgcacttgcactactacggtctgagggattctcggtctgaacacgagcgccagtatctgctttgcccaggaagcagcggcgtagaaaatacagagcttgtaaagtctccatctgagtatctgatgatgctaatgccaccttcccaagaggaagagaaagacaaaccggtagcaccctctaatgtgcttagcatggcgcagctccggaccctgccgctggctgatcaaattaagattctgatgaaaaacgtgaaagtcatgcctttcgctaaccttatgagccttctcggcccaagcatcgactcggtcgccgtgctgcggggaatccagaaggtagctatgctggtgcaaggcaactgggttgtgaaaagcgatattctatatccaaaggactcaagttccccacatagcggcgtcccggcagaagtcctgtgccggggacgagactttgtgatgtggaaattcacccaaagcagatgggtggtgcgaaaggaggtcgccaccgtgactaagttatgtgccgaagatgtaaaggatttcctggagcatatggctgtggtcaggataaacaagggctgggagtttatcctcccatatgacggcgagtttattaaaaagcaccctgacgtggtgcaacggcagcacatgctgtggacaggcatccaggctaaactggaaaaggtgtacaatctggtaaaggaaacgatgcctaaaaagccagatgctcaatcaggaccagctgggttagtgtgcggcgatcagagaatacaagttgcgaagactaaggctcagcaaaaccacgcactccttgagcgggagctacagcggcgaaaagagcagttgagggttcccgccgtcccacccggggttcggatcaaagaagaaccagttagcgaagagggggaagaggatgaggagcaggaagccgaggaggaaccaatggacactagtccctcaggtctccatagtaaattggcaaacggtctaccactgggacgagctgctggaaccgactcattcaacggacaccccccccaggggtgtgctagcacccctgttgctagagagctgaaggcgtttgtagaagccacttttcagcgccagtttgtgctgaccctttccgagcttaagcgactgtttaatcttcatctagcaagcctgccacccggccataccctgtttagcggtatttctgatcggatgctgcaagacacagtgctggcggccgggtgtaaacaaattctcgtaccattccctccccagaccgcggcttctcctgatgaacagaaggtatttgccctgtgggaaagcggggacatgagcgatcagcaccgtcaggtcctcctggaaatctttagtaaaaactatagagtgcgcaggaatatgattcagagtaggcttacacaggagtgcggagaagacctcagtaagcaggaagtcgacaaggtgttgaaagactgttgcgtgtcctacggaggaatgtggtatctgaagggcacagtgcaaagctag

SEQ ID NO: 196703 - DNA, 2127 bp, Artificial Sequence
  derived and/or modified sequence
atggctaacgaggaggatgatcccgttgttcaagagattgacgtatatttggctaagagcctcgccgaaaaattgtacctttttcagtaccccgtgaggcctgcttccatgacttacgacgatatcccacacctgtccgctaagattaagcccaaacaacaaaaagtcgagttggaaatggcaattgataccctgaaccctaactactgcaggtcaaaaggcgagcaaattgccctcaacgtcgacggggcatgcgccgacgagacatccacatattcaagcaagttaatggacaaacagaccttctgttcatcccagacaacaagtaatacaagtaggtatgccgctgccctttacaggcagggtgaacttcacctgacgcctctacacggtattttacagctgcgaccaagcttctcctatcttgacaaagctgacgccaagcaccgcgaaagagaagccgcaaacgaagctggagactcaagccaggacgaagcggaggacgatgtgaaacagattaccgtccgattttccagaccagaaagcgaacaggcgcgacagcggcgtgtacagagctacgaatttctgcaaaagaagcacgctgaagagccctgggtccacctgcactactatggcttgagggactcacgctctgagcacgagcgccagtacttattgtgtcccggttcctccggcgtcgaaaatacagagctggtgaagtccccatccgaatacctgatgatgcttatgcccccaagtcaggaggaggaaaaagacaagcccgtggcccctagtaatgttctatctatggcacaactgaggaccctgccactcgctgatcagatcaaaatcttaatgaagaacgtgaaggtaatgcccttcgccaatctgatgagcctactgggaccttctatcgattctgtggccgtcctcaggggaatccagaaggttgccatgctggttcagggtaattgggtcgtgaaatcggacattctgtatcctaaggatagctcttcaccacatagcggagtgcccgcagaagtactgtgccgcggtcgggacttcgttatgtggaaattcactcagagcaggtgggtcgtccggaaggaggtcgccactgtcactaagctatgcgccgaagatgtgaaggacttcttagaacatatggccgtagtccgaatcaataagggatgggaattcatcttaccgtacgacggtgagttcataaagaagcatcctgacgtggtgcagaggcagcatatgttatggacaggcatccaggcaaagctggagaaggtgtataacctcgtaaaagaaacaatgcctaagaaacctgatgcccaatcaggtccggctggcctggtctgcggggatcagcgcatccaagtggcgaagactaaagcccaacagaaccatgccttgcttgaacgggaattgcagcgacgcaaagaacagctgcgcgtacctgccgtccccccaggggttaggatcaaagaggagcctgtcagcgaggagggagaggaagatgaggaacaagaggcggaggaagaacctatggatacctctcccagtggtctgcactccaagctggctaatggtctacccctggggagagcggctggaactgactcatttaatggtcacccccctcagggttgcgctagtacacctgtcgccagagaattgaaggcctttgtggaagccactttccagagacaattcgtcctcacgctcagcgaacttaagcgactctttaacctgcacctggcaagcctcccacccggtcataccctgttctccggcattagtgaccgcatgttacaagacaccgtccttgccgcaggttgtaagcagattttggtgcctttcccaccacaaactgccgcatccccggacgaacagaaagttttcgctctctgggagagtggagatatgtcggaccagcacagacaggtgttattggaaatcttttccaagaactacagagtgaggaggaacatgatccagtcgcggttgacccaggagtgcggggaggacctttctaaacaggaagttgacaaagtgctcaaggactgctgcgtgagttacgggggaatgtggtatctgaaggggactgtacagagctag

SEQ ID NO: 196704 - DNA, 2127 bp, Artificial Sequence
  derived and/or modified sequence
atggccaacgaggaggacgaccccgtggtgcaggagatcgacgtgtacctggccaagagcctggccgagaagctgtacctgttccagtaccccgtgagacccgccagcatgacctacgacgacatcccccacctgagcgccaagatcaagcccaagcagcagaaggtggagctggagatggccatcgacaccctgaaccccaactactgcagaagcaagggcgagcagatcgccctgaacgtggacggcgcctgcgccgacgagaccagcacctacagcagcaagctgatggacaagcagaccttctgcagcagccagaccaccagcaacaccagcagatacgccgccgccctgtacagacagggcgagctgcacctgacccccctgcacggcatcctgcagctgagacccagcttcagctacctggacaaggccgacgccaagcacagagagagagaggccgccaacgaggccggcgacagcagccaggacgaggccgaggacgacgtgaagcagatcaccgtgagattcagcagacccgagagcgagcaggccagacagagaagagtgcagagctacgagttcctgcagaagaagcacgccgaggagccctgggtgcacctgcactactacggcctgagagacagcagaagcgagcacgagagacagtacctgctgtgccccggcagcagcggcgtggagaacaccgagctggtgaagagccccagcgagtacctgatgatgctgatgccccccagccaggaggaggagaaggacaagcccgtggcccccagcaacgtgctgagcatggcccagctgagaaccctgcccctggccgaccagatcaagatcctgatgaagaacgtgaaggtgatgcccttcgccaacctgatgagcctgctgggccccagcatcgacagcgtggccgtgctgagaggcatccagaaggtggccatgctggtgcagggcaactgggtggtgaagagcgacatcctgtaccccaaggacagcagcagcccccacagcggcgtgcccgccgaggtgctgtgcagaggcagagacttcgtgatgtggaagttcacccagagcagatgggtggtgagaaaggaggtggccaccgtgaccaagctgtgcgccgaggacgtgaaggacttcctggagcacatggccgtggtgagaatcaacaagggctgggagttcatcctgccctacgacggcgagttcatcaagaagcaccccgacgtggtgcagagacagcacatgctgtggaccggcatccaggccaagctggagaaggtgtacaacctggtgaaggagaccatgcccaagaagcccgacgcccagagcggccccgccggcctggtgtgcggcgaccagagaatccaggtggccaagaccaaggcccagcagaaccacgccctgctggagagagagctgcagagaagaaaggagcagctgagagtgcccgccgtgccccccggcgtgagaatcaaggaggagcccgtgagcgaggagggcgaggaggacgaggagcaggaggccgaggaggagcccatggacaccagccccagcggcctgcacagcaagctggccaacggcctgcccctgggcagagccgccggcaccgacagcttcaacggccaccccccccagggctgcgccagcacccccgtggccagagagctgaaggccttcgtggaggccaccttccagagacagttcgtgctgaccctgagcgagctgaagagactgttcaacctgcacctggccagcctgccccccggccacaccctgttcagcggcatcagcgacagaatgctgcaggacaccgtgctggccgccggctgcaagcagatcctggtgcccttccccccccagaccgccgccagccccgacgagcagaaggtgttcgccctgtgggagagcggcgacatgagcgaccagcacagacaggtgctgctggagatcttcagcaagaactacagagtgagaagaaacatgatccagagcagactgacccaggagtgcggcgaggacctgagcaagcaggaggtggacaaggtgctgaaggactgctgcgtgagctacggcggcatgtggtacctgaagggcaccgtgcagagctag

SEQ ID NO: 196705 - protein, 282 aa, Artificial Sequence
  derived and/or modified sequence
MNSSTSTMSEEPDALSVVNQLRDLAADPLNRRAIVQDQGCLPGLILFMDHPNPPVVHSALLALRYLAECRANREKMKGELGMMLSLQNVIQKTTTPGETKLLASEIYDILQSSNMADGDSFNEMNSRRRKAQFFLGTTNKRAKTVVLHIDGLDDTSRRNLCEEALLKIKGVISFTFQMAVQRCVVRIRSDLKAEALASAIASTKVMKAQQVVKSESGEEMLVPFQDTPVEVEQNTELPDYLPEDESPTKEQDKAVSRVGSHPEGGASWLSTAANFLSRSFYW

SEQ ID NO: 196706 - DNA, 849 bp, Artificial Sequence
  derived and/or modified sequence
atgaacagcagcaccagcaccatgagcgaggagcccgacgccctgagcgtggtgaaccagctgagagacctggccgccgaccccctgaacagaagagccatcgtgcaggaccagggctgcctgcccggcctgatcctgttcatggaccaccccaacccccccgtggtgcacagcgccctgctggccctgagatacctggccgagtgcagagccaacagagagaagatgaagggcgagctgggcatgatgctgagcctgcagaacgtgatccagaagaccaccacccccggcgagaccaagctgctggccagcgagatctacgacatcctgcagagcagcaacatggccgacggcgacagcttcaacgagatgaacagcagaagaagaaaggcccagttcttcctgggcaccaccaacaagagagccaagaccgtggtgctgcacatcgacggcctggacgacaccagcagaagaaacctgtgcgaggaggccctgctgaagatcaagggcgtgatcagcttcaccttccagatggccgtgcagagatgcgtggtgagaatcagaagcgacctgaaggccgaggccctggccagcgccatcgccagcaccaaggtgatgaaggcccagcaggtggtgaagagcgagagcggcgaggagatgctggtgcccttccaggacacccccgtggaggtggagcagaacaccgagctgcccgactacctgcccgaggacgagagccccaccaaggagcaggacaaggccgtgagcagagtgggcagccaccccgagggcggcgccagctggctgagcaccgccgccaacttcctgagcagaagcttctactggtag

SEQ ID NO: 196707 - DNA, 849 bp, Artificial Sequence
  derived and/or modified sequence
atgaattctagcaccagtaccatgagtgaggagccggacgctctgagcgtggtcaaccagctgagggatctcgcggccgatccactgaataggcgagctatcgttcaggatcagggatgtctgcccggactcatcttgtttatggaccaccccaatccaccagtcgttcattccgccctgctagcactaaggtatttggctgagtgcagggctaaccgggaaaaaatgaagggcgaactagggatgatgctgagcttgcagaacgttatacagaagaccacaacacccggagagacaaaacttctggccagtgagatttatgatatactccagagctcaaacatggccgacggcgactccttcaatgaaatgaacagtagaagacggaaggcccaattcttcctcggaaccactaataaacgagcaaaaacggtcgtgctgcacatcgacggcctagatgacacaagtagaagaaacctctgtgaggaggcactgttgaagataaaaggagtcataagtttcactttccaaatggcggtccagaggtgtgtcgtgaggatccggtctgaccttaaagccgaggccctggcaagcgccatcgcaagcaccaaggttatgaaagctcagcaggtagtaaaaagcgagagcggggaagaaatgctcgtgcctttccaggacactcctgtggaggtcgagcagaacacagagctgcctgactacctgcctgaggacgagtcgccaaccaaagaacaggataaggcggtgagtagggtgggttcacaccctgagggcggagctagctggctatctactgccgcgaatttcctgagtcggagcttctattggtag

SEQ ID NO: 196708 - DNA, 849 bp, Artificial Sequence
  derived and/or modified sequence
atgaacagcagcaccagcaccatgtctgaggagccagatgccctgtctgtggtgaaccagctgcgggacctggccgctgaccccctgaacagaagagccatcgtgcaggaccagggctgcctgcccggcctcatcctcttcatggaccaccccaacccccctgtggtgcacagcgccctgctggccctgcgctacctggccgagtgccgggccaaccgggagaagatgaagggggagctgggcatgatgctgagcctgcagaatgtcatccagaagaccaccaccccaggagagaccaagctgctggccagcgagatctatgacatcctgcagagcagcaacatggctgatggagacagcttcaatgagatgaacagcagaagaaggaaggcccagttcttcctgggcaccaccaacaagagggccaagacagtggtgctgcacattgatggcctggatgacaccagcagaagaaacctgtgtgaggaggccctgctgaagatcaagggcgtcatctccttcaccttccagatggctgtgcagagatgtgtggtgcgcatccgcagtgacctgaaggccgaggccctggccagcgccatcgccagcaccaaggtgatgaaggcccagcaggtggtgaagtctgagagcggggaggagatgctggtgcccttccaggacacccctgtggaggtggagcagaacacagagctgcctgactacctgcctgaagatgagagccccaccaaggagcaggacaaggctgtgtcccgggtgggcagccaccctgagggcggggcctcctggctgagcacagctgccaacttcctgagccgctccttctactggtag

SEQ ID NO: 196709 - DNA, 849 bp, Artificial Sequence
  derived and/or modified sequence
atgaacagcagcaccagcaccatgagcgaggagcccgacgccctgtctgtcgtaaatcaattacgtgacctggcagctgatccacttaaccggagggctatcgttcaggaccagggatgtctgccagggctgatcttgtttatggaccaccctaaccctcccgtggtgcacagcgcactgctggctttaaggtatctcgcagagtgtagagctaacagagagaaaatgaagggtgagctcgggatgatgctttctctccagaacgtgatccaaaagactacgactcctggagaaactaaattgctcgcttccgaaatctatgatattctccagtctagtaatatggccgacggagattctttcaacgaaatgaactccaggcggcggaaagctcagtttttcttaggaacaaccaacaaaagagcaaagaccgtggtgctgcatattgatggactggacgatacgtctcgtagaaacctgtgtgaggaagcactgttgaagattaagggagtcatatccttcacttttcagatggcagtgcaacgctgtgtggtgcgaatacgctccgaccttaaagccgaagctttggccagcgccattgcgagcaccaaggtgatgaaagcccagcaggtcgttaagagtgaatctggggaggagatgttagtcccatttcaggacactcctgtcgaagtcgagcaaaacacagaacttcccgactatttgcctgaagacgaaagccccacaaaagagcaggacaaggctgtctctagagtaggcagccatccggaggggggtgcttcatggctttcaactgcggcaaacttcttgtcgcggtcattttattggtag

SEQ ID NO: 196710 - DNA, 3029 bp, Artificial Sequence
  derived and/or modified sequence
gaggcgtcaggtcacctgggaagagtctgcagagcctttgcccgccagcgccttcgctctttggctccctgagttagtccggttgcttgcgatcgccgcggccggggctgcgaaccgaagggctcgctccgcgccgcctgggtctctacctcatccgtaggtgtggccctgatggtgtggcaggctctggactcctaaagctctggagcgaatttaagattttattcatgtgcatggcatagaagatgaattcttccacttccaccatgagtgaagagcctgacgctctatcggtagttaaccagttacgggatctagcagcagatccgttaaacagaagagccatcgtccaggatcagggatgtctgcctggccttattttatttatggaccatcccaaccctccagtcgtccactccgctttgcttgctcttcgatacttggcagaatgccgtgcaaacagagaaaagatgaaaggagaactgggtatgatgttgagcttacaaaatgttatacagaaaactacaactccaggagaaacaaaacttctggcctctgaaatctatgacattcttcagtcctccaatatggcagatggtgatagttttaatgagatgaattcacgtcgaaggaaagctcaattttttctgggaactacaaacaaacgtgccaaaacagtggttttgcatatagatggccttgatgatacgtctcggagaaatctatgtgaagaggctttgttaaaaattaaaggtgttattagctttacttttcaaatggctgttcaaaggtgtgtggtgcgaatccgttcagatttgaaagctgaggctttggcatcagcaatagcatcaaccaaggttatgaaagctcagcaagttgtgaaaagtgaaagtggagaagagatgttggtcccattccaagatactcctgtggaagttgaacagaacacagagctacctgactacctgcctgaggatgagagtcccacaaaggaacaggacaaagcggtgtcccgggtcggctcacacccagaaggtggagctagctggcttagcacagctgcaaactttttatccagatcattttattggtgacttcacttttgggctcaaggactgtgtgaaccaacaaggggccagttttccattgttgtggtgaactgtcaagtgcaatttgcaataagttatcatgaaaagtttttagattacacgatcgcatatgctgcatttcacgttttattggacattttaccccactgagtggtaaaaaggacagaggctacagatggagttgctttgtttatgaaagtattttggtttgttttctttcatttaattgcctcatatttaaaaaccatgggtccactgttaaaaccacatgtgtatgtgcagctttacattttattttacgtgaagcatgtgattaggaaaactcattttcttttcaagcctcaggacctacctgaagagaagttttcttgtagctcaagttgtgcatgaattactgaatattttactgtgcttttcttcatgaagggtacatgctttgtactcttcactgaaagctgaaaacatttcttgttaccctcttttgtgcctttttattttgccaaccgtgtttatagaaaggacattactaatgacattttgcagattaaaaacattcatttgaacacagtagtcccctagaaaaacaactctacaaaaattttgcagccttattcattataattttgataaaattaacacaaaatcagtcaagaaggaaacatgtatattagtgaagtgtttttggagactgtttgaatgtgaccaaatgtggttctagttgacttcttttcactttggcttatatcaattcttgagagttaatgtgatcatgatattgcaaacaactataaatggtctctaggccttactttgtgattatacgttatctccggctagaaaaaaataatggtagtaaagaaactgacaaactgaaaataagaaaacaaaaatcaaatgcctataataccataatgccagtttggtatagagtccaactttaaaacatgaattgctcgacagagttctattcagtaggtgtttctttgtattgtcttttgtgaatttattatgaaaatgctgcgttgtgttgaatgaaaaagacccaaattactgcttatgaagaaataaagccagcattgatcacttaatcctgtttctcatgtccagccagaaaaaagaacttcagtgaaggtaagataaataaatacatacacatatgtttttttggtagataagtgctaattacatatatgtaatgctttattaaatttctgaaatatttggtaactaaaattttctttttggaaattaataaatccagatacatattaatgttgatatgagtaaaaacaaataggaagaaattgaaatttcttttcatcaacatgtagagctgctattttactatttggagaatatgatgtgaaaattggacctcaaagggtttccttgtgttttcattgtaaaataccatcatcagtgagagtcttgagttcactaacattgtcaccttctggagagagagttaatggggggcattgaggatgatatttttttacatgtgtttggtttctgattcaagtgacacgcacaaactgaaaaaaaaaaaacaaaaaaagcaacaataactttcagggcacctattgctctaaatgcataatataacttgctgccagaaccagatgtgtttaaaaaagaaaataaaaccaccttctttctatagccattaaagcaaactttactgttctaacaaatttgtattttattttgcattgccacacatctgcttatttaaaaactacatccctttggtagtaatgtttcaggacaagtaggtattacagcttgatgtttgtgtgttctaattctaagagttctttattccagatcatatagagtagttaagacaactgtaacagcattttttgaaatacattgtaaaataataaaaggtaacataattaaaatcgagtggatatt

SEQ ID NO: 196711 - DNA, 849 bp, Artificial Sequence
  derived and/or modified sequence
atgaatagtagcacttcaaccatgagtgaggaacccgacgccctgagcgtggttaaccagcttagagatctcgcagcggaccctctgaataggcgggcaatcgtgcaagaccagggctgcttgcccggtcttattctctttatggaccatcctaaccctcccgtcgtacacagtgcactgctcgcattgcgctacctggccgaatgccgcgctaacagggagaaaatgaaaggggaattaggcatgatgctctctctgcagaacgtcatccaaaagactaccacccccggagagacgaagcttcttgcctctgagatatatgatatcctccagagctctaacatggccgatggagatagcttcaacgaaatgaactcacgtagaagaaaggcccagttctttcttggtacaacaaacaagcgagcaaaaactgtggtcctgcacatcgacgggctggatgacacctctagaaggaacttatgcgaagaggcactgttaaagattaaaggcgtgatctcctttacttttcaaatggccgttcaacgctgtgtggtgagaatcaggtccgatcttaaggccgaagccctggcttcagccatcgcatccaccaaggtcatgaaagcccagcaagtcgtgaagtcggaaagtggcgaagaaatgctggttccattccaggacacaccagtggaggttgaacagaacactgagctgccagactacctgccagaagatgaatcaccaactaaagaacaagataaggccgtctccagagtcggatcacatcccgaagggggagcctcctggctcagcacagccgctaactttctcagccggtccttttattggtag

SEQ ID NO: 196712 - protein, 1173 aa, Artificial Sequence
  derived and/or modified sequence
MTRRCMPARPGFPSSPAPGSSPPRCHLRPGSTAHAAAGKRTESPGDRKQSIIDFFKPASKQDRHMLDSPQKSNIKYGGSRLSITGTEQFERKLSSPKESKPKRVPPEKSPIIEAFMKGVKEHHEDHGIHESRRPCLSLASKYLAKGTNIYVPSSYHLPKEMKSLKKKHRSPERRKSLFIHENNEKNDRDRGKTNADSKKQTTVAEADIFNNSSRSLSSRSSLSRHHPEESPLGAKFQLSLASYCRERELKRLRKEQMEQRINSENSFSEASSLSLKSSIERKYKPRQEQRKQNDIIPGKNNLSNVENGHLSRKRSSSDSWEPTSAGSKQNKFPEKRKRNSVDSDLKSTRESMIPKARESFLEKRPDGPHQKEKFIKHIALKTPGDVLRLEDISKEPSDETDGSSAGLAPSNSGNSGHHSTRNSDQIQVAGTKETKMQKPHLPLSQEKSAIKKASNLQKNKTASSTTKEKETKLPLLSRVPSAGSSLVPLNAKNCALPVSKKDKERSSSKECSGHSTESTKHKEHKAKTNKADSNVSSGKISGGPLRSEYGTPTKSPPAALEVVPCIPSPAAPSDKAPSEGESSGNSNAGSSALKRKLRGDFDSDEESLGYNLDSDEEEETLKSLEEIMALNFNQTPAATGKPPALSKGLRSQSSDYTGHVHPGTYTNTLERLVKEMEDTQRLDELQKQLQEDIRQGRGIKSPIRIGEEDSTDDEDGLLEEHKEFLKKFSVTIDAIPDHHPGEEIFNFLNSGKIFNQYTLDLRDSGFIGQSAVEKLILKSGKTDQIFLTTQGFLTSAYHYVQCPVPVLKWLFRMMSVHTDCIVSVQILSTLMEITIRNDTFSDSPVWPWIPSLSDVAAVFFNMGIDFRSLFPLENLQPDFNEDYLVSETQTTSRGKESEDSSYKPIFSTLPETNILNVVKFLGLCTSIHPEGYQDREIMLLILMLFKMSLEKQLKQIPLVDFQSLLINLMKNIRDWNTKVPELCLGINELSSHPHNLLWLVQLVPNWTSRGRQLRQCLSLVIISKLLDEKHEDVPNASNLQVSVLHRYLVQMKPSDLLKKMVLKKKAEQPDGIIDDSLHLELEKQAYYLTYILLHLVGEVSCSHSFSSGQRKHFVLLCGALEKHVKCDIREDARLFYRTKVKDLVARIHGKWQEIIQNCRPTQGQLHDFWVPDS

SEQ ID NO: 196713 - DNA, 6894 bp, Artificial Sequence
  derived and/or modified sequence
acttccgaagagagaaccgccatgaagagagaagggggtgccgcccacctctgctccgacagcctcccggagtcccagcagcaagacggcaaccacgcacccaacttctccagccacggctcatgccgccgtcgccagcggcgccgacatgacaaggcgctgcatgcccgctaggccaggtttcccctcatccccagccccggggtcgtcgcccccgcgctgccatctgagacccggtagtaccgcccatgctgcagcgggaaagagaacagagagtcctggggacaggaagcagtcaattatagatttcttcaaaccagcttcaaaacaagacagacacatgttggattcaccacaaaaatcaaacatcaaatatggaggaagtagattgtctatcactgggacagagcagtttgaaaggaaactatcctcaccaaaagaatctaaacccaaaagggtgccaccagaaaagagccctattatagaagctttcatgaaaggtgttaaagagcaccatgaagatcatggtatacatgagtcacgtcggccttgtctgtcactagcctccaaatatttagccaaaggaacaaatatctatgttccttcttcatatcacttgccaaaggagatgaagtcactaaagaaaaaacatcgatccccagagagaaggaagtcactattcattcatgaaaataatgagaagaatgatagagatcgaggcaaaaccaatgcagactccaaaaagcagaccacagtggcagaagctgacatcttcaataacagctccagaagccttagcagcaggagcagcctgtccaggcaccacccggaagaaagcccactgggagctaaattccagttgtcactagcttcttactgcagagaacgagaactaaagaggttgagaaaggagcaaatggagcagagaatcaactccgagaattctttctcagaagcaagcagtctttccttaaaatctagtatagaaagaaaatataaaccaaggcaggaacaaaggaaacagaatgacatcatacctggaaaaaataatctgtcaaatgtggaaaatggacatctctcaagaaaaagatcctcttctgattcatgggaacctacttcagcaggctctaagcagaataaattccctgaaaaaagaaaaaggaactctgtggactcagatctgaaaagcacaagagaatctatgataccaaaagcaagagagtccttccttgagaagcgtcctgatggaccacatcagaaagaaaaatttataaaacatattgcactgaagacacctggtgatgtgttgcgcttagaagatatatccaaggaaccgagtgatgaaactgatggctcttctgcaggcttggcaccttcaaattctggcaattctggccaccattctaccaggaatagtgaccaaatccaagtggcaggtaccaaggagactaagatgcagaaaccccacttacctttatctcaggaaaagtctgcaattaaaaaagctagcaaccttcagaaaaataaaaccgctagctccacgacaaaggagaaggagacaaaactacctttactttcccgtgttccaagtgctggttcctctctagtaccattaaatgctaaaaattgtgctcttccagtttctaaaaaagataaagagcgttcctcatctaaagaatgttctgggcattctacagaatccaccaaacacaaggaacacaaagcaaagactaataaggccgattctaatgtatcttcagggaaaatttctgggggacctttgcgctcagaatatggcactcctacaaagtctccccctgctgctttggaagttgtgccatgtatcccaagccctgcagcaccttcagataaagccccttcagaaggagagagttcaggaaattccaatgcaggtagcagtgcactgaaaagaaaactaaggggtgattttgatagtgatgaagaaagtttaggttacaacctagacagtgatgaggaagaggaaacattaaagtcactggaagaaataatggctttgaacttcaatcagactcctgcagctacaggaaagcctcctgctctttccaaggggcttagatctcagtcatcagactatacaggacatgttcatcctggaacttacacaaataccttagaacgtctagtgaaggaaatggaagacacacaaaggctagatgaactgcagaagcaactacaagaagacataaggcaaggccgaggcattaaatccccaatcagaattggagaagaagacagtacagatgatgaggatggcctcttagaagagcacaaggaatttctaaagaaattttcagttacaattgatgctattcctgatcatcatccaggtgaagaaatatttaatttcctcaattctggaaaaattttcaatcagtataccttggatttaagagactctggttttattggacaaagtgctgtagaaaaacttattcttaaatcgggaaaaacagatcagatttttttgacaacacaaggtttccttacgtctgcttatcactatgtccagtgtcctgtccctgtgttaaagtggctgtttcggatgatgtcagttcatacagactgtattgtgtcagtgcagattttaagtacattgatggaaataacaattagaaatgataccttcagtgactcaccagtttggccatggatcccatcattgtctgatgtagcagctgtgtttttcaatatggggattgattttagatctttgtttcccctggagaatcttcagccagactttaatgaagactatctagtttctgaaacacagacaacatcaagggggaaagaaagtgaagattcatcttataagccaattttttcaacacttcctgaaaccaacattttaaatgtggttaagtttctaggcttgtgtacatctatacatccagaaggttaccaggatcgtgaaataatgttgctgattttaatgttatttaaaatgagtttggaaaaacagctgaaacagattcctttagtagactttcaaagcctcctgataaacctgatgaaaaacatcagagattggaacacaaaggtgcctgaactctgtctgggcataaatgaactctccagtcatccccacaacctcctgtggttggtacagctggtccctaattggacatcacgtggaaggcaactgagacagtgcctcagtctagtgattatttcaaagcttttggatgagaaacacgaagatgttcctaatgccagtaatctgcaggtatcagtcctacatcgctatcttgtgcagatgaagccttctgatttgttaaagaaaatggtcttgaagaaaaaggctgaacaaccagatggcattattgatgacagtcttcatttagaacttgaaaagcaggcatattacctgacctacattcttcttcatttagtcggtgaagttagttgttctcattctttttcttctggacaacggaaacactttgtgctactctgtggggctttggaaaagcatgttaaatgtgatattagggaagatgcaagacttttttacagaactaaggtgaaagacttggtcgccaggatacatggaaaatggcaggaaataatccagaactgtcggcctactcaggggcagcttcatgacttctgggtaccagattcttaataggagttgcagcagcaaaaatatgaaccaagagaaattcaataagagcctttcatagaggagtagaaaggattattacagaatccaatgaatgccaagaaaatgtacagcaaatgtgccacttgaatatctagtatgaagctggtaatgaagaaattgccatttctgaagcagatatgaaatatgatctgcttaattgttaaggcaactgacctttcaaaagtgcagagtcttattaaaagaggggaggggtagaagcagaataatagtcatatgtctaacctgccccagttaactcctcttgttaaattataagccagttatcttttttagatagtatttttgtcacttggataatcacaggaaatatataagaaaagagcttggactaacttgagaagttggacatggaaagcaagaccaagttccagttgggtttaattttccctcttggttattttcggacacaaagggaatgcttaaaactgagtttagtaataaaaagcataaatctcttctgtaacttttataaaccacagggaggtttcaatccatgcattttccttcattactcaagattataaatctgtttttaaaatacatctaaacaaacagttgagaaacaaaagtttggcatgttgtcagatccccttaagaggaagaggttaagctgtaaagtagtggccctgttttgatgccagaacattcatatgctgtttgttctggatttcttttaaatgcatgtattttaaatactggttaaatcttagaatcttggctatatcttagaattctggctcttggtaaccatattacagaagtctatattgtaaaagcctaaagatctggacaagtttccaacaaccttgtttccatgagtatataattttggcagacacctgaattctttgggacactgtgtctgtgtatgtgtgtgtgtgtgtgtgtgtgtgtgtgcgcttgtatcttgaagttgttgcacttcaaaaccacagctgctgtaaattcttaaacactggagagccatcctttggtttaaatggtagagggttagtggaagtgcacacgttgtttttagcccaggggtagtaacaaactcttactagccaactagaaaattattttgttgacgagatgtcccttttaggagggtttgtttcctgaaagaatgccaactttttttgttgttctttcagtattggcttgagtgacctgttctcctgagtgctctagtgtctccagttgtgggggggaaagatgatggaggggaacagaaactggacttgatgtttgcggtttgagaggcaagaaaataaaataactttctacctctaaattgaggcttaggagtaaaaagcattttgtcctaaatttatcatttaaaatagcatcagtaacttttgagctcatgtcaatcaagcattggcagtcagagattttatagggaagactaagtaaatccagtttccaagaacctaaactgattgaggctccaagagtcagaccaacaaaagttttattctgtgttgtttactggtaagaatattattatcttgatactacctctcaagggtattgttacaaaatgccacttatggttaaagagatagatacaaagagttctatttgacagaagcttgaaactctggcatctatctgcccaacgatgggggctttcgttctgtaatttaatcctttgtagatacattatttgtgtgtaattttatacgtgttcatatttttctcattttgcattgtgtaaagtgtacaaaatctcaaagtataaaatactgcttatattgcttgtaatttacagtgtgtaaatattttctaattgtgtacattgatgggggggacaagtgggttattcaggtttttttttaatgacccttttgtattgcagtttcaacagataactgtccatcaaatttaaaaccactttgatacatttttatttaacagttccaataagaaaaaaatctctatttttaattatatttctcctttagaaaaaaaatacttcatggtccctctaaaataaatggccagacctcagtttaggcccttgtatttatgactctggtagaggtcttcagactccaggtcatagtccagtcagtatttgcatttgggttctcatgaaaactttgtgactctcttttagcacaagtagcccatggtttttcttccaaatcaagtattttacttctcccttgagtccccatgctttgtctccctcctgctgctattgcccggtgaatgggatggtagagagggagaaatgttcattgcacagagaatgtcaggccactttggggacttggcaaacgaagcttgcactgagtggtggtgtgtttggcaatattactgtgccaaaaatcaccttgtctaattttatggatatgtatggcaaacttattacccttcttgcaagctgcacattaaggtacttgtaagtgtttatgcttttgtgtgtaactgtttgccttttctaactgcttttcttgttactgaaaatataattctactagttttatcacattaagaggctctccatgcacaaaatgcattgatgtagccgtaaagtaacagcatttgtacattttctatctcctgatggcagtggtgcctttgtcaccttttggaaggtttgcattttgtttctgctttcaagcgcaaatagtagcttgctttcagcttcacaaaaatctcctcaaatgtaaaagatacaaaatggcgtgttatcatccaggcttagttggagtatttgcatttttatttttatcaaaacaaatataattggtggggactggccagtaataatgtgtggcgtctttaagccaagagtaatttttaaattaaaaatgaaaattttaagaggtagcccattaaacaagctactgagttggagaattaggggatgactgtggtggtttgtcgctaaggaggcaacagtagggtccaggcggcggggcacgtagagcagttagcatgatccatggttattccttactcatgaacagtgtcggcgcacctcattatctgtgcatttgtttttcctgggcagtcctgtcagccagttaatccaccagctcttaggaagtaaatacagatttttttctttccttttttttttttttaaagattttatactacatcttgttaaagtcctatgaatgtgtgtgtgtgtgtgctattaaaactgctttttctcagtttgaaca

SEQ ID NO: 196714 - DNA, 3522 bp, Artificial Sequence
  derived and/or modified sequence
atgacccgacggtgtatgccagcccggccaggtttcccctcctcacctgcgccaggaagctctcccccaagatgtcatctcagacctggctccaccgcccatgcggccgctgggaaacggacagagtcacctggggaccgtaagcagagcattattgacttcttcaagccagccagcaagcaagataggcacatgctggactctccacagaaatccaatatcaagtatgggggcagtaggctgagtattacagggaccgaacagttcgagaggaaactgagctcacccaaagaatcaaaacctaagagagtcccccctgaaaaaagcccgatcattgaggcctttatgaagggcgtcaaagaacaccacgaggaccacggaattcacgagtcacgcagaccatgcctgtccttggcttctaaataccttgccaaagggactaacatctacgtgcctagcagttatcacctgcccaaggagatgaaatcacttaagaagaagcatagatcgccagaaaggcggaagagccttttcatacacgagaataacgagaagaacgatagagatcggggaaaaacaaatgctgactctaagaagcagactacggtggctgaggctgatatatttaataacagttcacgttcgctatcctccagatccagtctgtcccgtcatcatccagaagagtcacccttgggagcaaaatttcagctctctcttgcctcatattgtagggaaagagaactgaagcgactgagaaaggagcagatggagcagcgcataaattcagagaattctttttccgaggcgagtagcctcagcctgaagagtagcatcgagcgaaaatacaagccccgccaggaacagcgcaagcagaatgacataattcccggcaagaacaacctgtccaacgtggagaatggacacctctcacggaagcgtagttccagtgactcctgggaacccacttcagcgggctcaaagcagaataagtttcctgaaaaacggaaaagaaattctgtggactccgatttgaagtccacccgggagtcaatgatccctaaagccagggagagtttcctcgagaagaggcctgacggcccccaccaaaaggaaaagttcataaagcacatcgccctgaaaacccccggcgacgtgctcagactagaagatattagcaaagagcccagcgacgagacagatggaagctcggctggtctggccccctcaaacagcgggaattcagggcaccactccacaagaaattccgaccaaatacaggtcgctggcacaaaagaaaccaagatgcagaagcctcacctgcccctttcacaggaaaaatccgctatcaaaaaggcatcaaatctacagaaaaataaaacagctagcagcactactaaggagaaagagacaaaactcccgctgttgagtagagtgccttctgcaggatcttccctggtgccacttaatgccaaaaactgcgccctgcctgtaagcaaaaaagacaaggagcggtcttcgtctaaggagtgcagtgggcattcaaccgagtcaaccaaacacaaagaacacaaagctaaaactaacaaggctgatagcaacgtttcttccggcaaaatttctggaggaccattgagatcagaatacggaacacccactaaatccccacccgccgcactcgaggtggtcccatgtatccccagtcccgccgccccgtcagataaggccccttccgagggcgagagttccggtaatagcaatgcaggatctagtgccttgaagcgtaagttacggggcgactttgactccgacgaagagagcctcgggtacaacttagatagcgacgaggaagaggaaaccctaaagagcttagaggagatcatggccctgaactttaaccaaacacctgccgctacaggaaaaccacccgccctgtcgaagggccttcgttctcagagctccgattacactggtcatgtgcatcccggtacttacacaaatacactggagaggttagtaaaagaaatggaggatacccaacgcctggacgagctccaaaagcagctgcaggaggacattcggcaggggaggggcatcaaatcaccaattcgaatcggagaagaggactctactgatgacgaggatggactcctcgaggaacataaggagtttctgaaaaagttttcagttacaatcgacgcaatacctgaccatcaccccggggaagaaatctttaatttcctcaatagtggaaagatcttcaaccagtatactctggacttaagggattccggctttatcggtcagtctgccgtcgagaaacttattttgaagtcaggtaagactgatcagattttcctgactacccagggctttcttactagtgcttatcattatgtccaatgccctgtcccggtcttaaaatggctgtttaggatgatgagcgtacatactgattgcatagtgtctgtccaaattttgtctaccctgatggagatcaccatccgaaatgacactttctccgattctccagtgtggccttggatccccagcttgtctgatgtggctgctgtatttttcaatatgggcatagacttcagaagcctgtttccgctggaaaaccttcagcccgactttaatgaggactacttggtatctgagacgcagaccacgtccagggggaaagagtcagaagattccagctacaagcccatattctcaaccctcccagagactaatatactgaacgtggtgaagtttctcggcctgtgtaccagcatacatccagagggctatcaggacagggagattatgctactgatccttatgcttttcaagatgtctcttgaaaaacagttgaaacaaatcccccttgtggacttccagtccctcctcatcaatctgatgaagaatatccgggactggaatactaaggtccccgaactgtgcttgggcatcaacgagctctcctcacatccccataacctgctttggctcgtgcagctagtgcccaattggacaagccgcgggcggcaattgcggcaatgcctgtctctcgtaataatttctaaactgctggatgagaagcacgaagatgtgccaaacgcatctaacctccaggtcagtgttctgcaccgttacttggtccagatgaagccctctgatctgttaaagaaaatggtactaaaaaagaaggctgaacagcccgacggtatcatcgatgattccctgcatctggagttggagaaacaggcgtactacctcacatacatcttgttgcacctggtcggagaggtgtcatgtagccattcattcagcagcgggcagcgaaaacattttgtcctcctctgcggtgcactggaaaagcacgtcaaatgcgacataagagaagacgccagactcttctatcgaacgaaagtcaaggacctggtcgcaaggatccacggaaaatggcaggaaatcatccaaaactgtcgaccaactcaggggcagctccacgacttttgggtgccggacagctag

SEQ ID NO: 196715 - DNA, 3522 bp, Artificial Sequence
  derived and/or modified sequence
atgacccggcgctgcatgcctgcccggcccggcttccccagcagccctgcccctggcagcagccccccacgctgccacctgcggcccggcagcacagcccatgctgctgctgggaagaggacagagagccctggggacaggaagcagagcatcatcgacttcttcaagccagccagcaagcaggacagacacatgctggacagcccccagaagagcaacatcaagtatggaggcagccggctgagcatcaccggcacagagcagtttgagaggaagctgagcagccccaaggagagcaagcccaagagggtgcccccagagaagagccccatcatcgaggccttcatgaagggcgtgaaggagcaccacgaggaccacggcatccacgagagccggcggccctgcctgagcctggccagcaagtacctggccaagggcaccaacatctacgtgcccagcagctaccacctgcccaaggagatgaagagcctgaagaagaagcacaggagccctgagaggaggaagagcctcttcatccatgaaaataatgagaagaatgaccgggaccggggcaagaccaatgctgacagcaagaagcagaccaccgtggccgaggccgacatcttcaacaacagcagccgcagcctgagcagccgcagcagcctgagccgccaccaccctgaggagagccccctgggcgccaagttccagctgagcctggccagctactgccgggagcgggagctgaagaggctgaggaaggagcagatggagcagaggatcaacagcgagaacagcttcagcgaggccagcagcctgagcctgaagagcagcattgaaaggaagtacaagccccggcaggagcagaggaagcagaatgacatcatccctgggaagaacaacctgagcaatgtggagaatggccacctgagcaggaagaggagcagcagtgacagctgggagcccaccagcgctggcagcaagcagaacaagtttcctgagaagaggaagaggaacagcgtggacagcgacctgaagagcacccgggagagcatgatccccaaggcccgggagagcttcctggagaagaggccagatggcccccaccagaaggagaagttcatcaagcacatcgccctgaagaccccaggagatgtgctgcggctggaggacatcagcaaggagcccagtgatgaaacagatggcagcagcgctggcctggcccccagcaacagcggcaacagcggccaccacagcaccaggaacagcgaccagatccaggtggccggcaccaaggagaccaagatgcagaagccccacctgcccctgagccaggagaagagcgccatcaagaaggccagcaacctgcagaagaacaagacagccagcagcaccaccaaggagaaggagaccaagctgcccctgctgagccgggtgcccagcgctggcagcagcctggtgcccctgaatgccaagaactgtgccctgcctgtgtccaagaaggacaaggagaggagcagcagcaaggagtgcagcggccacagcacagagagcaccaagcacaaggagcacaaggccaagaccaacaaggctgacagcaatgtgtcctctgggaagatcagcggcggccccctgcggagtgaatatggcacccccaccaagagccccccagctgccctggaggtggtgccctgcatccccagccctgctgcccccagcgacaaggcccccagcgagggggagagcagcggcaacagcaatgccggcagcagcgccctgaagaggaagctgcggggggactttgacagtgatgaggagagcctgggctacaacctggacagtgatgaggaggaggagaccctgaagagcctggaggagatcatggccctgaacttcaaccagaccccagctgccaccgggaagcccccagccctgagcaagggcctgcggagccagagcagtgactacacaggccacgtgcaccctggcacctacaccaacaccctggagcggctggtgaaggagatggaggacacccagaggctggatgagctgcagaagcagctgcaggaggacatccggcagggccggggcatcaagagccccatcagaattggagaggaggacagcacagatgatgaagatggcctgctggaggagcacaaggagttcctgaagaagttctctgtgaccattgatgccatcccagaccaccaccctggagaggagatcttcaacttcctgaacagcggcaagatcttcaaccagtacaccctggacctgcgggacagcggcttcatcggccagagcgctgtggagaagctgatcctgaagagcggcaagacagaccagatcttcctgaccacccagggcttcctgaccagcgcctaccactacgtgcagtgccctgtgcctgtgctgaagtggctgttcaggatgatgtctgtgcacacagactgcatcgtgtctgtgcagatcctgagcaccctgatggagatcaccatcagaaatgacaccttcagtgacagccctgtgtggccctggatccccagcctgagtgatgtggccgctgtgttcttcaacatgggcatcgacttccgcagcctcttccccctggagaacctgcagcctgacttcaatgaagactacctggtgtctgagacccagaccaccagccggggcaaggagagcgaggacagcagctacaagcccatcttcagcaccctgcctgagaccaacatcctgaatgtggtgaagttcctgggcctgtgcaccagcatccaccctgagggctaccaggaccgggagatcatgctgctgatcctgatgctgttcaagatgagcctggagaagcagctgaagcagatccccctggtggacttccagagcctgctgatcaacctgatgaagaacatccgggactggaacaccaaggtgcctgagctgtgcctgggcatcaatgagctgagcagccacccccacaacctgctgtggctggtgcagctggtgcccaactggaccagccggggccggcagctgcggcagtgcctgagcctggtgatcatcagcaagctgctggatgagaagcatgaagatgtgcccaatgccagcaacctgcaggtgtctgtgctgcaccgctacctggtgcagatgaagcccagcgacctgctgaagaagatggtgctgaagaagaaggccgagcagccagatggcatcattgatgacagcctgcacctggagctggagaagcaggcctactacctgacctacatcctgctgcacctggtgggggaggtgtcctgcagccacagcttcagcagcggccagaggaagcactttgtgctgctgtgtggggccctggagaagcacgtgaagtgtgacatccgggaggatgcccggctcttctaccgcaccaaggtgaaggacctggtggcccgcatccacggcaagtggcaggagatcatccagaactgccggcccacccagggccagctgcatgacttctgggtgcctgacagctag

SEQ ID NO: 196716 - DNA, 3522 bp, Artificial Sequence
  derived and/or modified sequence
atgacccggcggtgcatgcccgcccggcccggcttccccagcagccccgcacctggctctagtcccccgcgctgtcatctcagaccagggtccactgcccacgccgccgcaggaaagcgcaccgaatcaccaggcgaccggaaacaaagcataatcgattttttcaaacctgcctcgaaacaagataggcacatgctggatagtccacagaaatccaatataaaatacgggggaagccggctgagtattaccgggactgagcaatttgagcgcaagctgagtagccccaaggaatccaagccaaagcgcgtcccacctgagaagagcccaatcattgaagcattcatgaagggagttaaggagcaccacgaggatcacggcatacacgagtctcggagaccatgcctgagcttagcatctaaatacctggcaaaaggaaccaatatctatgtgccgagcagttaccaccttcccaaagaaatgaagagcctgaaaaagaagcacagatctcccgagcgacgtaagagtcttttcatccacgaaaacaatgagaagaatgacagagacagaggtaagactaatgcagatagcaaaaaacagactactgttgcagaagccgacatcttcaacaactcatctaggtctttgtctagtagaagctctctctcgagacatcatcccgaagagagccctctgggcgccaagtttcagctgtcactggcatcatattgcagggagagagaactaaaaagactcaggaaggagcagatggaacaacggatcaactctgaaaatagcttctccgaggcatcgtcgctctctctcaagagcagtatcgagcgcaaatacaagccacgccaagagcagcgcaaacagaatgatatcataccggggaaaaacaacctcagcaatgttgagaatgggcacttatctcggaagcggagctctagcgatagctgggagcccacaagtgccggttctaaacagaataagttcccagaaaagcgtaagcgaaactctgtcgattccgacctcaaatctacccgagaatccatgatccctaaggctcgcgaatcgtttctcgaaaagcggccagatgggccgcaccagaaagagaagtttataaagcacatcgcactcaaaacgcccggggacgtgctccgtttggaggatatcagcaaggagccctcggacgaaaccgatggttctagtgccggcctggcgccctcaaattccggcaattctggtcaccattccacccggaatagtgatcagatacaggtggcaggcacaaaggaaacaaagatgcaaaagccccatctccctctttcacaggagaaatcagccataaaaaaggcttccaacttgcagaagaacaaaaccgcatcctccaccaccaaggagaaagagaccaagttgcccctgctatcaagggtgccctcggcagggagcagcctcgtcccactgaacgcaaagaattgcgctctgcccgtctctaaaaaagacaaagaacgatcttcctcgaaggagtgctcaggacattccacagagagtaccaaacacaaggagcacaaagccaaaaccaacaaggctgactctaacgtttcatcaggcaagatctctggcggtcccctacggtctgaatatgggacccccactaagtctccaccagcagctctggaggttgtcccgtgcatcccctcacccgctgcccctagtgataaggccccctccgaaggcgagtctagcgggaatagtaacgcgggctctagcgccttaaagcgcaagttgcggggtgactttgacagcgacgaggagagtctgggctataacttagacagcgacgaggaagaggagacactgaagagtctggaggagatcatggctcttaatttcaaccagacccctgcggctaccggaaagccacccgctctttctaaaggactacgctcccagtcttcagattacacagggcacgtgcacccaggaacctacacaaataccttagagagactggttaaggagatggaagatacccagagattagatgaactgcagaaacaacttcaggaggacatcagacaaggaaggggaattaaatcaccaattcggatcggcgaagaggactctaccgatgacgaagacggtcttttggaggagcacaaggagttcctcaagaaattttcagtgacgatcgacgccattccggatcatcatccgggagaggagattttcaattttttaaatagtgggaaaatctttaatcagtacacactggatctgcgtgacagtgggttcatcggacagtcagcagtggaaaaactcatactaaagtccggcaagaccgatcagattttcctgaccacccagggattcctaaccagcgcgtaccactatgtccagtgtcctgtgcctgtgctcaagtggctgtttcgcatgatgtcagttcacaccgattgcattgtgtctgtacagattctgagtaccttaatggaaatcaccatccggaacgacacatttagcgactcccccgtttggccgtggatccccagtctgtctgatgtcgccgcagttttcttcaacatgggaatcgatttccgcagtctattccccttagagaacctccaacccgacttcaatgaagactatctcgtgtctgagacccaaaccacaagccgcgggaaggagagcgaagatagttcttataagcctatctttagcacacttcctgagaccaatatccttaatgtggttaagtttttggggctatgtacctccatccacccagaaggataccaggaccgggagatcatgctccttatcttaatgttattcaaaatgtctctcgaaaagcagctaaaacagattcccctcgtggacttccagtccctcctgatcaatttgatgaagaacatccgggactggaacaccaaggtgccagaactgtgcttggggatcaacgaattaagtagccatccccataatctgttgtggctggtgcagctcgtccctaattggacaagcaggggacgccagctgagacaatgccttagcctcgtgataatcagcaagctgctggatgagaagcacgaggacgtgccaaacgcgtctaacctgcaggtcagtgtgctccaccgatatctggtccagatgaaacccagcgatctgctaaaaaaaatggtgctaaagaaaaaggctgagcagccagatggaatcatcgacgactcacttcacctcgaactcgaaaagcaggcatactaccttacttatattctgcttcatctagttggcgaggttagctgttcccatagcttttcttccggacaaagaaagcactttgtccttctgtgcggcgcgttggaaaagcacgtaaaatgcgacatcagagaagacgctagattattttaccgcaccaaagtcaaagatctggttgcaagaatccatggcaagtggcaagagatcatccagaattgtaggccgactcagggtcaactgcatgacttctgggtgcccgacagctag

SEQ ID NO: 196717 - DNA, 3522 bp, Artificial Sequence
  derived and/or modified sequence
atgaccagacggtgtatgccagcccgtcccggttttccatcatcccctgcacctggctcttccccaccccgatgccacttacgaccgggatccacggcccatgccgcagccggaaagcgcacagaaagtccgggagaccgcaaacaaagcattatcgatttcttcaaaccagccagcaaacaagataggcacatgcttgattcaccccagaaatccaacattaaatacggtggatcccggctgagtattactggcacggagcagttcgagaggaaactgtcttccccaaaagagagtaagccgaaacgcgttcctcccgagaaaagccctataattgaggcgttcatgaagggcgtgaaggagcaccacgaagaccacgggattcatgaatctaggcggccttgtctgtctctagcctctaagtacttagctaagggcactaatatttacgtgccttcatcgtaccatctcccaaaggaaatgaaaagcttgaagaagaagcaccggagccccgagagaaggaagtccctgttcatccatgagaataacgagaaaaacgatagggatagaggaaagaccaacgcagacagcaagaagcagaccacggtggccgaggcagatatatttaacaatagctcacggtcacttagcagccgttcatccctctcccgacaccaccctgaggaatctcccctgggcgctaaatttcagctaagcttggcttcatactgtcgcgaacgtgagctgaaacgactgagaaaggagcaaatggaacaacgtatcaactccgagaatagcttctcggaggccagctcgctgtcactgaagtcctctattgagcgtaagtacaaacccaggcaagagcaacgaaagcagaatgacataattcccggtaagaacaacctctccaacgttgaaaatggccacctgtccagaaagaggtcttcatcagactcatgggaaccgacttcagctgggtctaaacagaacaaattccctgagaagagaaagaggaattccgttgatagcgatctcaagtcaactagggagagcatgattcccaaagctagggaatcttttttagaaaagaggcccgatgggcctcaccaaaaggagaaatttattaaacatattgcattgaagaccccaggagacgtgcttagactcgaggacatcagcaaggagccatcagatgagacggacggatcatcagccggactggcaccctctaacagcggcaatagtggccatcattccaccagaaatagcgatcagatccaggtggctggtaccaaagagaccaagatgcagaagccgcacctgcctttgtcccaagagaaatccgccatcaagaaggctagtaacctacagaagaacaaaactgcctccagtacaaccaaagaaaaagaaaccaaattgcccctcctctctagagtgccatctgccggaagcagtctggttcctttaaacgctaaaaactgcgctctccccgtctcaaagaaagataaggagagatcttcatccaaagagtgttctggccacagcactgaatcgacaaagcataaggagcataaggctaagactaacaaggctgacagcaacgtgagctcgggtaaaatatccgggggaccactgcggtctgaatacggtacgccaacaaagtccccacctgctgctctggaggtcgtcccctgcatcccaagccctgctgctccctcagacaaggcacctagcgagggagagagttctgggaactccaacgctggatccagcgccctcaaaagaaagttaaggggcgacttcgactctgacgaggaatctctcggatataatctggattccgatgaagaggaagaaacactaaaatctttggaagagatcatggcccttaattttaatcagaccccagccgcaacaggtaaaccccctgcgctgagcaaaggcttacgtagccaatcaagcgactatactgggcatgtgcaccccggtacttatactaatacgcttgagagactagtcaaagaaatggaagacacacagaggttggatgagctacagaaacaacttcaggaggatatcaggcagggcaggggaatcaagtcgccaatcagaatcggcgaagaggactcaacagacgatgaggatggattgctcgaagagcacaaggaattcttgaaaaagttctccgttaccattgatgccattcccgaccatcatcctggtgaggaaatcttcaattttctcaatagcgggaaaattttcaatcaatacacactggacctacgggactcgggtttcatcggccagtccgcagtcgagaaactaattttaaagagcggaaagaccgaccagatctttctgactacccaggggtttcttacctcagcttaccattacgtacagtgtccagtgcctgtcctaaagtggttgttccggatgatgtccgtccataccgattgcatcgtgtcagtgcagattttgagtacactgatggagataacaattaggaacgatacatttagcgattctccggtgtggccctggattccgtccctctcagacgtcgccgctgtgttctttaacatgggcatcgacttccgcagcttattcccgctggaaaacctccagccggacttcaatgaagattatctggtgtctgaaacccagaccacctcccggggaaaagagagcgaagattcatcctacaagcctatctttagcactctgccagaaaccaacattctcaacgttgttaagttcttggggctctgcactagcatccatccggaggggtaccaggatcgcgagatcatgctcctgatcttaatgctattcaaaatgtctctggagaaacagttgaaacaaattccccttgttgacttccaatccctgttaattaaccttatgaagaatattcgcgactggaacactaaagtccctgaattgtgcctagggataaatgaactctcaagccaccctcacaacctgctttggcttgtccagctcgtgcctaattggacatccagggggaggcagcttcgccagtgcctatcactggtgataatctcaaaattactggacgaaaaacatgaggacgttccaaatgcaagcaacctccaagtgtctgtccttcatcgctatctagtgcagatgaaaccctcggacctgctgaaaaagatggtcctgaaaaaaaaggctgaacagccagacggaattatcgatgattctttgcatttggagttggaaaaacaggcttattacctcacatacatccttctgcacctagttggcgaggtaagttgcagccattccttcagcagcggccagagaaagcactttgtgctgttatgtggggcactcgaaaaacacgtcaaatgtgacattagggaagatgcccgtctattttacaggaccaaggtaaaggacctggtcgccagaatacacggcaagtggcaagaaattatccagaactgccggcctacacaggggcaactgcacgacttctgggtcccagatagttag

SEQ ID NO: 196718 - DNA, 3522 bp, Artificial Sequence
  derived and/or modified sequence
atgaccagaagatgcatgcccgccagacccggcttccccagcagccccgcccccggcagcagcccccccagatgccacctgagacccggcagcaccgcccacgccgccgccggcaagagaaccgagagccccggcgacagaaagcagagcatcatcgacttcttcaagcccgccagcaagcaggacagacacatgctggacagcccccagaagagcaacatcaagtacggcggcagcagactgagcatcaccggcaccgagcagttcgagagaaagctgagcagccccaaggagagcaagcccaagagagtgccccccgagaagagccccatcatcgaggccttcatgaagggcgtgaaggagcaccacgaggaccacggcatccacgagagcagaagaccctgcctgagcctggccagcaagtacctggccaagggcaccaacatctacgtgcccagcagctaccacctgcccaaggagatgaagagcctgaagaagaagcacagaagccccgagagaagaaagagcctgttcatccacgagaacaacgagaagaacgacagagacagaggcaagaccaacgccgacagcaagaagcagaccaccgtggccgaggccgacatcttcaacaacagcagcagaagcctgagcagcagaagcagcctgagcagacaccaccccgaggagagccccctgggcgccaagttccagctgagcctggccagctactgcagagagagagagctgaagagactgagaaaggagcagatggagcagagaatcaacagcgagaacagcttcagcgaggccagcagcctgagcctgaagagcagcatcgagagaaagtacaagcccagacaggagcagagaaagcagaacgacatcatccccggcaagaacaacctgagcaacgtggagaacggccacctgagcagaaagagaagcagcagcgacagctgggagcccaccagcgccggcagcaagcagaacaagttccccgagaagagaaagagaaacagcgtggacagcgacctgaagagcaccagagagagcatgatccccaaggccagagagagcttcctggagaagagacccgacggcccccaccagaaggagaagttcatcaagcacatcgccctgaagacccccggcgacgtgctgagactggaggacatcagcaaggagcccagcgacgagaccgacggcagcagcgccggcctggcccccagcaacagcggcaacagcggccaccacagcaccagaaacagcgaccagatccaggtggccggcaccaaggagaccaagatgcagaagccccacctgcccctgagccaggagaagagcgccatcaagaaggccagcaacctgcagaagaacaagaccgccagcagcaccaccaaggagaaggagaccaagctgcccctgctgagcagagtgcccagcgccggcagcagcctggtgcccctgaacgccaagaactgcgccctgcccgtgagcaagaaggacaaggagagaagcagcagcaaggagtgcagcggccacagcaccgagagcaccaagcacaaggagcacaaggccaagaccaacaaggccgacagcaacgtgagcagcggcaagatcagcggcggccccctgagaagcgagtacggcacccccaccaagagcccccccgccgccctggaggtggtgccctgcatccccagccccgccgcccccagcgacaaggcccccagcgagggcgagagcagcggcaacagcaacgccggcagcagcgccctgaagagaaagctgagaggcgacttcgacagcgacgaggagagcctgggctacaacctggacagcgacgaggaggaggagaccctgaagagcctggaggagatcatggccctgaacttcaaccagacccccgccgccaccggcaagccccccgccctgagcaagggcctgagaagccagagcagcgactacaccggccacgtgcaccccggcacctacaccaacaccctggagagactggtgaaggagatggaggacacccagagactggacgagctgcagaagcagctgcaggaggacatcagacagggcagaggcatcaagagccccatcagaatcggcgaggaggacagcaccgacgacgaggacggcctgctggaggagcacaaggagttcctgaagaagttcagcgtgaccatcgacgccatccccgaccaccaccccggcgaggagatcttcaacttcctgaacagcggcaagatcttcaaccagtacaccctggacctgagagacagcggcttcatcggccagagcgccgtggagaagctgatcctgaagagcggcaagaccgaccagatcttcctgaccacccagggcttcctgaccagcgcctaccactacgtgcagtgccccgtgcccgtgctgaagtggctgttcagaatgatgagcgtgcacaccgactgcatcgtgagcgtgcagatcctgagcaccctgatggagatcaccatcagaaacgacaccttcagcgacagccccgtgtggccctggatccccagcctgagcgacgtggccgccgtgttcttcaacatgggcatcgacttcagaagcctgttccccctggagaacctgcagcccgacttcaacgaggactacctggtgagcgagacccagaccaccagcagaggcaaggagagcgaggacagcagctacaagcccatcttcagcaccctgcccgagaccaacatcctgaacgtggtgaagttcctgggcctgtgcaccagcatccaccccgagggctaccaggacagagagatcatgctgctgatcctgatgctgttcaagatgagcctggagaagcagctgaagcagatccccctggtggacttccagagcctgctgatcaacctgatgaagaacatcagagactggaacaccaaggtgcccgagctgtgcctgggcatcaacgagctgagcagccacccccacaacctgctgtggctggtgcagctggtgcccaactggaccagcagaggcagacagctgagacagtgcctgagcctggtgatcatcagcaagctgctggacgagaagcacgaggacgtgcccaacgccagcaacctgcaggtgagcgtgctgcacagatacctggtgcagatgaagcccagcgacctgctgaagaagatggtgctgaagaagaaggccgagcagcccgacggcatcatcgacgacagcctgcacctggagctggagaagcaggcctactacctgacctacatcctgctgcacctggtgggcgaggtgagctgcagccacagcttcagcagcggccagagaaagcacttcgtgctgctgtgcggcgccctggagaagcacgtgaagtgcgacatcagagaggacgccagactgttctacagaaccaaggtgaaggacctggtggccagaatccacggcaagtggcaggagatcatccagaactgcagacccacccagggccagctgcacgacttctgggtgcccgacagctag

SEQ ID NO: 196719 - protein, 190 aa, Artificial Sequence
  derived and/or modified sequence
MESQRLELIRLMETQEEDVVLLTAGEHNKACSLLGKLRLECADLLETRGVVLRDPTLFSFLWVVDFPLFLPKEENPRELESAHHPFTAPHPSDIHLLYTEPKKEDVKMLSHLLQALDYGAPPHGGIALGLDRLICLVTGSPSIRDVIAFPKSFRGHDLMSNTPDSVPPEELKPYHIRVSKPTDSKAERAH

SEQ ID NO: 196720 - protein, 645 aa, Artificial Sequence
  derived and/or modified sequence
MYFPSWLSQLYRGLSRPIRRTTQPIWGSLYRSLLQSSQRRIPEFSSFVVRTNTCGELRSSHLGQEVTLCGWIQYRRQNTFLVLRDFDGLVQVIIPQDESAASVKKILCEAPVESVVQVSGTVISRPAGQENPKMPTGEIEIKVKTAELLNACKKLPFEIKNFVKKTEALRLQYRYLDLRSFQMQYNLRLRSQMVMKMREYLCNLHGFVDIETPTLFKRTPGGAKEFLVPSREPGKFYSLPQSPQQFKQLLMVGGLDRYFQVARCYRDEGSRPDRQPEFTQIDIEMSFVDQTGIQSLIEGLLQYSWPNDKDPVVVPFPTMTFAEVLATYGTDKPDTRFGMKIIDISDVFRNTEIGFLQDALSKPHGTVKAICIPEGAKYLKRKDIESIRNFAADHFNQEILPVFLNANRNWNSPVANFIMESQRLELIRLMETQEEDVVLLTAGEHNKACSLLGKLRLECADLLETRGVVLRDPTLFSFLWVVDFPLFLPKEENPRELESAHHPFTAPHPSDIHLLYTEPKKARSQHYDLVLNGNEIGGGSIRIHNAELQRYILATLLKEDVKMLSHLLQALDYGAPPHGGIALGLDRLICLVTGSPSIRDVIAFPKSFRGHDLMSNTPDSVPPEELKPYHIRVSKPTDSKAERAH

SEQ ID NO: 196721 - DNA, 573 bp, Artificial Sequence
  derived and/or modified sequence
atggagtcccaacggctggaactgattcggctcatggaaacccaggaggaggatgttgttctcctcaccgcaggcgagcataacaaggcctgttcactgttgggcaagctccgcctggaatgcgctgaccttctggagacaagaggagtggtgttacgggatccaacgcttttcagttttctctgggtggttgacttcccactattcttgcccaaagaagagaaccctagggagttggagagcgctcaccaccccttcaccgcaccgcacccatccgacatacatttactgtacaccgagcccaagaaggaagacgtcaagatgctctctcatctgctgcaggcactggactatggcgcccctccccacggcggtatcgcacttggtcttgacaggcttatctgtctggtgaccggcagccctagcattcgagatgttatcgcctttccaaagagttttcgtggtcacgatttgatgagtaacacccccgactccgtgccccctgaggaacttaagccttaccatattagggtgagcaaacctacagacagcaaggcagagagagcgcattag

SEQ ID NO: 196722 - DNA, 1938 bp, Artificial Sequence
  derived and/or modified sequence
atgtacttcccgtcctggctgagtcaattatatagaggcttatcacggccaataagaaggaccacccaaccaatctggggttctctgtatcgctccctccttcagtccagccagcggcgcatcccagaattcagttcatttgtggtgagaaccaacacatgtggagagttacgatctagccatctcggtcaggaggtgacgctgtgcgggtggatccagtaccgccggcagaacacattcttggtgctgcgcgatttcgatggcttggtccaagtaatcatacctcaggacgagtctgctgcgtcggtcaagaaaatcttgtgcgaggctccagtggagtccgtggtccaggtgtccggcacggtgattagcagaccagcggggcaagagaatccaaaaatgccaacgggagaaatcgagatcaaagtcaaaactgccgagctccttaacgcgtgtaaaaaacttccttttgagatcaaaaacttcgtgaaaaaaacagaagccctgcggctgcagtatagatacttggatttgcgctcgtttcagatgcagtacaaccttaggttacggtctcaaatggtcatgaagatgcgagaatatctgtgtaatctccacggatttgtagatatcgagaccccaacactgtttaagagaacccccggaggagcaaaagaatttctggttccaagtagagagcccggaaagttttatagccttccccaaagcccccagcagtttaaacaactgctaatggttggcggtctggataggtactttcaggtggccagatgttatagagatgaaggatcaagacctgatcggcagcctgagttcacacagatcgacattgaaatgtcattcgtagaccagacaggaatccaatccttgatcgagggcctcctgcagtattcttggcctaacgacaaggatccagtggtcgtgccgtttcctaccatgacttttgcagaagtgctggcaacctacggtaccgacaaacccgatacaaggttcggtatgaagataatcgacatttctgatgtgtttcgcaacacagagattggcttcctacaggatgcactctcaaaacctcatggtaccgtgaaggccatttgtatcccagagggcgctaaatacttgaaacgcaaggacatcgaatctattagaaactttgcagcagatcatttcaaccaggagatcctgcccgtgtttctcaacgcaaaccgtaactggaactctccggttgccaacttcattatggaatctcagcgcctcgagcttataaggttgatggagacccaggaggaagatgttgtgctactcacagcaggtgagcataacaaggcctgctccctgctggggaaactgaggctggagtgcgcagacctgctcgagacacgcggagtcgtcctgcgagatcctacactgttttcattcctgtgggttgtggatttccctctgttcttgccaaaggaagagaatcccagagaactggaatccgctcaccacccattcaccgctccgcatccaagtgatattcatctgctctatactgagcctaaaaaagctcgcagccagcattatgacctggtgttgaatggtaacgaaattggtggaggctctatccggatacataatgctgaattacagcgctatatactggcaacactgctcaaagaagacgtcaaaatgctgtcacatctgcttcaagccctggattacggtgccccccctcacggaggcattgccctgggtctggatcggttaatctgcctggtcaccggaagcccttctattagggatgtaatcgcatttcctaaatcttttagagggcatgatctgatgtccaatacacccgattccgtgccacctgaagagctgaaaccctatcacatcagggtgagcaagccaaccgattcgaaagccgaaagagcccattag

SEQ ID NO: 196723 - DNA, 573 bp, Artificial Sequence
  derived and/or modified sequence
atggagagccagaggctggagctgatccggctgatggagacccaggaggaggatgtggtgctgctgacagctggggagcacaacaaggcctgcagcctgctgggcaagctgcggctggagtgtgccgacctgctggagacccggggcgtggtgctgcgggaccccaccctcttctccttcctgtgggtggtggacttccccctcttcctgcccaaggaggagaacccccgggagctggagagcgcccaccaccccttcaccgccccccaccccagcgacatccacctgctgtacacagagcccaagaaggaggatgtgaagatgctgagccacctgctgcaggccctggactatggagcccctcctcatggaggcatcgccctgggcctggacaggctcatctgcctggtgacaggcagccccagcatcagagatgtgattgccttccccaagagcttccggggccatgacctgatgagcaacaccccagattctgtgcccccagaggagctgaagccctaccacatccgggtgtccaagcccacagacagcaaggccgagcgggcccactag

SEQ ID NO: 196724 - DNA, 1938 bp, Artificial Sequence
  derived and/or modified sequence
atgtacttccccagctggctgagccagctgtaccggggcctgagccggcccatccggaggaccacccagcccatctggggcagcctgtaccgcagcctgctgcagagcagccagaggcgcatccctgagttcagcagctttgtggtgaggaccaacacctgtggggagctgcggagcagccacctgggccaggaggtgaccctgtgtggctggatccagtaccgccggcagaacaccttcctggtgctgcgggactttgatggcctggtgcaggtgatcatcccccaggatgaatctgctgcctctgtgaagaagatcctgtgtgaggcccctgtggagagcgtggtgcaggtgtctggaacagtcatcagcaggcctgctggccaggagaaccccaagatgcccaccggggagattgagatcaaggtgaagacagctgagctgctgaatgcctgcaagaagctgccctttgagatcaagaactttgtgaagaagacagaggccctgcggctgcagtaccgctacctggacctgcggagcttccagatgcagtacaacctgcggctgcggagccagatggtgatgaagatgagggagtacctgtgcaacctgcacggctttgtggacatcgagacccccaccctcttcaagaggacccctgggggcgccaaggagttcctggtgcccagccgggagcccgggaagttctacagcctgccccagagcccccagcagttcaagcagctgctgatggtgggcggcctggaccgctacttccaggtggcccgctgctacagagatgagggcagcaggccagaccggcagcctgagttcacccagattgatattgagatgagctttgtggaccagacaggcatccagagcctgattgagggcctgctgcagtacagctggcccaatgacaaggaccctgtggtggtgcccttccccaccatgacctttgctgaggtgctggccacctacggcacagacaagccagacaccaggtttggcatgaagatcatcgacatcagtgatgtgttcaggaacacagaaattggcttcctgcaggatgccctgagcaagccccacggcaccgtgaaggccatctgcatccctgagggcgccaagtacctgaagaggaaggacatcgagagcatccggaactttgctgctgaccacttcaaccaggagatcctgcctgtgttcctgaatgccaacagaaactggaacagccctgtggccaacttcatcatggagagccagaggctggagctgatccggctgatggagacccaggaggaggatgtggtgctgctgacagctggggagcacaacaaggcctgcagcctgctgggcaagctgcggctggagtgtgccgacctgctggagacccggggcgtggtgctgcgggaccccaccctcttctccttcctgtgggtggtggacttccccctcttcctgcccaaggaggagaacccccgggagctggagagcgcccaccaccccttcaccgccccccaccccagcgacatccacctgctgtacacagagcccaagaaggcccggagccagcactatgacctggtgctgaatggaaatgagatcggcggcggcagcatccgcatccacaatgctgagctgcagcgctacatcctggccaccctgctgaaggaggatgtgaagatgctgagccacctgctgcaggccctggactatggagccccaccccacggcggcatcgccctgggcctggacaggctcatctgcctggtgacaggcagccccagcatcagagatgtgattgccttccccaagagcttccggggccatgacctgatgagcaacaccccagacagcgtgcccccagaggagctgaagccctaccacatccgggtgtccaagcccacagacagcaaggccgagcgggcccactag

SEQ ID NO: 196725 - DNA, 573 bp, Artificial Sequence
  derived and/or modified sequence
atggagagccagcggctggagctgatccggctgatggagacccaggaggaggacgtggtcctgctcaccgccggagagcataacaaggcctgctctcttctgggaaagctccgtttggaatgtgctgacttgcttgagactagaggcgtggtcctgcgggacccaacattgttttcgtttctgtgggttgtggatttccctctgtttctccctaaagaggaaaatcccagggagttggagagtgctcaccatccctttactgcccctcacccctctgacattcacttgttgtacaccgagccgaagaaagaggatgtgaagatgcttagtcatctgctgcaggcgttggattatggagcgcccccacatggggggatcgcgctgggactggacagactcatatgtctcgtcaccggctccccttcaatcagggatgtgatagccttcccaaagagcttccgtggacatgatctcatgagtaatacccccgactcagtgcctccagaggagctcaaaccctaccacattcgggtatctaagccaaccgattctaaagccgagcgggcacattag

SEQ ID NO: 196726 - DNA, 1938 bp, Artificial Sequence
  derived and/or modified sequence
atgtacttccccagctggctgagccagctgtaccggggcctgagcaggcccattaggcggaccacacaacctatttgggggagcctctacaggtctttgctgcagtcttcacaaagaagaatacctgaattcagtagctttgtggtgcgtacaaacacatgcggcgaactgcggtcttcccacctgggccaggaagttacactatgcgggtggattcaataccggcgacaaaacactttcttggttcttcgtgacttcgatgggctagtccaggtgatcatcccacaggacgagtctgcggcttctgtgaaaaaaatactgtgcgaagcccccgtggaatctgtggtacaggtgtcaggcacagtcatatcacggcctgcaggccaggaaaatcctaaaatgcccaccggggaaattgagattaaagtcaagaccgcagagctgcttaatgcatgcaaaaaactgccctttgagattaagaattttgtcaagaagactgaagccctgcggctgcagtatcgctacctcgatttgagaagttttcaaatgcaatacaacttaaggctgaggagccagatggtaatgaagatgagggagtatctttgtaacctgcacggattcgtcgacatcgaaacacccactctgttcaaacgaacacctgggggcgccaaggaattcctggtacctagtcgcgagccgggcaagttttactccctgccacagtccccacagcaattcaaacagctgctgatggtcggtgggcttgaccgatatttccaggtcgcgcgctgctaccgcgatgaggggtcccgaccagatagacagccggaattcacccagattgacatcgagatgtccttcgttgaccagaccgggattcagtccctcatagaaggacttcttcaatatagctggcctaacgacaaagatcccgtagtcgtgccgtttcccaccatgacgtttgccgaggtactcgctacctatggaactgacaagcctgatacacggttcggtatgaagatcatcgacatcagcgatgtcttccggaacacagagattgggtttctccaagacgccttaagcaagccccacggcaccgtgaaggctatttgcatcccagagggggccaagtatctcaagcgaaaggatattgaaagcatccgcaatttcgccgccgaccactttaaccaggaaatcctgcctgttttcttgaacgcgaacagaaactggaacagtcccgtggcaaattttattatggagtctcagaggctagagctgatcaggttgatggagacacaagaggaggacgtggtgctgttgacagccggcgaacataacaaagcctgttctctgttgggcaagttaagactggagtgcgctgatttgctggaaacacgcggggtggtcctgagggatcctactctgttctcgtttttatgggtcgtggacttccctttgtttctgcctaaagaagagaaccctagagaacttgagtcagcacaccatcctttcacagccccccatccctccgacattcacctgttgtacacagagcctaaaaaggcccgttctcagcactatgatctcgtcctaaacggcaatgaaattgggggcggcagcatcagaatccataatgctgagcttcaacgctacatcctggccacgctgttaaaggaggacgtgaagatgctcagtcatctgctgcaagctctcgactacggcgctccacctcacggagggatcgcattgggccttgaccggctgatctgcctcgtaactgggagtccaagtatccgagacgtaattgctttccccaagagctttaggggccacgacttaatgagtaatacacccgactccgtgcctccggaagagctgaagccatatcacatccgagtgtccaagccgacagacagcaaagccgagagagctcactag

SEQ ID NO: 196727 - DNA, 573 bp, Artificial Sequence
  derived and/or modified sequence
atggagtcgcagcggttagagttaattcgactgatggagacgcaggaagaagacgtggttctcttaactgcaggagaacacaataaagcttgctcactgctggggaaacttcggttggaatgcgcagacttactcgaaacacgcggagtggtgctcagagaccctactctgttctctttcctgtgggtggtggattttcctctctttctgcccaaagaggagaacccccgtgagttggagtcagcccaccatccatttactgctccccacccaagcgatattcacttgctgtatactgagcccaaaaaggaagatgtcaaaatgctgtcacatctcctacaggcgctggactatggtgcaccgccacacggcggaattgctctcggacttgaccgactgatctgccttgttaccgggagcccaagcatccgagatgtgattgctttcccaaaatctttccgaggacacgatctgatgagcaatacccccgatagtgttcctccggaggagctgaagccataccacatacgggtatccaaacctacagactccaaggcagaaagggctcattag

SEQ ID NO: 196728 - DNA, 1938 bp, Artificial Sequence
  derived and/or modified sequence
atgtactttccgagttggctgagtcagctctaccggggactctctcgtcctatacgtaggacaactcaaccaatttgggggagtctgtacagaagtctcctgcagtcttcgcagagacggatccctgagttttctagctttgtggttcggaccaacacatgtggggagctgagaagctcccatttaggccaagaagtgaccttatgcggctggattcagtaccggagacaaaatacttttcttgttctgagggactttgatggactagtccaagttattatcccccaggacgaaagtgcagccagcgtgaaaaagatattatgtgaagcccctgttgaaagcgtcgttcaggtcagcgggaccgtgattagtaggcctgccggacaggagaaccctaagatgcctacgggtgaaatcgaaatcaaggtgaaaaccgcagagctacttaatgcttgtaagaagctgccatttgaaatcaaaaacttcgtaaaaaagacagaggccctgcgacttcagtaccggtacctggacctcagaagtttccagatgcagtacaatctgcggcttaggtcacagatggttatgaaaatgagagagtatttatgtaatctgcatggattcgtggacatcgaaacacctacattattcaaaaggaccccgggaggagcaaaagagttccttgtgccctccagggagcctgggaaattttactctttgccgcaatcaccccagcagttcaaacagctcctcatggtggggggactggacaggtactttcaggtggcgaggtgttaccgcgacgaaggttcacgacccgaccgtcagccagagtttacgcaaatagatatcgagatgagttttgttgaccagactggtatccagagcttgatcgagggattattgcagtactcatggcctaatgacaaagaccccgtggtcgtgccttttcccaccatgacatttgcagaagtgctggccacgtatggcaccgacaagcctgatacgcggttcggcatgaagatcatagacattagcgatgtcttcagaaatacagagatcggattcctccaggacgccctgagcaagccccatgggacagtgaaggccatctgcattccggagggtgctaaatacctcaagcgcaaagatattgagtcaatccggaacttcgcggcagatcatttcaatcaggaaattctgccggtattcctgaacgccaaccgcaattggaattccccagttgcaaattttataatggaatcacagaggctcgaattaatccgtctgatggaaacacaagaggaagacgtcgtccttttgacggcaggagaacataacaaagcctgttccctgctcggtaaactgcgcctcgaatgtgcggatttgctggaaacacgaggcgtcgttctccgtgaccctaccctgtttagctttttgtgggttgtggacttcccgctgttcctcccaaaagaggaaaatcccagggagttggagtcagcccatcacccgttcacggccccacatccgagcgatatccatcttctgtatacagagcccaaaaaggccagatcccaacactatgatctggtgctgaacggcaatgagattgggggtggcagtatcagaatacataacgccgagctgcagcgttacatcctggccacattgcttaaggaggatgtaaagatgctgagccacttgctccaagctctcgactatggtgccccaccccacgggggtattgccttggggcttgaccgcctgatttgtctcgtcactgggagcccctccattagagacgtgatcgcattccctaaatcttttcgtgggcacgacctgatgagcaatacacctgactccgtgccgccagaggagctcaaaccatatcatattcgcgtgagcaaaccaaccgacagcaaggccgaaagggcccattag

SEQ ID NO: 196729 - DNA, 3237 bp, Artificial Sequence
  derived and/or modified sequence
tagcgggcggagttgaagggcgcttggaccccagcggcgatctgtgtttgggttcgcgctctgggagaattttggctttgctcgccttcctctttcagaagactcgaaatcggccagcaggtctgcgagatttgaaacgcgactgttactccttgttttccggttctggccgcgggagcctctcgagaagcgtggaaagaggagaagggcgtataccttgtgaccgcctctggttgtcttgggctcgcgcctggcgccgctacgtggagtcgctctctcgtcgtcacttttggctgccgacttgttgagtagaagtgcagactgatgctttaagactcagggagaggtctttcccttatctccaccccagcaagcaccccagagaccttggagatttgtcttgtttctagacacgtgtactccaatgttgtgcggaggaggccttaaatattcgagaagagagtgggaactcctggaattttaagggatttctgtgtatttccaaaactgacttttaactaccggcagcgtgggatttcgtgattgtttttcgccatcgtgtggctccaacatgtacttcccttcttggttaagtcagctgtacaggggtttatccagacccatcagaaggaccacccaaccgatctggggttctctctacagaagtctgttgcagagttcacagaggagaattccagaattcagtagctttgttgtccggaccaacacatgtggagagttgcgttcgtctcacttaggccaagaagtcaccttgtgtggatggattcagtaccgaaggcaaaacacattcttggtcctaagagatttcgatgggcttgttcaagttatcattccccaggatgagtcggcagcctctgtgaagaagattttatgtgaagcccctgtggaatctgtggtgcaagtgtctggtacagtcatttcccgtcctgcaggacaagagaatccaaaaatgccaacaggtgagattgaaatcaaagttaaaacagctgagcttctgaatgcctgcaagaagctgccctttgaaattaagaacttcgtgaagaaaacagaggctcttcggttgcagtatcgctacttagacttgcgtagtttccaaatgcagtataacctgcgactgaggtcccagatggtcatgaaaatgcgggaatatctctgtaatctgcatgggtttgtggatatagaaacccccacattgtttaagaggaccccagggggtgccaaagagtttttagtaccatccagggaacctggaaagttttattctctccctcagagtcctcaacagtttaagcaacttctgatggttggcggtttagacagatattttcaggttgcccgatgttatcgagatgaaggttcaagaccagacagacagcctgagtttactcagattgacatagagatgtcatttgtagaccagactgggatccagagtttaattgagggtttgctccagtattcctggcccaatgacaaagatcctgtggttgttccttttcctactatgacttttgctgaggtgctggccacctatggaactgataaacctgacactcgctttggaatgaagattatagatatcagtgatgtgtttagaaacacagagattggatttcttcaagatgcacttagtaagccccatggaactgtgaaagccatatgtatccctgaaggagcaaaatacttaaaaaggaaagacattgaatccattagaaactttgcagctgaccattttaatcaggaaatcttacctgtattccttaacgccaatagaaactggaattctccagttgctaatttcataatggagtcacaaagactggaattaatcagactaatggagacccaagaggaagatgtggtcctactaactgctggagagcacaataaagcatgctctttgttaggaaaattacgactggaatgtgctgaccttctagaaacaagaggagtggtgctccgtgaccccactctgttctctttcctttgggtggtagatttcccactcttcctgcccaaggaggaaaatcccagagagctggaatcggcccaccacccatttactgctccccaccccagtgacatacatctcctgtacactgagcccaaaaaggaggatgtgaaaatgctctcccatctgctccaggctttagattatggggcaccccctcatggaggaattgccttagggttagacagactgatatgccttgtcactggatctccaagcatcagagatgtcatagccttcccaaagtccttccggggacatgacctcatgagcaataccccagattctgtccctcctgaggaactgaagccctatcatatccgagtctccaagccaacagactccaaagcagaaagagctcattgaatcatgcataccatgcagaaagttgagcttttaggttttgtcctctttgcttccccaaggctaaagtcagatctagagttctgccacaggtctaacaatcaagtctttagatggaaggaatccaggcaacattcttcaccacaacgaagaaacagataaaagatacccaattttgacttgatttcatgcatcatttggattttttttggttaggactttttttgaagttcctttttacttaggtgtgaaagatggttctttgttgaaataatatagtggtttagtgttttcaaatcatgtttctcatacccagatagtagattattcacttaggacagaggtaatcaaattatgtgtgaaatgtaggaaaatgcttgcccctgtaaactagtgagttgatggagcatttgcttcatcatcctcatcaagagaatcatataaattaagctttataatgacatttcaaccatcaacataatatagtgaggagtagcataatattttttaataatgcagaaaacatcactgaaatgagagtcacaaatttttcttcagtgtttcagcctgagtaagttacataaacctcgcttagcctcccttcctgctaatgtgtaaaatacatacttgccctggctacctcaccgggctgttattgctggaatcagaggagataacatatatggaagataaagtgaataaaagtactttgaaaaactataaagcattccacaaatatgagatgatggtattatccatccataaataggtagatatatctctattttatagtttcagattaaacaaaactgatatcaatagtaaaagtcattttacttatc

SEQ ID NO: 196730 - DNA, 3506 bp, Artificial Sequence
  derived and/or modified sequence
cacttaaccactatcgtcaacctttccaatcgtgctcggttgctcctcagttttcctaccggtgcgaagctttctctcaaatttccgcccgtagtaggcatggcggcggcacctcaccactgattcgttgaattccttcccggtaatcttgggcactagcgggcggagttgaagggcgcttggaccccagcggcgatctgtgtttgggttcgcgctctgggagaattttggctttgctcgccttcctctttcagaagactcgaaatcggccagcaggtctgcgagatttgaaacgcgactgttactccttgttttccggttctggccgcgggagcctctcgagaagcgtggaaagaggagaagggcgtataccttgtgaccgcctctggttgtcttgggctcgcgcctggcgccgctacgtggagtcgctctctcgtcgtcacttttggctgccgacttgttgagtagaagtgcagactgatgctttaagactcagggagaggtctttcccttatctccaccccagcaagcaccccagagaccttggagatttgtcttgtttctagacacgtgtactccaatgttgtgcggaggaggccttaaatattcgagaagagagtgggaactcctggaattttaagggatttctgtgtatttccaaaactgacttttaactaccggcagcgtgggatttcgtgattgtttttcgccatcgtgtggctccaacatgtacttcccttcttggttaagtcagctgtacaggggtttatccagacccatcagaaggaccacccaaccgatctggggttctctctacagaagtctgttgcagagttcacagaggagaattccagaattcagtagctttgttgtccggaccaacacatgtggagagttgcgttcgtctcacttaggccaagaagtcaccttgtgtggatggattcagtaccgaaggcaaaacacattcttggtcctaagagatttcgatgggcttgttcaagttatcattccccaggatgagtcggcagcctctgtgaagaagattttatgtgaagcccctgtggaatctgtggtgcaagtgtctggtacagtcatttcccgtcctgcaggacaagagaatccaaaaatgccaacaggtgagattgaaatcaaagttaaaacagctgagcttctgaatgcctgcaagaagctgccctttgaaattaagaacttcgtgaagaaaacagaggctcttcggttgcagtatcgctacttagacttgcgtagtttccaaatgcagtataacctgcgactgaggtcccagatggtcatgaaaatgcgggaatatctctgtaatctgcatgggtttgtggatatagaaacccccacattgtttaagaggaccccagggggtgccaaagagtttttagtaccatccagggaacctggaaagttttattctctccctcagagtcctcaacagtttaagcaacttctgatggttggcggtttagacagatattttcaggttgcccgatgttatcgagatgaaggttcaagaccagacagacagcctgagtttactcagattgacatagagatgtcatttgtagaccagactgggatccagagtttaattgagggtttgctccagtattcctggcccaatgacaaagatcctgtggttgttccttttcctactatgacttttgctgaggtgctggccacctatggaactgataaacctgacactcgctttggaatgaagattatagatatcagtgatgtgtttagaaacacagagattggatttcttcaagatgcacttagtaagccccatggaactgtgaaagccatatgtatccctgaaggagcaaaatacttaaaaaggaaagacattgaatccattagaaactttgcagctgaccattttaatcaggaaatcttacctgtattccttaacgccaatagaaactggaattctccagttgctaatttcataatggagtcacaaagactggaattaatcagactaatggagacccaagaggaagatgtggtcctactaactgctggagagcacaataaagcatgctctttgttaggaaaattacgactggaatgtgctgaccttctagaaacaagaggagtggtgctccgtgaccccactctgttctctttcctttgggtggtagatttcccactcttcctgcccaaggaggaaaatcccagagagctggaatcggcccaccacccatttactgctccccaccccagtgacatacatctcctgtacactgagcccaaaaaggcccgtagccaacactatgacttggttttaaatggcaatgaaataggaggtggttcaattcgaattcacaatgcagagctgcagcgttatatcctggcaaccttactaaaggaggatgtgaaaatgctctcccatctgctccaggctttagattatggggcaccccctcatggaggaattgccttagggttagacagactgatatgccttgtcactggatctccaagcatcagagatgtcatagccttcccaaagtccttccggggacatgacctcatgagcaataccccagattctgtccctcctgaggaactgaagccctatcatatccgagtctccaagccaacagactccaaagcagaaagagctcattgaatcatgcataccatgcagaaagttgagcttttaggttttgtcctctttgcttccccaaggctaaagtcagatctagagttctgccacaggtctaacaatcaagtctttagatggaaggaatccaggcaacattcttcaccacaacgaagaaacagataaaagatacccaattttgacttgatttcatgcatcatttggattttttttggttaggactttttttgaagttcctttttacttaggtgtgaaagatggttctttgttgaaataatatagtggtttagtgttttcaaatcatgtttctcatacccagatagtagattattcacttaggacagaggtaatcaaattatgtgtgaaatgtaggaaaatgcttgcccctgtaaactagtgagttgatggagcatttgcttcatcatcctcatcaagagaatcatataaattaagctttataatgacatttcaaccatcaacataatatagtgaggagtagcataatattttttaataatgcagaaaacatcactgaaatgagagtcacaaatttttcttcagtgtttcagcctgagtaagttacataaacctcgcttagcctcccttcctgctaatgtgtaaaatacatacttgccctggctacctcaccgggctgttattgctggaatcagaggagataacatatatggaagataaagtgaataaaagtactttgaaaaactataaagcattccacaaatatgagatgatggtattatccatccataaataggtagatatatctctattttatagtttcagattaaacaaaactgatatcaatagtaaaagtcattttacttatcaa

SEQ ID NO: 196731 - DNA, 573 bp, Artificial Sequence
  derived and/or modified sequence
atggagagccagagactggagctgatcagactgatggagacccaggaggaggacgtggtgctgctgaccgccggcgagcacaacaaggcctgcagcctgctgggcaagctgagactggagtgcgccgacctgctggagaccagaggcgtggtgctgagagaccccaccctgttcagcttcctgtgggtggtggacttccccctgttcctgcccaaggaggagaaccccagagagctggagagcgcccaccaccccttcaccgccccccaccccagcgacatccacctgctgtacaccgagcccaagaaggaggacgtgaagatgctgagccacctgctgcaggccctggactacggcgcccccccccacggcggcatcgccctgggcctggacagactgatctgcctggtgaccggcagccccagcatcagagacgtgatcgccttccccaagagcttcagaggccacgacctgatgagcaacacccccgacagcgtgccccccgaggagctgaagccctaccacatcagagtgagcaagcccaccgacagcaaggccgagagagcccactag

SEQ ID NO: 196732 - DNA, 1938 bp, Artificial Sequence
  derived and/or modified sequence
atgtacttccccagctggctgagccagctgtacagaggcctgagcagacccatcagaagaaccacccagcccatctggggcagcctgtacagaagcctgctgcagagcagccagagaagaatccccgagttcagcagcttcgtggtgagaaccaacacctgcggcgagctgagaagcagccacctgggccaggaggtgaccctgtgcggctggatccagtacagaagacagaacaccttcctggtgctgagagacttcgacggcctggtgcaggtgatcatcccccaggacgagagcgccgccagcgtgaagaagatcctgtgcgaggcccccgtggagagcgtggtgcaggtgagcggcaccgtgatcagcagacccgccggccaggagaaccccaagatgcccaccggcgagatcgagatcaaggtgaagaccgccgagctgctgaacgcctgcaagaagctgcccttcgagatcaagaacttcgtgaagaagaccgaggccctgagactgcagtacagatacctggacctgagaagcttccagatgcagtacaacctgagactgagaagccagatggtgatgaagatgagagagtacctgtgcaacctgcacggcttcgtggacatcgagacccccaccctgttcaagagaacccccggcggcgccaaggagttcctggtgcccagcagagagcccggcaagttctacagcctgccccagagcccccagcagttcaagcagctgctgatggtgggcggcctggacagatacttccaggtggccagatgctacagagacgagggcagcagacccgacagacagcccgagttcacccagatcgacatcgagatgagcttcgtggaccagaccggcatccagagcctgatcgagggcctgctgcagtacagctggcccaacgacaaggaccccgtggtggtgcccttccccaccatgaccttcgccgaggtgctggccacctacggcaccgacaagcccgacaccagattcggcatgaagatcatcgacatcagcgacgtgttcagaaacaccgagatcggcttcctgcaggacgccctgagcaagccccacggcaccgtgaaggccatctgcatccccgagggcgccaagtacctgaagagaaaggacatcgagagcatcagaaacttcgccgccgaccacttcaaccaggagatcctgcccgtgttcctgaacgccaacagaaactggaacagccccgtggccaacttcatcatggagagccagagactggagctgatcagactgatggagacccaggaggaggacgtggtgctgctgaccgccggcgagcacaacaaggcctgcagcctgctgggcaagctgagactggagtgcgccgacctgctggagaccagaggcgtggtgctgagagaccccaccctgttcagcttcctgtgggtggtggacttccccctgttcctgcccaaggaggagaaccccagagagctggagagcgcccaccaccccttcaccgccccccaccccagcgacatccacctgctgtacaccgagcccaagaaggccagaagccagcactacgacctggtgctgaacggcaacgagatcggcggcggcagcatcagaatccacaacgccgagctgcagagatacatcctggccaccctgctgaaggaggacgtgaagatgctgagccacctgctgcaggccctggactacggcgcccccccccacggcggcatcgccctgggcctggacagactgatctgcctggtgaccggcagccccagcatcagagacgtgatcgccttccccaagagcttcagaggccacgacctgatgagcaacacccccgacagcgtgccccccgaggagctgaagccctaccacatcagagtgagcaagcccaccgacagcaaggccgagagagcccactag

SEQ ID NO: 196733 - protein, 774 aa, Artificial Sequence
  derived and/or modified sequence
MAHEAMEYDVQVQLNHAEQQPAPAGMASSQGGPALLQPVPADVVSSQGVPSILQPAPAEVISSQATPPLLQPAPQLSVDLTEVEVLGEDTVENINPRTSEQHRQGSDGNHTIPASSLHSMTNFISGLQRLHGMLEFLRPSSSNHSVGPMRTRRRVSASRRARAGGSQRTDSARLRAPLDAYFQVSRTQPDLPATTYDSETRNPVSEELQVSSSSDSDSDSSAEYGGVVDQAEESGAVILEEQLAGVSAEQEVTCIDGGKTLPKQPSPQKSEPLLPSASMDEEEGDTCTICLEQWTNAGDHRLSALRCGHLFGYRCISTWLKGQVRKCPQCNKKARHSDIVVLYARTLRALDTSEQERMKSSLLKEQMLRKQAELESAQCRLQLQVLTDKCTRLQRRVQDLQKLTSHQSQNLQQPRGSQAWVLSCSPSSQGQHKHKYHFQKTFTVSQAGNCRIMAYCDALSCLVISQPSPQASFLPGFGVKMLSTANMKSSQYIPMHGKQIRGLAFSSYLRGLLLSASLDNTIKLTSLETNTVVQTYNAGRPVWSCCWCLDEANYIYAGLANGSILVYDVRNTSSHVQELVAQKARCPLVSLSYMPRAASAAFPYGGVLAGTLEDASFWEQKMDFSHWPHVLPLEPGGCIDFQTENSSRHCLVTYRPDKNHTTIRSVLMEMSYRLDDTGNPICSCQPVHTFFGGPTCKLLTKNAIFQSPENDGNILVCTGDEAANSALLWDAASGSLLQDLQTDQPVLDICPFEVNRNSYLATLTEKMVHIYKWE

SEQ ID NO: 196734 - DNA, 2325 bp, Artificial Sequence
  derived and/or modified sequence
atggctcacgaagccatggaatacgacgtgcaggtgcagttaaatcatgccgagcagcagcccgccccagcagggatggcatctagccagggaggaccagctctactgcagcctgtgcccgcggatgtggtgagttcacaaggcgtacctagcatcctccagcccgctcctgctgaggtcatttcctctcaagcgacccctccacttcttcagcccgctccccagctttcggtggatctaactgaggtcgaagtgcttggtgaggacaccgtagagaatatcaatccacggacctccgaacagcacagacagggctccgatggaaatcacacaatacctgcctcaagtctgcacagcatgacgaactttatttcaggactgcagaggctgcacggcatgttggaattcctgcgcccttcttcatctaaccatagcgtcggccctatgcggaccaggcggagggtcagcgcctcccggcgcgcccgggctggggggtctcagcggaccgacagcgcccggctgagggccccactggacgcctacttccaagtgagcaggacacaacccgacctacctgccactacttacgattccgagacaaggaacccagtgtccgaggagctacaggtttctagtagttctgattctgatagtgatagttctgccgagtatggaggtgtagttgaccaagctgaagaatcaggggcggtgattttagaagagcagcttgccggggtttccgcagaacaagaggttacctgcatagacggagggaagacattaccaaaacagcccagtcctcagaaaagcgagccgctcctccctagcgccagtatggatgaagaggaaggcgatacttgcacaatatgtctcgagcagtggactaacgcaggggaccacaggctcagtgccctccggtgcggacacttgtttgggtataggtgcatctccacatggctgaaaggccaggtgcgcaagtgtcctcaatgtaacaagaaggctaggcacagcgacatcgtggtgctgtacgcgagaacactgcgcgctctggataccagtgagcaggaacggatgaaaagctctcttctgaaggagcagatgctcagaaaacaggcagaactcgaatccgcccagtgccgacttcagttgcaggtgcttactgacaagtgcacaaggctgcagcgtcgggttcaagacctgcagaagctcacctcacaccaatctcagaacttgcagcagccaagaggtagtcaggcctgggtgctctcctgcagtccgtctagtcagggacagcataaacataagtaccattttcaaaagaccttcactgtttcccaagccggtaactgcagaatcatggcttactgtgatgccctcagctgcctggtcatatcacagccttccccccaagccagctttctgcccgggttcggtgtgaaaatgctgagtactgccaatatgaagtcttcccagtacattccaatgcacgggaagcagatcagggggctagctttctcaagctatctgcggggacttctcctgtctgcatccctagacaacacaatcaagctgacttctctggaaactaatacggtggtccagacatacaatgctggccggccagtatggtcttgttgttggtgtctggatgaggcaaattatatttacgccggtttggccaacggaagcatactggtttacgacgtcagaaatacatcttcccacgttcaggagctcgtggcccaaaaagcccgctgtcctcttgtgagccttagctatatgccacgcgctgcaagcgccgctttcccatatggtggtgtcctggccgggacgctggaggacgcatccttctgggaacaaaaaatggatttttcgcattggccacacgtgctccccctggagcccggcggatgtatcgatttccaaaccgagaattcttctagacattgcttggttacgtacagaccagataagaatcacactactattcgtagtgtcttgatggagatgtcttatcgcctggacgatacgggaaatccaatatgtagttgtcagcctgtccataccttttttggggggcccacgtgtaagctcctcactaagaatgctattttccagtccccagagaacgatgggaacattttggtttgcacaggcgacgaggccgctaatagcgccctgttatgggacgctgcttctggaagcctcctccaagacttgcagaccgaccagcctgtcctggacatatgccccttcgaggttaatcggaactcttatctggcaactttgaccgagaaaatggtacatatttacaaatgggagtag

SEQ ID NO: 196735 - DNA, 2325 bp, Artificial Sequence
  derived and/or modified sequence
atggcccacgaggccatggagtatgatgtgcaggtgcagctgaaccacgccgagcagcagcctgccccagctggcatggccagcagccagggcggccctgccctgctgcagcctgtgcctgcagatgtggtgagcagccagggcgtgcccagcatcctgcagcctgccccagctgaggtgatcagcagccaggccaccccacccctgctgcagcctgccccccagctgtctgtggacctgacagaggtggaggtgctgggggaggacacagtggagaacatcaaccccaggaccagcgagcagcaccggcagggcagtgatggcaaccacaccatcccagccagcagcctgcacagcatgaccaacttcatcagcggcctgcagaggctgcacggcatgctggagttcctgcggcccagcagcagcaaccacagcgtgggccccatgaggaccaggagaagagtgtctgccagcagaagagcccgggccggcggcagccagaggacagattctgcccggctgcgggcccccctggatgcctacttccaggtgtccaggacccagcctgacctgcctgccaccacctatgacagcgagaccagaaatcctgtgtctgaggagctgcaggtgagcagcagcagtgacagcgacagcgacagcagcgcagaatatggaggagtggtggaccaggccgaggagagcggggccgtcatcctggaggagcagctggccggcgtgtctgctgagcaggaggtgacctgcattgatggcggcaagaccctgcccaagcagcccagcccccagaagtctgagcccctgctgcccagcgcctccatggatgaggaggagggggacacctgcaccatctgcctggagcagtggaccaatgctggggaccaccggctgagcgccctgcgctgtggccacctgtttggctaccgctgcatcagcacctggctgaagggccaggtgaggaagtgcccccagtgcaacaagaaggcccggcacagcgacatcgtggtgctgtatgcccggaccctgcgggccctggacaccagcgagcaggagaggatgaagagcagcctgctgaaggagcagatgctgaggaagcaggccgagctggagagcgcccagtgccgcctgcagctgcaggtgctgacagacaagtgcacccggctgcagaggagagtgcaggacctgcagaagctgaccagccaccagagccagaacctgcagcagccccggggcagccaggcctgggtgctgagctgcagccccagcagccagggccagcacaagcacaagtaccacttccagaagaccttcaccgtgtcccaggccggcaactgccgcatcatggcctactgtgatgccctgagctgcctggtgatcagccagcccagcccccaggccagcttcctgcccggctttggagtgaagatgctgagcacagccaacatgaagagcagccagtacatccccatgcacggcaagcagatccggggcctggccttcagcagctacctgcggggcctgctgctgagcgccagcctggacaacaccatcaagctgaccagcctggagaccaacacagtggtgcagacctacaatgccggccggcctgtgtggagctgctgctggtgcctggatgaggccaactacatctatgccggcctggccaacggcagcatcctggtgtatgatgtgaggaacaccagcagccacgtgcaggagctggtggcccagaaggcccgctgccccctggtgtccctgagctacatgcccagggctgccagcgctgccttcccctacggcggcgtgctggccggcaccctggaggatgccagcttctgggagcagaagatggacttcagccactggccccacgtgctgcccctggagcccggcggctgcatcgacttccagacagagaacagcagccgccactgcctggtgacctacagaccagacaagaaccacaccaccatccgctctgtgctgatggagatgagctaccgcctggatgacaccggcaaccccatctgcagctgccagcctgtgcacaccttctttggaggccccacctgcaagctgctgaccaagaatgccatcttccagagcccagaaaatgatggcaacatcctggtgtgcacaggagatgaggccgccaacagcgccctgctgtgggatgctgccagcggcagcctgctgcaggacctgcagacagaccagcctgtgctggacatctgcccctttgaggtgaacagaaacagctacctggccaccctgacagagaagatggtgcacatctacaagtgggagtag

SEQ ID NO: 196736 - DNA, 2325 bp, Artificial Sequence
  derived and/or modified sequence
atggcccacgaggccatggagtacgacgtgcaggtgcagctgaaccacgccgagcagcagccggcgcctgcagggatggcttcatcgcagggaggtcccgctctccttcaacctgtccccgctgacgttgtatcaagccagggagttcctagtattcttcagccagcacccgccgaggtgatctctagccaggctacgccccccctgctgcaacctgctcctcagctgtccgttgacctgaccgaagtggaagtgttgggcgaagacacagtggaaaacatcaacccaaggacgtccgaacagcaccgtcaaggatcagacggtaatcacaccatccccgccagctctctgcactccatgacgaacttcatctctggactgcagcgcctacatggtatgttagagttcctgagaccctcctctagcaatcatagtgtcggccccatgcgcacaagacgcagagtgtccgcttcccgtcgagctagagccggggggtcacagagaaccgactccgcccgactgcgagctcctctagacgcctactttcaggtatctaggactcaaccagatctgcccgctaccacctacgacagtgagacgaggaacccggtgtcagaagagttacaggtatcgtccagcagcgatagtgacagcgactcctctgcagagtacggcggcgtggtggaccaggctgaggagtctggggcagtcatcttagaagagcagttagctggagtttctgccgagcaggaagtcacttgtatcgacggtggtaagaccctgcccaagcaaccctcaccccaaaaatccgagccactgctgccatctgcctcaatggacgaggaagagggcgacacctgcacaatatgcctggagcaatggaccaacgctggggaccaccggctgtccgcgttgaggtgcggccacttgtttggctatcgttgcataagcacttggctaaaggggcaagtgaggaaatgcccgcagtgtaacaaaaaggcaaggcatagcgatatcgtagtcctgtatgcccgaactctgcgcgccttagacaccagcgaacaagaacgcatgaagagctctctgctaaaagaacagatgttgcggaaacaggctgagctcgaatcagctcaatgccggcttcaacttcaggtgctaactgataagtgtacacgattgcagaggcgcgtgcaagatctccagaagttaacatctcaccagagtcagaacttgcaacagcctcgggggtctcaggcttgggtgctcagttgctcaccctcttctcaggggcagcacaaacacaagtaccattttcaaaaaactttcaccgtttcacaagcaggaaattgcaggatcatggcctattgtgacgccctctcctgcctggtcatctcacagccaagcccacaggcttcttttctccctgggttcggggtcaagatgctgtcaaccgccaatatgaagtccagtcagtacatcccaatgcatggaaagcagattcgcgggctcgcatttagctcctacctgcggggacttcttctctctgctagcctggataacactatcaaactgacctccctcgagaccaacacagtagtgcagacatataacgcagggcgacccgtatggagctgctgctggtgcttagatgaggctaattacatctatgcaggtctggctaacggcagtattctcgtgtatgatgtgagaaatacttccagtcacgtgcaggagctcgtggcccagaaggcgcgctgtccactggtgagcctgagctacatgccgcgcgctgccagcgcggcttttccctacggaggagtgcttgcaggtactctcgaggacgcctctttctgggaacagaagatggatttctctcactggccccacgtcctccctctcgagcctggaggctgcatcgactttcaaacagaaaacagcagccgacattgtctggtaacttacagacctgataagaaccatacaaccattcgcagcgtgctaatggagatgtcatatagactggatgatactgggaatcccatatgcagctgtcagcctgtccataccttcttcgggggtccgacttgcaaactgctgaccaaaaatgccatctttcagtctccggaaaatgacggaaacattctggtctgtaccggagacgaggccgcaaactccgccctgctctgggacgcggccagcggttctctactgcaggacctccagacggatcagccagtcctagacatttgtcccttcgaggtaaatcggaattcctacctggccacattaactgagaaaatggttcacatttacaagtgggagtag

SEQ ID NO: 196737 - DNA, 2325 bp, Artificial Sequence
  derived and/or modified sequence
atggcccacgaggcaatggaatacgacgtacaggtgcaactgaaccacgcggaacagcaacctgctccagcaggaatggcatcaagtcagggcggtccagccctgcttcagcccgttcccgcagatgtggtgtccagccagggcgtcccctcgattttacagcccgcacccgctgaagtcattagctcacaggctactcctcctttactgcagcccgcaccccagctgtccgtcgacctgacagaggtcgaggtactcggtgaagataccgtagagaacatcaatcctcgcacatccgaacagcatcgccaaggcagcgatgggaatcatacaatacctgcttcaagtttgcactctatgaccaacttcatctccggtctgcaaagactccatgggatgctcgaattcctaaggccatccagtagtaatcactcagtcggtcccatgaggacaagaagacgcgtgtcagcctcacgcagagctcgagccggagggtctcagaggaccgactccgcccgtctccgggctccacttgatgcctatttccaggttagccggacccaaccggatcttccagccaccacctacgatagcgagaccagaaatccggtttccgaggaattgcaggtgagcagttcatcagattccgatagcgatagttcagcagagtatggcggagtggtcgaccaggccgaggaaagtggggctgttatcctcgaagagcaattggccggagtgtctgcagaacaggaggtgacatgcatagatggcggaaagacattgcccaaacagccatctcctcaaaagtcggagcctcttttgcctagcgcttctatggacgaggaggaaggggatacgtgtactatctgcctggaacagtggactaatgcaggcgaccatcgactaagcgcacttagatgcggacatttattcggatataggtgtatctcaacgtggttgaaaggtcaagtgaggaaatgcccacaatgtaacaagaaggccaggcattccgatatcgtcgtcctctacgccaggacactgcgggctctggacacatcagagcaggagagaatgaagtcatcattgcttaaggagcagatgctgaggaaacaggcggaattggaatctgcccagtgccgactccagcttcaggtgctaaccgataaatgtacgcgtcttcaacgtcgcgtgcaagatcttcaaaaactgacctcccatcagtcacagaacctgcagcagccacgtggtagccaagcctgggtcctgtcctgtagcccttcgtcccagggccagcacaagcacaaatatcacttccagaaaaccttcacagtttcacaggccggtaattgcaggataatggcctactgtgatgctctatcatgtttagtcatttcccagcctagccctcaagccagttttctacctggattcggtgtgaaaatgctgtcaactgccaatatgaagtcaagtcagtacatcccaatgcatgggaagcagataagaggtttagcgttttcttcctacctgagaggcctgttgctctcagcaagtctcgataacaccatcaaattgacctctctagagacgaacaccgtcgtccaaacatacaacgccggtagaccggtgtggtcctgctgctggtgtctggatgaggcaaactacatctatgccggactggcgaacggaagcatactcgtgtacgatgtacggaatactagctcccacgttcaggaactcgttgcacagaaggccaggtgccctctagtgtccctgtcttatatgcctcgagccgctagcgctgctttcccctacgggggagtgctggctggaacactcgaggacgcaagtttttgggaacaaaagatggacttcagccattggcctcatgttcttccactggaaccaggtggttgtattgacttccagaccgagaactctagcagacattgtctggtaacatatcgccctgacaaaaatcatactactatccgaagcgtattgatggagatgagttaccgtctggacgacaccggtaatccaatctgctcatgtcagcctgtgcatactttctttggaggccctacatgtaaattgctcaccaagaatgctattttccaaagccctgaaaacgacggcaatatactggtatgtacgggcgacgaggcagcaaatagtgccttactgtgggatgccgcaagtgggagcctgctacaggacctgcagacggatcaacctgtgctcgatatctgtcccttcgaagtgaaccgcaattcctatctcgctaccttgaccgaaaagatggtgcacatatacaagtgggaatag

SEQ ID NO: 196738 - DNA, 4952 bp, Artificial Sequence
  derived and/or modified sequence
aagtggcagttggcgtaggtgcattcggagtgcggccgaggtaactaccgagtcttcggcgggctcgcgagcccggccgcggcctgctggtttcagtgatggctcatgaagcaatggaatatgatgttcaggtgcagttaaatcatgccgaacaacagccagctcctgctggcatggccagcagccaagggggaccagccctcctccagcctgttcctgctgatgtggtcagcagccagggggtaccatccatcctccagccagctcctgctgaggtgatcagcagccaagcgacaccacccctgctccagcctgctccgcaactgtctgttgacctgacagaagtggaggtcttgggagaagacactgtggagaacatcaatccaagaacttcagaacaacataggcagggatctgatggtaatcacaccatcccagcatcttcgttgcattcaatgaccaacttcatcagcggactgcagagacttcatggcatgctggaattcctgagaccttcatcttcaaaccacagtgtagggccaatgagaacaagaaggagggtatctgcttcacggagggcaagagccggagggtctcagaggacagacagtgccaggttgagagcaccattggatgcttactttcaggtgagcaggacccagcctgacttgccagctaccacttatgattcagagactaggaatcctgtatctgaagagttgcaggtgtctagtagttctgattctgacagtgacagctctgcagagtatggaggggttgttgaccaggcagaggaatctggagctgtcattttagaagagcaactagcaggtgtctcagcagagcaagaagttacatgtatcgatggaggcaagaccctccccaaacagccatctccccagaagtctgagcctctgctaccttctgcttctatggatgaggaagaaggggacacttgtacaatatgtctggaacagtggaccaatgctggggaccaccggctctcagcattacgctgtgggcatctctttgggtataggtgcatttccacgtggcttaaaggacaagtacgaaaatgtccccagtgcaacaagaaagccaggcacagtgacattgtcgtcctttatgcccgaaccctgagagctttggacactagtgaacaggagcgcatgaaaagttccctactgaaggaacagatgctaaggaaacaggccgagttagaatcagcacagtgccgactccaactgcaggtcctcactgataagtgcactaggcttcaaaggcgtgttcaggacttgcaaaaacttacgtcacatcaaagtcagaatttacagcaacccaggggctcccaagcatgggtcctgagctgctcaccctccagccagggccagcacaagcacaagtaccacttccaaaagaccttcacagtatctcaggcaggaaactgccggatcatggcatactgtgatgctctgagctgcctggtgatatcacagccttctcctcaggcctcttttcttccaggctttggtgttaagatgttgagtactgccaacatgaagagcagtcagtacattccgatgcatggcaaacagatccgtggactggcgtttagcagttacctcagaggcttgctactctctgcttccctagacaacactattaaactgaccagcctggagacaaataccgtggtccagacttataatgctggacgtcctgtctggagctgttgctggtgtcttgatgaggctaactacatctatgctggactggccaatggttcaattctggtatatgacgtgcgaaacacgagcagtcatgtgcaggagttagtagctcagaaagccagatgcccactggtctccctgtcatacatgcccagagctgcctcagctgcatttccatatggtggggtgctggctggaaccttggaggatgcttcattctgggaacagaaaatggacttttctcattggcctcatgtgctgcccttggagccagggggctgcatagactttcagacagagaacagctcccggcactgtcttgtgacctacaggcctgataaaaatcacaccaccatacgaagtgtgctgatggaaatgtcctaccgactggatgacactggaaatccaatctgctcctgccagcctgtacatacattttttggaggacctacttgcaaactattgaccaaaaatgccattttccaaagcccagagaatgatggcaacatcctggtgtgtactggggatgaagcagcaaattctgccctgctgtgggatgctgccagtggctcgttgctccaggacctacagaccgatcagcctgtgttggacatctgcccatttgaggtgaaccgtaacagctacttggctaccttaacagagaagatggtccacatctataagtgggagtgactgtggtctcgaaaccttgaaggcatgctgctggttagatgttgtttgctagcgcctagcagccccaagcaagatccctgtttattgtctgcagtctagaacattgggaatcatggtttgtttgcattagtatgattctaggaccctaggtcactgagacactacagattgtgtatctgttatgtccactaaaagagtaattgatgggtactttatctacattatccatttcttgggtttaaagccttcattaaccattattgtatgttggaaattcttattttctttattttctgtgtgactttctggaccttagagagtgtcctctcatcatctaggatgtgagtgggcatcaagcattttctggggaatatgacatcccatctgagttgtcctgtcacttaagtatccttgaagggactaaccatcgtcttggtactgatttgatgcaacgtagatgtaaaagagtattattcagttgaacacaagagggcactgtagaaccttgtgtccggtttatttctgaccttgaaggctgacaatcttttagtaacttgtctcatctccacacaagtgtgtgatagcacacctgggtgtgctttgtggcaataacacttgtgttccaggtgtgaagtgctgggacattggcaggcccagtgatggaagcagctagtgaacgattccctttgctaatgcctagtgcattaagttcattgctttgcgaaaggtaaggaaagaggccagttgtttgagcggtggggaagattttgttttttctagccagcttaggatctcaggattggttttatccaagctagtgctttgaagaacactatctcttgccaggaaaagatgagtgataggtcaaagcttttacttgagtctcccctagtgtcagagatcaggagaaaagacataagagaatttacaaaagctattcagactgctattgaaaacatgagaagaacttgtctcccattttgagagttcctatctaaataaagccaattcctcagactgaggggctgttcttaagtgttctttatacattccagttatccagttaaagccttccccatgtgaagctgatgtttgattccagtttcctttgatttgcctccctaaccttttctagggctcagtttgtatttctttgccttgcctcagactactttgccaacccacttccacaacagaatatgcttcaagatgtgggcaggtcagtgtcctgttcatgggagaaaatggcttaacagtctgattttctcaaatgattattgaagagttgttatcgtttttattataaaacacttctgacctgtcaattcaagagctgtttctaggatctttctctccggcaaggggttgttgcactagatttccccagagttccaagttctagttgtgccttttaatgaccctttaatattttaggacataattttttccttttttaaatttttttgtagaaatagatgtttcactacgttgtccaggctggtcttggactcctggcctcaagcaatcctcccacctcagcctcctaaagtgccaaaattataggcgtgagccactgcacccggcccctatttgaagacgtcttttgtaaaagctagcttctagaacctgagaaaagctcttttctcagaggagatactccttttgatatgttaatgattaagagtggttgcccaggcctagtttcagtggcagaataggattggaattaaaaagcagaactcatctggcttcagcagattgccaccaagaggatacaggtggtcaggtcctggctggctttgtctttgggcctgggcaggcttaggatttgactttctttgaagtacctgatgctgattgattccactaatagtaggaagcaagagacttaactatgagggacgttatgtgaatcttaagtcttaccagtccttgcattagtacattaaatttggatgttttggaagcaaattcatacgatcgtgagtgatttctccaaagaaaaaaagccttgtccagcctgaccaacatggtgaaaccccatctctactaaaaatacaaaaattaactgggtgcagtggtgcgcatgcctgtagtcccagctacttgggaggctgaggcaggagaattgcttgaaccctgggaggcagaggttgcagtgagtcgagatcgcgccactgcactccagcctcggtgacagagcaagactccatctcaaaaaaaacaaacaaacaaaaaaaaaccctgatgccattcccagtccccgttgtaggacatcacatttataaatccaggctttagtcttctgggctccaccagtctctgccccaccatattcctttgtcactacctctaagtttttttccccacttgaggatttggagttaaacgaactcaaaatgtcttgtcattgtatgtattcttgcccctgctttgaaaacagggccatgggaactctgtttatgccctgttttaatgtttctgttttatgttttactgttaatatgaaaataaagaatttgctatgta

SEQ ID NO: 196739 - DNA, 2325 bp, Artificial Sequence
  derived and/or modified sequence
atggcccacgaggccatggagtacgacgtgcaggtgcagctgaaccacgccgagcagcagcccgcccccgccggcatggccagcagccagggcggccccgccctgctgcagcccgtgcccgccgacgtggtgagcagccagggcgtgcccagcatcctgcagcccgcccccgccgaggtgatcagcagccaggccaccccccccctgctgcagcccgccccccagctgagcgtggacctgaccgaggtggaggtgctgggcgaggacaccgtggagaacatcaaccccagaaccagcgagcagcacagacagggcagcgacggcaaccacaccatccccgccagcagcctgcacagcatgaccaacttcatcagcggcctgcagagactgcacggcatgctggagttcctgagacccagcagcagcaaccacagcgtgggccccatgagaaccagaagaagagtgagcgccagcagaagagccagagccggcggcagccagagaaccgacagcgccagactgagagcccccctggacgcctacttccaggtgagcagaacccagcccgacctgcccgccaccacctacgacagcgagaccagaaaccccgtgagcgaggagctgcaggtgagcagcagcagcgacagcgacagcgacagcagcgccgagtacggcggcgtggtggaccaggccgaggagagcggcgccgtgatcctggaggagcagctggccggcgtgagcgccgagcaggaggtgacctgcatcgacggcggcaagaccctgcccaagcagcccagcccccagaagagcgagcccctgctgcccagcgccagcatggacgaggaggagggcgacacctgcaccatctgcctggagcagtggaccaacgccggcgaccacagactgagcgccctgagatgcggccacctgttcggctacagatgcatcagcacctggctgaagggccaggtgagaaagtgcccccagtgcaacaagaaggccagacacagcgacatcgtggtgctgtacgccagaaccctgagagccctggacaccagcgagcaggagagaatgaagagcagcctgctgaaggagcagatgctgagaaagcaggccgagctggagagcgcccagtgcagactgcagctgcaggtgctgaccgacaagtgcaccagactgcagagaagagtgcaggacctgcagaagctgaccagccaccagagccagaacctgcagcagcccagaggcagccaggcctgggtgctgagctgcagccccagcagccagggccagcacaagcacaagtaccacttccagaagaccttcaccgtgagccaggccggcaactgcagaatcatggcctactgcgacgccctgagctgcctggtgatcagccagcccagcccccaggccagcttcctgcccggcttcggcgtgaagatgctgagcaccgccaacatgaagagcagccagtacatccccatgcacggcaagcagatcagaggcctggccttcagcagctacctgagaggcctgctgctgagcgccagcctggacaacaccatcaagctgaccagcctggagaccaacaccgtggtgcagacctacaacgccggcagacccgtgtggagctgctgctggtgcctggacgaggccaactacatctacgccggcctggccaacggcagcatcctggtgtacgacgtgagaaacaccagcagccacgtgcaggagctggtggcccagaaggccagatgccccctggtgagcctgagctacatgcccagagccgccagcgccgccttcccctacggcggcgtgctggccggcaccctggaggacgccagcttctgggagcagaagatggacttcagccactggccccacgtgctgcccctggagcccggcggctgcatcgacttccagaccgagaacagcagcagacactgcctggtgacctacagacccgacaagaaccacaccaccatcagaagcgtgctgatggagatgagctacagactggacgacaccggcaaccccatctgcagctgccagcccgtgcacaccttcttcggcggccccacctgcaagctgctgaccaagaacgccatcttccagagccccgagaacgacggcaacatcctggtgtgcaccggcgacgaggccgccaacagcgccctgctgtgggacgccgccagcggcagcctgctgcaggacctgcagaccgaccagcccgtgctggacatctgccccttcgaggtgaacagaaacagctacctggccaccctgaccgagaagatggtgcacatctacaagtgggagtag

SEQ ID NO: 196740 - protein, 826 aa, Artificial Sequence
  derived and/or modified sequence
MWALCSLLRSAAGRTMSQGRTISQAPARRERPRKDPLRHLRTREKRGPSGCSGGPNTVYLQVVAAGSRDSGAALYVFSEFNRYLFNCGEGVQRLMQEHKLKVARLDNIFLTRMHWSNVGGLSGMILTLKETGLPKCVLSGPPQLEKYLEAIKIFSGPLKGIELAVRPHSAPEYEDETMTVYQIPIHSEQRRGKHQPWQSPERPLSRLSPERSSDSESNENEPHLPHGVSQRRGVRDSSLVVAFICKLHLKRGNFLVLKAKEMGLPVGTAAIAPIIAAVKDGKSITHEGREILAEELCTPPDPGAAFVVVECPDESFIQPICENATFQRYQGKADAPVALVVHMAPASVLVDSRYQQWMERFGPDTQHLVLNENCASVHNLRSHKIQTQLNLIHPDIFPLLTSFRCKKEGPTLSVPMVQGECLLKYQLRPRREWQRDAIITCNPEEFIVEALQLPNFQQSVQEYRRSAQDGPAPAEKRSQYPEIIFLGTGSAIPMKIRNVSATLVNISPDTSLLLDCGEGTFGQLCRHYGDQVDRVLGTLAAVFVSHLHADHHTGLPSILLQRERALASLGKPLHPLLVVAPNQLKAWLQQYHNQCQEVLHHISMIPAKCLQEGAEISSPAVERLISSLLRTCDLEEFQTCLVRHCKHAFGCALVHTSGWKVVYSGDTMPCEALVRMGKDATLLIHEATLEDGLEEEAVEKTHSTTSQAISVGMRMNAEFIMLNHFSQRYAKVPLFSPNFSEKVGVAFDHMKVCFGDFPTMPKLIPPLKALFAGDIEEMEERREKRELRQVRAALLSRELAGGLEDGEPQQKRAHTEEPQAKKVRAQ

SEQ ID NO: 196741 - protein, 807 aa, Artificial Sequence
  derived and/or modified sequence
MWALCSLLRSAAGRTMSQGRTISQAPARRERPRKDPLRHLRTREKRGPSGCSGGPNTVYLQVVAAGSRDSGVQRLMQEHKLKVARLDNIFLTRMHWSNVGGLSGMILTLKETGLPKCVLSGPPQLEKYLEAIKIFSGPLKGIELAVRPHSAPEYEDETMTVYQIPIHSEQRRGKHQPWQSPERPLSRLSPERSSDSESNENEPHLPHGVSQRRGVRDSSLVVAFICKLHLKRGNFLVLKAKEMGLPVGTAAIAPIIAAVKDGKSITHEGREILAEELCTPPDPGAAFVVVECPDESFIQPICENATFQRYQGKADAPVALVVHMAPASVLVDSRYQQWMERFGPDTQHLVLNENCASVHNLRSHKIQTQLNLIHPDIFPLLTSFRCKKEGPTLSVPMVQGECLLKYQLRPRREWQRDAIITCNPEEFIVEALQLPNFQQSVQEYRRSAQDGPAPAEKRSQYPEIIFLGTGSAIPMKIRNVSATLVNISPDTSLLLDCGEGTFGQLCRHYGDQVDRVLGTLAAVFVSHLHADHHTGLPSILLQRERALASLGKPLHPLLVVAPNQLKAWLQQYHNQCQEVLHHISMIPAKCLQEGAEISSPAVERLISSLLRTCDLEEFQTCLVRHCKHAFGCALVHTSGWKVVYSGDTMPCEALVRMGKDATLLIHEATLEDGLEEEAVEKTHSTTSQAISVGMRMNAEFIMLNHFSQRYAKVPLFSPNFSEKVGVAFDHMKVCFGDFPTMPKLIPPLKALFAGDIEEMEERREKRELRQVRAALLSRELAGGLEDGEPQQKRAHTEEPQAKKVRAQ

SEQ ID NO: 196742 - protein, 286 aa, Artificial Sequence
  derived and/or modified sequence
  misc_feature (1)..(1): Xaa can be any naturally occurring amino acid
XPHGVSQRRGVRDSSLVVAFICKLHLKRGNFLVLKAKEMGLPVGTAAIAPIIAAVKDGKSITHEGREVLQILAEELCTPPDPGAAFVVVECPDESFIQPICENATFQRYQGKADAPVALVVHMAPASVLVDSRYQQWMERFGPDTQHLVLNENCASVHNLRSHKIQTQLNLIHPDIFPLLTSFRCKKEGPTLSVPMVQGECLLKYQLRPRREWQRDAIITCNPEEFIVEALQLPNFQQSVQEYRRSAQDGPAPAEKRSQYPEIIFLGTGSAIPMKIRNVSATLVNI

SEQ ID NO: 196743 - DNA, 2481 bp, Artificial Sequence
  derived and/or modified sequence
atgtgggcattgtgcagcctgctgagatcagcggccgggaggactatgtcacagggccggaccatatcacaggcccctgctcggagggagcggccccggaaagaccccctcagacacctacggacacgagaaaagagagggccaagcgggtgcagcgggggaccgaacacagtttatctgcaagtggttgccgctgggagccgggactctggcgccgccttgtacgtatttagtgaatttaatagatacctttttaattgtggagaaggtgtgcaacgattgatgcaggaacacaagctgaaggtggcgcggctcgataacattttcctcacacgcatgcactggagcaacgtaggtggcctgtcaggaatgattttgacacttaaagaaaccgggctgcctaagtgtgtgctgtcagggcctccccagctggaaaaatacctggaggctattaaaatcttttcaggaccgttgaaggggatcgaactggccgtccgcccgcactctgccccagagtacgaagacgaaacaatgactgtgtatcaaattccaatccattcagaacagagacggggtaagcaccagccctggcagtcaccagaacgtcctttgtcaaggctaagccctgaaagatcgagcgactccgaatctaacgaaaatgaaccacacctgccccatggggtcagtcagcggcggggagttcgggactcttccctggtggtggcgttcatctgcaagctgcacctcaaacgagggaacttcttagtgctaaaggccaaggagatgggactgccagtcggcaccgccgctatcgcgccgatcattgccgctgtgaaggatggaaaatctattacacacgagggcagggagattcttgcggaagagttgtgtaccccccccgatcctggagcagcctttgttgtagttgagtgccctgatgaatccttcatccagcccatttgcgagaatgctactttccagcgatatcagggcaaggccgacgctccagtagcacttgtggtccatatggccccggcctctgtcctggttgattcgcggtaccaacagtggatggaaaggttcgggccggatacccagcaccttgtcctgaacgaaaactgtgcttccgttcataatctgcggagccacaagatccagacccagctgaacctgattcaccctgacatctttccgctcctgactagcttccgatgcaagaaggaggggcctactctgtcggtgccaatggtgcagggagaatgcctcctcaaatatcagctcagaccccgtcgtgaatggcaaagggatgccatcatcacgtgtaaccccgaagaattcatcgtcgaagctctgcagctgcccaatttccagcaatccgtgcaggaatataggcgcagtgctcaggacggcccagctcccgccgaaaaaagatcccaatatcccgaaataattttccttggtaccgggtctgcaatccctatgaagattaggaacgtaagtgccaccctcgtcaacatttcccctgacacctctctcctccttgactgtggggagggcacattcgggcaactgtgtcgtcattacggtgaccaggttgatcgggtattaggcaccttggcagcagtgtttgtgagccacctgcatgcggaccaccacacgggcctgccgagcatactcctccaaagagaaagggcccttgcaagcttggggaagcctttgcatcctctgctcgtggtggctcccaatcaactgaaagcttggttacagcaatatcataaccagtgccaggaggtgctgcatcacatatcaatgatcccagccaagtgcttacaggagggggctgagatatcctccccagccgtcgaaaggttgatctcctccctccttcggacatgcgacctggaggaattccagacgtgccttgtgagacactgcaagcacgcctttggctgtgcactcgtgcatacaagtgggtggaaggtcgtgtatagcggtgacaccatgccatgcgaagccctggtgaggatgggaaaagacgcaactctccttatccatgaagcgactcttgaggatggtcttgaagaagaagctgttgagaaaacgcactcgacaacctctcaggcaattagcgtcggcatgagaatgaatgcagagtttataatgttgaaccatttttcgcagaggtatgcaaaagttcctctgttttcgcccaacttttccgagaaagtcggcgtggccttcgatcacatgaaagtctgcttcggagatttccctactatgccgaagttgattccccctctgaaagctctctttgcgggcgacattgaggaaatggaggaacgcagggagaagcgggagttgcgacaggtgagagccgctttgctgtccagagaactcgcaggtggcctggaagatggcgagccccaacagaaacgagcacacacagaagagccccaggcaaaaaaagtgcgcgcccagtag

SEQ ID NO: 196744 - DNA, 2424 bp, Artificial Sequence
  derived and/or modified sequence
atgtgggccctctgttcactcctgcgatctgccgccgggaggactatgagccagggccgcacgataagccaggcgccagctcgacgcgaacggcccagaaaagacccactgcggcatcttcgcacaagggaaaaacgcggcccttccggctgctccggcggccccaacacggtgtacttacaggtggttgctgccggctcccgggactccggtgttcagcggttaatgcaggagcataaattgaaagttgcccggttggacaacatatttttgacgcgcatgcattggagcaacgtgggcggcctctcaggaatgatacttacgctgaaagagactggtctaccaaaatgcgtgctctctggtcccccacaactggaaaaataccttgaggccataaagattttttctggcccattaaaaggcatcgagctggcagtcagaccacacagtgcacccgagtatgaagatgaaacgatgacagtatatcagatccctattcattccgagcagcggcgcggaaagcaccaaccttggcagagccctgaacgcccactgagccggctctcccccgagaggagcagtgatagcgaatcgaacgaaaacgagccccatctgccgcatggggtatctcagagacggggcgtgcgggactcctccctcgtggtggcctttatatgcaagctgcatctgaagcgaggcaatttcttggtgttgaaggcaaaggaaatggggctgcctgtcggaaccgctgccattgccccaataattgccgcggtgaaggatggcaaaagcatcacacatgaaggtagggagattctggcggaagaactttgtacacctccagaccctggggccgctttcgtcgtcgtcgagtgccctgacgagagctttatccagccaatttgtgaaaatgccacttttcagcgataccaggggaaagccgacgctcctgtagcattggtggtacatatggcacccgcaagtgtcctggtggactctcgctatcagcagtggatggaaaggttcggccctgacacacagcacctggttctgaatgagaactgtgctagcgttcacaaccttagaagccacaaaatacaaacccagctcaacctgatacaccctgatattttccctctgcttacaagctttcggtgtaaaaaagagggccctaccctgagtgtgccaatggtgcagggggaatgcctactgaagtatcagcttagaccccgccgggagtggcagcgcgacgcaattataacgtgcaaccccgaagagtttatagtcgaggctttgcaacttccgaatttccagcagagcgttcaggaatacagacgcagtgcacaggacgggcccgcccctgccgagaaacggtctcagtaccccgagatcatcttcctcggaactgggagcgcgatccctatgaagattagaaatgtctccgccaccctagtgaatatatcaccagacactagcttgctgctggactgtggtgaggggacttttgggcagctatgcagacattacggtgatcaagttgaccgcgttcttgggaccctggccgcagtgtttgtgtctcacctacacgccgaccaccacaccggactcccatccattctattacagcgggagagagcactggcttctctcggaaaaccactgcatccactgttggtcgtcgcaccgaaccaactgaaggcctggctgcagcagtaccacaaccagtgccaggaagttctgcatcatatctctatgattcccgccaagtgcttgcaggaaggagcagagatctcttcaccagccgtggagagattgattagtagcctcctgaggacttgcgacctcgaagaattccagacgtgtctagttcgccactgtaagcacgcctttggttgcgcacttgtccacaccagcggctggaaggttgtttactctggcgataccatgccgtgcgaagccttagtgcggatgggcaaagacgcaacattgctgattcacgaagcaactcttgaagacggacttgaagaagaggcagtcgagaagacccatagtactacaagtcaggccatttctgtggggatgcggatgaatgctgaattcattatgctcaatcactttagtcaaaggtatgcaaaagtaccgcttttcagccccaatttctctgaaaaggttggggtcgccttcgatcacatgaaagtttgtttcggcgacttccccacaatgcctaagcttattccccccttgaaggcattgttcgcaggcgacattgaggagatggaagagcggcgggagaaaagagagctcagacaggtgagggctgccttgctctctagggagctggctgggggattggaagatggggagccccagcagaaaagagcacatactgaggagcctcaagccaaaaaggttcgggcccagtag

SEQ ID NO: 196745 - DNA, 861 bp, Artificial Sequence
  derived and/or modified sequence
tgacctcacggagttagccagcgccgaggagtgagagattcctctctggtggtggccttcatctgcaaactgcatctgaaacgtggaaacttcctggtgctgaaagccaaggagatggggctgcccgtaggaaccgctgccatagcccccattatcgctgccgtgaaagatggaaaatccattactcacgagggtcgggaggtgctccagattctagccgaggagttgtgtaccccccccgaccctggcgcagccttcgtggtggtggaatgccccgacgagtcgttcatccagcccatctgcgaaaacgcaacctttcagcgataccaaggcaaggccgatgcccctgtcgccctggtggtgcatatggcacccgcctcggtgctggtcgatagccgataccagcagtggatggaacggtttggtcccgatacgcagcaccttgtcctaaatgaaaactgtgcctcggtgcataatcttcgaagtcataaaatccaaactcagcttaacctaatccatcccgatatctttcccctcctcaccagttttcgatgcaagaaagagggtcctactctcagcgtgcctatggtgcagggcgagtgccttcttaagtaccagctccggcctcgcagggaatggcagagagacgcaattataacatgtaaccccgaggagttcatagtggaggcactgcagctgcctaattttcagcaatcagtgcaggaataccggcggtccgcccaagacggcccagctcctgctgaaaaaaggagccagtatccagagattattttcctgggaaccggttctgccatcccaatgaaaatcaggaacgtctcagccaccctggttaatatttag

SEQ ID NO: 196746 - DNA, 2481 bp, Artificial Sequence
  derived and/or modified sequence
atgtgggccctgtgcagcctgctgcggtctgctgctggccgcaccatgagccagggccgcaccatcagccaggccccagcccggcgggagcggcccaggaaggaccccctgcggcacctgcggacccgggagaagaggggccccagcggctgcagcggcggccccaacacagtgtacctgcaggtggtggccgccggcagccgggacagcggggccgccctgtatgtgttcagcgagttcaaccgctacctgttcaactgtggggagggcgtgcagaggctgatgcaggagcacaagctgaaggtggcccggctggacaacatcttcctgaccaggatgcactggagcaatgtgggcggcctgagcggcatgatcctgaccctgaaggagaccggcctgcccaagtgtgtgctgagcggccccccccagctggagaagtacctggaggccatcaagatcttcagcggccccctgaagggcatcgagctggccgtgcggccccacagcgccccagaatatgaagatgagaccatgacagtgtaccagatccccatccacagcgagcagaggcggggcaagcaccagccctggcagagccctgagcggcccctgagccggctgagccctgagaggagcagtgacagcgagagcaatgaaaatgagccccacctgccccacggcgtgtcccagaggagaggagtgcgggacagcagcctggtggtggccttcatctgcaagctgcacctgaagaggggcaacttcctggtgctgaaggccaaggagatgggcctgcctgtgggcacagctgccatcgcccccatcatcgctgctgtgaaggatggcaagagcatcacccatgagggccgggagatcctggccgaggagctgtgcaccccaccagaccccggggccgcctttgtggtggtggagtgcccagatgagagcttcatccagcccatctgtgaaaatgccaccttccagcgctaccagggcaaggcagatgcccctgtggccctggtggtgcacatggccccagcctctgtgctggtggacagccgctaccagcagtggatggagagatttggaccagacacccagcacctggtgctgaatgaaaactgtgcctctgtgcacaacctgcggagccacaagatccagacccagctgaacctgatccacccagacatcttccccctgctgaccagcttccgctgcaagaaggagggccccaccctgtctgtgcccatggtgcagggcgagtgcctgctgaagtaccagctgcggccccggcgggagtggcagagagatgccatcatcacctgcaaccctgaggagttcatcgtggaggccctgcagctgcccaacttccagcagagcgtgcaggagtaccgccgcagcgcccaggacggccctgccccagctgagaagaggagccagtacccagagatcatcttcctgggcaccggcagcgccatccccatgaagatcagaaatgtgtctgccaccctggtgaacatcagcccagacaccagcctgctgctggactgtggggagggcaccttcggccagctgtgccgccactacggggaccaggtggacagagtgctgggcaccctggccgctgtgtttgtgagccacctgcatgctgaccaccacacaggcctgcccagcatcctgctgcagcgggagcgggccctggccagcctgggcaagcccctgcaccccctgctggtggtggcccccaaccagctgaaggcctggctgcagcagtaccacaaccagtgccaggaggtgctgcaccacatctccatgatcccagccaagtgcctgcaggagggcgctgagatcagcagccctgctgtggagcggctcatcagcagcctgctgcggacctgtgacctggaggagttccagacctgcctggtgcgccactgcaagcacgccttcggctgtgccctggtgcacaccagcggctggaaggtggtgtacagcggggacaccatgccctgtgaggccctggtgaggatgggcaaggatgccaccctgctgattcatgaggccaccctggaggatggcctggaggaggaggccgtggagaagacccacagcaccaccagccaggccatctctgtgggcatgaggatgaatgctgagttcatcatgctgaaccacttcagccagagatatgccaaggtgcccctcttcagccccaacttcagcgagaaggtgggcgtggcctttgaccacatgaaggtgtgcttcggggacttccccaccatgcccaagctgatcccccccctgaaggccctgtttgctggggacatcgaggagatggaggagcggcgggagaagcgggagctgcggcaggtgcgggccgccctgctgagccgggagctggccggcggcctggaggatggagagccccagcagaagagggcccacacagaggagccccaggccaagaaggtgcgggcccagtag

SEQ ID NO: 196747 - DNA, 2424 bp, Artificial Sequence
  derived and/or modified sequence
atgtgggccctgtgcagcctgctgcggtctgctgctggccgcaccatgagccagggccgcaccatcagccaggccccagcccggcgggagcggcccaggaaggaccccctgcggcacctgcggacccgggagaagaggggccccagcggctgcagcggcggccccaacacagtgtacctgcaggtggtggccgccggcagccgggacagcggcgtgcagaggctgatgcaggagcacaagctgaaggtggcccggctggacaacatcttcctgaccaggatgcactggagcaatgtgggcggcctgagcggcatgatcctgaccctgaaggagaccggcctgcccaagtgtgtgctgagcggccccccccagctggagaagtacctggaggccatcaagatcttcagcggccccctgaagggcatcgagctggccgtgcggccccacagcgccccagaatatgaagatgagaccatgacagtgtaccagatccccatccacagcgagcagaggcggggcaagcaccagccctggcagagccctgagcggcccctgagccggctgagccctgagaggagcagtgacagcgagagcaatgaaaatgagccccacctgccccatggagtgtcccagaggcggggcgtgcgggacagcagcctggtggtggccttcatctgcaagctgcacctgaagaggggcaacttcctggtgctgaaggccaaggagatgggcctgcctgtgggcacagctgccatcgcccccatcatcgctgctgtgaaggatggcaagagcatcacccatgagggccgggagatcctggccgaggagctgtgcaccccaccagaccctggagctgcctttgtggtggtggagtgcccagatgagagcttcatccagcccatctgtgaaaatgccaccttccagcgctaccagggcaaggcagatgcccctgtggccctggtggtgcacatggccccagcctctgtgctggtggacagccgctaccagcagtggatggagcgcttcggccctgacacccagcacctggtgctgaatgaaaactgtgcctctgtgcacaacctgcggagccacaagatccagacccagctgaacctgatccacccagacatcttccccctgctgaccagcttccgctgcaagaaggagggccccaccctgtctgtgcccatggtgcagggagaatgtctgctgaagtaccagctgcggccccggcgggagtggcagagagatgccatcatcacctgcaaccctgaggagttcatcgtggaggccctgcagctgcccaacttccagcagagcgtgcaggagtacagaagaagtgcccaggacggccctgccccagctgagaagaggagccagtacccagagatcatcttcctgggcactggaagtgccatccccatgaagatcagaaatgtgtctgccaccctggtgaacatcagcccagacaccagcctgctgctggactgtggggagggcaccttcggccagctgtgccgccactatggagaccaggtggacagagtgctgggcaccctggccgctgtgtttgtgagccacctgcacgccgaccaccacacaggcctgcccagcatcctgctgcagcgggagcgggccctggccagcctgggcaagcccctgcaccccctgctggtggtggcccccaaccagctgaaggcctggctgcagcagtaccacaaccagtgccaggaggtgctgcaccacatctccatgatcccagccaagtgcctgcaggagggcgctgagatcagcagccctgctgtggagcggctcatcagcagcctgctgcggacctgtgacctggaggagttccagacctgcctggtgcgccactgcaagcacgccttcggctgtgccctggtgcacaccagcggctggaaggtggtgtacagcggggacaccatgccctgtgaggccctggtgaggatgggcaaggatgccaccctgctgatccacgaggccaccctggaggatggcctggaggaggaggccgtggagaagacccacagcaccaccagccaggccatctctgtgggcatgaggatgaatgctgagttcatcatgctgaaccacttcagccagagatatgccaaggtgcccctcttcagccccaacttcagcgagaaggtgggcgtggcctttgaccacatgaaggtgtgctttggagacttccccaccatgcccaagctgatcccccccctgaaggccctgtttgctggggacatcgaggagatggaggagcggcgggagaagcgggagctgcggcaggtgcgggccgccctgctgagccgggagctggccggcggcctggaggatggagagccccagcagaagagggcccacacagaggagccccaggccaagaaggtgcgggcccagtag

SEQ ID NO: 196748 - DNA, 861 bp, Artificial Sequence
  derived and/or modified sequence
tgaccacatggagtgtcccagaggcggggcgtgcgggacagcagcctggtggtggccttcatctgcaagctgcacctgaagaggggcaacttcctggtgctgaaggccaaggagatgggcctgcctgtgggcacagctgccatcgcccccatcatcgctgctgtgaaggatggcaagagcatcacccatgagggccgggaggtgctgcagatcctggccgaggagctgtgcaccccaccagaccccggggccgcctttgtggtggtggagtgcccagatgagagcttcatccagcccatctgtgaaaatgccaccttccagcgctaccagggcaaggcagatgcccctgtggccctggtggtgcacatggccccagcctctgtgctggtggacagccgctaccagcagtggatggagagatttggaccagacacccagcacctggtgctgaatgaaaactgtgcctctgtgcacaacctgcggagccacaagatccagacccagctgaacctgatccacccagacatcttccccctgctgaccagcttccgctgcaagaaggagggccccaccctgtctgtgcccatggtgcagggcgagtgcctgctgaagtaccagctgcggccccggcgggagtggcagagagatgccatcatcacctgcaaccctgaggagttcatcgtggaggccctgcagctgcccaacttccagcagagcgtgcaggagtaccgccgcagcgcccaggacggccctgccccagctgagaagaggagccagtacccagagatcatcttcctgggcaccggcagcgccatccccatgaagatcagaaatgtgtctgccaccctggtgaacatctag

SEQ ID NO: 196749 - DNA, 2481 bp, Artificial Sequence
  derived and/or modified sequence
atgtgggccctgtgcagcctgctgcggagcgccgccggccggaccatgtcccagggtcggaccataagccaggcacccgcacggcgagaacgaccccggaaggatcccctccgccatctccgcactcgcgagaaacgcggtccttccgggtgcagcgggggacctaatacggtgtacctccaggtcgtggctgccggaagcagagacagcggggccgctctgtacgtattcagtgaattcaatcgatacctcttcaattgtggcgagggcgtacagcgcctgatgcaggaacataagttgaaagtggcccgactggacaacatcttcctcacaaggatgcattggagtaacgtgggaggcctgtccggcatgatcctcacgttaaaagaaacaggcctccctaaatgcgtcctgagtggtcccccccagctcgagaagtaccttgaagccatcaagattttttcgggccctctgaaaggcattgagttggctgtgaggccccacagcgcaccggagtacgaggatgagacgatgacagtctatcagattccgattcactcagaacagcggcgtggcaaacaccagccatggcagagccccgagaggccactgtcacgcctcagccctgagcgaagctctgacagcgaaagtaatgaaaacgaaccccatctacctcatggtgtgtctcagaggcgcggcgtccgcgacagcagcctggtggtagcttttatctgcaaactacacctcaagagaggaaattttctggtgctcaaggctaaagagatgggtcttccagtaggcacagccgctatcgctcccatcattgcagccgtgaaagacgggaaatccataactcatgaaggcagggaaatcttggccgaagagctgtgcacgccgcccgaccccggggccgcttttgtggtagtggaatgccccgatgagtcgtttatacaaccgatatgcgagaacgcaactttccagcggtatcagggtaaagccgacgctccagtcgcactggtggtacatatggctcctgctagcgtgctcgtcgactcaagataccagcagtggatggaacgatttggccccgacacgcaacacttggtccttaacgaaaattgcgcttccgttcataatttacgttctcacaagatccagacacagctcaatctgatccatccagatatctttccactgctgacttcattccgatgcaagaaggagggccccaccctgtcagtacccatggtgcagggtgagtgcctgttgaagtaccagctccgccctaggagagagtggcaaagggatgcaataatcacatgcaaccccgaggagttcatagtcgaagccctccaattgccaaatttccagcagtcagtgcaagaatacaggcgctccgcccaggacggccccgctcccgccgagaaaagatcccagtatcccgagattatttttcttgggaccggaagcgctattccaatgaaaatccgtaatgtcagcgccacactcgtcaacattagcccggacacatccctcctgctggactgcggcgaggggacttttggccagctctgcagacactatggcgatcaggttgacagagttctgggcaccctggcagcagtgtttgtgagccatctgcatgccgatcaccatactggcttgccctcgatcttattgcaaagagaaagggctcttgcctcgttaggtaagcccctgcatcctctactggtggtggctcccaatcagctgaaagcctggcttcagcagtaccataaccagtgccaagaagtattgcaccacatatcgatgatccctgcgaagtgcctgcaggagggtgcggaaatctcctctccagccgtagagaggctgatctcctctctgctccgaacttgcgacttggaagagttccagacgtgtttagttcggcattgcaagcacgcatttggatgcgcattagttcacaccagcggctggaaagtagtgtactcaggcgataccatgccttgcgaggcactggtgcgcatgggcaaggacgctactctcttaatacatgaggccactctggaggacggacttgaggaagaagccgtcgagaaaacccactcgactaccagccaagccatctcagtcggcatgaggatgaacgcagagtttataatgcttaaccacttttcccagcgatatgctaaagtgcctctgtttagtccaaacttctctgagaaagtgggggtcgcttttgatcacatgaaagtgtgcttcggagatttcccgaccatgcctaagctcatcccgcccctgaaggcactcttcgcaggggacatagaggagatggaggaacgccgtgaaaagcgggagctgaggcaagtgagagctgccttgttgtccagagaattagccggtggcctggaggatggtgaaccccagcagaagcgcgctcacacggaggagcctcaggcgaagaaggtgcgggcacagtag

SEQ ID NO: 196750 - DNA, 2424 bp, Artificial Sequence
  derived and/or modified sequence
atgtgggccctgtgcagcctgctgcggagcgccgccggccggaccatgagccagggacggacaatctcacaggctcccgccaggcgcgaacgaccgcgcaaggatcccctacgccatttaagaaccagagagaagcgcggccccagcggctgctctggcggacctaacacagtgtatctgcaagtggtggcggccggcagtagagactcaggagtccagagattgatgcaagagcacaaacttaaagtagcaagactagacaatattttcctcactagaatgcattggtctaacgtggggggtctcagcggcatgatcctgactctcaaggaaactggcctccccaagtgcgtcctgtccggccccccgcagctagaaaaatatctggaagcaataaagatcttcagcggaccacttaaaggcatcgagcttgccgtgcgccctcacagcgcaccagagtacgaagacgagaccatgacggtatatcagatacccatccattccgagcaacggagaggcaagcatcaaccctggcagagtccagaacgccctctctccagactgagccctgagaggagttccgactctgagagcaatgaaaatgaaccccacctgccccacggcgtgtcgcagcggcggggagtaagagattcctctctcgtcgtggccttcatatgtaagcttcacctaaagaggggcaatttcttggtgctcaaggcgaaggagatgggtctgccagtgggtaccgctgcgatcgctccaatcatagccgctgtgaaggacgggaaaagcatcacccacgagggcagggagatcctggctgaggagctttgcactcctccagatcccggagctgcctttgtcgtcgtcgagtgtcctgatgagtcttttatccagccaatttgcgaaaacgccacattccagcgctaccaggggaaggccgatgcaccagtggccttggtcgtgcatatggctcccgcttccgtcctcgtcgacagcaggtaccagcagtggatggagcgatttggacctgacacacagcatttagtgctgaatgagaattgcgcctcggttcacaatttgcggagtcataagattcaaacccaactgaatctcatccacccagatattttcccactgctgactagtttccgatgtaaaaaagaaggcccaacgctgtccgtgccaatggtgcagggggaatgtctactcaaatatcagttgagaccccgccgcgagtggcagagagatgctatcatcacttgcaacccagaggagtttatcgtcgaagccctccaactccctaattttcaacagtccgtacaggaatacagacggtctgctcaggacgggcccgctcccgcagaaaagcggagtcagtacccagaaataatttttctgggaactggctctgcaattccaatgaaaatccgtaatgtgagcgctactttggtgaacatttctccagatacctcactgttgctggattgtggtgaggggacctttgggcagctttgtaggcattacggcgatcaggtggaccgggtgttggggacgctggctgcagtgttcgttagccatcttcacgcagaccatcatactgggctgcccagcatcctgttacagagggaacgggctttggccagcttaggaaaacccctgcacccactcctggtggtcgcccctaatcagttaaaggcttggctgcaacagtatcacaaccagtgccaggaggtactgcatcatattagcatgatcccggccaagtgcctgcaagaaggggcggagatctcttctcccgcagtcgaacgacttatcagcagtctactacgaacatgcgatcttgaagagtttcagacgtgccttgttcgacattgtaaacacgcctttggctgtgcattagtgcacacctccggttggaaggttgtttatagcggcgatacaatgccctgcgaggctctcgtgcggatgggaaaagatgcaaccttgttaatacatgaagcgaccctggaggacggactcgaagaggaggcagtggaaaagacccactctactaccagccaggctattagcgttggaatgcgaatgaatgcagagtttatcatgcttaaccatttctctcagcgctacgccaaggtgccactgttcagccctaatttctccgaaaaagttggagtggcctttgatcacatgaaagtgtgcttcggcgactttcctacgatgcccaagctcattcctcctctgaaggccctgttcgccggcgacatcgaggagatggaagaacgacgcgagaaacgagagctgcgccaggttagagccgctctgcttagcagggagctagccggtgggttggaagatggcgagccccaacagaaaagagctcacactgaggagcctcaagcaaaaaaagtgcgagctcagtag

SEQ ID NO: 196751 - DNA, 861 bp, Artificial Sequence
  derived and/or modified sequence
tgaccccacggcgtgagccagcggcggggcgtgcgggacagcagcttggtggtggcattcatttgtaaactccacctgaagcgcggtaatttcctcgtgctgaaagcaaaggaaatgggcctgcccgtcggaactgccgccatagccccaatcatcgccgccgtcaaagatgggaaatcaatcactcacgaaggccgcgaggtgctgcaaattctcgccgaggaattgtgcacccctcctgaccctggggctgcatttgttgtcgtcgagtgtccggatgaaagctttatacaacccatctgtgagaacgccaccttccagcggtaccaaggcaaagccgatgctcccgtcgctctcgtcgtccatatggcccctgcatccgtgctcgtggactccagataccaacagtggatggaaagatttggaccggacacccagcacctggtgcttaatgagaattgcgcctcagttcacaacttgcgcagtcacaaaatacagacacagttgaacctgatacatccagacatatttcctttgctaacctccttccgctgcaagaaggagggccccaccttgtccgtgcctatggtgcaaggggagtgtctgctgaaatatcaactgcggcccagacgggagtggcagagagatgccattatcacttgtaaccccgaggagttcattgtggaggcactccaactccctaacttccaacaaagcgtccaggagtacaggcggagtgctcaggacggccccgcgccagccgaaaagcgatcacagtacccagaaatcatcttcctcggcacaggctctgcgatccccatgaaaatccggaatgtgtcagcgaccctcgtaaacatatag

SEQ ID NO: 196752 - DNA, 2481 bp, Artificial Sequence
  derived and/or modified sequence
atgtgggcgttgtgttcccttctgcggagtgctgctggcaggacaatgagccagggccgaactataagtcaagctccagccagacgggaacgtccgcgaaaagatccactccggcacctccggacccgcgagaagcgtggtccctcagggtgtagtggcggacccaatacggtctacctacaagtggtagcggcaggatcacgcgattccggcgcagcactctacgtgtttagcgaattcaacagatatttgttcaactgcggagagggggtgcagaggctcatgcaggaacacaaacttaaagtggctagactcgacaacattttccttactcggatgcattggtccaacgttggcggtctctcgggcatgattctcaccctgaaagagaccgggctccctaagtgtgttttgtccggcccacctcagctagagaaatacctcgaggcgatcaagatattcagtggaccactgaagggcatagaactggccgtgaggccgcactccgcaccagagtacgaggatgaaacaatgaccgtatatcagatcccaattcattctgagcaaaggagggggaaacatcagccctggcaatctccagagaggcctctgagccgtctaagtccagagcggtcctctgacagcgagagcaatgaaaacgaaccacatctgccacacggggtctcacagagacgcggagttcgggactctagtttagtggtggctttcatctgtaagctgcacttgaaacggggtaacttcctcgtactcaaggcgaaggagatggggctacccgtaggtaccgctgccatcgcgccaatcatagccgcagttaaggacggcaagagcataacacatgaggggagggaaattttggcggaagagctctgcaccccacccgacccgggtgccgctttcgtggtggtcgagtgccctgacgaaagtttcattcagccgatttgtgagaatgcaacgtttcagagataccaggggaaagcagatgcgccagttgccctggtagtccatatggcccctgctagcgtgctggttgattctcgctaccaacagtggatggaaaggttcggaccagacacccagcatctggtgttaaacgagaactgcgccagtgttcataacctcaggagccacaagattcaaacccagcttaatctgatacatccagatatcttccccctgttgacgtcgttcaggtgcaaaaaagaaggtccaactttatccgtcccaatggtgcagggagaatgcctgctgaagtatcaactcagaccaaggcgagagtggcagcgggacgctatcattacctgtaacccggaggagttcatcgtggaagccctgcagcttcccaacttccagcagagtgtacaggaatatcgcaggtctgcacaggatggtcctgcacccgctgaaaagcggagccagtaccccgaaatcatctttcttgggacgggaagcgccatcccaatgaaaattaggaatgtgagtgcaaccctcgtcaatatctcaccagataccagcctcctcctggactgtggtgagggaacatttggtcagctctgccgccactatggggaccaagtggaccgtgtgctgggaaccctcgcggctgtatttgtctcacacctacatgccgatcatcataccgggctgccatctattcttctgcaacgagaacgggctttggcttctctgggtaaacccctgcaccctttacttgtcgtggctccaaatcagctcaaagcttggcttcaacagtaccacaaccaatgccaagaggtgttacaccacatcagcatgatccccgctaaatgccttcaggagggggctgagatctcgtcgcccgcagttgaacgcctgatctccagcttgctgcgcacgtgcgatctggaggagtttcagacttgtctggtccgccattgtaagcacgcttttggctgcgcactggtccatacaagcggttggaaagttgtgtatagcggagacaccatgccttgcgaagccctggtgaggatgggcaaggacgccacactgctcatccatgaggcaaccctggaggacggattggaggaggaggctgtggaaaaaactcattctacaaccagtcaagccatctctgtggggatgcgaatgaatgctgagtttatcatgctcaaccatttcagtcagagatatgccaaggtgccgttattttcacccaacttttccgagaaagtgggggtagcttttgatcacatgaaagtctgtttcggagatttcccaacaatgcctaagctgatcccacctctcaaggcactctttgctggtgacatcgaagagatggaagaacgcagagaaaaacgtgagttgagacaagtaagagctgctctgttaagtcgagaacttgctgggggtctcgaagatggagaaccgcagcagaaacgggctcacacagaggagccacaggccaagaaggtgcgggcacaatag

SEQ ID NO: 196753 - DNA, 2424 bp, Artificial Sequence
  derived and/or modified sequence
atgtgggcgctctgcagcttgctccgttctgctgctgggagaaccatgtcacaaggcagaacaatctcacaagcacccgctagaagagagaggcccagaaaggacccattgagacacctccgcactagggaaaagaggggcccttcaggatgttctggtgggccaaataccgtttatcttcaggtcgtggcagccggttcccgagactcaggtgtgcagagactcatgcaagaacacaaactcaaggtggccagattggacaatatttttcttactaggatgcactggtccaatgtcggcggactctcaggcatgatcctcaccttaaaagaaacgggcctacctaagtgcgtgctgagcggtccaccccagttggagaaatacctcgaagcaattaagatctttagcggacccctcaaagggatcgagttggcggtcaggccccatagtgcacctgaatacgaagatgaaaccatgaccgtgtaccaaatccccatccacagcgagcagagacgcggaaagcaccagccatggcagagccctgaacgacccctttcccgtctgtctccggaacgttcaagcgacagcgaatccaatgaaaacgagcctcatttgccccacggggtgtcacagaggcgcggagttcgagacagctcattggtagtggccttcatatgcaagctccacctgaaacggggtaactttttggtgctgaaagctaaagagatgggactaccagtgggcacagctgccatcgcccctatcatagctgccgtcaaagatggcaagtcgattacccacgaagggagagaaatcctggcagaagagctgtgcactcctcccgatccgggagcagctttcgtcgtggtggagtgtcccgacgagtcttttattcagccaatttgcgagaatgccacatttcagcggtaccagggtaaggctgatgcaccagtcgcgcttgttgtccacatggctcccgcaagcgtcctcgtagactcgcgctaccagcaatggatggagaggtttggccctgacacacagcatctggttctgaatgagaactgcgcctcagtacataacttacgctctcacaagatccagacccagctgaacctgattcacccagatatcttccctttgctgacatccttcaggtgtaaaaaggaaggaccaactttatctgttcccatggtgcagggcgaatgtctgctcaaatatcagcttagacctaggagagagtggcagcgcgacgcgatcatcacctgtaaccccgaagagttcattgtggaggcactccagctacccaattttcaacagtccgtgcaggagtataggcggagcgcacaggacgggcctgctcccgcagagaagcggtcacagtatcccgaaattatctttctcgggaccgggtcagctatccctatgaaaatcagaaacgtgagcgcgactctcgtgaatatctcccctgatacctccctgctgctagactgcggcgaggggacatttgggcaactttgccgccactacggggaccaagtcgatcgggtgcttgggacgctggccgctgtctttgtttcccacctccatgccgaccaccacacagggctccccagtatcctccttcaacgagaacgggctctcgctagccttggcaagcccctgcaccccctgctagtggtcgctccaaatcagctcaaggcgtggctgcagcagtaccataatcagtgccaggaggttctccaccatatcagcatgattcccgcaaaatgcctccaggaaggcgcagagatttcttctcccgcagtggaacgcctcatctcctcattactgaggacctgcgatctggaggaattccagacttgcttggttcgacactgtaagcacgcattcggctgcgctcttgtgcataccagtggttggaaagtggtgtattctggtgacactatgccctgcgaagctctcgtcaggatgggcaaggacgccaccttgctgatccatgaggccacactggaggacggcctggaggaggaggctgtggaaaagacacatagcacgacctctcaggccatcagcgtgggcatgcgcatgaatgccgaatttatcatgctgaatcatttctcccagcgctatgccaaagtgccactcttttcccctaacttttcagagaaggttggggtcgcctttgatcacatgaaggtgtgcttcggggactttcccactatgccgaaactgataccccctcttaaagctctcttcgcaggcgatattgaagagatggaagaaaggagagagaaaagggaattgaggcaggtacgagccgctctgctgagccgtgagctggcaggaggactggaggatggcgagccccagcagaagagagcacacaccgaggaaccgcaggcaaagaaggttcgagcacaatag

SEQ ID NO: 196754 - DNA, 861 bp, Artificial Sequence
  derived and/or modified sequence
tagccacatggggtgtcacagaggaggggagtccgcgatagctcacttgtagtggccttcatctgcaagctgcatttgaagcgaggcaatttcctggtgctaaaggccaaggagatgggccttcccgttggcaccgctgctatcgcccctatcatcgcggcagtaaaggacggcaagtccattactcacgaagggcgagaggtcctccaaatcctggctgaagagctttgcacgccacccgatccaggagctgcctttgtggtggtggagtgtcctgacgagtcttttattcaacctatctgcgagaatgctacctttcaaagataccaaggtaaggctgacgcacccgtggcgctagtagtacacatggccccagcctccgttctggtggattctcgatatcagcagtggatggaaagattcggccctgacacccagcatctggttttgaatgagaattgcgcgagcgtccacaaccttagatcccataagattcaaacgcagttaaacctcatacatccagacatattcccactcctcacaagttttcgatgcaagaaagagggacctacactgtccgttcccatggtgcaaggagaatgccttctgaagtaccaactgcgcccacggcgtgaatggcagcgagacgctatcatcacatgtaacccagaagagtttatcgtcgaggccctacagcttcccaacttccagcagtctgtccaggaatacaggaggtcagctcaggatgggcctgcacccgcagaaaagcgaagtcagtaccctgagatcatcttcttagggactggttctgccatccccatgaagattagaaatgtgagtgccacacttgtgaatatatag

SEQ ID NO: 196755 - DNA, 2481 bp, Artificial Sequence
  derived and/or modified sequence
atgtgggccctgtgcagcctgctgagaagcgccgccggcagaaccatgagccagggcagaaccatcagccaggcccccgccagaagagagagacccagaaaggaccccctgagacacctgagaaccagagagaagagaggccccagcggctgcagcggcggccccaacaccgtgtacctgcaggtggtggccgccggcagcagagacagcggcgccgccctgtacgtgttcagcgagttcaacagatacctgttcaactgcggcgagggcgtgcagagactgatgcaggagcacaagctgaaggtggccagactggacaacatcttcctgaccagaatgcactggagcaacgtgggcggcctgagcggcatgatcctgaccctgaaggagaccggcctgcccaagtgcgtgctgagcggccccccccagctggagaagtacctggaggccatcaagatcttcagcggccccctgaagggcatcgagctggccgtgagaccccacagcgcccccgagtacgaggacgagaccatgaccgtgtaccagatccccatccacagcgagcagagaagaggcaagcaccagccctggcagagccccgagagacccctgagcagactgagccccgagagaagcagcgacagcgagagcaacgagaacgagccccacctgccccacggcgtgagccagagaagaggcgtgagagacagcagcctggtggtggccttcatctgcaagctgcacctgaagagaggcaacttcctggtgctgaaggccaaggagatgggcctgcccgtgggcaccgccgccatcgcccccatcatcgccgccgtgaaggacggcaagagcatcacccacgagggcagagagatcctggccgaggagctgtgcaccccccccgaccccggcgccgccttcgtggtggtggagtgccccgacgagagcttcatccagcccatctgcgagaacgccaccttccagagataccagggcaaggccgacgcccccgtggccctggtggtgcacatggcccccgccagcgtgctggtggacagcagataccagcagtggatggagagattcggccccgacacccagcacctggtgctgaacgagaactgcgccagcgtgcacaacctgagaagccacaagatccagacccagctgaacctgatccaccccgacatcttccccctgctgaccagcttcagatgcaagaaggagggccccaccctgagcgtgcccatggtgcagggcgagtgcctgctgaagtaccagctgagacccagaagagagtggcagagagacgccatcatcacctgcaaccccgaggagttcatcgtggaggccctgcagctgcccaacttccagcagagcgtgcaggagtacagaagaagcgcccaggacggccccgcccccgccgagaagagaagccagtaccccgagatcatcttcctgggcaccggcagcgccatccccatgaagatcagaaacgtgagcgccaccctggtgaacatcagccccgacaccagcctgctgctggactgcggcgagggcaccttcggccagctgtgcagacactacggcgaccaggtggacagagtgctgggcaccctggccgccgtgttcgtgagccacctgcacgccgaccaccacaccggcctgcccagcatcctgctgcagagagagagagccctggccagcctgggcaagcccctgcaccccctgctggtggtggcccccaaccagctgaaggcctggctgcagcagtaccacaaccagtgccaggaggtgctgcaccacatcagcatgatccccgccaagtgcctgcaggagggcgccgagatcagcagccccgccgtggagagactgatcagcagcctgctgagaacctgcgacctggaggagttccagacctgcctggtgagacactgcaagcacgccttcggctgcgccctggtgcacaccagcggctggaaggtggtgtacagcggcgacaccatgccctgcgaggccctggtgagaatgggcaaggacgccaccctgctgatccacgaggccaccctggaggacggcctggaggaggaggccgtggagaagacccacagcaccaccagccaggccatcagcgtgggcatgagaatgaacgccgagttcatcatgctgaaccacttcagccagagatacgccaaggtgcccctgttcagccccaacttcagcgagaaggtgggcgtggccttcgaccacatgaaggtgtgcttcggcgacttccccaccatgcccaagctgatcccccccctgaaggccctgttcgccggcgacatcgaggagatggaggagagaagagagaagagagagctgagacaggtgagagccgccctgctgagcagagagctggccggcggcctggaggacggcgagccccagcagaagagagcccacaccgaggagccccaggccaagaaggtgagagcccagtag

SEQ ID NO: 196756 - DNA, 2424 bp, Artificial Sequence
  derived and/or modified sequence
atgtgggccctgtgcagcctgctgagaagcgccgccggcagaaccatgagccagggcagaaccatcagccaggcccccgccagaagagagagacccagaaaggaccccctgagacacctgagaaccagagagaagagaggccccagcggctgcagcggcggccccaacaccgtgtacctgcaggtggtggccgccggcagcagagacagcggcgtgcagagactgatgcaggagcacaagctgaaggtggccagactggacaacatcttcctgaccagaatgcactggagcaacgtgggcggcctgagcggcatgatcctgaccctgaaggagaccggcctgcccaagtgcgtgctgagcggccccccccagctggagaagtacctggaggccatcaagatcttcagcggccccctgaagggcatcgagctggccgtgagaccccacagcgcccccgagtacgaggacgagaccatgaccgtgtaccagatccccatccacagcgagcagagaagaggcaagcaccagccctggcagagccccgagagacccctgagcagactgagccccgagagaagcagcgacagcgagagcaacgagaacgagccccacctgccccacggcgtgagccagagaagaggcgtgagagacagcagcctggtggtggccttcatctgcaagctgcacctgaagagaggcaacttcctggtgctgaaggccaaggagatgggcctgcccgtgggcaccgccgccatcgcccccatcatcgccgccgtgaaggacggcaagagcatcacccacgagggcagagagatcctggccgaggagctgtgcaccccccccgaccccggcgccgccttcgtggtggtggagtgccccgacgagagcttcatccagcccatctgcgagaacgccaccttccagagataccagggcaaggccgacgcccccgtggccctggtggtgcacatggcccccgccagcgtgctggtggacagcagataccagcagtggatggagagattcggccccgacacccagcacctggtgctgaacgagaactgcgccagcgtgcacaacctgagaagccacaagatccagacccagctgaacctgatccaccccgacatcttccccctgctgaccagcttcagatgcaagaaggagggccccaccctgagcgtgcccatggtgcagggcgagtgcctgctgaagtaccagctgagacccagaagagagtggcagagagacgccatcatcacctgcaaccccgaggagttcatcgtggaggccctgcagctgcccaacttccagcagagcgtgcaggagtacagaagaagcgcccaggacggccccgcccccgccgagaagagaagccagtaccccgagatcatcttcctgggcaccggcagcgccatccccatgaagatcagaaacgtgagcgccaccctggtgaacatcagccccgacaccagcctgctgctggactgcggcgagggcaccttcggccagctgtgcagacactacggcgaccaggtggacagagtgctgggcaccctggccgccgtgttcgtgagccacctgcacgccgaccaccacaccggcctgcccagcatcctgctgcagagagagagagccctggccagcctgggcaagcccctgcaccccctgctggtggtggcccccaaccagctgaaggcctggctgcagcagtaccacaaccagtgccaggaggtgctgcaccacatcagcatgatccccgccaagtgcctgcaggagggcgccgagatcagcagccccgccgtggagagactgatcagcagcctgctgagaacctgcgacctggaggagttccagacctgcctggtgagacactgcaagcacgccttcggctgcgccctggtgcacaccagcggctggaaggtggtgtacagcggcgacaccatgccctgcgaggccctggtgagaatgggcaaggacgccaccctgctgatccacgaggccaccctggaggacggcctggaggaggaggccgtggagaagacccacagcaccaccagccaggccatcagcgtgggcatgagaatgaacgccgagttcatcatgctgaaccacttcagccagagatacgccaaggtgcccctgttcagccccaacttcagcgagaaggtgggcgtggccttcgaccacatgaaggtgtgcttcggcgacttccccaccatgcccaagctgatcccccccctgaaggccctgttcgccggcgacatcgaggagatggaggagagaagagagaagagagagctgagacaggtgagagccgccctgctgagcagagagctggccggcggcctggaggacggcgagccccagcagaagagagcccacaccgaggagccccaggccaagaaggtgagagcccagtag

SEQ ID NO: 196757 - DNA, 861 bp, Artificial Sequence
  derived and/or modified sequence
tgaccccacggcgtgagccagagaagaggcgtgagagacagcagcctggtggtggccttcatctgcaagctgcacctgaagagaggcaacttcctggtgctgaaggccaaggagatgggcctgcccgtgggcaccgccgccatcgcccccatcatcgccgccgtgaaggacggcaagagcatcacccacgagggcagagaggtgctgcagatcctggccgaggagctgtgcaccccccccgaccccggcgccgccttcgtggtggtggagtgccccgacgagagcttcatccagcccatctgcgagaacgccaccttccagagataccagggcaaggccgacgcccccgtggccctggtggtgcacatggcccccgccagcgtgctggtggacagcagataccagcagtggatggagagattcggccccgacacccagcacctggtgctgaacgagaactgcgccagcgtgcacaacctgagaagccacaagatccagacccagctgaacctgatccaccccgacatcttccccctgctgaccagcttcagatgcaagaaggagggccccaccctgagcgtgcccatggtgcagggcgagtgcctgctgaagtaccagctgagacccagaagagagtggcagagagacgccatcatcacctgcaaccccgaggagttcatcgtggaggccctgcagctgcccaacttccagcagagcgtgcaggagtacagaagaagcgcccaggacggccccgcccccgccgagaagagaagccagtaccccgagatcatcttcctgggcaccggcagcgccatccccatgaagatcagaaacgtgagcgccaccctggtgaacatctag

SEQ ID NO: 196758 - DNA, 2982 bp, Artificial Sequence
  derived and/or modified sequence
agcggctaggtggtgcacgggaaacgcgggcgtaggtgaccggcggctttctcagttttggtggagacgggcgcatgtgggcgctttgctcgctgctgcggtccgcggccggacgcaccatgtcgcagggacgcaccatatcgcaggcacccgcccgccgcgagcggccgcgcaaggacccgctgcggcacctgcgcacgcgagagaagcgcggaccgtcggggtgctccggcggcccaaacaccgtgtacctgcaggtggtggcagcgggtagccgggactcgggcgccgcgctctacgtcttctccgagttcaaccggtatctcttcaactgtggagaaggcgttcagagactcatgcaggagcacaagttaaaggttgctcgcctggacaacatattcctgacacgaatgcactggtctaatgttgggggcttaagtggaatgattcttactttaaaggaaaccgggcttccaaagtgtgtactttctggacctccacaactggaaaaatacctcgaagcaatcaaaatattttctggtccattgaaaggaatagaactggctgtgcggccccactctgccccagaatacgaggatgaaaccatgacagtttaccagatccccatacacagtgaacagaggaggggaaagcaccaaccatggcagagtccagaaaggcctctcagcaggctcagtccagagcgatcttcagactccgagtcgaatgaaaatgagccacaccttccacatggtgttagccagagaagaggggtcagggactcttccctggtcgtagctttcatctgtaagcttcacttaaagagaggaaacttcttggtgctcaaagcaaaggagatgggcctcccagttgggacagctgccatcgctcccatcattgctgctgtcaaggacgggaaaagcatcactcatgaaggaagagagattttggctgaagagctgtgtactcctccagatcctggtgctgcttttgtggtggtagaatgtccagatgaaagcttcattcaacccatctgtgagaatgccacctttcagaggtaccaaggaaaggcagatgcccccgtggccttggtggttcacatggccccagcatctgtgcttgtggacagcaggtaccagcagtggatggagaggtttgggcctgacacccagcacttggtcctgaatgagaactgtgcctcagttcacaaccttcgcagccacaagattcaaacccagctcaacctcatccacccggacatcttccccctgctcaccagtttccgctgtaagaaggagggccccaccctcagtgtgcccatggttcagggtgaatgcctcctcaagtaccagctccgtcccaggagggagtggcagagggatgccattattacttgcaatcctgaggaattcatagttgaggcgctgcagcttcccaacttccagcagagcgtgcaggagtacaggaggagtgcgcaggacggcccagccccagcagagaaaagaagtcagtacccagaaatcatcttccttggaacagggtctgccatcccgatgaagattcgaaatgtcagtgccacacttgtcaacataagccccgacacgtctctgctactggactgtggtgagggcacatttgggcagctgtgccgtcattacggagaccaggtggacagggtcctgggcaccctggctgctgtgtttgtgtcccacctgcacgcagatcaccacacgggcttgccaagtatcttgctgcagagagaacgcgccttggcatctttgggaaagccgcttcaccctttgctggtggttgcccccaaccagctcaaagcctggctccagcagtaccacaaccagtgccaggaggtcctgcaccacatcagtatgattcctgccaaatgccttcaggaaggggctgagatctccagtcctgcagtggaaagattgatcagttcgctgttgcgaacatgtgatttggaagagtttcagacctgtctggtgcggcactgcaagcatgcgtttggctgtgcgctggtgcacacctctggctggaaagtggtctattccggggacaccatgccctgcgaggctctggtccggatggggaaagatgccaccctcctgatacatgaagccaccctggaagatggtttggaagaggaagcagtggaaaagacacacagcacaacgtcccaagccatcagcgtggggatgcggatgaacgcggagttcattatgctgaaccacttcagccagcgctatgccaaggtccccctcttcagccccaacttcagcgagaaagtgggagttgcctttgaccacatgaaggtctgctttggagactttccaacaatgcccaagctgattcccccactgaaagccctgtttgctggcgacatcgaggagatggaggagcgcagggagaagcgggagctgcggcaggtgcgggcggccctcctgtccagggagctggcaggcggcctggaggatggggagcctcagcagaagcgggcccacacagaggagccacaggccaagaaggtcagagcccagtgaagatctgggagaccctgaactcagaaggctgtgtgtcttctgccccacgcacgcacccgtatctgccctccttgctggtagaagctgaagagcacggtcccccaggaggcagctcaggataggtggtatggagctgtgccgaggcttgggctcccacataagcactagtctatagatgcctcttaggactggtgcctggcacagccgcgggccaggaggctgccacacggaagcaagcagatgaactaatttcatttcaaggcagtttttaaagaagtcttggaaacagacggcggcacctttcctctaatccagcaaagtgattccctgcacaccagagacaagcagagtaacaggatcagtgggtctaagtgtccgagacttaacgaaaatagtatttcagctgcaataaagattgagtttgcaa

SEQ ID NO: 196759 - DNA, 2923 bp, Artificial Sequence
  derived and/or modified sequence
agcggctaggtggtgcacgggaaacgcgggcgtaggtgaccggcggctttctcagttttggtggagacgggcgcatgtgggcgctttgctcgctgctgcggtccgcggccggacgcaccatgtcgcagggacgcaccatatcgcaggcacccgcccgccgcgagcggccgcgcaaggacccgctgcggcacctgcgcacgcgagagaagcgcggaccgtcggggtgctccggcggcccaaacaccgtgtacctgcaggtggtggcagcgggtagccgggactcgggcgttcagagactcatgcaggagcacaagttaaaggttgctcgcctggacaacatattcctgacacgaatgcactggtctaatgttgggggcttaagtggaatgattcttactttaaaggaaaccgggcttccaaagtgtgtactttctggacctccacaactggaaaaatacctcgaagcaatcaaaatattttctggtccattgaaaggaatagaactggctgtgcggccccactctgccccagaatacgaggatgaaaccatgacagtttaccagatccccatacacagtgaacagaggaggggaaagcaccaaccatggcagagtccagaaaggcctctcagcaggctcagtccagagcgatcttcagactccgagtcgaatgaaaatgagccacaccttccacatggtgttagccagagaagaggggtcagggactcttccctggtcgtagctttcatctgtaagcttcacttaaagagaggaaacttcttggtgctcaaagcaaaggagatgggcctcccagttgggacagctgccatcgctcccatcattgctgctgtcaaggacgggaaaagcatcactcatgaaggaagagagattttggctgaagagctgtgtactcctccagatcctggtgctgcttttgtggtggtagaatgtccagatgaaagcttcattcaacccatctgtgagaatgccacctttcagaggtaccaaggaaaggcagatgcccccgtggccttggtggttcacatggccccagcatctgtgcttgtggacagcaggtaccagcagtggatggagaggtttgggcctgacacccagcacttggtcctgaatgagaactgtgcctcagttcacaaccttcgcagccacaagattcaaacccagctcaacctcatccacccggacatcttccccctgctcaccagtttccgctgtaagaaggagggccccaccctcagtgtgcccatggttcagggtgaatgcctcctcaagtaccagctccgtcccaggagggagtggcagagggatgccattattacttgcaatcctgaggaattcatagttgaggcgctgcagcttcccaacttccagcagagcgtgcaggagtacaggaggagtgcgcaggacggcccagccccagcagagaaaagaagtcagtacccagaaatcatcttccttggaacagggtctgccatcccgatgaagattcgaaatgtcagtgccacacttgtcaacataagccccgacacgtctctgctactggactgtggtgagggcacatttgggcagctgtgccgtcattacggagaccaggtggacagggtcctgggcaccctggctgctgtgtttgtgtcccacctgcacgcagatcaccacacgggcttgccaagtatcttgctgcagagagaacgcgccttggcatctttgggaaagccgcttcaccctttgctggtggttgcccccaaccagctcaaagcctggctccagcagtaccacaaccagtgccaggaggtcctgcaccacatcagtatgattcctgccaaatgccttcaggaaggggctgagatctccagtcctgcagtggaaagattgatcagttcgctgttgcgaacatgtgatttggaagagtttcagacctgtctggtgcggcactgcaagcatgcgtttggctgtgcgctggtgcacacctctggctggaaagtggtctattccggggacaccatgccctgcgaggctctggtccggatggggaaagatgccaccctcctgatacatgaagccaccctggaagatggtttggaagaggaagcagtggaaaagacacacagcacaacgtcccaagccatcagcgtggggatgcggatgaacgcggagttcattatgctgaaccacttcagccagcgctatgccaaggtccccctcttcagccccaacttcagcgagaaagtgggagttgcctttgaccacatgaaggtctgctttggagactttccaacaatgcccaagctgattcccccactgaaagccctgtttgctggcgacatcgaggagatggaggagcgcagggagaagcgggagctgcggcaggtgcgggcggccctcctgtccagggagctggcaggcggcctggaggatggggagcctcagcagaagcgggcccacacagaggagccacaggccaagaaggtcagagcccagtgaagatctgggagaccctgaactcagaaggctgtgtgtcttctgccccacgcacgcacccgtatctgccctccttgctggtagaagctgaagagcacggtcccccaggaggcagctcaggataggtggtatggagctgtgccgaggcttgggctcccacataagcactagtctatagatgcctcttaggactggtgcctggcacagccgcgggccaggaggctgccacacggaagcaagcagatgaactaatttcatttcaaggcagtttttaaagaagtcttggaaacagacggcggcacctttcctctaatccagcaaagtgattccctgcacaccagagacaagcagagtaacaggatcagtgggtctaagtgtccgagacttaacgaaaatagtatttcagctgcaataaagattgagtttgc

SEQ ID NO: 196760 - DNA, 858 bp, Artificial Sequence
  derived and/or modified sequence
tccacatggtgttagccagagaagaggggtcagggactcttccctggtcgtagctttcatctgtaagcttcacttaaagagaggaaacttcttggtgctcaaagcaaaggagatgggcctcccagttgggacagctgccatcgctcccatcattgctgctgtcaaggacgggaaaagcatcactcatgaaggaagagaggttttgcagattttggctgaagagctgtgtactcctccagatcctggtgctgcttttgtggtggtagaatgtccagatgaaagcttcattcaacccatctgtgagaatgccacctttcagaggtaccaaggaaaggcagatgcccccgtggccttggtggttcacatggccccagcatctgtgcttgtggacagcaggtaccagcagtggatggagaggtttgggcctgacacccagcacttggtcctgaatgagaactgtgcctcagttcacaaccttcgcagccacaagattcaaacccagctcaacctcatccacccggacatcttccccctgctcaccagtttccgctgtaagaaggagggccccaccctcagtgtgcccatggttcagggtgaatgcctcctcaagtaccagctccgtcccaggagggagtggcagagggatgccattattacttgcaatcctgaggaattcatagttgaggcgctgcagcttcccaacttccagcagagcgtgcaggagtacaggaggagtgcgcaggacggcccagccccagcagagaaaagaagtcagtacccagaaatcatcttccttggaacagggtctgccatcccgatgaagattcgaaatgtcagtgccacacttgtcaacataag

SEQ ID NO: 196761 - protein, 804 aa, Artificial Sequence
  derived and/or modified sequence
MAAHRPGPLKQQNKAHKGGRHRGRGSAQRDGKGRLALKTLSKKVRKELSRVDQRHRASQLRKQKKEAVLAEKRQLGGKDGPPHQVLVVPLHSRISLPEAMQLLQDRDTGTVHLNELGNTQNFMLLCPRLKHRWFFTSARPGDLHVVLDMAKVADTILFLLDPLEGWDSTGDYCLSCLFAQGLPTYTLAVQGISGLPLKKQIDTRKKLSKAVEKRFPHDKLLLLDTQQEAGMLLRQLANQKQQHLAFRDRRAYLFAHAVDFVPSEENNLVGTLKISGYVRGQTLNVNRLLHIVGYGDFQMKQIDAPGDPFPLNPRGIKPQKDPDMAMEICATDAVDDMEEGLKVLMKADPGRQESLQAEVIPDPMEGEQTWPTEEELSEAKDFLKESSKVVKKVPKGTSSYQAEWILDGGSQSGGEGDEYEYDDMEHEDFMEEESQDESSEEEEEYETMTIGESVHDDLYDKKVDEEAEAKMLEKYKQERLEEMFPDEVDTPRDVAARIRFQKYRGLKSFRTSPWDPKENLPQDYARIFQFQNFTNTRKSIFKEVEEKEVEGAEVGWYVTLHVSEVPVSVVECFRQGTPLIAFSLLPHEQKMSVLNMVVRRDPGNTEPVKAKEELIFHCGFRRFRASPLFSQHTAADKHKLQRFLTADMALVATVYAPITFPPASVLLFKQKSNGMHSLIATGHLMSVDPDRMVIKRVVLSGHPFKIFTKMAVVRYMFFNREDVLWFKPVELRTKWGRRGHIKEPLGTHGHMKCSFDGKLKSQDTVLMNLYKRVFPKWTYDPYVPEPVPWLKSEISSTVPQGGME

SEQ ID NO: 196762 - DNA, 2415 bp, Artificial Sequence
  derived and/or modified sequence
atggccgctcatcgccccgggcccctcaagcagcagaataaggcccacaaaggaggtcggcatagggggcgggggagtgcacagcgggatggcaagggaagattagccctgaaaacgttgtccaagaaagttagaaaagaattgagcagagtggaccagcggcatagggctagccagttaagaaagcagaagaaagaggccgtcttggcggagaagcgccagctcgggggaaaagacggtccacctcaccaggtcctggtcgtgccactccattctaggatctccctgcccgaagctatgcaactactgcaggaccgggacaccgggaccgtccatctcaacgaactcggtaatacccaaaatttcatgttactgtgcccacgtttaaagcacaggtggtttttcacgtccgccaggcccggcgatctccacgttgtcttggatatggcaaaggttgcggacaccatcctgttcctcctggaccctctcgagggttgggattcaactggcgactactgtctctcttgtctcttcgctcaggggctgcctacgtacacactagctgtgcaggggatttcgggcctgcctctgaagaaacagatcgatacccgcaagaagctgagtaaagccgtggagaagagatttccgcacgataaactgctgctgctagatacacagcaggaagcagggatgttgttgcgacagctcgccaaccaaaaacagcaacatttggccttcagagaccgacgggcatacctctttgcccacgcggtcgattttgtgcctagtgaagagaacaacctagtgggcacgctgaagatcagtggttacgtacgtggtcagactctgaacgttaatcgactgttgcacatcgttggttatggcgatttccagatgaaacagattgatgctccaggtgatccattcccactgaacccccgggggattaaacctcaaaaggatcctgatatggccatggagatctgtgccaccgatgcagtggatgacatggaagaggggctgaaagttcttatgaaggccgatccaggccggcaagagtccctgcaggctgaagtaatcccggacccaatggagggagagcagacatggcccaccgaagaggaactcagtgaagctaaggattttctgaaggagagctccaaggtggtcaagaaggtcccgaaggggacgtcctcataccaagctgaatggatactggacggtgggagtcaatctggcggagagggtgatgagtacgaatacgatgacatggaacacgaagactttatggaggaagagtcccaggatgagtcaagcgaagaggaagaggaatacgaaaccatgaccataggagagtcggttcacgatgatctttatgacaagaaagtggacgaagaggctgaggcaaaaatgcttgagaaatataaacaggaacggttggaggagatgtttcccgacgaggtggatactccgcgcgacgtggctgcgaggatccggttccagaaatacagaggtctcaaaagtttccggacaagcccctgggacccaaaggaaaacctcccacaggattacgcaagaatatttcaattccagaattttactaatacgcgaaagtcaatttttaaggaggtggaggagaaggaggtggaaggtgcagaagtcgggtggtatgttacactgcacgtgtccgaagtgcccgtgagtgtggtggagtgttttagacaggggaccccactcatcgcattcagtttgctccctcatgagcagaaaatgtccgtgctcaacatggtggtgcggagggaccccggtaacacggagccagtcaaagctaaagaagagctcatctttcactgtggattcagaaggttccgcgcaagccctctgttttcccagcacacagcggccgataaacataagctccagcgtttcctcaccgccgacatggctctggtcgcaactgtgtacgccccaataacattccccccagctagcgtgttgctcttcaagcaaaagagcaacgggatgcactccttgattgcgaccggacacctcatgtcagtggaccctgatcgaatggttatcaagagagtggtgttgagcggacatccctttaagatcttcacgaagatggccgtggtccgctatatgttttttaacagggaggatgtcctctggttcaaacctgtggagctccgaacaaagtggggaaggcgtgggcatattaaggagcctttagggacccacggacatatgaaatgtagtttcgatggcaagctgaagtcccaggacactgtcttgatgaacctttataaaagggtctttccaaagtggacgtacgatccatacgtgcccgaaccagtgccgtggctcaaatcagaaatatcaagcacggtccctcagggcggtatggaatag

SEQ ID NO: 196763 - DNA, 2415 bp, Artificial Sequence
  derived and/or modified sequence
atggccgcccaccggcccggccccctgaagcagcagaacaaggcccacaagggcggccgccaccggggccggggcagcgcccagagagatggcaagggccgcctggccctgaagaccctgagcaagaaggtgaggaaggagctgagccgggtggaccagaggcaccgggccagccagctgaggaagcagaagaaggaggccgtgctggccgagaagaggcagctgggcggcaaggatggccccccccaccaggtgctggtggtgcccctgcacagccgcatcagcctgcctgaggccatgcagctgctgcaggaccgggacaccggcaccgtgcacctgaatgagctgggcaacacccagaacttcatgctgctgtgcccccggctgaagcaccgctggttcttcaccagcgcccggcctggggacctgcacgtggtgctggacatggccaaggtggccgacaccatcctcttcctgctggaccccctggagggctgggacagcactggagactactgcctgagctgcctgtttgcccagggcctgcccacctacaccctggccgtgcagggcatcagcggcctgcccctgaagaagcagattgacaccaggaagaagctgagcaaggctgtggagaagcgcttcccccatgacaagctgctgctgctggacacccagcaggaggccggcatgctgctgcggcagctggccaaccagaagcagcagcacctggccttccgggacagaagagcctacctgtttgcccatgctgtggactttgtgcccagcgaggagaacaacctggtgggcaccctgaagatcagcggctacgtgcggggccagaccctgaatgtgaaccggctgctgcacatcgtgggctacggggacttccagatgaagcagattgatgcccctggggaccccttccccctgaacccccggggcatcaagccccagaaggaccctgacatggccatggagatctgtgccacagatgctgtggatgacatggaggagggcctgaaggtgctgatgaaggctgaccccggccggcaggagagcctgcaggccgaggtgatcccagaccccatggagggggagcagacctggcccacagaggaggagctgtctgaggccaaggacttcctgaaggagagcagcaaggtggtgaagaaggtgcccaagggcaccagcagctaccaggccgagtggatcctggatggcggcagccagagcggcggggagggagatgaatatgaatatgatgacatggagcacgaggacttcatggaggaggagagccaggatgagagcagcgaggaggaggaggagtatgagaccatgaccatcggggagagcgtgcatgatgacctgtatgacaagaaggtggatgaggaggccgaggccaagatgctggagaagtacaagcaggagcggctggaggagatgtttcctgatgaggtggacaccccaagagatgtggccgcccgcatccgcttccagaagtaccggggcctgaagagcttccgcaccagcccctgggaccccaaggagaacctgccccaggactatgcccgcatcttccagttccagaacttcaccaacaccaggaagagcatcttcaaggaggtggaggagaaggaggtggagggcgctgaggtgggctggtacgtgaccctgcacgtgtctgaggtgcctgtgtctgtggtggagtgcttccggcagggcacccccctcatcgccttcagcctgctgccccatgagcagaagatgtctgtgctgaacatggtggtgagaagagaccccggcaacacagagcctgtgaaggccaaggaggagctgatcttccactgcggcttccgccgcttccgggccagccccctcttcagccagcacacagctgctgacaagcacaagctgcagcgcttcctgacagctgacatggccctggtggccaccgtgtatgcccccatcaccttccccccagcctctgtgctgctcttcaagcagaagagcaatggcatgcacagcctgattgccaccggccacctgatgtctgtggaccctgacaggatggtgatcaagagggtggtgctgagcggccaccccttcaagatcttcaccaagatggctgtggtgcgctacatgttcttcaacagagaagatgtgctgtggttcaagcctgtggagctgcggaccaagtggggcagaagaggccacatcaaggagcccctgggcacccacggccacatgaagtgcagctttgatggcaagctgaagagccaggacacagtgctgatgaacctgtacaagagggtcttccccaagtggacctatgacccctacgtgcctgagcctgtgccctggctgaagtctgagatcagcagcacagtgccccagggcggcatggagtag

SEQ ID NO: 196764 - DNA, 2415 bp, Artificial Sequence
  derived and/or modified sequence
atggccgcccaccggcccggccccctgaagcagcagaacaaggcccataagggaggtcgccatagggggagaggatcggctcaaagagacggaaagggaaggttggctctgaagacgttgagcaagaaagtccggaaagagctgagtcgggtggatcagcgacatagagctagtcaactgcgaaagcaaaagaaagaagcagtactagctgaaaagcgtcaactgggagggaaagacggacctccccatcaggtcttagtagtgcctctgcacagccggatctccctcccagaggccatgcagctgttgcaggatcgggatacaggcacggtccatctcaatgagctgggcaacactcaaaactttatgctgctatgtcccaggctgaagcaccgctggttctttacctccgctagacctggcgatcttcatgtagtcttggatatggctaaagtggccgacacaatcctgttcttactcgaccctctagaagggtgggacagcactggtgattattgtttgtcttgcttgttcgctcagggcttgcctacttacaccctggccgttcagggaattagcggcctgcccctcaaaaagcaaatcgatactcgcaaaaagttgagcaaggccgtggagaagcggtttccccacgacaaactgttgttactggacacccagcaggaggccgggatgttactccgccagttagcaaatcagaagcagcagcacttagcgtttagagaccgaagagcatacttatttgcccatgccgttgattttgtaccctcagaagaaaataacctcgtcggtaccctcaaaatctccggatacgtgcggggacaaacactgaatgtgaacaggctgttgcatatcgtcggctacggcgattttcagatgaagcagattgatgctcctggcgatcccttccccctgaatcctaggggaatcaaaccccaaaaggatcccgatatggctatggagatctgcgctacagacgccgtcgatgatatggaagaagggctgaaagtgctgatgaaagctgacccagggaggcaggagagcctgcaggcagaggtaattccagaccccatggagggggagcaaacctggcctaccgaagaggaactctctgaggccaaggactttctcaaggaatccagcaaagtggtgaaaaaggtcccaaaagggacctccagctaccaggccgagtggatcttggatggggggtctcagagtggcggggaaggggacgagtatgaatacgacgatatggagcacgaggactttatggaagaagagagccaggacgaatcctccgaggaagaggaagaatatgagaccatgactattggtgaaagtgtgcacgatgacctgtacgataagaaggttgatgaggaggctgaagccaagatgttggaaaagtacaagcaggagaggctcgaggagatgtttcccgacgaggtggacacaccgcgagacgttgcagctagaattcgcttccagaaatacagagggctaaaatcatttagaacctccccttgggatcctaaggagaacctaccacaggattatgcccgaatcttccagttccagaactttacaaatactcgcaaatccattttcaaagaggtggaggagaaggaagttgagggggcagaggtggggtggtacgtgaccctacacgtcagtgaagtgccggtgtctgttgttgagtgctttcgacagggaacacctttgattgcattttctctcctgccccatgagcaaaaaatgtccgtgctgaatatggttgtgagacgggacccagggaatacagagcctgtgaaggccaaggaagaactcatctttcactgcgggtttcggcgtttccgggcctcaccgttgttttctcagcatactgcagctgacaaacacaaacttcagagattcttgaccgccgacatggctctggtcgccaccgtttacgcccctataacgttccctcctgcttccgtgcttttgtttaaacaaaagtccaatggcatgcacagtttgattgcaaccgggcatctgatgtctgtcgaccctgataggatggtgattaagagggtagttctctcaggtcatccattcaagatcttcacaaagatggccgttgtccgttacatgttcttcaatcgcgaggatgtgctatggttcaagccagtagagctgcgtacaaagtggggcaggcgtggacatatcaaggaaccattaggcacccacggacatatgaaatgctccttcgacggcaaactcaagtcgcaagataccgtgctaatgaacttatataagcgcgtgttccccaaatggacctacgacccatacgtgccagagcctgtaccttggctcaaaagtgagatttcctccaccgtacctcagggcggcatggaatag

SEQ ID NO: 196765 - DNA, 2415 bp, Artificial Sequence
  derived and/or modified sequence
atggctgcccacagacccggacctctgaagcagcagaacaaagcgcacaaaggcggtcggcacagaggtcgcggatctgcgcagcgtgacggcaaggggagactggccctgaaaaccctctccaaaaaggtgcgcaaagaactctcccgcgttgatcagaggcaccgagcatcacagcttagaaaacagaagaaagaggccgtactggccgagaaacgacagctaggcggaaaggatggccctccccatcaagttctagtggtccccctacacagtaggatttccctgcccgaagctatgcagttattgcaggacagagataccgggaccgtccatctaaatgagctgggaaatacccagaatttcatgctgctgtgccccagattgaaacaccgttggttttttacctcggccaggcccggtgatttgcacgttgtgttggacatggccaaggtcgccgatactattctttttttgctggacccacttgaaggttgggatagcacaggcgattattgcctgtcctgccttttcgcacagggtcttcctacatacaccctggcggtgcaaggaatatcaggcttaccactgaagaaacagatagacacccggaagaaactttctaaggcagtagaaaaacgtttcccacacgacaagttgttgctgctagacacccaacaagaggctggtatgctgctgcgacaactggcaaaccagaagcaacagcatttagctttcagagacagaagggcgtatcttttcgcccatgcagtggacttcgttccatcagaagaaaacaacttggtgggtactctcaagatttccggatatgttcggggtcaaacactcaacgtcaacagactgcttcacatcgtcggctacggcgactttcagatgaaacagatcgacgcacccggagaccctttcccattgaatccacgaggcataaagccgcaaaaggaccctgacatggctatggaaatctgcgctactgacgccgtggacgatatggaggaaggacttaaggtgctgatgaaggccgaccccggtagacaagagtctctgcaagccgaggtcatccctgatcctatggagggcgagcagacctggccaactgaagaggagctctcagaggcaaaagactttctgaaagagtcatccaaggtggtgaagaaggtcccaaaggggacaagtagctaccaggctgaatggattctcgacggtggttcacagagtggaggtgagggcgatgaatatgagtacgacgacatggagcatgaggacttcatggaagaggagagccaggatgagtcctctgaggaggaggaagagtatgaaacaatgactatcggggaatccgttcatgacgacttgtatgacaagaaagtagacgaagaggctgaggccaagatgctcgaaaagtacaagcaggagagactggaagaaatgttccccgacgaggtggacaccccaagggacgtcgccgcacgaatcaggttccagaagtaccgtggactcaaatcttttcggacgtccccatgggaccctaaggaaaacctgccccaggattatgcccgaattttccagttccagaactttacaaacactcgcaagagcatttttaaagaagtggaggaaaaagaggtagagggagctgaggtcggatggtatgtaacattacacgtgagcgaggtaccagtgtccgtggtggagtgctttaggcagggcacccccctgatcgcctttagcttgctcccacacgagcagaaaatgtccgttctgaacatggtagttagacgcgatccaggcaacaccgagcccgtgaaggccaaagaggagcttatcttccattgcggcttcaggcgctttagagctagtcctctcttttctcagcacaccgccgcagacaaacacaaactgcagagatttctgaccgccgatatggcgctcgttgccacggtatacgctcccatcactttcccaccggcttcggtcttgctctttaagcagaagagcaatggaatgcactccctgatcgctaccggccacttaatgtcggtggacccagaccgcatggtgatcaaacgtgttgtgctctcggggcatcctttcaaaatctttaccaaaatggctgttgtgaggtacatgttctttaaccgagaggacgtattgtggtttaagcctgtcgagcttcgcacaaagtggggcaggcgcggacatatcaaggaaccactggggacccatggccatatgaaatgtagtttcgatgggaaacttaaatcccaggataccgttctaatgaatctctacaaaagagtctttcctaagtggacatacgacccttacgtgccggagccagtcccatggctgaagagtgaaatctcgagcaccgtgccacagggcggaatggagtag

SEQ ID NO: 196766 - DNA, 4870 bp, Artificial Sequence
  derived and/or modified sequence
cgccacgggggtcgctgtcatggcaacgcacccgctcccgcatggagggcgcgaagccgcattgtgagcgctggccctggagcccgcggccccgcggctgagagcgagcctcggtcccgctgaagctcccctgacttctgcctgctccctctcccgacgggacggaaagggccggggctcgggcatggggtcccctgcggtccgagcctgcccacggcgaagccggtgcagcctggccccgtgacccctctgaatccccgtccggccgtcgccgtgcagttgtcaagtttctgggaagattagtgggagcgcagccgcccgagcccgacggccggagggtcgcggccagtcccccttgccgggtcgccacgtcccacaaggtccttcccggccgctccgtgggaggcggggcgcaggttggagtaacagggacgggcttgagctggtacggaaccgggcaaggtgagagaagtgtcttccacgcgattcccaagcctcgctagggaatcgagggagaagaaaggttgctcagagtgataaagaacatgccgttgcaaacggaagagcaacgtgcccgaatctaggtgacaggaagggcttaggccttttcggcacgaatggagccttccagtcaacatgcttctacgtgatgcagctttatagcgcaaaaaaatgacaatgcaaggggtacaaacagccctgctagaccaacagcccgagcctcgacagtctacatccggcgccttcaagcccccaaccacacactgcgaagtgggaaaagttcccagcgcggcttggcgaacccgctaacacggcgctctcacgagctgctggaaaagaccttcgcgagagggcgcagggagtcccgctccctggagggcccgcccccttggaggggaccggaagcgcttgtcctggcccggaagcagtgctgactccgtacacgcgcgctgcggcatggcggcccaccgccccggcccgctcaagcagcagaataaagctcataaaggcggacggcatcggggtcggggatctgcacagcgggacggcaagggccgtctggcactgaaaaccctaagcaagaaggtgagaaaagaactcagcagagtcgaccagaggcatcgcgccagccagctccgaaagcagaagaaggaggcggttctggcagagaagagacagctgggtggcaaggatggccctcctcatcaggtactggtggtgcccctgcacagcagaatttccctgccagaggccatgcagctgcttcaagatagggacactggaacagtacacttgaatgaattgggaaacacccagaactttatgctgctgtgcccccgcttgaaacatcggtggtttttcacctcagcaaggccaggggatctgcacgttgtgttagacatggctaaagtagctgataccatcctgttcctccttgatccactagaaggctgggacagcaccggtgattactgtctttcctgcctctttgctcagggccttccgacctatacactagctgtccaggggatttctggcctcccactgaagaaacaaatagataccaggaagaagctaagtaaagcagtggagaagcgctttccgcatgacaaactcctcttgttagacactcaacaggaggcagggatgctgcttaggcagttggctaaccagaagcaacagcatcttgcttttcgagatcggcgggcctacctatttgcccatgctgttgattttgttcctagtgaagagaataacttggtgggcaccttgaaaatttcaggctatgttcgagggcagactctgaatgtcaataggttgctgcatatcgttggatatggtgatttccagatgaaacagatagatgcccccggagaccctttccctttaaatcctagaggaattaaaccccaaaaggacccagacatggcaatggagatttgtgctacggatgctgtagatgatatggaagaaggtcttaaagtcctaatgaaggcagaccctggtagacaggaatccttgcaagcagaggttatcccagatccaatggagggagagcaaacctggcccactgaggaggagctgagcgaggcaaaggatttcttgaaggaaagttctaaggtggtaaagaaggtccccaaaggaacatccagttaccaagctgaatggattttggatggtggcagccaaagtggtggggaaggagatgaatatgaatatgatgatatggaacatgaggattttatggaggaggaatctcaggatgagagtagtgaagaagaggaagaatatgaaactatgactattggggagtctgtgcatgatgatctgtatgataagaaagtagatgaagaagctgaggcaaaaatgttggagaaatataaacaagaaagactggaagagatgtttccagatgaagtggacacgccccgtgatgtggctgctcgaattcgatttcagaaatacagaggccttaagagcttccggacatctccatgggatcctaaggaaaaccttcctcaagattatgctcgaatatttcagtttcagaactttactaacactaggaaaagcatctttaaagaggttgaagaaaaagaggttgaaggagctgaggttggctggtatgtcacacttcatgtctctgaagtccccgtctcagtggtcgagtgcttcaggcaaggaacacccttgattgcattttctttactacctcatgaacagaagatgtcagtattgaatatggtggtgaggcgtgaccctggcaacactgaacctgtgaaagccaaggaagagctcatatttcactgtggattcaggcgcttccgagcctcacctttattctctcagcacactgcagcggacaaacataaattgcagagattcctgactgctgacatggccctggtggcgacagtctatgcgccaatcacttttcctcctgcatctgtgctgcttttcaagcaaaaaagcaatggaatgcacagcctcattgctacaggccatcttatgtcagtagatccagacagaatggtcatcaagagagttgttctgagtggtcatcctttcaaaatttttactaagatggcagtagtacgttacatgttcttcaacagagaggatgtgctgtggtttaaaccagtggaactgagaacgaagtggggccggagaggacatatcaaggaacctttaggtacccatggccacatgaaatgcagctttgatgggaagctaaaatctcaagacacagtactgatgaacctgtataaacgagtcttccccaaatggacttatgatccatatgtaccagaaccagtaccctggctgaaaagtgagatttcttcaacagtgcctcaagggggcatggagtaatggattcaaagagattctgtcttaccggtgccagtcagtactccagggatgggaggcacaagttgtgattgggcaaagtttattttctatgtcagcctgtcagtccactgccccattttgcaagacttttttttagccttgacaaaatgtctcagttaagtataaaagtttttccactacttagtccaaaaaaaactattaaatcttaatgaaatagccactctccattaagaatctgataactaagagttgacaatactaggaaacaaaatgtcttcagtatctaaagacactgaattcccaccatttccttttctgtaaattaaacagaaacagactgataagaagctggcctttcagcctgcttcacccaagttatggaggaggttaagtctacatttccaccactgagcacaatacaaatgttctttacttctggggaaacagtttgaaaatgttgagacagcacagcagccactccaacaccagctgtaggttcaatgagtagtttcatcctctcccacaccagctgggttgcacactgttgatatggaagggagtaggaattagtgaaaggggagtctagttggtttacctataaagttcagatgagaatacgtgtccagtttgaattttcttatcactgtgtacacacgcttcccaaagcttttctttaattctgactctgcttctgtcaagagggttgtcattaatacatctagggtaccctcccatgtcatgaagttacctagtcaggttcccgtgggtcacttgctactcctaagggaagtttcttctgcctaagaagttacaccatgctttgctatttcttttcttgctggagcctcaccttaatttcatcctctgtgacagtgaagatatcatccacaaggtccctgataataggccaggtgttcaagccaatgctggatttgacaccatctgctatggtttctggaggataaagattgggcatcagtttccccttcagcttggactggtagcagtcatctgcatttgagggttcagcagcatataccttcacactaggtttcagagcctgggaagaggaatattaagacatcttaacaacaaaccacaacattgcctgcatgtctaaaagaaaatatgggcctggtgtggtggctcacacctgtaatcccaacactttgggagcccgaggcgggtggatcagctgaggtcaggagttcaagaccagcctggccaacctggtgaaatgcagtgtcaactaaaaataggaaaatcagccaggcgtggtggcagacccctgtaatcccagctactcaagaggctgaggtaggagaatcacttgaacttgggaggggtaggttgcagtgagctgagatcacaccaaaatggggtggggcgcagtggctcacgcctgtaatcccagcactttgggaggccgaggtgggcggatcacgaggtagggagatcaagaccatcctggctaacacggtgaaaccccgtctctact

SEQ ID NO: 196767 - DNA, 2415 bp, Artificial Sequence
  derived and/or modified sequence
atggccgcccacagacccggccccctgaagcagcagaacaaggcccacaagggcggcagacacagaggcagaggcagcgcccagagagacggcaagggcagactggccctgaagaccctgagcaagaaggtgagaaaggagctgagcagagtggaccagagacacagagccagccagctgagaaagcagaagaaggaggccgtgctggccgagaagagacagctgggcggcaaggacggccccccccaccaggtgctggtggtgcccctgcacagcagaatcagcctgcccgaggccatgcagctgctgcaggacagagacaccggcaccgtgcacctgaacgagctgggcaacacccagaacttcatgctgctgtgccccagactgaagcacagatggttcttcaccagcgccagacccggcgacctgcacgtggtgctggacatggccaaggtggccgacaccatcctgttcctgctggaccccctggagggctgggacagcaccggcgactactgcctgagctgcctgttcgcccagggcctgcccacctacaccctggccgtgcagggcatcagcggcctgcccctgaagaagcagatcgacaccagaaagaagctgagcaaggccgtggagaagagattcccccacgacaagctgctgctgctggacacccagcaggaggccggcatgctgctgagacagctggccaaccagaagcagcagcacctggccttcagagacagaagagcctacctgttcgcccacgccgtggacttcgtgcccagcgaggagaacaacctggtgggcaccctgaagatcagcggctacgtgagaggccagaccctgaacgtgaacagactgctgcacatcgtgggctacggcgacttccagatgaagcagatcgacgcccccggcgaccccttccccctgaaccccagaggcatcaagccccagaaggaccccgacatggccatggagatctgcgccaccgacgccgtggacgacatggaggagggcctgaaggtgctgatgaaggccgaccccggcagacaggagagcctgcaggccgaggtgatccccgaccccatggagggcgagcagacctggcccaccgaggaggagctgagcgaggccaaggacttcctgaaggagagcagcaaggtggtgaagaaggtgcccaagggcaccagcagctaccaggccgagtggatcctggacggcggcagccagagcggcggcgagggcgacgagtacgagtacgacgacatggagcacgaggacttcatggaggaggagagccaggacgagagcagcgaggaggaggaggagtacgagaccatgaccatcggcgagagcgtgcacgacgacctgtacgacaagaaggtggacgaggaggccgaggccaagatgctggagaagtacaagcaggagagactggaggagatgttccccgacgaggtggacacccccagagacgtggccgccagaatcagattccagaagtacagaggcctgaagagcttcagaaccagcccctgggaccccaaggagaacctgccccaggactacgccagaatcttccagttccagaacttcaccaacaccagaaagagcatcttcaaggaggtggaggagaaggaggtggagggcgccgaggtgggctggtacgtgaccctgcacgtgagcgaggtgcccgtgagcgtggtggagtgcttcagacagggcacccccctgatcgccttcagcctgctgccccacgagcagaagatgagcgtgctgaacatggtggtgagaagagaccccggcaacaccgagcccgtgaaggccaaggaggagctgatcttccactgcggcttcagaagattcagagccagccccctgttcagccagcacaccgccgccgacaagcacaagctgcagagattcctgaccgccgacatggccctggtggccaccgtgtacgcccccatcaccttcccccccgccagcgtgctgctgttcaagcagaagagcaacggcatgcacagcctgatcgccaccggccacctgatgagcgtggaccccgacagaatggtgatcaagagagtggtgctgagcggccaccccttcaagatcttcaccaagatggccgtggtgagatacatgttcttcaacagagaggacgtgctgtggttcaagcccgtggagctgagaaccaagtggggcagaagaggccacatcaaggagcccctgggcacccacggccacatgaagtgcagcttcgacggcaagctgaagagccaggacaccgtgctgatgaacctgtacaagagagtgttccccaagtggacctacgacccctacgtgcccgagcccgtgccctggctgaagagcgagatcagcagcaccgtgccccagggcggcatggagtag

SEQ ID NO: 196768 - protein, 261 aa, Artificial Sequence
  derived and/or modified sequence
MTCWLRGVTATFGRPAEWPGYLSHLCGRSAAMDLGPMRKSYRGDREAFEETHLTSLDPVKQFAAWFEEAVQCPDIGEANAMCLATCTRDGKPSARMLLLKGFGKDGFRFFTNFESRKGKELDSNPFASLVFYWEPLNRQVRVEGPVKKLPEEEAECYFHSRPKSSQIGAVVSHQSSVIPDREYLRKKNEELEQLYQDQEVPKPKSWGGYVLYPQVMEFWQGQTNRLHDRIVFRRGLPTGDSPLGPMTHRGEEDWLYERLAP

SEQ ID NO: 196769 - protein, 218 aa, Artificial Sequence
  derived and/or modified sequence
MTCWLRGVTATFGRPAEWPGYLSHLCGRSAAMDLGPMRKSYRGDREAFEETHLTSLDPVKQFAAWFEEAVQCPDIGEANAMCLATCTRDGKPSARMLLLKGFGKDGFRFFTNFESRKGKELDSNPFASLVFYWEPLNRQYLRKKNEELEQLYQDQEVPKPKSWGGYVLYPQVMEFWQGQTNRLHDRIVFRRGLPTGDSPLGPMTHRGEEDWLYERLAP

SEQ ID NO: 196770 - protein, 166 aa, Artificial Sequence
  derived and/or modified sequence
MLLLKGFGKDGFRFFTNFESRKGKELDSNPFASLVFYWEPLNRQVRVEGPVKKLPEEEAECYFHSRPKSSQIGAVVSHQSSVIPDREYLRKKNEELEQLYQDQEVPKPKSWGGYVLYPQVMEFWQGQTNRLHDRIVFRRGLPTGDSPLGPMTHRGEEDWLYERLAP

SEQ ID NO: 196771 - protein, 243 aa, Artificial Sequence
  derived and/or modified sequence
MTCWLRGVTATFGRPAEWPGYLSHLCGRSAAMDLGPMRKSYRGDREAFEETHLTSLDPVKQFAAWFEEAVQCPDIGEANAMCLATCTRDGKPSARMLLLKGFGKDGFRFFTNFESRKGKELVRVEGPVKKLPEEEAECYFHSRPKSSQIGAVVSHQSSVIPDREYLRKKNEELEQLYQDQEVPKPKSWGGYVLYPQVMEFWQGQTNRLHDRIVFRRGLPTGDSPLGPMTHRGEEDWLYERLAP

SEQ ID NO: 196772 - DNA, 786 bp, Artificial Sequence
  derived and/or modified sequence
atgacctgctggctgagaggcgtgaccgccaccttcggcagacccgccgagtggcccggctacctgagccacctgtgcggcagaagcgccgccatggacctgggccccatgagaaagagctacagaggcgacagagaggccttcgaggagacccacctgaccagcctggaccccgtgaagcagttcgccgcctggttcgaggaggccgtgcagtgccccgacatcggcgaggccaacgccatgtgcctggccacctgcaccagagacggcaagcccagcgccagaatgctgctgctgaagggcttcggcaaggacggcttcagattcttcaccaacttcgagagcagaaagggcaaggagctggacagcaaccccttcgccagcctggtgttctactgggagcccctgaacagacaggtgagagtggagggccccgtgaagaagctgcccgaggaggaggccgagtgctacttccacagcagacccaagagcagccagatcggcgccgtggtgagccaccagagcagcgtgatccccgacagagagtacctgagaaagaagaacgaggagctggagcagctgtaccaggaccaggaggtgcccaagcccaagagctggggcggctacgtgctgtacccccaggtgatggagttctggcagggccagaccaacagactgcacgacagaatcgtgttcagaagaggcctgcccaccggcgacagccccctgggccccatgacccacagaggcgaggaggactggctgtacgagagactggccccctag

SEQ ID NO: 196773 - DNA, 786 bp, Artificial Sequence
  derived and/or modified sequence
atgacctgttggctgcgcggcgtgaccgctacatttggtagacccgctgagtggcctggttatttgtcacacttgtgtggccgcagcgcagcaatggacttaggccccatgagaaaaagctatcgcggggatcgcgaggcttttgaggagacccacttgacctctctggaccctgtgaagcaattcgctgcatggttcgaagaggctgtgcagtgccccgatatcggagaggcaaatgctatgtgtctggccacctgcacaagagacgggaaaccaagcgcccgcatgcttttactaaaaggtttcggaaaggacggtttcaggtttttcaccaactttgagagtcgtaagggcaaggaattagactctaaccctttcgctagcttggtattttattgggagccactgaaccgtcaggtccgcgttgaaggcccagtgaagaaactgccggaagaggaggctgaatgttatttccatagtcggccaaaatcctcccagatcggcgccgtggtgtcccaccaatccagtgtcattcccgacagggaatatctacgtaaaaagaatgaggaactggaacagttgtatcaggatcaagaagtgccaaaacccaaaagttggggcggctacgttctttatccacaagtgatggaattctggcagggacagacaaacagactacacgatcggatcgtctttcggcgtggactgccaactggagattccccgttggggcccatgactcacagaggggaggaggattggctgtatgaacggcttgctccctag

SEQ ID NO: 196774 - DNA, 786 bp, Artificial Sequence
  derived and/or modified sequence
atgacctgctggctgcggggcgtgacagccaccttcggccggcctgctgagtggccaggctacctgagccacctgtgtggccgctctgctgccatggacctgggccccatgaggaagagctacagaggagaccgggaggcctttgaggagacccacctgaccagcctggaccctgtgaagcagtttgctgcctggtttgaggaggccgtgcagtgcccagacattggagaggccaatgccatgtgcctggccacctgcaccagagatggcaagcccagcgccaggatgctgctgctgaagggctttgggaaggatggcttccgcttcttcaccaactttgagagcaggaagggcaaggagctggacagcaacccctttgccagcctggtgttctactgggagcccctgaaccggcaggtgcgggtggagggccctgtgaagaagctgcctgaggaggaggccgagtgctacttccacagccggcccaagagcagccagattggagctgtggtgagccaccagagcagcgtcatcccagaccgggagtacctgaggaagaagaatgaggagctggagcagctgtaccaggaccaggaggtgcccaagcccaagtcctggggcggctacgtgctgtacccccaggtgatggagttctggcagggccagaccaaccggctgcatgaccgcatcgtgttcagaagaggcctgcccaccggggacagccccctgggccccatgacccacagaggagaggaggactggctgtatgaaaggctggccccctag

SEQ ID NO: 196775 - DNA, 786 bp, Artificial Sequence
  derived and/or modified sequence
atgacctgctggctgcggggcgtgaccgccaccttcggccggcccgccgagtggccaggatacctttcacacctgtgcggtcggtcagctgctatggacctggggccaatgcgcaagtcttaccgaggcgacagagaggccttcgaggagacccatcttacctctctcgatcctgtcaagcagttcgctgcttggttcgaggaggctgtgcagtgccctgatattggagaggcaaatgcaatgtgtctggccacatgtacccgcgatggcaagccaagcgctaggatgctacttctgaagggcttcggcaaagatggcttcagattcttcacaaactttgaatcacgcaagggaaaggaactggactccaatccgtttgcttctctggtcttctactgggagcctctgaatcggcaggttagagtggagggtcccgtcaaaaaacttcccgaagaggaggccgagtgctactttcatagtcgccccaaatctagccagattggcgcggtggtgtcccaccagagcagtgtgattcctgaccgggagtatctaaggaagaaaaatgaggaactggagcagttgtaccaggaccaggaggttcccaaacctaagagctggggaggctacgtgctgtacccacaagtcatggagttttggcagggccagacaaacagacttcacgaccggatcgtcttccgtagagggctccctacgggcgattctcctttggggccgatgacacaccgaggtgaggaggactggctttatgagcggctggctccctag

SEQ ID NO: 196776 - DNA, 786 bp, Artificial Sequence
  derived and/or modified sequence
atgacttgctggctgagaggggtgacggccaccttcgggcgtcctgctgaatggcccggatacttaagtcacctgtgcggcagatctgccgctatggacctggggcctatgagaaagagttataggggggatagggaggcctttgaggaaacacatctgacctcccttgaccccgtgaagcaattcgctgcgtggttcgaggaagctgtgcagtgccccgatatcggcgaggcgaatgcaatgtgcctcgcaacctgtactagggacggcaaaccttcagcacgcatgctgctcctgaagggctttggcaaagacgggtttcgctttttcaccaactttgagtctcgtaaggggaaggaattagattccaacccatttgcctctctggtgttctattgggaacctttgaaccgtcaggtacgggtagagggcccagtgaagaagctgcccgaggaggaggctgagtgttacttccatagtcgccctaaatcctcccagatcggcgcagtagtttcacatcagtccagtgtaattcccgatagggagtacctgagaaaaaaaaacgaggaactggaacagctttatcaggaccaagaggtgcccaaacctaaatcgtgggggggttatgtgctgtaccctcaagttatggaattttggcaggggcagactaaccgcctccatgaccgcatagtctttagaaggggattacccacaggtgactcccccttagggccaatgacacacaggggggaggaggactggttgtatgagagactcgccccttag

SEQ ID NO: 196777 - DNA, 657 bp, Artificial Sequence
  derived and/or modified sequence
atgacatgctggctgcggggcgtgacagccacttttggaagaccagcagagtggccaggatacctcagtcacctttgcggccgctctgccgcgatggatctgggccccatgcgcaaatcatacaggggagatcgtgaagccttcgaggagacacacctaaccagcctcgatcccgtgaagcaatttgctgcatggtttgaggaggccgtacagtgcccggacattggtgaagcaaacgcaatgtgtttggctacatgcactcgcgatgggaaacctagtgccaggatgttgttgcttaagggattcgggaaagatggatttcggttcttcaccaacttcgaaagccgcaaggggaaggaattggattctaatccgttcgccagcctcgttttctattgggagccgctcaatagacagtacctcaggaaaaaaaacgaggaattagagcaactgtatcaggatcaggaggtgccaaaaccaaaatcttgggggggatatgtactctacccccaggtgatggagttttggcaggggcagacaaatagattgcacgaccgcattgtcttcagaagagggcttccaactggcgacagcccactgggacccatgactcacagaggggaggaggattggttatacgaacggctcgcaccttag

SEQ ID NO: 196778 - DNA, 732 bp, Artificial Sequence
  derived and/or modified sequence
atgacctgctggctaaggggggtgaccgccacttttggtcgaccggccgagtggccgggttatcttagccatctgtgcgggagatctgccgcaatggatttagggccaatgcgcaagagctataggggcgacagggaagcttttgaggagacccatttgacgtcccttgatcccgtcaagcaattcgctgcttggttcgaggaggctgtccaatgtccagacatcggcgaagcgaatgcaatgtgccttgctacctgtaccagggacgggaaaccctcagcacgcatgctcctgctgaagggttttggcaaggacggatttcgcttcttcacaaactttgagagccgtaaagggaaggaactggtgcgcgtggaagggcccgtgaaaaaactgcctgaggaagaagcagagtgttatttccatagtagacctaaaagcagccagattggtgccgtagtgtcacatcagtcgagcgtgataccagatcgcgaatatcttagaaaaaagaatgaggagctcgagcagctttatcaggatcaggaagtccctaaaccaaaaagctggggcgggtacgtgctgtatcctcaagtgatggagttctggcagggccaaaccaacaggctacatgataggattgtgtttcgccgcggcctgcctacaggagattcacccctggggccgatgacccaccgaggggaggaagactggctatacgagaggctagcaccatag

SEQ ID NO: 196779 - DNA, 657 bp, Artificial Sequence
  derived and/or modified sequence
atgacctgctggctgcggggcgtgacagccaccttcggccggcctgctgagtggccaggctacctgagccacctgtgtggccgctctgctgccatggacctgggccccatgaggaagagctacagaggagaccgggaggcctttgaggagacccacctgaccagcctggaccctgtgaagcagtttgctgcctggtttgaggaggccgtgcagtgcccagacattggagaggccaatgccatgtgcctggccacctgcaccagagatggcaagcccagcgccaggatgctgctgctgaagggctttgggaaggatggcttccgcttcttcaccaactttgagagcaggaagggcaaggagctggacagcaacccctttgccagcctggtgttctactgggagcccctgaaccggcagtacctgaggaagaagaatgaggagctggagcagctgtaccaggaccaggaggtgcccaagcccaagtcctggggcggctacgtgctgtacccccaggtgatggagttctggcagggccagaccaaccggctgcatgacagaattgtgttccggcggggcctgcccactggagacagccccctgggccccatgacccacagaggagaggaggactggctgtatgagcggctggccccctag

SEQ ID NO: 196780 - DNA, 732 bp, Artificial Sequence
  derived and/or modified sequence
atgacctgctggctgcggggcgtgacagccaccttcggccggcctgctgagtggccaggctacctgagccacctgtgtggccgctctgctgccatggacctgggccccatgaggaagagctacagaggagaccgggaggcctttgaggagacccacctgaccagcctggaccctgtgaagcagtttgctgcctggtttgaggaggccgtgcagtgcccagacattggagaggccaatgccatgtgcctggccacctgcaccagagatggcaagcccagcgccaggatgctgctgctgaagggctttgggaaggatggcttccgcttcttcaccaactttgagagcaggaagggcaaggagctggtgcgggtggagggccctgtgaagaagctgcctgaggaggaggccgagtgctacttccacagccggcccaagagcagccagattggagctgtggtgagccaccagagcagcgtcatcccagaccgggagtacctgaggaagaagaatgaggagctggagcagctgtaccaggaccaggaggtgcccaagcccaagtcctggggcggctacgtgctgtacccccaggtgatggagttctggcagggccagaccaaccggctgcatgaccgcatcgtgttcagaagaggcctgcccaccggggacagccccctgggccccatgacccacagaggagaggaggactggctgtatgaaaggctggccccctag

SEQ ID NO: 196781 - DNA, 657 bp, Artificial Sequence
  derived and/or modified sequence
atgacctgctggctgcggggcgtgaccgccaccttcggccggcccgctgaatggccgggctacttgtcccacctctgtgggcgaagcgcagccatggatctgggacctatgcgcaaaagttacaggggagatcgcgaggctttcgaagaaacacatctgacctcccttgatccggttaaacagtttgccgcctggtttgaggaagccgtgcagtgcccagatattggcgaagcgaatgccatgtgtttagctacctgcacccgggacggcaagccgagcgctcgcatgcttctgctaaagggtttcggtaaagatggctttaggttttttactaacttcgagtctcggaaggggaaggaactggacagtaaccccttcgcctcactagtgttctattgggaacccctcaataggcagtatcttcggaagaagaatgaggagcttgaacagttataccaagaccaggaggtccctaaacccaaaagctgggggggatacgtactttaccctcaggtgatggagttttggcagggacagacaaacaggctccacgaccggatagttttcagaagagggttaccaacgggcgattctcccctcggtccaatgacccaccgcggggaggaggattggttatatgagcggttagctccctag

SEQ ID NO: 196782 - DNA, 732 bp, Artificial Sequence
  derived and/or modified sequence
atgacctgctggctgcggggcgtgaccgccaccttcggccggcccgccgagtggcccggatatctgagccatttatgcggtcgatcagcggctatggacttgggcccaatgaggaaaagttatcgcggtgaccgggaggcctttgaagagacccaccttacttctttggacccggttaagcaattcgctgcatggtttgaggaggcagtccagtgcccagatatcggcgaggctaacgccatgtgcctggcaacatgcacaagggacggcaagccttcagcacgcatgctcctgctgaaggggtttgggaaggacggttttagatttttcacaaatttcgagtcgagaaaagggaaggaattggtgcgcgtggagggaccagtcaaaaagctgccggaggaagaagcagaatgctactttcactcaagaccgaagtcaagccagatcggcgccgtggtgtctcatcagagctctgtcatacccgatagggagtatctccggaaaaaaaatgaagagctcgaacagctgtaccaggatcaggaagtgcccaagcctaagtcctggggagggtatgtgctgtacccacaggtcatggagttttggcaagggcagactaacagactgcatgaccgaattgtgttccgccggggattacccacgggcgacagtcctctcggacccatgacccacaggggggaagaagactggttatacgagaggctggcgccttag

SEQ ID NO: 196783 - DNA, 657 bp, Artificial Sequence
  derived and/or modified sequence
atgacctgttggttgcgaggtgtcactgctacattcggacggccagcagagtggcccggttatctatcacacctttgcggcagatccgctgccatggatttgggcccaatgagaaagtcttaccgcggagaccgtgaagctttcgaagaaactcatctgacatcgctcgacccggtgaaacaatttgcggcatggttcgaagaggctgtacagtgccctgacattggcgaggctaatgcaatgtgtctcgctacctgcactcgagatggaaaaccgtctgcccgtatgctgctcctgaagggctttgggaaggacggatttcggttcttcacaaattttgaatcaaggaaaggtaaagagctagattctaatccgttcgcgagtctggtcttctactgggagcccctgaatcggcaatacctgaggaaaaagaacgaggaattggaacagctgtaccaggatcaagaggtgcctaaacccaagagctgggggggatacgtgctctatccccaggtgatggagttctggcaaggccagaccaacaggcttcacgataggatcgtattccgcaggggtctccccaccggcgattctcctctggggcctatgactcatcgcggagaggaagactggctgtacgagcgactcgcgccttag

SEQ ID NO: 196784 - DNA, 732 bp, Artificial Sequence
  derived and/or modified sequence
atgacttgctggctgagaggcgtgaccgcaacattcgggagacctgccgaatggcccggttatctatcacatttgtgtggtagaagcgccgcaatggatttggggcctatgagaaaatcatacaggggagacagggaggcttttgaggaaacccatttaacctcccttgatccggttaaacaatttgctgcttggttcgaagaggcagtccagtgtccagacatcggcgaggccaatgctatgtgtctagcaacgtgcactcgcgacggcaagccctctgctaggatgttgctcctgaagggctttggaaaagatggattccggtttttcacaaacttcgagtcaagaaagggaaaggaactagttcgcgtggagggaccggtgaaaaaattacccgaagaggaggcagaatgttactttcacagcaggcctaaaagctcgcaaatcggtgctgtagttagccaccaatccagtgttattcccgatcgcgaatatcttcgaaaaaaaaacgaggagctcgagcaactctaccaggatcaggaggtaccgaagcccaaatcttggggagggtatgtgctgtatccgcaggtaatggaattttggcagggccagacaaatcggcttcacgacagaatagtatttaggagggggctcccaaccggagactcccctctgggcccaatgacccacaggggagaagaggactggctctacgaacgcctggcaccttag

SEQ ID NO: 196785 - DNA, 3464 bp, Artificial Sequence
  derived and/or modified sequence
cattggctccgaggacttaggacctgttagcttggttgggcgactggcaaatccttccttccccggggtagaagtccagggtgagaaattggttccgaactcaaaggaacccagtgccgggccacagccgggtcacgtggccggcggccccccatgacgtgctggctgcggggcgtcacggcgacgttcgggcgacctgccgagtggccaggctacctcagtcacctgtgtggtcgcagtgctgccatggacctgggacccatgcgcaagagttaccgcggggaccgagaggcatttgaggagactcatctgacctcccttgacccagtgaaacagtttgctgcctggtttgaggaggctgttcagtgtcctgacataggggaagccaatgccatgtgtctggctacctgcaccagagatggaaaaccctctgctcgcatgttgctgctgaagggcttcgggaaagatggcttccgcttcttcactaacttcgagagtcgaaaaggaaaagagctggactctaatccctttgcttcccttgtcttctactgggagccacttaaccgtcaggtgcgtgtggaaggccctgtgaagaaactgcctgaggaggaggctgagtgctacttccactcccgccccaagagcagccagattggggctgtggtcagccaccagagttctgtgatccctgatcgggagtatctgagaaagaaaaatgaggaactggaacagctctaccaggatcaagaggtgcccaagccaaaatcctggggtggctatgtcctgtaccctcaggtgatggagttctggcaaggtcaaaccaaccgcctgcatgaccggatagtctttcggcggggcctacccacaggagattcccctttggggcccatgacccaccgcggggaggaagactggctctatgagagacttgcaccttaactctgggacctgctggcccagagtggagctagggctaggtgtcaagagagggtgtgggattgggacccaggcccttctttctaaactcaacccatttccctccctaccccttatcttcaggactcttcagagctaatcctctaagttctctgtactcagttggttctcagttagctggtcaagtggagtgtaatggtggcgtagagaatcacaaatggaaaataattccataattatttttttgaccttgcctatgattgattaggatagctccctctaggggtagcagccggtgtgactccctttctggtgacagacagggccccagcagccctgtctgttaccatgtgagtcatactggccaaagcttagtcctagcatatgcacctgagccaacctggccaatcagattgttttgtcaataatttgaaatttgaactggagagatccagaaccttgggagtcattaaagccaagtcattcatagcagccaggaaacaataggaaccaaaagcctctgcctgctgctattgcaattcccaggatctctccttccctggatccctccctcccaggtctgggctgtgcagttcctccccctgccttaaaacaccccactatctctgtaaagtctctctctctcttttttttttttttacttaatctagctagaatctatttctgttgattacaacttaactaactcatttacggataggacttttttttttctttttttcttttttcttttcttttttttttttgagatggagtctcactctgtcacccaggctggagtgcagtggtgtgatcttggctcactgcaacctctgcctcccaggttcaagcaattctcctgcctcagcctcccaagtagctgggactacaggcacacgccaccacacccaactaatttttgtatttttagtagagatggggtttcaccatgttggccaggattgtctccatctcttgaccttgtgatccacccacctcagcctcccaaagtgctgggattacaggcatgagccaccacacccagcgagacggggtttcattatgttggccaggctggtctccaactcctgacctaaagtgatctgcccgccttggcctcccaaagtgctgggattacagacatgagccaccacgcttggccgggatagtatatttttatagcacttcccctactgattgctgccttctctgtggctacaagggacccacagaattacagggaagttacagggaagcaggtttcatctcaatattgggagagatttcaaacaatcacacctgcctgagaaggagtgggctgtcactaggaatttttattcccagtccgtcaggaattttgtagaagggcttcatgtgctggtaccaataggacaggaagattttaatcagctttactatctatgtttttttatggaaactgtgtgtatgtatacatacattttccaaaaagaaaaattaaatgattatagagattatgtttttcagactactcacgtatctgcttttcttactccccacctctgctgataattcctagttcattggtttttcccccacactggaattacctggggagcttaaaaaaccctgatgcctgggtcccaccctcagagatgattgaaccagcctggccagcatggcaaaaccctgtctctactatgatatgaatgcagcctgggcactgggaaatttaaaaactccccagataattctgtgcagccaaggttgagacctcctagtctagagctttgctatacacagggtggtccacaagccaggagcatcagcatcacttggcagcgccttagagattcagaccccagacccactgaatctgaccctgcattttcactagaccccaggtgatcagctgcactagactcaacctctaaaccaagacctcccaccctcacagtctatgatcctttagtgaccctcagctgagtcctgtgctgaactgtgtttgttctccttgagcacatgcccgctaaccagggacagactggatgagcaagcaacctgctggctatggagaagagccaggctgggtaaatgtttgctgtgactaagccaggatcaaagaactgcctgttgcttgcactggctggcactgagcttgccactctgtgaactgtgcttccttcccctgcatggacctgtgcctcagtcactattatccgcaggccttctccaagggcagccctctccttgtttatccctcttaagcctgcgtgcaggaaggcacattaaccctgtggccccctgcaggcaggagggtgttgggtgcccttacctaccttgccctttttcttgtaccgtaggctgtgccgtttatgagtaagtgatgtgtgtctgtgtgtgtgtctagaagtgctgcactcaccttgtgttattggaggttgtgtaaccccctagctttgagcctggtctcagatgttccttttccgttctctgtccagccgttaccgcccccagtctgtaataaaagcctatcagccgtgcacttt

SEQ ID NO: 196786 - DNA, 1210 bp, Artificial Sequence
  derived and/or modified sequence
aaatccttccttccccggggtagaagtccagggtgagaaattggttccgaactcaaaggaacccagtgccgggccacagccgggtcacgtggccggcggccccccatgacgtgctggctgcggggcgtcacggcgacgttcgggcgacctgccgagtggccaggctacctcagtcacctgtgtggtcgcagtgctgccatggacctgggacccatgcgcaagagttaccgcggggaccgagaggcatttgaggagactcatctgacctcccttgacccagtgaaacagtttgctgcctggtttgaggaggctgttcagtgtcctgacataggggaagccaatgccatgtgtctggctacctgcaccagagatggaaaaccctctgctcgcatgttgctgctgaagggcttcgggaaagatggcttccgcttcttcactaacttcgagagtcgaaaaggaaaagagctggactctaatccctttgcttcccttgtcttctactgggagccacttaaccgtcagtatctgagaaagaaaaatgaggaactggaacagctctaccaggatcaagaggtgcccaagccaaaatcctggggtggctatgtcctgtaccctcaggtgatggagttctggcaaggtcaaaccaaccgcctgcatgaccggatagtctttcggcggggcctacccacaggagattcccctttggggcccatgacccaccgcggggaggaagactggctctatgagagacttgcaccttaactctgggacctgctggcccagagtggagctagggctaggtgtcaagagagggtgtgggattgggacccaggcccttctttctaaactcaacccatttccctccctaccccttatcttcaggactcttcagagctaatcctctaagttctctgtactcagttggttctcagttagctggtcaagtggagtgtaatggtggcgtagagaatcacaaatggaaaataattccataattatttttttgaccttgcctatgattgattaggatagctccctctaggggtagcagccggtgtgactccctttctggtgacagacagggccccagcagccctgtctgttaccatgtgagtcatactggccaaagcttagtcctagcatatgcacctgagccaacctggccaatcagattgttttgtcaataatttgaaatttgaactggagagat

SEQ ID NO: 196787 - DNA, 1196 bp, Artificial Sequence
  derived and/or modified sequence
aaatccttccttccccggggtagaagtccagggtgagaaattggttccgaactcaaaggaacccagtgccgggccacagccgggtcacgtggccggcggccccccatgacgtgctggctgcggggcgtcacggcgacgttcgggcgacctgccgagtggccaggctacctcagtcacctgtgtggtcgcagtgctgccatggacctgggacccatgcgcaagagttaccgcggggaccgagaggcatttgaggagactcatctgacctcccttgacccagtgaaacagtttgctgcctggtttgaggaggctgttcagtgtcctgacataggggaagccaatgccatgtgtctggctacctgcaccagagatggaaaaccctctgctcgcatgttgctgctgaagggcttcgggaaagatggcttccgcttcttcactaacttcgagagtcgaaaaggaaaagagctggtgcgtgtggaaggccctgtgaagaaactgcctgaggaggaggctgagtgctacttccactcccgccccaagagcagccagattggggctgtggtcagccaccagagttctgtgatccctgatcgggagtatctgagaaagaaaaatgaggaactggaacagctctaccaggatcaagaggtgcccaagccaaaatcctggggtggctatgtcctgtaccctcaggtgatggagttctggcaaggtcaaaccaaccgcctgcatgaccggatagtctttcggcggggcctacccacaggagattcccctttggggcccatgacccaccgcggggaggaagactggctctatgagagacttgcaccttaactctgggacctgctggcccagagtggagctagggctaggtgtcaagagagggtgtgggattgggacccaggcccttctttctaaactcaacccatttccctccctaccccttatcttcaggactcttcagagctaatcctctaagttctctgtactcagttggttctcagttagctggtcaagtggagtgtaatggtggcgtagagaatcacaaatggaaaataattccataattatttttttgaccttgcctatgattgattaggatagctccctctaggggtagcagccggtgtgactccctttctggtgacagacagggccccagcagccctgtctgttaccatgtgagtcatact

SEQ ID NO: 196788 - DNA, 657 bp, Artificial Sequence
  derived and/or modified sequence
atgacctgctggctgagaggcgtgaccgccaccttcggcagacccgccgagtggcccggctacctgagccacctgtgcggcagaagcgccgccatggacctgggccccatgagaaagagctacagaggcgacagagaggccttcgaggagacccacctgaccagcctggaccccgtgaagcagttcgccgcctggttcgaggaggccgtgcagtgccccgacatcggcgaggccaacgccatgtgcctggccacctgcaccagagacggcaagcccagcgccagaatgctgctgctgaagggcttcggcaaggacggcttcagattcttcaccaacttcgagagcagaaagggcaaggagctggacagcaaccccttcgccagcctggtgttctactgggagcccctgaacagacagtacctgagaaagaagaacgaggagctggagcagctgtaccaggaccaggaggtgcccaagcccaagagctggggcggctacgtgctgtacccccaggtgatggagttctggcagggccagaccaacagactgcacgacagaatcgtgttcagaagaggcctgcccaccggcgacagccccctgggccccatgacccacagaggcgaggaggactggctgtacgagagactggccccctag

SEQ ID NO: 196789 - DNA, 732 bp, Artificial Sequence
  derived and/or modified sequence
atgacctgctggctgagaggcgtgaccgccaccttcggcagacccgccgagtggcccggctacctgagccacctgtgcggcagaagcgccgccatggacctgggccccatgagaaagagctacagaggcgacagagaggccttcgaggagacccacctgaccagcctggaccccgtgaagcagttcgccgcctggttcgaggaggccgtgcagtgccccgacatcggcgaggccaacgccatgtgcctggccacctgcaccagagacggcaagcccagcgccagaatgctgctgctgaagggcttcggcaaggacggcttcagattcttcaccaacttcgagagcagaaagggcaaggagctggtgagagtggagggccccgtgaagaagctgcccgaggaggaggccgagtgctacttccacagcagacccaagagcagccagatcggcgccgtggtgagccaccagagcagcgtgatccccgacagagagtacctgagaaagaagaacgaggagctggagcagctgtaccaggaccaggaggtgcccaagcccaagagctggggcggctacgtgctgtacccccaggtgatggagttctggcagggccagaccaacagactgcacgacagaatcgtgttcagaagaggcctgcccaccggcgacagccccctgggccccatgacccacagaggcgaggaggactggctgtacgagagactggccccctag

SEQ ID NO: 196790 - protein, 577 aa, Artificial Sequence
  derived and/or modified sequence
MLTPAFDLSQDPDFLTIAIRVPYARVSEFDVYFEGSDFKFYAKPYFLRLTLPGRIVENGSEQGSYDADKGIFTIRLPKETPGQHFEGLNMLTALLAPRKSRTAKPLVEEIGASEIPEEVVDDEEFDWEIEQTPCEEVSESALNPQCHYGFGNLRSGVLQRLQDELSDVIDIKDPDFTPAAERRQKRLAAELAKFDPDHYLADFFEDEAIEQILKYNPWWTDKYSKMMAFLEKSQEQENHATLVSFSEEEKYQLRKFVNKSYLLDKRACRQVCYSLIDILLAYCYETRVTEGEKNVESAWNIRKLSPTLCWFETWTNVHDIMVSFGRRVLCYPLYRHFKLVMKAYRDTIKILQLGKSAVLKCLLDIHKIFQENDPAYILNDLYISDYCVWIQKVKSKKLAALAEALKEVSLTKAQLGLELEELEAAALLVQEEETALKAAHSVSGQQTLCSSSEASDSEDSDSSVSSGNEDSGSDSEQDELKDSPSETVSSLQGPFLEESSAFLIVDGGVRRNTAIQESDASQGKPLASSWPLGVSGPLIEELGEQLKTTVQVSEPKGTTAVNRSNIQERDGCQTPNN

SEQ ID NO: 196791 - DNA, 1734 bp, Artificial Sequence
  derived and/or modified sequence
atgcttactcccgcattcgacttaagtcaagatcccgatttcctgacgatcgcgatccgtgttccgtatgccagggtcagtgagttcgatgtttacttcgagggctctgacttcaagttttatgcaaagccctatttcctgaggttaacactccctggtcgcatcgtggaaaatgggtctgaacagggttcttatgacgcagataaaggaatctttaccattagactgcctaaggagacacctggtcaacattttgagggtctcaacatgctaacggcacttttagcgccaaggaagtccagaaccgcaaagcccctggtagaggagattggagcttccgaaattccggaggaggtcgtggacgatgaggagtttgattgggaaatcgagcagactccctgcgaggaagtcagcgaatccgccctgaaccctcagtgccactacgggttcggcaaccttcgctctggtgtgctccaacgccttcaggatgaattatctgatgttatcgatatcaaagatcccgatttcacccctgctgccgaaagacgccagaagcggctcgcggctgaactagccaaatttgaccccgatcattatttggcagacttcttcgaggacgaagctattgagcaaatcctcaaatacaacccctggtggaccgataaatactcgaagatgatggccttcctagaaaaaagtcaggagcaggaaaaccatgccaccctcgtgagctttagcgaggaagagaaataccagttgcggaaattcgtgaataaatcttacctgctagacaagagagcttgtcgacaggtctgttatagcctgatcgatattctgctggcttattgttacgaaacccgcgtcacggagggggagaagaacgttgagtctgcctggaatatacggaagttatcaccgacgctctgctggtttgagacctggactaacgtacacgatatcatggtatcttttgggcgaagggtgctttgctaccccctctaccgacactttaagttggtgatgaaagcttacagagacaccatcaaaatcctccagctcggtaagtcagccgtccttaagtgtttgttggacatccacaagatctttcaagagaacgaccccgcttatatactgaacgatctatacatctcggattattgcgtctggatccaaaaagttaagtctaaaaagttggcagcactggcggaagccctgaaagaggtgagtctgacaaaggcccagcttggactagagctggaggagctggaggcagctgccctgcttgttcaggaagaggagactgcgcttaaagccgcgcatagcgtctcgggccagcagacactgtgtagcagtagcgaggcatcagactcggaagactcagactcttccgtgtcgtccggtaacgaggactccggtagtgactctgagcaggatgagctgaaagacagtccctccgagacggtcagttctcttcaaggaccgttcttagaagagtccagtgccttcctcatagtggacggaggtgttcgccggaatactgcgatccaggaaagcgacgcgtcgcaggggaagcctttagctagttcctggcccctaggcgtgtcaggacccctgattgaagaactaggagagcaattaaaaacaaccgtgcaggtgagtgagccaaagggcacaaccgcggttaatagatcaaatatccaagagagagatggatgtcagactcctaataactag

SEQ ID NO: 196792 - DNA, 1734 bp, Artificial Sequence
  derived and/or modified sequence
atgctgaccccagcctttgacctgagccaggaccctgacttcctgaccatcgccatccgggtgccctatgcccgggtgtctgaatttgatgtgtactttgagggcagtgacttcaagttctacgccaagccctacttcctgcggctgaccctgcccggcagaattgtggagaatggcagcgagcagggcagctatgatgctgacaagggcatcttcaccatccggctgcccaaggagaccccaggccagcactttgagggcctgaacatgctgacagccctgctggcccccaggaagagcaggacagccaagcccctggtggaggagatcggggccagcgagatccctgaggaggtggtggatgatgaggagtttgactgggagattgagcagaccccctgtgaggaggtgtctgagagcgccctgaacccccagtgccactacggcttcggcaacctgcggtctggagtgctgcagaggctgcaggatgagctgagtgatgtgattgacatcaaggaccctgacttcaccccagctgctgagcggcggcagaagaggctggccgctgagctggccaagtttgatcctgaccactacctggccgacttctttgaagatgaggccatcgagcagatcctgaagtacaacccctggtggacagacaagtacagcaagatgatggccttcctggagaagagccaggagcaggagaaccacgccaccctggtgtccttcagcgaggaggagaagtaccagctgaggaagtttgtgaacaagagctacctgctggacaagagggcctgccggcaggtgtgctacagcctgattgacatcctgctggcctactgctatgagaccagggtgacagaaggagagaagaatgtggagagcgcctggaacatcaggaagctgagccccaccctgtgctggtttgagacctggaccaacgtgcatgacatcatggtgtcctttggccggcgggtgctgtgctaccccctgtaccgccacttcaagctggtgatgaaggcctacagagacaccatcaagatcctgcagctgggcaagtctgctgtgctgaagtgcctgctggacatccacaagatcttccaggagaatgaccctgcctacatcctgaatgacctgtacatcagtgactactgtgtgtggatccagaaggtgaagagcaagaagctggccgccctggccgaggccctgaaggaggtgtccctgaccaaggcccagctgggcctggagctggaggagctggaggccgccgccctgctggtgcaggaggaggagacagccctgaaggccgcccacagcgtgtctggccagcagaccctgtgcagcagcagcgaggccagtgacagcgaggacagcgacagctctgtgtcctctggaaatgaagattctggcagtgacagcgagcaggatgagctgaaggacagccccagcgagaccgtgagcagcctgcagggccccttcctggaggagagcagcgccttcctgattgtggatggcggcgtgagaagaaacacagccatccaggagagtgatgccagccagggcaagcccctggccagctcctggcccctgggcgtgtctggccccctgattgaggagctgggggagcagctgaagaccaccgtgcaggtgtctgagcccaagggcaccacagctgtgaacagaagcaacatccaggagagagatggctgccagacccccaacaactag

SEQ ID NO: 196793 - DNA, 1734 bp, Artificial Sequence
  derived and/or modified sequence
atgctgacccccgccttcgacctgagccaggaccccgacttcctgacgatcgccataagggtgccctacgctagagtctcagagtttgatgtgtacttcgaagggtcagacttcaagttttacgcaaagccttattttcttcgcctgaccctgcctggtagaattgttgaaaatggttccgagcaggggtcctatgatgctgataagggtatcttcaccattaggctccctaaggagactcccggtcagcacttcgagggattaaacatgctgaccgcgctcctggccccaagaaagtctaggacagcaaaacctctggtggaagagattggcgctagcgagattcccgaagaagtcgtagacgatgaagaatttgactgggaaattgaacagactccctgtgaagaggtctcagagtccgctttaaacccacagtgtcattatggctttggcaatcttaggtccggggtgcttcagaggttgcaggatgaactgtcagatgttatcgacattaaggacccagactttacacctgcagcggagcggcgacagaagaggttggctgcagagcttgccaagtttgaccctgatcactacctggccgacttcttcgaggacgaagccatcgagcagatattgaagtataatccttggtggactgacaaatacagtaaaatgatggcgttcctagagaaaagccaggagcaggagaaccacgccaccttggtgtcattttccgaggaagagaaatatcaacttagaaagtttgtgaataagagttatctgcttgataagagggcctgcaggcaggtctgttactccttaatcgacatcctgctggcctattgttatgaaactagggtgacagagggagagaagaatgttgaatcagcctggaacatcaggaaattaagcccaactctgtgctggtttgagacctggactaatgtccatgatatcatggtgtctttcgggcgaagagtgttgtgctatcctctgtataggcatttcaagctcgttatgaaggcctatagggacacaattaaaatcctacagttgggaaagagcgccgtgctcaagtgcctgctggatattcacaaaatcttccaagagaatgatcctgcttacattctgaatgacttatatatttccgattactgcgtctggattcaaaaagtgaagtctaaaaagctggcagctctcgctgaggccctgaaagaggtgtccctgactaaagcccagctgggacttgaacttgaggagctggaggctgccgctctcctggttcaggaagaggagacggccctcaaggctgctcacagcgtcagtggtcaacaaacgctatgctctagcagcgaagctagtgattcagaagactcggattccagcgtctcgagtgggaatgaggatagtggctccgattccgagcaggatgagctgaaagactcaccgtccgagaccgttagctccctccagggcccttttctggaggagagctccgctttcctgatagtcgacggtggcgtacgccgaaataccgccatccaagaatcagacgcttctcagggtaagccccttgctagcagctggcctcttggagttagcggccctctgatcgaggaactgggggagcaactgaagacaacggttcaggttagcgagcctaagggcacaactgccgttaataggtctaatattcaagaaagggatggctgccaaaccccaaacaactag

SEQ ID NO: 196794 - DNA, 1734 bp, Artificial Sequence
  derived and/or modified sequence
atgctgacaccggcattcgatctgagtcaggatcctgactttctgaccattgctatccgagtgccctacgcgagggtgagtgagttcgatgtgtatttcgaagggagtgattttaagttctacgctaaaccatacttcctgagacttactttgcccggaagaatcgtagagaacggcagcgaacagggtagctacgacgcagacaaaggtatctttacaatcagactgccaaaggaaacgccaggccagcactttgaaggtcttaatatgctaactgccctgttggcgcctcgcaaatcgaggactgccaagcccttagtcgaggaaatcggtgcctctgagattcctgaagaggtggtggacgatgaggagttcgactgggagatagaacaaaccccatgtgaggaggtgtccgagtcagctctgaatccacaatgccactacggattcggcaacctccggagcggcgtcctgcagaggctccaagacgaactgagtgacgtgatcgacattaaggaccctgactttactcccgcagcagaacggaggcagaagcgactggccgctgagctggcgaaattcgaccccgatcactacttagcagacttctttgaggatgaagccatcgaacagatcttgaaatataatccttggtggactgataagtatagtaaaatgatggcatttctcgaaaaaagccaggaacaagaaaaccatgcaaccctggtgtctttctcagaggaggaaaaataccaactaagaaaatttgtaaacaagagctatctcctagataagagagcttgtcgccaagtctgttactcactgattgatatcctgttggcctactgctacgaaacaagagtcacagagggagagaagaacgtggagtccgcttggaacattagaaaattgtctcccacattatgctggttcgaaacctggacgaatgtgcatgacatcatggtgagcttcggcagacgtgtgttgtgttatccgctgtaccgtcacttcaagcttgtaatgaaggcgtatagggacactataaaaatcctgcaacttggaaaatcggctgtgttaaagtgcttactggacattcataagatctttcaggaaaatgacccagcctacattctgaatgacctctacatcagcgactattgtgtttggattcaaaaagtaaagtctaagaaattggccgctttggcggaggcactaaaggaagtgtcactcactaaagcgcagttgggactcgaactggaggagttagaggccgctgccttactcgtgcaggaagaagaaaccgccttgaaagcggctcattcagtcagcggccagcagactctgtgttccagctccgaagcctctgattcggaggatagcgattcctccgtttcttctggaaatgaggattccggaagcgacagtgagcaggacgaacttaaggatagcccttccgagacagtatcatctctccagggtcctttcttggaggaaagctccgcatttctgatcgtcgacggcggagtcagacggaataccgctatacaggaaagcgacgccagtcagggtaagccgctcgcgtcatcctggccactcggagtctccgggccattgatcgaggaactgggcgaacaactcaagaccactgtgcaggtgtcagaacccaaaggaaccacagcagtcaacaggagcaacattcaggaaagagatggctgtcagacccccaataattag

SEQ ID NO: 196795 - DNA, 2879 bp, Artificial Sequence
  derived and/or modified sequence
gcgcgagcacttccgcctcgagccggaagctccgtccctcacaccgagagttcctgcgcgtggggagttggagagtttgcgtggcgggaacgcggcggcagtgagagcgagcggcgccggcccttgcgtccggtgcggcgatgctgaccccggcgttcgacctcagccaggatccggacttcctgactatcgccatccgcgtgccctacgcccgggtctccgagttcgacgtctacttcgaggggtctgacttcaagttctacgccaagccatactttctcagattaacccttcctggaagaattgtagaaaatggaagtgagcaagggtcctatgatgcagataaaggaatttttaccattcgcctgcccaaagaaacccctggccagcattttgaggggctgaacatgttaactgctcttctggcaccaagaaaatccaggacagcaaaaccacttgtggaagaaataggtgcttctgagattcctgaggaagtagttgacgatgaagagtttgattgggaaattgagcagacaccctgtgaagaggtatcagaaagtgctttgaatccgcagtgccactatggatttggaaacttacgatcaggagtgttgcaacggttacaggatgaactgagtgatgttattgatattaaggatccagatttcacccctgcagctgaacgaagacagaagcgcctggccgctgagctggccaagtttgatcctgatcattatctagctgacttttttgaagatgaggcgattgaacagattttgaagtataatccttggtggactgacaaatattcaaaaatgatggcctttttggaaaagagtcaggaacaagaaaatcatgctacattagtgtctttttctgaagaagagaagtatcagctacgaaaatttgtcaataaatcttatctgctggacaagagagcctgtcgtcaagtgtgctacagtttgattgatatccttctggcatattgctatgaaacccgtgtcactgaaggagagaagaatgttgaatctgcatggaatatcaggaaactgagtccaacactatgctggtttgagacttggactaacgttcatgatatcatggtgtcttttggaagaagggtgttgtgttacccactctatcgccatttcaagctggtgatgaaggcctacagggacactataaagatattgcaactgggtaaaagtgcagttttaaagtgtctcctggatattcacaaaatttttcaggaaaatgacccagcgtacatactgaatgatctctacatctcagactactgtgtgtggattcagaaagtcaaatccaaaaagttggcagctcttgcagaagccttaaaggaagtctcccttacaaaggcccagctggggttagaactggaagaactagaagcagcagcactgcttgtccaggaggaagaaactgcattaaaagcagcccattcagtttctgggcagcagacactttgctccagctctgaggcaagtgattcggaggactcagacagcagcgtgtcatctggaaacgaagactcaggctcagattcagaacaagatgaactcaaagatagtccatctgagacagtcagttctttgcaaggtccctttcttgaagaaagcagtgcctttcttattgttgatggtggagtacgcagaaacacagccatccaggagtctgatgccagtcagggaaagccacttgcctcttcctggcctcttggagtgtctgggcctctgatagaggagcttggggaacaactgaagactacagttcaggtttctgaacccaagggcaccactgctgtaaaccgcagcaatattcaggagagagacggctgtcagacaccaaataattgactcttaggtggttttattcattgttgagaaatatggtagattgggtttcatttaccgaatgagaattcttcattttcactttgtaatttttcttagtatatagtcagcccactgtatttgtgtgttccacatctgtggattcaaccaactgcagatcaaaaatattgaagaaaaaatcgcatctgtaccaaacatgtacagacttttttcttgttattattctctaaataatacagtatgacaactatttccacagcatttacattgtattgggtaatataagtaatctagtgatgatttaaactgtgcaggaggatgtgggtaggttatatgcaaatactgcaccattttttatcaggggcttgagcatctgaggattttagtatcctcaggagtcctggaaccaaccccccacagatacggggacaactttatgacattgtttttcaaccaatgaatgtttataccttttgttttccttgccgcgactgtgaagataaagttcaaaagtatttttaccaaagtgtagctaatatttcaagctgaaaataatagttctactgcccgtgtctccagaatgtagagcccatcaatatttttattttaggaggtgtacttgacacccaataaactgcacgtatcaaaagtgtacaatgtgttggcgtatgtataccctgcgtaaaactatcaccacaactgaagtgaggaacggacccatcattcccaagtgcccttgtgccctgttattagtttgcatgtcctagaattctatgtaaattgaatcatacaatatgtatcccttttttggtcaggcatattttactcagtatagttattttgagattcatccatgtggtagcatgtgtcacgagtttttgtttttatgtttttcattgctgagtactgcttcattgaatagatttgttcattgacctatcgatggacacctgggttgtttccagtttggggctgttataaataaagctgttatgaacatttgtgtac

SEQ ID NO: 196796 - DNA, 1734 bp, Artificial Sequence
  derived and/or modified sequence
atgctgacccccgccttcgacctgagccaggaccccgacttcctgaccatcgccatcagagtgccctacgccagagtgagcgagttcgacgtgtacttcgagggcagcgacttcaagttctacgccaagccctacttcctgagactgaccctgcccggcagaatcgtggagaacggcagcgagcagggcagctacgacgccgacaagggcatcttcaccatcagactgcccaaggagacccccggccagcacttcgagggcctgaacatgctgaccgccctgctggcccccagaaagagcagaaccgccaagcccctggtggaggagatcggcgccagcgagatccccgaggaggtggtggacgacgaggagttcgactgggagatcgagcagaccccctgcgaggaggtgagcgagagcgccctgaacccccagtgccactacggcttcggcaacctgagaagcggcgtgctgcagagactgcaggacgagctgagcgacgtgatcgacatcaaggaccccgacttcacccccgccgccgagagaagacagaagagactggccgccgagctggccaagttcgaccccgaccactacctggccgacttcttcgaggacgaggccatcgagcagatcctgaagtacaacccctggtggaccgacaagtacagcaagatgatggccttcctggagaagagccaggagcaggagaaccacgccaccctggtgagcttcagcgaggaggagaagtaccagctgagaaagttcgtgaacaagagctacctgctggacaagagagcctgcagacaggtgtgctacagcctgatcgacatcctgctggcctactgctacgagaccagagtgaccgagggcgagaagaacgtggagagcgcctggaacatcagaaagctgagccccaccctgtgctggttcgagacctggaccaacgtgcacgacatcatggtgagcttcggcagaagagtgctgtgctaccccctgtacagacacttcaagctggtgatgaaggcctacagagacaccatcaagatcctgcagctgggcaagagcgccgtgctgaagtgcctgctggacatccacaagatcttccaggagaacgaccccgcctacatcctgaacgacctgtacatcagcgactactgcgtgtggatccagaaggtgaagagcaagaagctggccgccctggccgaggccctgaaggaggtgagcctgaccaaggcccagctgggcctggagctggaggagctggaggccgccgccctgctggtgcaggaggaggagaccgccctgaaggccgcccacagcgtgagcggccagcagaccctgtgcagcagcagcgaggccagcgacagcgaggacagcgacagcagcgtgagcagcggcaacgaggacagcggcagcgacagcgagcaggacgagctgaaggacagccccagcgagaccgtgagcagcctgcagggccccttcctggaggagagcagcgccttcctgatcgtggacggcggcgtgagaagaaacaccgccatccaggagagcgacgccagccagggcaagcccctggccagcagctggcccctgggcgtgagcggccccctgatcgaggagctgggcgagcagctgaagaccaccgtgcaggtgagcgagcccaagggcaccaccgccgtgaacagaagcaacatccaggagagagacggctgccagacccccaacaactag

SEQ ID NO: 196797 - protein, 268 aa, Artificial Sequence
  derived and/or modified sequence
MSGKANASKKNAQQLKRNPKRKKDNEEVVLSENKVRNTVKKNKNHLKDLSSEGQTKHTNLKHGKTAASKRKTWQPLSKSTRDHLQTMMESVIMTILSNSIKEKEEIQYHLNFLKKRLLQQCETLKVPPKKMEDLTNVSSLLNMERARDKANEEGLALLQEEIDKMVETTELMTGNIQSLKNKIQILASEVEEEEERVKQMHQINSSGVLSLPELSQKTLKAPTLQKEILALIPNQNALLKDLDILHNSSQMKSMSTFIEEAYKKLDAS

SEQ ID NO: 196798 - DNA, 807 bp, Artificial Sequence
  derived and/or modified sequence
atgtccggtaaggctaacgcctccaaaaagaatgctcagcagctgaagagaaatccaaagagaaagaaggacaatgaggaagtggttctctccgaaaataaggtgagaaacaccgtcaaaaagaacaagaatcaccttaaagacctatcctccgaagggcagaccaagcatacgaatttgaaacacggcaaaactgctgcttcaaagagaaagacctggcagcccctgagcaagtctactcgagaccatctgcagaccatgatggagtcggtgattatgacaattctttctaatagtattaaggagaaagaggaaatccaataccatcttaatttcctgaaaaagaggctcctgcaacagtgtgagacacttaaggtcccgcctaaaaaaatggaggacttgactaatgtctcgtcactgctcaacatggagagagcacgtgataaagcgaatgaagagggtctggccctgttacaggaggagattgacaaaatggtggaaactactgagctgatgactggtaatatacagtcccttaaaaacaagattcagattctggccagcgaagtggaagaagaagaagagagggtgaaacagatgcatcagatcaacagctccggagtcctgtccctgccagagctgagccaaaaaacattgaaggccccgaccttgcagaaggagatcctggctcttatccctaatcagaatgcacttttgaaggacctggacatcctccacaactccagtcagatgaagagcatgagcacatttatagaagaagcttacaagaagctggatgcaagttag

SEQ ID NO: 196799 - DNA, 807 bp, Artificial Sequence
  derived and/or modified sequence
atgtctggcaaagcgaacgcctccaagaaaaacgctcagcagctaaagagaaaccctaagcggaagaaagataatgaggaagtggtgctgtctgagaataaagtgcgtaacacagtcaaaaagaacaagaaccacttaaaagacctgtcttccgagggacagacaaagcacacaaacttgaagcacggcaagacagccgcatccaagcgcaagacctggcaaccccttagcaagagcaccagggaccatctccagaccatgatggagtcagtgattatgactatattaagcaattcaataaaggaaaaggaagagatacagtatcatcttaatttcctcaagaagcggctactgcagcagtgcgaaactctcaaggtcccgcctaaaaagatggaggacttgacaaacgtgagctccctgctgaatatggagagagcccgagataaggcgaatgaagagggactggcattgcttcaggaggagattgataaaatggtggagactacagagctgatgaccggcaacatccagtccctcaagaataagatccagatactcgcttccgaagttgaagaagaagaagaaagggtcaagcaaatgcaccagatcaatagtagcggtgtgctgagcctcccggagctgagccagaagaccttaaaagcccctacattacaaaaagagattctcgctttaattccgaaccagaatgccctgcttaaggacctggacatcctgcacaattcttcccaaatgaagtcaatgtccacgtttatcgaagaagcttacaaaaagctggatgcttcatag

SEQ ID NO: 196800 - DNA, 807 bp, Artificial Sequence
  derived and/or modified sequence
atgtctgggaaggccaatgccagcaagaagaatgcccagcagctgaagaggaaccccaagaggaagaaggacaatgaggaggtggtgctgtctgagaacaaggtgaggaacacagtgaagaagaacaagaaccacctgaaggacctgagcagcgagggccagaccaagcacaccaacctgaagcacggcaagacagctgccagcaagaggaagacctggcagcccctgagcaagagcacccgggaccacctgcagaccatgatggagagcgtcatcatgaccatcctgagcaacagcatcaaggagaaggaggagatccagtaccacctgaacttcctgaagaagaggctgctgcagcagtgtgagaccctgaaggtgccccccaagaagatggaggacctgaccaacgtgagcagcctgctgaacatggagcgggcccgggacaaggccaatgaggagggcctggccctgctgcaggaggagattgacaagatggtggagaccacagagctgatgactggaaacatccagagcctgaagaacaagatccagatcctggccagcgaggtggaggaggaggaggagcgggtgaagcagatgcaccagatcaacagcagcggcgtgctgagcctgcctgagctgagccagaagaccctgaaggcccccaccctgcagaaggagatcctggccctgatccccaaccagaatgccctgctgaaggacctggacatcctgcacaacagcagccagatgaagtccatgagcaccttcatcgaggaggcctacaagaagctggatgccagctag

SEQ ID NO: 196801 - DNA, 807 bp, Artificial Sequence
  derived and/or modified sequence
atgagcggcaaggccaacgccagcaagaagaacgcccagcagctgaaacggaatcccaaaagaaagaaggacaacgaagaggtcgtgctctccgaaaacaaggttcgaaacacagttaaaaagaacaagaatcatttaaaggacttatcctcagaaggtcagacaaagcataccaacctgaagcatgggaagaccgctgccagcaagagaaaaacatggcagccattgagtaagagtacaagagaccatctccagacaatgatggagtccgtaataatgaccatcttgagcaacagtataaaagaaaaggaggagatacagtaccaccttaatttcttgaaaaagcggctgttacagcagtgtgagactttgaaggttccccccaagaaaatggaggatctgaccaatgtaagctctctgctgaatatggaaagagccagagataaggccaatgaggaaggcctggctctcttgcaggaggaaattgacaagatggttgaaactacagaactgatgactggtaacatccaatctctaaagaacaagatccagatccttgcttctgaggtcgaagaagaggaagagcgagtcaagcagatgcaccagattaactctagtggcgttctcagcctaccagaattatcacagaaaacactgaaagctccgactttgcagaaagaaatactggcgctcattcccaaccaaaatgcattactaaaagacctggacatcctgcataatagttctcagatgaagtcgatgtctacctttattgaagaagcctataaaaagttagatgcatcctag

SEQ ID NO: 196802 - DNA, 807 bp, Artificial Sequence
  derived and/or modified sequence
atgagcggcaaggccaacgccagcaagaagaacgcccagcagctgaaaagaaacccgaagaggaagaaggataatgaggaggttgttctgagcgagaataaggtacggaacactgtgaagaaaaataagaatcacctcaaagaccttagttcggagggccagacaaaacacaccaacctaaagcacggaaaaactgccgcttcgaaaagaaagacatggcagcctttgtctaaaagtaccagagaccacctgcagaccatgatggaatctgtgattatgactatactcagcaactcgatcaaagagaaagaggaaatccagtatcatttaaacttcttaaaaaagcgcctgctccagcagtgcgagaccctcaaggtaccgcccaagaaaatggaagatctcactaacgtttcaagcttactaaacatggaacgggcccgcgacaaagcaaacgaggagggattagcactgctacaagaggagattgacaaaatggtggagacaaccgaattaatgaccggcaatattcagtccctaaagaataaaatccaaatattagcctcagaggtggaggaggaggaagagcgcgttaagcaaatgcaccagattaattcgtctggtgtgctgtctctcccggagcttagtcagaaaacactgaaggctccgaccctgcagaaggagattctagctttgatccctaaccaaaacgctctacttaaggatctggatatcctgcataatagttcacaaatgaaatccatgtctacctttatcgaggaggcttataagaagctagacgcgtcctag

SEQ ID NO: 196803 - DNA, 807 bp, Artificial Sequence
  derived and/or modified sequence
atgtcaggaaaggctaatgcctctaagaaaaatgcacagcagttgaaacgcaaccccaagaggaagaaagataatgaggaggtggttctcagtgaaaacaaagtgcggaacactgtgaaaaagaacaaaaaccacctcaaggacctatctagcgagggacagactaagcacaccaatctgaaacacgggaagactgctgcttcaaagcgcaagacgtggcagccgctcagtaaatccacccgggaccacctgcaaactatgatggagtcagttattatgacgattctgagtaacagcatcaaggaaaaagaagaaatccagtaccatctcaattttctgaagaaacggttgctccagcagtgtgaaaccctcaaagttccaccgaagaagatggaggatctgaccaacgtgtcaagcctgctaaatatggagcgtgctcgcgataaagcaaatgaggaaggattggctctcctccaagaggagattgacaaaatggtggagactacagagctcatgaccggcaacatccagagcctcaaaaacaagatccagatcctggcaagcgaggtggaggaggaagaggagcgcgttaaacagatgcaccaaatcaacagctctggggtgttgagcctgcctgaattgagccagaagaccttaaaggcccctaccttacaaaaggaaatcctggctctcattcccaaccagaacgccctcctcaaagatcttgacattctgcataatagctcacaaatgaaatcaatgagcacttttatagaggaggcttacaaaaaactcgatgcaagctag

SEQ ID NO: 196804 - DNA, 807 bp, Artificial Sequence
  derived and/or modified sequence
atgagcgggaaagccaacgcttcaaaaaagaatgcccaacaactgaaaaggaatccaaaacggaagaaagacaatgaggaggttgtgctttctgaaaataaggtgcgcaacactgtaaaaaaaaacaagaaccatctgaaggatctatccagtgagggtcagacgaagcacacaaacctaaaacacgggaaaactgctgcttcgaaaaggaagacctggcaaccattgagtaagagtacacgtgaccaccttcagacgatgatggaatcagtgatcatgactattctgtctaacagtataaaggaaaaagaagaaatccagtatcacctgaatttccttaaaaagcggctcctccagcagtgcgagacgttgaaagttccaccaaagaagatggaggatctgaccaatgttagtagcttactgaacatggaacgcgcacgtgacaaggccaacgaggagggcctagctctcctgcaggaagagatcgacaagatggtggagaccacagaactgatgacagggaacattcagtcactgaagaacaagatccagatactggcatcggaggtcgaggaggaggaagaacgcgtaaagcaaatgcatcagataaattcttccggggttttgtcactgcctgagctttctcaaaaaacactcaaggcccctaccctccagaaggaaatcctagctctaatacccaaccaaaacgctctgctgaaggatttggacatcttgcacaacagttcacagatgaagagcatgtctacttttatagaggaagcttacaagaagctcgacgcctcatag

SEQ ID NO: 196805 - DNA, 1728 bp, Artificial Sequence
  derived and/or modified sequence
ctctgtttacgaatgtttgggcgcgaattactctaagcgcggctctcagaagggtgcaagaagaatcagtgcactgtgtttagatcaagatgtctggtaaagcaaatgcttccaagaaaaacgctcaacagttaaaaagaaatccaaagagaaaaaaggataatgaggaagttgtgttgtcagagaataaggttagaaacacagtgaaaaaaaataaaaatcatctgaaagatctgtcttctgaaggacaaacaaagcacactaacctaaaacacggaaagacagcagccagcaagagaaaaacctggcaacctctgtcaaagagtaccagagaccatttgcaaactatgatggaatcagtaataatgacaattttgagtaacagtattaaagaaaaagaagaaatacaataccatctcaacttcctgaagaaaagattgctacaacagtgtgaaactctgaaagtccctcccaaaaagatggaagatttaactaatgtatcaagtctactgaatatggaaagggcacgagacaaagctaatgaagaaggtctggcattactacaggaagaaatagataaaatggtagagaccacagagttaatgactgggaatattcagagcctaaagaacaaaattcagattctggcaagtgaggtggaagaagaagaggagagagtaaaacagatgcatcaaataaatagtagtggagtactctctcttccggaactttctcagaaaactctcaaagcacccacacttcagaaagaaattttggcgctaattccaaaccagaatgctcttctaaaggacttggatattcttcataattcatcacagatgaagagcatgtcaaccttcattgaagaagcctataagaaactggatgcatcttaaagagtgttttttttttagattgttccatattaatttaatgttcgtgaatttgtaaaactgttaacctatgattatatgtacagaggctaaggcttctgcaggatttattatctcctgatatgcactttaaaattagtctttgtagttctatcattagcatctaatgtagttctgaagactgtttttagcagttgccaaatctaggaaactaacatttatattgctgtatctataagtatttgcctaaaaccataaaataggaattgccttaaggatctagtagtttataatgcctgaatggaactcatttattggttaacagctcatatcaggagctgtgataagtaagtgtttacatacactgtctagtgcataaaaaccttagtgtttgctatcattcattctgtagccaatggcttacagtttctgtctggtcatctggaacttgaaaaatcctcaaatgccttcactcttttacctaactccctagtctttttgggaagtagttaagatatgcctgctatctttaactttggaggtagtatcaaaattttacttctttggttgtttagtgaattaatgttgaatattttctactgtcatcaaaacatattcccaaaaagtattaaaaaggaaccttagcacatttattttattaaaacaagaaaacccaaaatatataaaccttttcttattatgataataagcttatatatgtgaataagttataacctagtgtataaaaaattatttctaacaaactacagtatactgtcttgggtttttttttttttttttagtctgtaaaataaaatgactgcaattacttttt

SEQ ID NO: 196806 - DNA, 1701 bp, Artificial Sequence
  derived and/or modified sequence
ctcagaagggtgcaagaagaatcagtgttttttttttttcgaagcactgtgtttagatcaagatgtctggtaaagcaaatgcttccaagaaaaacgctcaacagttaaaaagaaatccaaagagaaaaaaggataatgaggaagttgtgttgtcagagaataaggttagaaacacagtgaaaaaaaataaaaatcatctgaaagatctgtcttctgaaggacaaacaaagcacactaacctaaaacacggaaagacagcagccagcaagagaaaaacctggcaacctctgtcaaagagtaccagagaccatttgcaaactatgatggaatcagtaataatgacaattttgagtaacagtattaaagaaaaagaagaaatacaataccatctcaacttcctgaagaaaagattgctacaacagtgtgaaactctgaaagtccctcccaaaaagatggaagatttaactaatgtatcaagtctactgaatatggaaagggcacgagacaaagctaatgaagaaggtctggcattactacaggaagaaatagataaaatggtagagaccacagagttaatgactgggaatattcagagcctaaagaacaaaattcagattctggcaagtgaggtggaagaagaagaggagagagtaaaacagatgcatcaaataaatagtagtggagtactctctcttccggaactttctcagaaaactctcaaagcacccacacttcagaaagaaattttggcgctaattccaaaccagaatgctcttctaaaggacttggatattcttcataattcatcacagatgaagagcatgtcaaccttcattgaagaagcctataagaaactggatgcatcttaaagagtgttttttttttagattgttccatattaatttaatgttcgtgaatttgtaaaactgttaacctatgattatatgtacagaggctaaggcttctgcaggatttattatctcctgatatgcactttaaaattagtctttgtagttctatcattagcatctaatgtagttctgaagactgtttttagcagttgccaaatctaggaaactaacatttatattgctgtatctataagtatttgcctaaaaccataaaataggaattgccttaaggatctagtagtttataatgcctgaatggaactcatttattggttaacagctcatatcaggagctgtgataagtaagtgtttacatacactgtctagtgcataaaaaccttagtgtttgctatcattcattctgtagccaatggcttacagtttctgtctggtcatctggaacttgaaaaatcctcaaatgccttcactcttttacctaactccctagtctttttgggaagtagttaagatatgcctgctatctttaactttggaggtagtatcaaaattttacttctttggttgtttagtgaattaatgttgaatattttctactgtcatcaaaacatattcccaaaaagtattaaaaaggaaccttagcacatttattttattaaaacaagaaaacccaaaatatataaaccttttcttattatgataataagcttatatatgtgaataagttataacctagtgtataaaaaattatttctaacaaactacagtatactgtcttgggtttttttttttttttttagtctgtaaaataaaatgactgcaattacttttt

SEQ ID NO: 196807 - DNA, 807 bp, Artificial Sequence
  derived and/or modified sequence
atgagcggcaaggccaacgccagcaagaagaacgcccagcagctgaagagaaaccccaagagaaagaaggacaacgaggaggtggtgctgagcgagaacaaggtgagaaacaccgtgaagaagaacaagaaccacctgaaggacctgagcagcgagggccagaccaagcacaccaacctgaagcacggcaagaccgccgccagcaagagaaagacctggcagcccctgagcaagagcaccagagaccacctgcagaccatgatggagagcgtgatcatgaccatcctgagcaacagcatcaaggagaaggaggagatccagtaccacctgaacttcctgaagaagagactgctgcagcagtgcgagaccctgaaggtgccccccaagaagatggaggacctgaccaacgtgagcagcctgctgaacatggagagagccagagacaaggccaacgaggagggcctggccctgctgcaggaggagatcgacaagatggtggagaccaccgagctgatgaccggcaacatccagagcctgaagaacaagatccagatcctggccagcgaggtggaggaggaggaggagagagtgaagcagatgcaccagatcaacagcagcggcgtgctgagcctgcccgagctgagccagaagaccctgaaggcccccaccctgcagaaggagatcctggccctgatccccaaccagaacgccctgctgaaggacctggacatcctgcacaacagcagccagatgaagagcatgagcaccttcatcgaggaggcctacaagaagctggacgccagctag

SEQ ID NO: 196808 - protein, 1389 aa, Artificial Sequence
  derived and/or modified sequence
MANRRVGRGCWEVSPTERRPPAGLRGPAAEEEASSPPVLSLSHFCRSPFLCFGDVLLGASRTLSLALDNPNEEVAEVKISHFPAADLGFSVSQRCFVLQPKEKIVISVNWTPLKEGRVREIMTFLVNDVLKHQAILLGNAEEQKKKKRSLWDTIKKKKISASTSHNRRVSNIQNVNKTFSVSQKVDRRYRQQTYFNKLKKITKTVQQRYWAMKERNIQFQRYNKLRHSVIYIQAIFRGKKARRHLKMMHIAATLIQRRFRTLMMRRRFLSLKKTAILIQRKYRAHLCTKHHLQFLQVQNAVIKIQSSYRRWMIRKRMREMHRAATFIQSTFRMHRLHMRYQALKQASVVIQQQYQANRAAKLQRQHYLRQRHSAVILQAAFRGMKTRRHLKSMHSSATLIQSRFRSLLVRRRFISLKKATIFVQRKYRATICAKHKLYQFLHLRKAAITIQSSYRRLMVKKKLQEMQRAAVLIQATFRMYRTYITFQTWKHASILIQQHYRTYRAAKLQRENYIRQWHSAVVIQAAYKGMKARQLLREKHKASIVIQSTYRMYRQYCFYQKLQWATKIIQEKYRANKKKQKVFQHNELKKETCVQAGFQDMNIKKQIQEQHQAAIIIQKHCKAFKIRKHYLHLRATVVSIQRRYRKLTAVRTQAVICIQSYYRGFKVRKDIQNMHRAATLIQSFYRMHRAKVDYETKKTAIVVIQNYYRLYVRVKTERKNFLAVQKSVRTIQAAFRGMKVRQKLKNVSEEKMAAIVNQSALCCYRSKTQYEAVQSEGVMIQEWYKASGLACSQEAEYHSQSRAAVTIQKAFCRMVTRKLETQKCAALRIQFFLQMAVYRRRFVQQKRAAITLQHYFRTWQTRKQFLLYRKAAVVLQNHYRAFLSAKHQRQVYLQIRSSVIIIQARSKGFIQKRKFQEIKNSTIKIQAMWRRYRAKKYLCKVKAACKIQAWYRCWRAHKEYLAILKAVKIIQGCFYTKLERTRFLNVRASAIIIQRKWRAILPAKIAHEHFLMIKRHRAACLIQAHYRGYKGRQVFLRQKSAALIIQKYIRAREAGKHERIKYIEFKKSTVILQALVRGWLVRKRFLEQRAKIRLLHFTAAAYYHLNAVRIQRAYKLYLAVKNANKQVNSVICIQRWFRARLQEKRFIQKYHSIKKIEHEGQECLSQRNRAASVIQKAVRHFLLRKKQEKFTSGIIKIQALWRGYSWRKKNDCTKIKAIRLSLQVVNREIREENKLYKRTALALHYLLTYKHLSAILEALKHLEVVTRLSPLCCENMAQSGAISKIFVLIRSCNRSIPCMEVIRYAVQVLLNVSKYEKTTSAVYDVENCIDILLELLQIYREKPGNKVADKGGSIFTKTCCLLAILLKTTNRASVSISQLPFFKIIFLWS

SEQ ID NO: 196809 - protein, 3477 aa, Artificial Sequence
  derived and/or modified sequence
MANRRVGRGCWEVSPTERRPPAGLRGPAAEEEASSPPVLSLSHFCRSPFLCFGDVLLGASRTLSLALDNPNEEVAEVKISHFPAADLGFSVSQRCFVLQPKEKIVISVNWTPLKEGRVREIMTFLVNDVLKHQAILLGNAEEQKKKKRSLWDTIKKKKISASTSHNRRVSNIQNVNKTFSVSQKVDRVRSPLQACENLAMNEGGPPTENNSLILEENKIPISPISPAFNECHGATCLPLSVRRSTTYSSLHASENRELLNVHSANVSKVSFNEKAVTETSFNSVNVNGQRGENSKLSLTPNCSSTLNITQSQIHFLSPDSFVNNSHGANNELELVTCLSSDMFMKDNSQPVHLESTIAHEIYQKILSPDSFIKDNYGLNQDLESESVNPILSPNQFLKDNMAYMCTSQQTCKVPLSNENSQVPQSPEDWRKSEVSPRIPECQGSKSPKAIFEELVEMKSNYYSFIKQNNPKFSAVQDISSHSHNKQPKRRPILSATVTKRKATCTRENQTEINKPKAKRCLNSAVGEHEKVINNQKEKEDFHSYLPIIDPILSKSKSYKNEVTPSSTTASVARKRKSDGSMEDANVRVAITEHTEVREIKRIHFSPSEPKTSAVKKTKNVTTPISKRISNREKLNLKKKTDLSIFRTPISKTNKRTKPIIAVAQSSLTFIKPLKTDIPRHPMPFAAKNMFYDERWKEKQEQGFTWWLNFILTPDDFTVKTNISEVNAATLLLGIENQHKISVPRAPTKEEMSLRAYTARCRLNRLRRAACRLFTSEKMVKAIKKLEIEIEARRLIVRKDRHLWKDVGERQKVLNWLLSYNPLWLRIGLETTYGELISLEDNSDVTGLAMFILNRLLWNPDIAAEYRHPTVPHLYRDGHEEALSKFTLKKLLLLVCFLDYAKISRLIDHDPCLFCKDAEFKASKEILLAFSRDFLSGEGDLSRHLGLLGLPVNHVQTPFDEFDFAVTNLAVDLQCGVRLVRTMELLTQNWDLSKKLRIPAISRLQKMHNVDIVLQVLKSRGIELSDEHGNTILSKDIVDRHREKTLRLLWKIAFAFQVDISLNLDQLKEEIAFLKHTKSIKKTISLLSCHSDDLINKKKGKRDSGSFEQYSENIKLLMDWVNAVCAFYNKKVENFTVSFSDGRVLCYLIHHYHPCYVPFDAICQRTTQTVECTQTGSVVLNSSSESDDSSLDMSLKAFDHENTSELYKELLENEKKNFHLVRSAVRDLGGIPAMINHSDMSNTIPDEKVVITYLSFLCARLLDLRKEIRAARLIQTTWRKYKLKTDLKRHQEREKAARIIQLAVINFLAKQRLRKRVNAALVIQKYWRRVLAQRKLLMLKKEKLEKVQNKAASLIQGYWRRYSTRQRFLKLKYYSIILQSRIRMIIAVTSYKRYLWATVTIQRHWRAYLRRKQDQQRYEMLKSSTLIIQSMFRKWKQRKMQSQVKATVILQRAFREWHLRKQAKEENSAIIIQSWYRMHKELRKYIYIRSCVVIIQKRFRCFQAQKLYKRRKESILTIQKYYKAYLKGKIERTNYLQKRAAAIQLQAAFRRLKAHNLCRQIRAACVIQSYWRMRQDRVRFLNLKKTIIKFQAHVRKHQQRQKYKKMKKAAVIIQTHFRAYIFAMKVLASYQKTRSAVIVLQSAYRGMQARKMYIHILTSVIKIQSYYRAYVSKKEFLSLKNATIKLQSTVKMKQTRKQYLHLRAAALFIQQCYRSKKIAAQKREEYMQMRESCIKLQAFVRGYLVRKQMRLQRKAVISLQSYFRMRKARQYYLKMYKAIIVIQNYYHAYKAQVNQRKNFLQVKKAATCLQAAYRGYKVRQLIKQQSIAALKIQSAFRGYNKRVKYQSVLQSIIKIQRWYRAYKTLHDTRTHFLKTKAAVISLQSAYRGWKVRKQIRREHQAALKIQSAFRMAKAQKQFRLFKTAALVIQQNFRAWTAGRKQCMEYIELRHAVLVLQSMWKGKTLRRQLQRQHKCAIIIQSYYRMHVQQKKWKIMKKAALLIQKYYRAYSIGREQNHLYLKTKAAVVTLQSAYRGMKVRKRIKDCNKAAVTIQSKYRAYKTKKKYATYRASAIIIQRWYRGIKITNHQHKEYLNLKKTAIKIQSVYRGIRVRRHIQHMHRAATFIKAMFKMHQSRISYHTMRKAAIVIQVRCRAYYQGKMQREKYLTILKAVKVLQASFRGVRVRRTLRKMQTAATLIQSNYRRYRQQTYFNKLKKITKTVQQRYWAMKERNIQFQRYNKLRHSVIYIQAIFRGKKARRHLKMMHIAATLIQRRFRTLMMRRRFLSLKKTAILIQRKYRAHLCTKHHLQFLQVQNAVIKIQSSYRRWMIRKRMREMHRAATFIQSTFRMHRLHMRYQALKQASVVIQQQYQANRAAKLQRQHYLRQRHSAVILQAAFRGMKTRRHLKSMHSSATLIQSRFRSLLVRRRFISLKKATIFVQRKYRATICAKHKLYQFLHLRKAAITIQSSYRRLMVKKKLQEMQRAAVLIQATFRMYRTYITFQTWKHASILIQQHYRTYRAAKLQRENYIRQWHSAVVIQAAYKGMKARQLLREKHKASIVIQSTYRMYRQYCFYQKLQWATKIIQEKYRANKKKQKVFQHNELKKETCVQAGFQDMNIKKQIQEQHQAAIIIQKHCKAFKIRKHYLHLRATVVSIQRRYRKLTAVRTQAVICIQSYYRGFKVRKDIQNMHRAATLIQSFYRMHRAKVDYETKKTAIVVIQNYYRLYVRVKTERKNFLAVQKSVRTIQAAFRGMKVRQKLKNVSEEKMAAIVNQSALCCYRSKTQYEAVQSEGVMIQEWYKASGLACSQEAEYHSQSRAAVTIQKAFCRMVTRKLETQKCAALRIQFFLQMAVYRRRFVQQKRAAITLQHYFRTWQTRKQFLLYRKAAVVLQNHYRAFLSAKHQRQVYLQIRSSVIIIQARSKGFIQKRKFQEIKNSTIKIQAMWRRYRAKKYLCKVKAACKIQAWYRCWRAHKEYLAILKAVKIIQGCFYTKLERTRFLNVRASAIIIQRKWRAILPAKIAHEHFLMIKRHRAACLIQAHYRGYKGRQVFLRQKSAALIIQKYIRAREAGKHERIKYIEFKKSTVILQALVRGWLVRKRFLEQRAKIRLLHFTAAAYYHLNAVRIQRAYKLYLAVKNANKQVNSVICIQRWFRARLQEKRFIQKYHSIKKIEHEGQECLSQRNRAASVIQKAVRHFLLRKKQEKFTSGIIKIQALWRGYSWRKKNDCTKIKAIRLSLQVVNREIREENKLYKRTALALHYLLTYKHLSAILEALKHLEVVTRLSPLCCENMAQSGAISKIFVLIRSCNRSIPCMEVIRYAVQVLLNVSKYEKTTSAVYDVENCIDILLELLQIYREKPGNKVADKGGSIFTKTCCLLAILLKTTNRASDVRSRSKVVDRIYSLYKLTAHKHKMNTERILYKQKKNSSISIPFIPETPVRTRIVSRLKPDWVLRRDNMEEITNPLQAIQMVMDTLGIPY

SEQ ID NO: 196810 - DNA, 88 bp, Artificial Sequence
  derived and/or modified sequence
agcaacttcagcaaaatctcaggatacaaaatcaatgtacaaaaatcacaagcattcttatacaccaacaacagacaaacagagagcc

SEQ ID NO: 196811 - DNA, 88 bp, Artificial Sequence
  derived and/or modified sequence
agcaacttcagcaaagtctcaggatacaaaatcaatgtacaaaaatcacaagcattcttatacaccaacaacagacaaacagagagcc

SEQ ID NO: 196812 - DNA, 88 bp, Artificial Sequence
  derived and/or modified sequence
agcaacttcagcaaagtttcaggatacaaaatcaatgtgcaaaaatcacaagcattcttatacaccaacaacagacaaacagagagcc

SEQ ID NO: 196813 - DNA, 88 bp, Artificial Sequence
  derived and/or modified sequence
agcaacttcagcaaagtctcaggatacaaaatcaatgtacaaaagtcacaagcattcttatacaccaacaaaagacaaacagagagcc

SEQ ID NO: 196814 - DNA, 89 bp, Artificial Sequence
  derived and/or modified sequence
aatggactcgaatggattaatcattgaacggaatcgaatggaatcatcatcggatggtaatgaatggaatcatcatcgaatggaatcgg

SEQ ID NO: 196815 - DNA, 4170 bp, Artificial Sequence
  derived and/or modified sequence
atggcgaaccgacgggttgggagggggtgttgggaggtatctccaacggagaggcgaccacctgccgggctgagggggcccgcagctgaggaagaagcaagcagtccccctgttctatctctgagccatttctgcagaagccctttcctatgtttcggagatgtgctgctgggggcgtccaggacccttagcttggctttagacaaccctaacgaggaagtggctgaggtcaaaatcagccatttccctgctgcggacctgggattcagcgtctcccagagatgcttcgtcctgcagccaaaagaaaaaatcgtcatcagcgtcaattggactcccctgaaggagggaagggtgagagagatcatgacttttcttgtaaatgatgtgctcaagcaccaggccatactgcttgggaacgccgaggagcagaagaagaaaaaacgctctctatgggacaccattaagaagaaaaagatcagcgccagcacaagccacaatcgccgcgtgtctaacatccaaaatgtaaacaaaactttttcagtttcgcagaaagtggaccgccgataccggcaacaaacctatttcaacaaactcaagaagatcacaaagacagtgcagcagagatattgggccatgaaggaaaggaacatccaattccaaaggtacaataagctcagacatagtgtcatttatatccaagctattttcaggggcaaaaaggcacgtaggcatcttaaaatgatgcatatcgccgccaccctgatccaacgtcgtttcaggactctcatgatgcggcgtaggtttctctctctgaagaagaccgccatccttattcagcggaaatatcgtgcacacctgtgtacaaagcatcacctccagtttctgcaagtgcagaatgccgttatcaagattcagtcttcgtacaggcgatggatgataagaaagaggatgcgcgagatgcacagagccgccacctttattcagtcaacctttcggatgcaccggctccacatgagataccaagccctgaagcaggcttcagtagtgattcagcagcagtaccaggcgaatagagccgctaaactgcagagacagcactatctgcgacaacgccattctgctgtgatactgcaggctgcgttcagggggatgaagacgcggcgtcatcttaagtcaatgcacagcagcgctacactgatccagagcagattcaggtctctcctcgtcagaagacgcttcataagccttaagaaggcgacgatctttgtccagaggaaataccgtgctactatttgcgccaagcacaaactgtatcagttcctccacctcaggaaagcagcgattaccatacagagtagttataggcgccttatggtgaagaaaaagctccaggaaatgcaacgcgctgccgtgctgattcaggccacctttcggatgtaccgaacctacatcaccttccagacctggaaacacgcttctattctcatacagcagcactataggacctaccgcgcagctaagctgcaaagagaaaattatatccggcagtggcacagtgccgtggtgattcaggcagcatataagggcatgaaagcccgacagctcctcagagaaaagcacaaggccagtatcgtcatacagtctacttacaggatgtatcggcagtactgcttttatcagaaactacaatgggcaacaaaaatcatccaggaaaaatatagggcaaataaaaaaaagcagaaagttttccagcacaatgaactcaagaaggagacttgcgtgcaggcaggcttccaagatatgaatatcaagaagcagatccaagaacagcatcaggcggctataataatccagaagcattgtaaagccttcaaaattcgcaagcactacctgcacctccgggccactgtggtctctatccaaagacggtacagaaaactgaccgccgtgcggacccaggctgtgatctgcattcaatcgtattatcgggggtttaaagtccggaaagacatccaaaatatgcatcgcgcagccaccctgatacagtctttctataggatgcacagggccaaagtagactacgagacaaaaaagacggctatagtggtgatacagaactattacagactgtacgttcgtgtgaagactgagaggaagaacttcctcgctgtgcagaaatcagttagaactatccaggctgccttccgaggcatgaaggtgagacagaagctcaaaaatgtgtccgaggaaaagatggcagccattgtgaatcaatccgctttgtgctgttaccgttccaagacacagtatgaggcggtccaaagtgaaggagtgatgattcaagaatggtacaaggcatcagggctcgcctgcagccaggaagccgagtaccacagtcaaagcagagccgctgttaccatccagaaggccttctgtaggatggttacccgcaagctcgaaacccagaaatgcgctgcgctgaggatccagttttttctgcaaatggctgtgtaccggagacggttcgtgcaacaaaagcgggccgcgataacactgcagcactactttcgaacatggcagactcggaagcaattccttctgtaccgcaaagccgccgttgtcctgcagaatcactacagagcttttctttcagctaagcaccagaggcaagtttacctgcagatacgctcctccgtgattatcatccaggcacggtcaaagggatttattcagaaaaggaagttccaggagatcaaaaattccaccattaagattcaggccatgtggcgtagatatagagccaagaagtacctgtgcaaggtgaaggccgcatgcaagatccaggcctggtatagatgctggcgcgcacacaaagaataccttgctattttgaaggcggtcaagattattcagggctgtttttatacgaaactggagagaactaggttcctcaacgtacgcgcctctgctatcataattcagagaaagtggcgcgccatattgcctgctaagattgctcatgaacatttcctgatgatcaaacgccacagagcagcctgcctcattcaggctcactatcgcgggtataagggacgccaggttttcctccgccagaagtctgccgccttgataattcagaaatatatcagggctcgcgaagcaggcaaacacgaaaggatcaagtacatcgagttcaagaaaagcacagtcatcctacaggccctcgttaggggctggctggtcagaaagcgtttccttgagcagagggccaagattaggttactccattttacagcggcggcctactaccacctaaacgcagtgcgaattcagcgcgcctacaagctgtacctggcagtgaaaaatgccaacaagcaggtgaattcagtgatttgcatccagaggtggttcagagccaggctgcaggaaaaaaggtttatacaaaagtaccactccataaagaaaatcgagcacgagggtcaggaatgcctgagccagagaaacagagccgccagcgtaatacagaaagccgtaagacactttctcttacggaagaagcaggagaagttcacttctggtatcatcaagatccaggctctatggaggggatacagctggaggaaaaagaatgactgtactaagatcaaggccatcaggctgtcactacaggtggtgaaccgagaaataagagaggaaaacaaactgtataagaggaccgccttggcattgcactatctgctgacctataagcatctgtcagccattttagaggcgctcaaacacctggaagtcgttacccggctatctccactctgctgcgaaaatatggcgcagtctggagccatttctaagatcttcgtgctgattagaagctgtaataggagcatcccctgcatggaggtgattaggtatgctgtgcaagtcttattgaatgtgtccaagtacgagaagactacttcagcggtttatgatgtggagaactgtatcgatattctactcgaactgcttcagatctaccgtgagaaacccggcaacaaggtcgctgataagggcggatccatcttcactaaaacatgttgcctgcttgcaatcctgttaaaaacgactaatcgggccagtgtgagtatctcccagctgccttttttcaaaataattttcctgtggtcctag

SEQ ID NO: 196816 - DNA, 10434 bp, Artificial Sequence
  derived and/or modified sequence
atggccaacagaagggtaggaaggggctgttgggaagtttcccccaccgagcgtcggccccccgcgggcctccggggacctgccgctgaggaagaagcctcttcacctccagtgttatcactgtcacatttttgtcggtccccgtttctctgcttcggtgatgtcctccttggcgcttctagaacactgtctttggcactggacaatcctaacgaggaagttgctgaggtgaaaattagccacttccctgctgccgatctgggattttccgtttcacagcgttgcttcgtgctgcagccgaaggaaaagatagttattagcgtgaattggacaccacttaaagaggggagagttcgagagatcatgaccttcctggttaatgatgtcctgaagcatcaggctattcttctagggaatgctgaagagcagaagaagaagaagcgatccctgtgggataccatcaagaaaaaaaaaatatcagctagtacgtcccataacaggagggtttctaacatccaaaacgtaaataaaaccttttcagtgagtcaaaaagtagatcgggtgaggtcccccctgcaagcctgtgaaaacctcgcaatgaatgagggcggacccccgacggagaacaattcactgatactcgaggagaacaaaatccccatctcacccattagtcctgcttttaatgaatgccatggggccacctgtctgccccttagtgttcgtcggtctacaacttacagctcactacatgcctctgagaatcgcgagttgttaaacgtccatagcgctaatgttagcaaggtctctttcaatgaaaaggccgtaacagaaaccagcttcaactcagtcaatgtgaatggccaacggggggaaaattctaaattatccttaactcccaactgcagcagcaccctgaacattacccagtcacaaattcattttttgtcccccgattctttcgtgaataattcacatggcgctaacaacgagctggagcttgtgacctgcctgtctagcgatatgttcatgaaagataactctcagcccgttcacctcgagtccactattgcccacgaaatttaccagaaaatcctgtctcccgactctttcattaaagacaattatggactgaaccaggatttggaaagcgaatctgttaatcctatactgagccccaatcagttcctcaaggataacatggcatacatgtgcacctcccagcagacatgcaaagtcccattgagcaatgagaacagtcaggtgccccagagccctgaagactggaggaaatctgaagtcagcccccgcatacctgaatgtcaagggtccaaaagccctaaagcgatattcgaagagttggtcgagatgaaatcaaactactattcttttatcaagcagaataaccccaaatttagcgctgtgcaagatataagtagccacagtcataacaagcagccgaagcggcgaccaatcctgtctgccaccgttactaaacggaaggccacctgtacccgcgaaaaccagactgagatcaacaagcccaaagccaaaagatgtctgaacagtgcagtcggagaacacgaaaaagtgatcaataatcagaaggagaaggaggatttccacagctatttgcccatcatagaccccattctctcaaagtccaaaagctacaagaacgaggtcacaccatctagtaccacggccagtgttgctcgcaagaggaagagcgatgggagcatggaagatgctaacgtgagagtcgcaatcaccgagcatactgaggtccgggagatcaaaaggattcatttcagcccctccgagcccaaaacatctgccgtcaagaaaacaaaaaatgtcaccacgcctatcagcaaacgcatctctaaccgcgaaaagctcaacttaaagaaaaaaaccgatctcagcatcttcagaactcccatcagcaaaaccaacaagaggactaagcctatcatagctgtggcccagtcctctctcacattcatcaagccactcaaaactgacataccccgacacccgatgccttttgctgccaagaatatgttttacgacgagagatggaaagagaaacaagaacagggattcacctggtggctgaattttatcttgacgccggacgatttcaccgtgaaaacaaacatcagcgaagtgaacgccgccacacttttgttggggatcgagaatcagcacaagatctccgtacctcgtgcccccacgaaggaggagatgtcactgcgcgcctacactgcgagatgcagattgaaccgcctgagacgcgctgcctgtagactttttacctccgagaaaatggttaaggcgattaaaaaactggagatcgagatcgaggcaaggaggctgatagtgcggaaagacaggcatctgtggaaagatgtcggggagcgccagaaggtgctgaactggctgctgagttataaccctctgtggctgcggatcggccttgaaaccacgtacggagagcttatctcgttagaagacaactctgacgtaactgggctcgccatgtttatactcaataggttgctgtggaatcctgacatcgcagccgagtatcgccaccctacagttccacacctgtatcgggacgggcacgaagaggcactgtctaaatttaccctgaaaaagctgctgctcctagtctgttttctggactacgccaaaatttcacgcctgatagatcacgacccttgtctgttctgcaaagacgccgagtttaaggcctccaaggaaattctgcttgcgttttctagagatttccttagtggcgagggagacttgagtcgacatctagggctgttagggctccctgttaatcatgtgcagactcccttcgacgagtttgattttgccgtgaccaacttggccgtagatttgcaatgtggagtgagattagtacggacgatggagctcctcacgcaaaactgggatctatctaaaaaactgcggataccagccatttccagattacagaagatgcataacgtggacattgtgctacaggtcctcaagtcccggggaatagaactgtccgacgagcatggcaataccattttatcaaaggacattgtcgataggcacagagaaaaaaccctgcgtctgctttggaaaattgcctttgcattccaagtggacatatcactgaatttagaccaattgaaggaggagatcgccttcctgaaacacactaaaagcataaaaaaaacaatttcactgctgtcctgtcatagcgatgacctgatcaacaagaaaaaagggaagagagattccggctctttcgaacagtactccgaaaacatcaaactgctaatggattgggtcaatgccgtctgtgccttttacaacaaaaaggtcgaaaacttcacagttagcttttcagacgggcgggtcttatgctatctcatccatcattatcacccttgctatgttcctttcgacgcaatctgtcagaggaccacccaaactgtggagtgtactcaaacgggatctgtagttcttaatagtagctcagaatccgatgactcatctttagacatgtccttaaaagcatttgaccatgagaataccagcgagttatataaggaactgcttgaaaatgaaaagaaaaacttccatctagtccgctctgccgtgcgcgacctcggtggaattcccgcaatgatcaaccactctgacatgagtaacaccattcccgacgagaaggtcgtgatcacctacttgagctttctgtgcgccagattgttagacctgcgaaaggaaatcagagccgctcgcttaattcagaccacctggcgcaaatataagctcaagacggatctgaaacggcaccaggaacgcgagaaagccgctcggattattcagctggctgtgataaattttctggccaaacagcgcctgcggaaacgggtgaatgcagctctcgtcatccagaagtactggaggcgggtgttagcacaacgcaaactgctcatgctgaagaaggagaagctagagaaggtgcagaacaaggctgcctctctaatacagggatattggcgtcgctactctactagacaacggtttctgaaactgaagtactatagtatcattctccaatcacgcatacgaatgattatcgccgttacctcatataaaagatatctgtgggctaccgtcaccattcaaagacactggcgggcctatctgagacgcaagcaagaccagcaaagatatgaaatgcttaagtccagcacactgattatacagagcatgttcaggaagtggaagcagcgtaaaatgcagagccaagtaaaagccactgtcattcttcaaagggcgtttagagagtggcacctgcgcaagcaggctaaggaggagaattctgccattatcatacaatcttggtaccggatgcataaagagttgcgcaagtacatttacatcagatcctgcgtcgtaatcatccagaaacggttccgctgtttccaggcacagaaactgtataagcgccgcaaggagtctatcctgaccattcagaaatactataaggcttatctaaaagggaaaatcgagcgcactaactacctgcagaaacgggctgcggccatccagttacaagctgctttccgtcgcttgaaggcccacaacttgtgtagacagattagggcggcctgcgtgatccagtcttactggcggatgaggcaggaccgggttcggttcttgaatcttaagaaaaccataatcaagttccaggcgcacgttcgtaagcaccaacaacgtcagaaatataagaagatgaaaaaagcagcagtaattattcagacacatttcagggcctacatttttgcaatgaaggtgttggcaagctaccaaaaaacaaggagcgctgtcattgttttgcagagcgcataccgggggatgcaggctcgcaagatgtatattcatatccttacttccgtaattaaaattcagtcttattatagagcttatgtatctaaaaaagagttcctgagccttaagaatgccactattaaactgcaaagcacggtgaagatgaagcagactcgcaaacagtatctgcacctgcgggctgccgcactgttcatccaacagtgttacagaagtaagaagatcgcggcccaaaagcgggaggagtatatgcaaatgcgtgagtcatgtattaagctccaggcttttgtgaggggatatctggtgagaaaacaaatgcgtttgcagagaaaagccgtgatctccctgcaatcatatttcagaatgaggaaggcccgccagtattatcttaagatgtataaagccataattgtgatccaaaactactaccatgcctataaagcccaggtgaaccagcgcaagaatttcctacaagtaaagaaggctgcgacgtgtttacaggctgcataccgagggtacaaggttaggcagctcatcaagcaacagtcgatcgccgccctgaaaatacagagcgctttccgaggatataacaaaagagtcaagtaccagagcgttctacagtctattattaagattcagcgatggtatcgcgcgtataagactctgcacgatacccggacacatttcctcaaaactaaggccgccgtgatctctcttcaaagcgcctatagagggtggaaagtgagaaaacagatccggcgggagcaccaggcagctctcaagatccaatctgcctttcggatggccaaggctcagaagcagttccgattgtttaaaacggccgccctcgtgatccagcaaaatttccgggcctggaccgctggccgaaagcagtgcatggagtatattgagctcaggcacgccgtgctggtccttcagtccatgtggaaaggcaaaaccctccgtcgacagctccagcggcagcacaagtgcgctatcattatccagtcctactaccggatgcatgtccaacaaaaaaagtggaagatcatgaaaaaagcggccttgctcattcagaagtattatcgggcatattccatcggtagggaacagaatcatctctaccttaaaaccaaagccgcagtggtgactcttcagtccgcttaccgcgggatgaaagtgagaaaaaggataaaggactgtaacaaagcggctgtcaccatacagtcaaagtatagggcatacaagaccaagaaaaaatacgctacttatcgggcatcagccatcattatccagcggtggtaccgtgggataaaaattacgaatcatcagcataaagagtacttgaatctcaaaaagacggccatcaaaattcagtctgtatatcgcggcattagggtcaggaggcatatccagcatatgcatagggcagctacctttatcaaagctatgtttaagatgcaccagagtcggatcagttaccacaccatgagaaaggctgctattgtcatccaagtaagatgtagggcgtattatcagggaaaaatgcagcgggaaaaataccttactattctaaaagccgtaaaggttttacaggcctcctttagaggagtgagagtgaggcgaaccctgcgcaaaatgcaaactgctgcaactctcatccagagcaactaccgccgctaccggcaacagacctatttcaacaagctgaaaaagattaccaagacggtacagcaacgctactgggcgatgaaggagcgaaatattcagtttcagaggtataacaaactcagacattctgtgatttacattcaggccattttcagaggcaaaaaggccagaaggcatctgaaaatgatgcacatcgctgccacattgatccagagacgctttaggaccctgatgatgagaagaaggttccttagcctgaagaagacagcaatactgattcagcgcaagtatagagcccacctgtgtaccaagcaccatttgcagttcctgcaggttcagaacgctgtgataaagatacagtcctcttatcgccggtggatgatccgtaagcgaatgagagaaatgcaccgggctgccacctttattcaatcgaccttccgcatgcaccgtttgcatatgaggtatcaggcgctcaaacaggcctctgttgtgatccagcagcagtatcaagccaacagggcagccaagcttcagaggcagcactacttacggcaaaggcattctgctgtcatcctccaggcagcatttcggggaatgaaaacccgcagacacctcaagtctatgcatagtagcgccactcttatccaatctcgcttcagatctctgctcgtgagacgcaggttcatctcccttaaaaaggccactatttttgttcagaggaagtacagagcaactatctgcgccaagcacaaactctaccaattcttgcacctgcgtaaagcagcgatcaccattcaatctagctacaggcgccttatggtcaagaaaaagctgcaggagatgcagcgcgcagccgtcctgatccaagccacatttcggatgtatcgtacttacattacctttcagacctggaagcacgcctccattctgatccagcagcattacaggacctacagagctgctaagctccaacgtgagaactacatcaggcagtggcacagcgccgtggtcatccaggctgcttacaaaggcatgaaggccaggcagctcctccgtgaaaaacacaaagcctccatcgtcatccagtctacataccgtatgtacaggcaatactgtttttaccagaaactgcagtgggcgactaaaatcatccaagaaaagtatcgcgctaacaaaaaaaagcagaaggtttttcagcacaatgagctgaagaaggagacctgcgtccaggccggcttccaggacatgaatattaagaaacagatacaggaacagcaccaggcggctatcatcattcagaagcattgcaaagcttttaaaatcaggaaacattatctgcacctcagggctactgtcgtgtccatccagaggcggtaccgaaaactgacagcggtgaggacacaagctgtcatctgtattcagtcatactacagggggtttaaggtacgaaaggatatccagaacatgcatcgggccgcaacccttattcagtccttttaccgcatgcaccgcgcgaaggtcgattacgagaccaaaaaaactgcaatagttgtgatccagaattactacaggctttacgtgagagtgaagacggagcgaaagaatttcttagcagtgcaaaagagcgtacgaaccatacaagccgccttccgcggcatgaaggtgcggcaaaagttgaagaatgtgtccgaagaaaaaatggctgccattgttaatcaatctgccctctgctgctaccgcagtaagacacaatacgaggcagtgcagtcagagggggtaatgatccaggagtggtacaaggcctctggcctagcgtgcagccaagaggcagaataccactcccagtctagggcagcagtgactattcaaaaagcattttgcagaatggtgacccggaagctagaaacgcaaaagtgtgcggccctgcgtatccaattttttctacagatggccgtgtatagacggcggtttgtgcagcagaagcgcgccgctataacgttgcagcactattttcgcacttggcagactagaaagcagtttctgttgtatagaaaggctgctgtggtgctccaaaaccattatagggctttcctgtccgccaagcaccaacggcaggtgtacctgcagatccggagtagtgtgattatcatccaggctagaagtaaaggctttatccagaagagaaagtttcaggagataaagaatagcacaatcaaaatccaggcaatgtggcgccgctatagggccaagaagtacctttgcaaggttaaggccgcttgtaaaatccaggcttggtatcgctgctggcgggctcacaaggaatatcttgctatattgaaagcagtgaaaattatccagggctgcttttacaccaaactcgagcggacccggtttctgaacgtgcgtgcgtcagctatcattatacagcgcaaatggagagcaatcctccctgccaagatcgcacatgaacacttccttatgatcaaaagacaccgcgcagcttgcctgatccaagcccattaccgaggctataaaggccggcaggtttttctccgacagaagtccgctgctcttatcattcaaaagtatattcgtgcaagagaggccgggaaacacgaaaggatcaagtatatcgagttcaagaagagtaccgtgatactccaagccttagttaggggctggctcgtgagaaaacggttcctggagcagagagccaagatacggctgctccacttcacagcagccgcctattatcacctaaacgctgtgagaatccaaagggcttacaaattataccttgcagtgaaaaatgcaaacaagcaggtcaatagcgttatctgcatacagcgctggtttcgcgcccggctgcaggagaaaaggttcattcagaagtatcactctattaaaaagattgaacacgaaggccaggagtgcctgtctcagcgcaatagggcagcttccgtgattcagaaggcggtgcggcacttcctgcttaggaaaaagcaggagaagtttacctctggaattatcaagatccaggccctttggagaggttatagctggcgaaagaagaatgactgtacgaagatcaaggcgattagacttagcctccaggtggtgaatagggagatccgtgaggagaacaagctatataagagaacagctcttgctttgcattatctcctgacttataagcatctttctgctatattagaggcacttaaacacctcgaggtcgtgacgcgattatctccactgtgctgtgaaaatatggcccagtctggtgctatcagcaaaatctttgtactgatacggtcttgtaatcggagcatcccttgcatggaggtgataaggtatgctgtgcaagtacttctcaatgtgtctaaatatgagaagactacaagcgcagtgtacgacgttgaaaactgtatcgacatcctgttagagctgctgcaaatctatcgggaaaaacccggaaacaaagtggctgataaggggggatcaattttcacgaagacatgctgcctgctggcaattctcctgaagacgaccaaccgggcgtctgatgtgcggtcccgatcgaaggtcgtggaccgaatttattccctgtacaagctgactgcacacaaacacaaaatgaacacagagagaatcctatataagcagaagaagaactcaagcatctctattccttttatccctgaaacccctgttcggacccgaatcgtgtcacgcttaaagcccgactgggtgttacgcagggataatatggaggaaattacaaatcctctccaggctatccaaatggttatggacacccttggcatcccctattag

SEQ ID NO: 196817 - DNA, 4170 bp, Artificial Sequence
  derived and/or modified sequence
atggccaacagaagagtgggccggggctgctgggaggtgagccccacagagcggcggcccccagctggcctgcggggccctgctgctgaggaggaggccagcagcccccctgtgctgagcctgagccacttctgccgcagccccttcctgtgctttggagatgtgctgctgggcgccagcaggaccctgagcctggccctggacaaccccaatgaggaggtggccgaggtgaagatcagccacttccctgctgctgacctgggcttctctgtgtcccagcgctgctttgtgctgcagcccaaggagaagatcgtcatctctgtgaactggacccccctgaaggagggccgggtgcgggagatcatgaccttcctggtgaatgatgtgctgaagcaccaggccatcctgctgggcaatgctgaggagcagaagaagaagaagaggagcctgtgggacaccatcaagaagaagaagatcagcgccagcaccagccacaacagaagagtgagcaacatccagaatgtgaacaagaccttctctgtgtcccagaaggtggaccggcgctaccggcagcagacctacttcaacaagctgaagaagatcaccaagacagtgcagcagcgctactgggccatgaaggagaggaacatccagttccagcgctacaacaagctgcggcacagcgtcatctacatccaggccatcttccggggcaagaaggcccggcggcacctgaagatgatgcacatcgccgccaccctcatccagaggcgcttccgcaccctgatgatgagaagacgcttcctgagcctgaagaagacagccatcctgatccagaggaagtaccgggcccacctgtgcaccaagcaccacctgcagttcctgcaggtgcagaatgctgtgatcaagatccagagcagctaccgccgctggatgatcaggaagaggatgagggagatgcacagagctgccaccttcatccagagcaccttcaggatgcaccggctgcacatgagataccaggccctgaagcaggcctctgtggtgatccagcagcagtaccaggccaacagagctgccaagctgcagaggcagcactacctgcggcagaggcacagcgctgtgatcctgcaggccgccttccggggcatgaagaccaggaggcacctgaagtccatgcacagcagcgccaccctcatccagagccgcttccgcagcctgctggtgagaagacgcttcatcagcctgaagaaggccaccatctttgtgcagaggaagtaccgggccaccatctgtgccaagcacaagctgtaccagttcctgcacctgaggaaggccgccatcaccatccagagcagctacagaaggctgatggtgaagaagaagctgcaggagatgcagagagctgctgtgctgatccaggccaccttcaggatgtaccgcacctacatcaccttccagacctggaagcacgccagcatcctgatccagcagcactaccgcacctacagagctgccaagctgcagcgggagaactacatccggcagtggcacagcgctgtggtgatccaggccgcctacaagggcatgaaggcccggcagctgctgcgggagaagcacaaggccagcatcgtcatccagagcacctacaggatgtaccggcagtactgcttctaccagaagctgcagtgggccaccaagatcatccaggagaagtaccgggccaacaagaagaagcagaaggtgttccagcacaatgagctgaagaaggagacctgtgtgcaggccggcttccaggacatgaacatcaagaagcagatccaggagcagcaccaggccgccatcatcatccagaagcactgcaaggccttcaagatcaggaagcactacctgcacctgcgggccaccgtggtgtccatccagaggcgctacaggaagctgacagctgtgaggacccaggccgtcatctgcatccagagctactaccggggcttcaaggtgaggaaggacatccagaacatgcacagagctgccaccctcatccagagcttctacaggatgcaccgggccaaggtggactatgagaccaagaagacagccatcgtggtgatccagaactactaccgcctgtatgtgcgggtgaagacagagaggaagaacttcctggccgtgcagaagtctgtgaggaccatccaggccgccttccggggcatgaaggtgcggcagaagctgaagaatgtgtctgaggagaagatggccgccatcgtgaaccagagcgccctgtgctgctaccgcagcaagacccagtatgaggccgtgcagagcgagggcgtgatgatccaggagtggtacaaggccagcggcctggcctgcagccaggaggccgagtaccacagccagagcagagctgctgtgaccatccagaaggccttctgcaggatggtgaccaggaagctggagacccagaagtgtgccgccctgcgcatccagttcttcctgcagatggctgtgtacagaagaagatttgtgcagcagaagagagctgccatcaccctgcagcactacttccgcacctggcagaccaggaagcagttcctgctgtacaggaaggctgctgtggtgctgcagaaccactaccgggccttcctgagcgccaagcaccagaggcaggtgtacctgcagatccgcagcagcgtcatcatcatccaggcccggagcaagggcttcatccagaagaggaagttccaggagatcaagaacagcaccatcaagatccaggccatgtggaggcgctaccgggccaagaagtacctgtgcaaggtgaaggccgcctgcaagatccaggcctggtaccgctgctggagggcccacaaggagtacctggccatcctgaaggctgtgaagatcatccagggctgcttctacaccaagctggagaggacccgcttcctgaatgtgcgggccagcgccatcatcatccagaggaagtggagggccatcctgcctgccaagatcgcccacgagcacttcctgatgatcaagaggcaccgggccgcctgcctgatccaggcccactaccggggctacaagggccggcaggtgttcctgcggcagaagtctgctgccctgatcatccagaagtacatccgggcccgggaggccggcaagcatgagcgcatcaagtacatcgagttcaagaagagcaccgtcatcctgcaggccctggtgcggggctggctggtgaggaagcgcttcctggagcagagggccaagatccggctgctgcacttcaccgctgctgcctactaccacctgaatgctgtgcgcatccagagggcctacaagctgtacctggccgtgaagaatgccaacaagcaggtgaacagcgtcatctgcatccagcgctggttccgggcccggctgcaggagaagcgcttcatccagaagtaccacagcatcaagaagattgagcacgagggccaggagtgcctgagccagaggaacagagctgccagcgtcatccagaaggctgtgcgccacttcctgctgaggaagaagcaggagaagttcaccagcggcatcatcaagatccaggccctgtggaggggctacagctggaggaagaagaatgactgcaccaagatcaaggccatccggctgagcctgcaggtggtgaaccgggagatccgggaggagaacaagctgtacaagaggacagccctggccctgcactacctgctgacctacaagcacctgagcgccatcctggaggccctgaagcacctggaggtggtgacccggctgagccccctgtgctgtgagaacatggcccagagcggggccatcagcaagatctttgtgctgatccgcagctgcaacagaagcatcccctgcatggaggtgatccgctatgctgtgcaggtgctgctgaatgtgtccaaatatgagaagaccaccagcgctgtgtatgatgtggagaactgcatcgacatcctgctggagctgctgcagatctaccgggagaagccaggcaacaaggtggccgacaagggcggcagcatcttcaccaagacctgctgcctgctggccatcctgctgaagaccaccaacagagcctctgtgtccatcagccagctgcccttcttcaagatcatcttcctgtggagctag

SEQ ID NO: 196818 - DNA, 10434 bp, Artificial Sequence
  derived and/or modified sequence
atggccaacagaagagtgggccggggctgctgggaggtgagccccacagagcggcggcccccagctggcctgcggggccctgctgctgaggaggaggccagcagcccccctgtgctgagcctgagccacttctgccgcagccccttcctgtgctttggagatgtgctgctgggcgccagcaggaccctgagcctggccctggacaaccccaatgaggaggtggccgaggtgaagatcagccacttccctgctgctgacctgggcttctctgtgtcccagcgctgctttgtgctgcagcccaaggagaagatcgtcatctctgtgaactggacccccctgaaggagggccgggtgcgggagatcatgaccttcctggtgaatgatgtgctgaagcaccaggccatcctgctgggcaatgctgaggagcagaagaagaagaagaggagcctgtgggacaccatcaagaagaagaagatcagcgccagcaccagccacaacagaagagtgagcaacatccagaatgtgaacaagaccttctctgtgtcccagaaggtggacagagtgcgcagccccctgcaggcctgtgagaacctggccatgaatgaaggaggccccccaacagagaacaacagcctcatcctggaggagaacaagatccccatcagccccatcagccctgccttcaatgaatgccacggggccacctgcctgcccctgtctgtgcggcgcagcaccacctacagcagcctgcacgccagcgagaaccgggagctgctgaatgtgcacagcgccaacgtgtccaaggtgtccttcaatgagaaggctgtgacagagaccagcttcaacagcgtgaatgtgaatggccagagaggagagaacagcaagctgagcctgacccccaactgcagcagcaccctgaacatcacccagagccagatccacttcctgagcccagacagctttgtgaacaacagccacggggccaacaatgagctggagctggtgacctgcctgagcagtgacatgttcatgaaggacaacagccagcctgtgcacctggagagcaccatcgcccacgagatctaccagaagatcctgagcccagacagcttcatcaaggacaactacggcctgaaccaggacctggagagcgagagcgtgaaccccatcctgagccccaaccagttcctgaaggacaacatggcctacatgtgcaccagccagcagacctgcaaggtgcccctgagcaatgaaaacagccaggtgccccagagccctgaggactggaggaagtctgaggtgagcccccgcatccctgagtgccagggcagcaagagccccaaggccatctttgaggagctggtggagatgaagagcaactactacagcttcatcaagcagaacaaccccaagttctctgctgtgcaggacatcagcagccacagccacaacaagcagcccaagagaagacccatcctgagcgccaccgtgaccaagaggaaggccacctgcacccgggagaaccagacagagatcaacaagcccaaggccaagcgctgcctgaacagcgctgtgggggagcacgagaaggtgatcaacaaccagaaggagaaggaggacttccacagctacctgcccatcatcgaccccatcctgagcaagagcaagagctacaagaatgaggtgacccccagcagcaccacagcctctgtggccaggaagaggaagagtgatggctccatggaggatgccaacgtgcgggtggccatcacagagcacacagaggtgcgggagatcaagaggatccacttcagccccagcgagcccaagaccagcgctgtgaagaagaccaagaatgtgaccacccccatcagcaagaggatcagcaaccgggagaagctgaacctgaagaagaagacagacctgagcatcttccgcacccccatcagcaagaccaacaagaggaccaagcccatcatcgctgtggcccagagcagcctgaccttcatcaagcccctgaagacagacatccccaggcaccccatgccctttgctgccaagaacatgttttatgatgagcgctggaaggagaagcaggagcagggcttcacctggtggctgaacttcatcctgaccccagatgacttcaccgtgaagaccaacatcagcgaggtgaatgctgccaccctgctgctgggcatcgagaaccagcacaagatctctgtgccccgggcccccaccaaggaggagatgagcctgcgggcctacacagcccgctgccgcctgaaccggctgcggcgggccgcctgccgcctcttcaccagcgagaagatggtgaaggccatcaagaagctggagattgaaattgaggcccggcggctgattgtgaggaaggacagacacctgtggaaggatgtgggggagcggcagaaggtgctgaactggctgctgagctacaaccccctgtggctgcgcatcggcctggagaccacctacggggagctgatcagcctggaggacaacagtgatgtgacaggcctggccatgttcatcctgaaccggctgctgtggaacccagacattgctgctgagtaccgccaccccaccgtgccccacctgtacagagatggccacgaggaggccctgagcaagttcaccctgaagaagctgctgctgctggtgtgcttcctggactatgccaagatcagccggctgattgaccatgacccctgcctcttctgcaaggatgctgagttcaaggccagcaaggagatcctgctggccttcagccgggacttcctgtctggagagggggacctgagccgccacctgggcctgctgggcctgcctgtgaaccacgtgcagaccccatttgatgaatttgattttgctgtgaccaacctggccgtggacctgcagtgtggggtgcggctggtgaggaccatggagctgctgacccagaactgggacctgagcaagaagctgcgcatcccagccatcagccggctgcagaagatgcacaacgtggacatcgtgctgcaggtgctgaagagccggggcatcgagctgagtgatgaacatggcaacaccatcctgagcaaggacatcgtggacagacaccgggagaagaccctgcggctgctgtggaagatcgcctttgccttccaggtggacatcagcctgaacctggaccagctgaaggaggagatcgccttcctgaagcacaccaagagcatcaagaagaccatcagcctgctgagctgccacagtgatgacctgatcaacaagaagaagggcaagagggacagcggcagctttgagcagtacagcgagaacatcaagctgctgatggactgggtgaatgctgtgtgtgccttctacaacaagaaggtggagaacttcaccgtgtccttcagtgatggccgggtgctgtgctacctgatccaccactaccacccctgctacgtgccctttgatgccatctgccagaggaccacccagacagtggagtgcacccagacaggctctgtggtgctgaacagcagcagcgagagtgatgacagcagcctggacatgagcctgaaggcctttgaccacgagaacaccagcgagctgtacaaggagctgctggagaatgagaagaagaacttccacctggtgcgctctgctgtgcgggacctgggcggcatcccagccatgatcaaccacagcgacatgagcaacaccatcccagatgagaaggtggtgatcacctacctgtccttcctgtgtgcccggctgctggacctgaggaaggagatccgggccgcccggctcatccagaccacctggaggaagtacaagctgaagacagacctgaagaggcaccaggagcgggagaaggccgcccgcatcatccagctggccgtcatcaacttcctggccaagcagaggctgaggaagagggtgaatgctgccctggtgatccagaagtactggaggagagtgctggcccagaggaagctgctgatgctgaagaaggagaagctggagaaggtgcagaacaaggccgccagcctcatccagggctactggaggcgctacagcacccggcagcgcttcctgaagctgaagtactacagcatcatcctgcagagccgcatccgcatgatcatcgctgtgaccagctacaagcgctacctgtgggccaccgtgaccatccagaggcactggagggcctacctgcggaggaagcaggaccagcagagatatgagatgctgaagagcagcaccctcatcatccagagcatgttcaggaagtggaagcagaggaagatgcagagccaggtgaaggccaccgtcatcctgcagagggccttccgggagtggcacctgaggaagcaggccaaggaggagaacagcgccatcatcatccagagctggtacaggatgcacaaggagctgaggaagtacatctacatccgcagctgtgtggtgatcatccagaagcgcttccgctgcttccaggcccagaagctgtacaagaggaggaaggagagcatcctgaccatccagaagtactacaaggcctacctgaagggcaagattgaaagaaccaactacctgcagaagagagctgctgccatccagctgcaggccgccttccggcggctgaaggcccacaacctgtgccggcagatccgggccgcctgcgtcatccagagctactggaggatgaggcaggacagagtgcgcttcctgaacctgaagaagaccatcatcaagttccaggcccacgtgaggaagcaccagcagaggcagaagtacaagaagatgaagaaggctgctgtgatcatccagacccacttccgggcctacatctttgccatgaaggtgctggccagctaccagaagaccaggtctgctgtgattgtgctgcagagcgcctaccggggcatgcaggccaggaagatgtacatccacatcctgaccagcgtcatcaagatccagagctactaccgggcctacgtgtccaagaaggagttcctgagcctgaagaatgccaccatcaagctgcagagcacagtgaagatgaagcagaccaggaagcagtacctgcacctgcgggccgccgccctcttcatccagcagtgctaccgcagcaagaagattgctgcccagaagcgggaggagtacatgcagatgagggagagctgcatcaagctgcaggcctttgtgcggggctacctggtgaggaagcagatgaggctgcagaggaaggccgtcatcagcctgcagagctacttcaggatgaggaaggcccggcagtactacctgaagatgtacaaggccatcatcgtcatccagaactactaccacgcctacaaggcccaggtgaaccagaggaagaacttcctgcaggtgaagaaggccgccacctgcctgcaggccgcctaccggggctacaaggtgcggcagctgatcaagcagcagagcattgctgccctgaagatccagagcgccttccggggctacaacaagagggtgaagtaccagagcgtgctgcagagcatcatcaagatccagcgctggtaccgggcctacaagaccctgcatgacaccaggacccacttcctgaagaccaaggctgctgtgatcagcctgcagagcgcctaccggggctggaaggtgaggaagcagatcagaagagagcaccaggccgccctgaagatccagagcgccttcaggatggccaaggcccagaagcagttccgcctcttcaagacagctgccctggtgatccagcagaacttccgggcctggacagctggcaggaagcagtgcatggagtacatcgagctgcggcatgctgtgctggtgctgcagagcatgtggaagggcaagaccctgcggcggcagctgcagaggcagcacaagtgtgccatcatcatccagagctactacaggatgcacgtgcagcagaagaagtggaagatcatgaagaaggccgccctgctgatccagaagtactaccgggcctacagcatcggccgggagcagaaccacctgtacctgaagaccaaggctgctgtggtgaccctgcagagcgcctaccggggcatgaaggtgaggaagaggatcaaggactgcaacaaggctgctgtgaccatccagagcaagtaccgggcctacaagaccaagaagaagtatgccacctaccgggccagcgccatcatcatccagcgctggtaccggggcatcaagatcaccaaccaccagcacaaggagtacctgaacctgaagaagacagccatcaagatccagagcgtgtaccggggcatccgggtgcggcggcacatccagcacatgcacagagctgccaccttcatcaaggccatgttcaagatgcaccagagccgcatctcctaccacaccatgaggaaggccgccatcgtcatccaggtgcgctgccgggcctactaccagggcaagatgcagcgggagaagtacctgaccatcctgaaggctgtgaaggtgctgcaggccagcttccggggcgtgcgggtgcggaggaccctgaggaagatgcagacagctgccaccctcatccagagcaactaccgccgctaccggcagcagacctacttcaacaagctgaagaagatcaccaagacagtgcagcagcgctactgggccatgaaggagaggaacatccagttccagcgctacaacaagctgcggcacagcgtcatctacatccaggccatcttccggggcaagaaggcccggcggcacctgaagatgatgcacatcgccgccaccctcatccagaggcgcttccgcaccctgatgatgagaagacgcttcctgagcctgaagaagacagccatcctgatccagaggaagtaccgggcccacctgtgcaccaagcaccacctgcagttcctgcaggtgcagaatgctgtgatcaagatccagagcagctaccgccgctggatgatcaggaagaggatgagggagatgcacagagctgccaccttcatccagagcaccttcaggatgcaccggctgcacatgagataccaggccctgaagcaggcctctgtggtgatccagcagcagtaccaggccaacagagctgccaagctgcagaggcagcactacctgcggcagaggcacagcgctgtgatcctgcaggccgccttccggggcatgaagaccaggaggcacctgaagtccatgcacagcagcgccaccctcatccagagccgcttccgcagcctgctggtgagaagacgcttcatcagcctgaagaaggccaccatctttgtgcagaggaagtaccgggccaccatctgtgccaagcacaagctgtaccagttcctgcacctgaggaaggccgccatcaccatccagagcagctacagaaggctgatggtgaagaagaagctgcaggagatgcagagagctgctgtgctgatccaggccaccttcaggatgtaccgcacctacatcaccttccagacctggaagcacgccagcatcctgatccagcagcactaccgcacctacagagctgccaagctgcagcgggagaactacatccggcagtggcacagcgctgtggtgatccaggccgcctacaagggcatgaaggcccggcagctgctgcgggagaagcacaaggccagcatcgtcatccagagcacctacaggatgtaccggcagtactgcttctaccagaagctgcagtgggccaccaagatcatccaggagaagtaccgggccaacaagaagaagcagaaggtgttccagcacaatgagctgaagaaggagacctgtgtgcaggccggcttccaggacatgaacatcaagaagcagatccaggagcagcaccaggccgccatcatcatccagaagcactgcaaggccttcaagatcaggaagcactacctgcacctgcgggccaccgtggtgtccatccagaggcgctacaggaagctgacagctgtgaggacccaggccgtcatctgcatccagagctactaccggggcttcaaggtgaggaaggacatccagaacatgcacagagctgccaccctcatccagagcttctacaggatgcaccgggccaaggtggactatgagaccaagaagacagccatcgtggtgatccagaactactaccgcctgtatgtgcgggtgaagacagagaggaagaacttcctggccgtgcagaagtctgtgaggaccatccaggccgccttccggggcatgaaggtgcggcagaagctgaagaatgtgtctgaggagaagatggccgccatcgtgaaccagagcgccctgtgctgctaccgcagcaagacccagtatgaggccgtgcagagcgagggcgtgatgatccaggagtggtacaaggccagcggcctggcctgcagccaggaggccgagtaccacagccagagcagagctgctgtgaccatccagaaggccttctgcaggatggtgaccaggaagctggagacccagaagtgtgccgccctgcgcatccagttcttcctgcagatggctgtgtacagaagaagatttgtgcagcagaagagagctgccatcaccctgcagcactacttccgcacctggcagaccaggaagcagttcctgctgtacaggaaggctgctgtggtgctgcagaaccactaccgggccttcctgagcgccaagcaccagaggcaggtgtacctgcagatccgcagcagcgtcatcatcatccaggcccggagcaagggcttcatccagaagaggaagttccaggagatcaagaacagcaccatcaagatccaggccatgtggaggcgctaccgggccaagaagtacctgtgcaaggtgaaggccgcctgcaagatccaggcctggtaccgctgctggagggcccacaaggagtacctggccatcctgaaggctgtgaagatcatccagggctgcttctacaccaagctggagaggacccgcttcctgaatgtgcgggccagcgccatcatcatccagaggaagtggagggccatcctgcctgccaagatcgcccacgagcacttcctgatgatcaagaggcaccgggccgcctgcctgatccaggcccactaccggggctacaagggccggcaggtgttcctgcggcagaagtctgctgccctgatcatccagaagtacatccgggcccgggaggccggcaagcatgagcgcatcaagtacatcgagttcaagaagagcaccgtcatcctgcaggccctggtgcggggctggctggtgaggaagcgcttcctggagcagagggccaagatccggctgctgcacttcaccgctgctgcctactaccacctgaatgctgtgcgcatccagagggcctacaagctgtacctggccgtgaagaatgccaacaagcaggtgaacagcgtcatctgcatccagcgctggttccgggcccggctgcaggagaagcgcttcatccagaagtaccacagcatcaagaagattgagcacgagggccaggagtgcctgagccagaggaacagagctgccagcgtcatccagaaggctgtgcgccacttcctgctgaggaagaagcaggagaagttcaccagcggcatcatcaagatccaggccctgtggaggggctacagctggaggaagaagaatgactgcaccaagatcaaggccatccggctgagcctgcaggtggtgaaccgggagatccgggaggagaacaagctgtacaagaggacagccctggccctgcactacctgctgacctacaagcacctgagcgccatcctggaggccctgaagcacctggaggtggtgacccggctgagccccctgtgctgtgagaacatggcccagagcggggccatcagcaagatctttgtgctgatccgcagctgcaacagaagcatcccctgcatggaggtgatccgctatgctgtgcaggtgctgctgaatgtgtccaaatatgagaagaccaccagcgctgtgtatgatgtggagaactgcatcgacatcctgctggagctgctgcagatctaccgggagaagccaggcaacaaggtggccgacaagggcggcagcatcttcaccaagacctgctgcctgctggccatcctgctgaagaccaccaacagagccagtgatgtgcgcagccgcagcaaggtggtggaccgcatctacagcctgtacaagctgacagcccacaagcacaagatgaacacagagcgcatcctgtacaagcagaagaagaacagcagcatcagcatccccttcatccctgagacccctgtgaggaccagaattgtgtcccggctgaagccagactgggtgctgcggcgggacaacatggaggagatcaccaaccccctgcaggccatccagatggtgatggacaccctgggcatcccctactag

SEQ ID NO: 196819 - DNA, 4170 bp, Artificial Sequence
  derived and/or modified sequence
atggccaaccggcgggtgggccggggctgctgggaggtgagccccaccgagcggcggccacccgccggacttcgagggccagcagctgaggaagaagccagttcccctcctgtgttgagtctgtctcatttttgtcgatctccgtttttatgcttcggggacgtactgttgggagccagccgtaccctctcgttggctcttgataatcctaacgaagaagtcgctgaggtgaagatctctcattttcccgcagcagacctcggcttcagcgtttctcagaggtgcttcgtcttgcagcctaaggaaaagattgtaattagtgtcaattggaccccactgaaagaaggacgtgtgagagagatcatgacttttctagtgaacgacgtgctgaaacatcaggccattctgctcggaaatgccgaggaacagaaaaaaaagaagcgatccctctgggacaccattaaaaagaagaagatttccgctagcacatctcataatcgccgggtcagcaacatccaaaatgtgaacaagacattttcagtctcgcagaaagttgatagaaggtatcggcagcagacatacttcaacaaactgaaaaaaatcactaaaactgtgcaacagagatactgggcaatgaaggaacgaaacattcagtttcagcgctacaacaagctacgccactcagtcatctatatccaggccatcttcaggggaaagaaggcccggagacacctgaagatgatgcacattgctgctaccttgatccaacgtagatttcggaccctgatgatgagacggcgttttctgagccttaagaagaccgccatcttgattcagcggaagtacagagctcacttatgcacaaagcatcatcttcagttcctgcaggtgcagaacgcagttatcaaaattcagtcatcttacaggcggtggatgattagaaagagaatgcgcgagatgcatagagctgcaactttcatccagagcacctttagaatgcatcgtcttcacatgaggtatcaggccctgaagcaggcgtctgtggttatccagcagcagtaccaggcaaaccgggccgcaaagctgcagcgtcagcactatctgcgccagaggcatagtgctgtgattctgcaggcagcgtttagaggaatgaagacccggaggcatctgaaatcaatgcactccagcgctactttaattcaatctagattccgctcacttctcgtacgcaggcgtttcatatctctgaagaaggcaaccatcttcgttcagagaaagtatcgcgccactatctgcgcaaaacacaagctgtaccagtttctacacctgcgcaaagccgcaatcaccatacagtctagctacagaagacttatggtgaaaaaaaagctgcaggaaatgcaacgagcagctgtacttatccaggcaacatttaggatgtacagaacatacatcactttccagacttggaagcatgcttccatcctgatccagcagcattacagaacctaccgagctgcaaagctccaacgggaaaattatatccggcagtggcactccgcagtcgtcattcaggcagcttataagggtatgaaggccagacagcttctgcgcgaaaaacacaaagcaagtattgttattcagagcacctaccgtatgtacagacagtattgcttctaccaaaagctgcagtgggcgactaagatcattcaggagaagtatagagctaataaaaaaaaacaaaaggtcttccaacataacgaactgaagaaagaaacctgcgtgcaggctggttttcaggacatgaacatcaaaaaacaaattcaggagcagcaccaggccgctatcatcatacagaaacactgtaaggcgtttaaaatacgtaaacattatctacatctcagggccactgtagtgtccatccagcgtagataccgtaagctgactgcagtgcgcactcaggccgtgatatgtatccagtcatactaccggggctttaaagtgaggaaggatatccagaatatgcacagggcggccaccctcatacagtccttttaccgtatgcatcgggctaaagtggactatgagacaaagaaaaccgcaatagttgttatccagaattattacaggctctatgtgagagtgaaaaccgagcgaaagaattttctggctgttcagaaatccgtgaggactattcaggcggcttttcgaggaatgaaggtgcgacagaagctcaaaaacgttagtgaggaaaaaatggccgcaattgtgaatcagtctgcactgtgctgctaccgaagtaagacacagtacgaagctgtgcagagcgagggggtcatgatacaagagtggtacaaggcttcggggcttgcatgctcccaggaggccgagtatcacagtcagtcaagggccgctgtaactatacaaaaagccttctgcagaatggttacacgcaagctagagacccaaaaatgcgccgcccttcgtattcagttttttctccaaatggccgtgtatagaaggcgattcgtgcagcagaagagagccgctattaccttacagcactattttagaacatggcagactaggaaacagttcctgttatacaggaaggcggctgtagtgctccagaaccattatagggcctttctcagcgccaagcaccaacgccaggtctatctgcagattagatctagtgtcataatcattcaagctcgatcgaagggcttcatccagaaacggaagtttcaggagatcaaaaatagcacaattaagatccaggctatgtggcgaaggtacagagccaaaaaatacctctgtaaggtgaaagccgcctgcaagattcaggcgtggtatagatgttggcgagcacataaagagtatttagccatccttaaagccgtcaaaataattcagggttgcttctataccaaactagaacggacgagatttctcaacgtccgagcaagcgcaatcattatccagaggaaatggagggctatcctacctgctaagattgcccatgagcatttcttaatgattaagcgccaccgggccgcatgtctcatccaggcccactacagaggctataaagggcgtcaagttttcctgcgccagaagagcgccgctctgattatccagaaatatatcagagcccgcgaagccggcaagcatgaacggataaagtacatcgaatttaagaaatccacagtaattctgcaggcgctcgtccggggatggcttgtccgcaagcgcttccttgaacagagagcaaaaatcaggctcctccactttaccgccgctgcctactatcatcttaacgctgttcggatccaacgggcttataagttgtacctcgccgttaaaaatgctaacaaacaggtcaatagcgtcatctgtattcagcgctggtttagagccagactgcaagaaaagcgctttatccagaagtatcattccattaagaagatcgagcacgaaggccaggagtgtctttctcagcgaaaccgggccgcaagcgtgattcagaaagccgtgaggcatttccttctccggaaaaagcaggagaaatttacctctggaataattaagatacaggctctgtggagggggtattcctggcgtaagaagaacgactgtaccaaaattaaagccattcgcctgagtttgcaggtcgtgaacagggaaattagggaagaaaacaaactatacaaacgtactgccctggcactgcattacttgttgacctacaaacatctttcagccatactggaagcactgaagcatctcgaagtcgtgacccgcctctcacccctttgctgcgagaacatggcgcaaagcggagctatctccaagatattcgtgctcataaggtcgtgtaatcgctccatcccttgcatggaggttatcaggtatgcagtccaggtcctgttgaacgtaagcaaatacgaaaaaactacatccgcagtctacgatgtagaaaactgtattgatatactgctcgagctgctccaaatttaccgggaaaagcccgggaacaaagtggcagataagggagggtctatcttcacaaaaacttgctgcctgctcgcaatcctgctgaaaactaccaacagagcctcagttagcataagccagttgcctttcttcaagattatctttttgtggtcctag

SEQ ID NO: 196820 - DNA, 10434 bp, Artificial Sequence
  derived and/or modified sequence
atggccaaccggcgggtgggccggggctgctgggaggtgagccccaccgagaggagaccccctgccggactccgggggcccgctgccgaggaggaggcttcttctcccccagtattgtctctaagtcacttttgtcgctctccgttcctatgcttcggggacgtcctcctgggcgccagcagaactctctccctggccctggacaatcccaatgaagaggttgctgaggtgaagataagtcactttcctgctgccgacctaggcttttccgtgagccaaaggtgcttcgtgcttcagcctaaggagaagatcgtgatcagcgtaaattggacccctctcaaagaaggaagggtacgggaaattatgacctttctggtaaatgacgtactaaaacaccaggccatactccttggcaatgcagaggaacagaaaaagaaaaaacgaagcttatgggatactatcaaaaaaaaaaagatttcggccagtactagccataataggcgcgtgtccaatatccagaacgttaacaagacattttcagtcagtcaaaaagtagatcgggtaaggtcacctctgcaggcttgtgagaacctggccatgaacgaggggggaccacctactgaaaataactcactcattttggaagagaataaaataccaatctcaccaataagtcctgcgtttaatgagtgtcatggagcaacttgcttgcctctttccgttcggcgaagcacaacttactcctctcttcacgcctcagagaatagagagctgctgaacgtacatagtgccaacgtttctaaagtgagcttcaatgaaaaagcggtgactgagacctccttcaacagcgtcaatgtgaacggtcaacgcggcgagaattcaaaactgtccctcacacccaattgctcatccaccctgaacatcacgcaaagccagatccactttctgagtcctgattcattcgtgaataactcacacggcgccaataatgaactcgaactggtgacgtgcctgtcttccgatatgttcatgaaagataacagccagccggttcacctcgaaagcacgatcgctcacgaaatctaccaaaaaattctgagtcctgactcatttattaaggataactacggcctgaatcaagacttggagagcgaaagtgtgaatcccatattgtctcctaatcagttcctcaaggataacatggcatacatgtgtaccagccaacaaacttgcaaggtcccactttccaatgagaatagccaggtcccacaatctcctgaggattggcgaaaatccgaggtatctccccgcatccctgaatgtcaaggctctaaaagtcctaaggctatctttgaggagttggtcgagatgaagtcaaattattactcatttataaaacaaaataatccaaagttcagtgcagtacaagatatttcatctcattcccataacaagcagccaaagcggaggcccatcctcagcgccaccgttactaagagaaaggccacgtgtaccagggagaatcagaccgaaattaataagcccaaggcaaaacggtgtcttaactcagcggttggcgagcacgagaaggtaataaacaaccagaaggaaaaggaggacttccattcatacctgccgatcattgatcctatactgtcaaaaagtaagtcatataagaatgaggtcactccatcctcaacaactgcctccgtcgcccggaaaagaaaaagcgacggatccatggaagacgcgaacgtcagagtggccattacggagcatactgaggtaagggagattaaacgtatccacttcagtccttccgagccgaaaacatcagcagtgaaaaaaactaagaacgtgactaccccaatttccaagcggattagcaatcgagaaaagcttaatctgaaaaaaaagaccgacctgtccatctttcgcactccgattagcaagactaacaagcgcacaaaacctataattgcagtggctcagtcaagtcttacctttatcaagccattaaagaccgatattccaaggcacccgatgcccttcgccgctaagaacatgttctatgatgaaagatggaaggaaaagcaagagcagggcttcacttggtggcttaacttcatcctgacacctgatgattttaccgtcaaaacaaacatcagtgaggttaacgccgctacactattgctgggcatagaaaatcaacataaaattagcgtgccacgggcccccaccaaagaggaaatgagccttcgggcctacacagctaggtgcagactgaacaggctccgtagagcagcatgccgcctttttaccagtgagaagatggttaaagccattaagaaattggagatcgagatcgaggctcggcgactgatcgtccggaaagacagacatctgtggaaggatgtgggggagagacaaaaggtgctgaattggctgctgtcttacaatcctttatggttgcgcattggactcgagaccacatacggcgagttgataagccttgaggataattccgacgtgacagggctcgccatgttcatccttaataggctgctgtggaaccccgatattgctgccgagtaccgtcatcccacggtgccgcacctctaccgcgatggtcacgaagaggccctgtctaagttcacccttaagaagttactactgctggtgtgcttcctagattacgccaagattagcagactgatcgatcatgatccctgtttgttttgcaaggacgcagaattcaaggcaagtaaggagattctgcttgccttttctcgcgactttctgtccggtgaaggcgacctctcacggcatcttgggctgttaggactgcctgttaatcacgtgcagacacccttcgacgagttcgacttcgctgtcaccaatctggcggtcgaccttcagtgcggagtgaggctagttcgcacaatggagctgctcactcagaactgggatttgtccaagaaactgagaattcccgccatttcacgtctacaaaaaatgcacaatgtggatatcgtactgcaggtgctaaagagcaggggcattgaactgagtgatgagcacggtaataccatcttgtcaaaggacatcgtagaccggcaccgggagaaaaccctccgcctcctgtggaagatcgccttcgcttttcaagtagatatatccctgaatctggaccagctaaaagaggagatcgccttcctgaaacacactaagagtatcaaaaaaacaataagtctcttgtcttgccattcagacgatctcattaataaaaaaaagggcaaacgagacagcggtagctttgagcagtattccgaaaatatcaaactgctgatggactgggtaaatgctgtgtgtgccttttacaacaagaaggtggagaacttcacagtgtcattctctgatggcagggtactgtgctatctgattcatcattatcatccatgctacgtgccttttgatgccatctgtcagcgaacgacacagaccgtggagtgtacacagaccggctccgtagtcttgaactcctccagtgagtccgatgacagcagcctggatatgagcctgaaagcctttgaccacgaaaacacgtcagaactgtacaaggagctactagagaatgagaagaaaaatttccatctggtgcgctcagctgttcgcgacctgggcggaattccggccatgattaaccattctgatatgtccaacactatacccgatgagaaagtggtcatcacttacctctccttcctctgtgcccgcctgctggacttgcgtaaagagattcgtgcggccaggctaatccagacgacatggagaaagtataagctgaaaactgaccttaaacggcatcaggagcgagagaaagctgcaaggatcatccaacttgccgttatcaattttctggcgaagcagaggctgcgtaaacgggtgaacgcggcactggttattcagaaatactggcgtcgggtcctagctcagcgtaaactattgatgctaaagaaagagaaactcgagaaagtgcagaataaggctgcttccctgattcaaggctactggcgccgctacagtaccagacagagatttctcaagctcaagtactacagcatcatcctgcagtctcggattaggatgatcattgcggtgacatcctacaagcgctatctgtgggctaccgtaacgatccaaagacattggagagcctatttaagacggaagcaggaccagcaacggtacgagatgctcaagtcttcgactcttataatacaatctatgttcaggaaatggaagcagagaaagatgcaaagccaggtaaaggccacagtcatcctacagcgagcctttagggaatggcacttgcggaagcaagcgaaggaagagaacagtgcaatcatcatccagagctggtatagaatgcacaaagaattaagaaaatacatatatattcgctcttgcgtggtgatcatccaaaagagattccgatgctttcaggcacagaaactgtataaacgcaggaaggagtccattttaactatccagaaatattacaaggcgtacctgaagggcaagatcgagaggaccaactaccttcagaaaagggcagcagctatccagttacaggctgcattccgtcggttaaaggcccacaatttgtgccgtcagattcgtgccgcatgcgtcatccagtcgtattggagaatgagacaggacagggtgcggttcctcaacctcaaaaagactatcatcaaatttcaggcacacgttaggaagcaccagcagcggcagaaatataagaaaatgaagaaggctgctgtgattattcaaacccatttccgtgcctacatttttgcaatgaaagtcttggccagttaccagaagactcgctccgctgtgattgtgttgcaaagtgcatatcgaggaatgcaggctcgtaaaatgtacatccatattcttaccagcgttattaagatccaaagctattacagagcttatgtgagcaagaaagaattcctgagcctcaaaaacgcgactatcaaacttcagtccacagtcaagatgaaacagacaaggaaacagtacctgcacttgcgtgcagctgcacttttcatccaacagtgctaccgctccaagaagatcgcagcccagaaaagggaggagtacatgcagatgcgcgaaagctgcatcaagctccaggcctttgtgcgaggatacttagtgcggaaacagatgaggttacagcgcaaagctgttatatccctacagtcctacttcaggatgaggaaagcacggcagtactacctcaaaatgtacaaggccatcatagttatccagaattactatcatgcctacaaagcacaagttaatcagagaaaaaactttctgcaagtgaagaaggccgcaacatgtttacaagcagcgtacaggggttacaaggttcggcaacttataaagcagcagagcatcgccgcgctcaaaattcagtccgcattccggggctacaataaacgggtgaagtaccagtctgtcctccaaagcattatcaagatccaaaggtggtacagagcctacaagacgttgcatgatacccgcactcattttttgaaaaccaaggcagcggtgatctcccttcagtccgcatatcgtggctggaaagttaggaaacaaattcgaagagagcaccaggcggcattaaagatccagagtgcctttcgcatggccaaagctcagaaacagtttcgtttgttcaagaccgcagcattagtgattcagcagaattttcgtgcctggacagccgggcgtaaacagtgtatggagtatatagaattgaggcacgctgtattagtactccaaagcatgtggaagggaaaaactctccgtcgtcagctccagagacagcataaatgtgccatcataatccagagctactaccggatgcacgtccagcagaaaaaatggaaaatcatgaaaaaggctgccctgttaatccagaagtactatagagcatattctattggaagggagcaaaaccacttgtatttaaagaccaaggccgccgtcgttacacttcagtccgcctacagaggtatgaaggtgcggaaacgaattaaagattgtaacaaagctgctgttaccatccagtctaagtatcgggcctataagactaaaaagaagtatgccacatacagagcttctgctattattatccagaggtggtacagagggattaaaatcaccaaccaccagcacaaagagtacttgaatttgaagaagacagccattaagatacagtctgtttaccggggcattagagttcggagacacatccaacacatgcatagagccgccacctttatcaaagcaatgtttaaaatgcatcagtcccgtatatcctaccacactatgcgcaaagcagcaatcgttatacaagtgaggtgtagggcctactaccaaggaaagatgcagcgggagaagtatctgaccatcctcaaggctgtgaaggtactacaagcatcctttcggggtgtgcgcgtcagacgtactctgagaaaaatgcagacagctgctaccctaatccaaagcaactatcggaggtatagacagcagacctattttaacaaactgaagaagataactaaaactgtgcagcaaaggtactgggctatgaaggaacgaaacattcaattccagcggtataacaagcttcgacactctgttatttatatccaggctattttccggggtaagaaggctagacgccaccttaaaatgatgcacatcgctgcgactcttattcagcgccgattcagaacattgatgatgaggcggaggttcttgagtctgaagaaaaccgctattctgattcagaggaagtaccgcgctcacctctgcaccaaacaccacttacagtttctccaggtgcagaacgccgtcatcaaaatccagagcagctacagaagatggatgattcggaagcggatgagagagatgcacagggcggccacctttattcagtcgacattccgcatgcaccgactgcacatgcggtatcaagccctcaagcaggctagcgtggtaatacagcaacagtaccaagccaatagagctgcaaaactgcagcgacaacattatctgaggcaacggcactctgcagtgattctgcaggctgcttttcgcggcatgaagactcggcgacacctgaaaagtatgcattcatctgctacccttatacagagccgttttcggtctttgctggtgcgcaggaggtttatctccctcaagaaagccacaatcttcgttcagcgtaaataccgcgcaactatttgtgccaagcacaagttgtaccaattcctgcacctgagaaaggcggccattacaatacagagcagctataggcgcctaatggtgaaaaagaaattgcaggagatgcagcgggctgctgtcctgattcaggctaccttccgtatgtaccgaacctacatcacatttcaaacttggaaacatgcgtccattctgattcagcagcactaccgcacctatcgcgctgctaagctgcagcgggagaattacattagacagtggcattctgctgtcgttatccaggccgcttataaaggtatgaaggcccgacagctgctccgtgaaaagcataaagcctccattgtgatacaaagcacttacagaatgtaccgccagtactgtttctaccagaagctgcagtgggcaaccaagatcatccaggagaagtatagagctaacaaaaaaaagcagaaagtgttccaacacaatgagctcaaaaaggagacatgcgttcaggcgggtttccaggacatgaatatcaagaagcaaatccaggagcagcaccaggctgcaattatcatacagaaacattgcaaggcttttaagataaggaaacattatttacacttacgcgctacggtcgtgtcgattcagagaagataccggaagctgaccgctgtgaggacacaggcagtcatctgtattcagtcctactacagagggttcaaggtgcgcaaagatattcagaatatgcatagggcggcaacactcatccaaagtttctatagaatgcaccgcgctaaggtggattatgagaccaaaaaaaccgccatagtggtgatacaaaactactaccgcctgtacgtgcgagttaaaaccgaaagaaagaacttccttgccgtccagaagtccgtgagaacaatccaggctgctttccgcgggatgaaagtgcgacagaagttaaaaaatgtgtctgaggagaagatggcagctatcgttaatcagtccgctctgtgctgctatcgctctaagactcaatatgaagcagttcaaagcgaaggagtcatgatccaagaatggtacaaggcatcggggctggcttgtagccaggaggcggagtaccactctcaaagtcgtgctgcagtcactatccagaaggccttctgcagaatggtgacaaggaagttagaaacacagaagtgcgccgccctcaggattcaattttttctgcagatggcagtgtaccgtcggaggttcgtccagcaaaagagagctgcaattacccttcagcactactttaggacttggcagacaagaaagcagttcctgttatacagaaaagccgccgtggtactgcaaaaccattatagggccttcctctctgcaaaacatcaacgccaagtgtacttgcagatacggagtagtgtgatcattatacaagcccggagcaaaggttttatacaaaagcggaagtttcaggagattaaaaattcaacaattaaaatccaggctatgtggcggagatacagagcaaagaaatatctgtgcaaggtgaaggcggcctgtaagatccaggcatggtataggtgttggagagcccataaggagtacctggctatcctgaaggctgtcaaaattatacaaggctgtttctacaccaaactggagcgaactagatttctgaatgtccgagcctccgctatcatcatccaacgcaagtggcgggccattcttcctgctaagatagcccacgagcatttcctgatgattaagcgccacagggccgcctgcctcatacaagcccactaccgcgggtacaagggacggcaggtcttcctacggcagaaatcagcagctctgattatccagaaatacattcgtgccagagaagcagggaaacacgaaaggatcaaatatatcgagtttaagaagtcaaccgtgattctccaagcactggttcgcgggtggctggtgaggaagcgcttcctcgaacagagggccaaaattaggttactgcacttcaccgccgccgcctattaccaccttaacgccgtccggattcagcgtgcttacaagttgtaccttgccgttaagaacgccaataagcaggtgaacagtgtgatctgtattcagaggtggttcagggctcgtcttcaggagaagcgattcatccagaaatatcacagtatcaagaaaatcgagcatgaaggccaggagtgcctgtctcaaaggaacagagcggcctccgttattcagaaagcggtgcgtcattttctgctgcgaaagaagcaggaaaaattcacatctggcatcattaagattcaggctctgtggaggggctattcctggcgcaaaaagaatgattgtactaaaatcaaggccatcagattgagcctgcaggtggtcaacagagagatacgcgaggaaaataagctctataaacgaaccgccctggcgctccattacctcctcacttacaagcacctgagtgccatcctcgaggccttaaagcatctcgaagttgttacccgtctgtcgccactttgttgcgagaacatggctcagagtggagccatttcaaaaatctttgtccttatcaggtcctgtaaccgttccatcccatgcatggaggtgattagatacgccgtgcaggtacttctcaacgtgagtaagtatgaaaagactaccagtgctgtgtatgacgtcgagaactgtatcgacattttgctagagctgctccagatttaccgggagaaacctggaaataaagtggccgataaaggtggctcaatcttcaccaagacctgctgtctgttggctattttactgaagactacaaaccgagcctccgatgtgagatcgagaagcaaggttgttgaccgaatctacagcctgtacaagctgacagctcataagcataagatgaataccgagcgcatcctctataagcagaaaaagaattcatcaatctcaatcccattcatcccagagaccccagtgagaaccaggattgtctcaagactgaaacccgattgggtcctcagaagagataacatggaggaaatcaccaaccccttgcaggccattcagatggtgatggacaccctaggcattccatattag

SEQ ID NO: 196821 - DNA, 4170 bp, Artificial Sequence
  derived and/or modified sequence
atggctaaccggagagtgggaagaggctgttgggaggtttcaccgactgaacgcaggccccctgcaggtctgcgtgggccagcagccgaggaagaagcatctagtcctcctgttctgtccctttcacacttctgccggagtccttttctctgctttggcgatgtgcttctgggtgcttctaggactctgtccctggccttggataaccctaacgaggaagtggccgaggtaaagatcagtcattttccggctgctgacctgggcttttcagtgagccagcgttgttttgtgctgcagccaaaagagaagattgtgatctccgttaattggacaccactcaaggaaggacgtgtgcgtgaaattatgacatttctggttaatgatgtcctgaagcaccaggctatcctgctcggtaacgcagaggaacagaagaagaaaaaacgttctctctgggataccatcaaaaagaaaaaaatctctgcttccaccagtcataacagacgggttagtaacattcagaacgtgaataaaactttcagcgtctcccagaaagtggataggaggtacaggcaacaaacctatttcaataaacttaaaaagataaccaagaccgtccagcaacggtactgggcaatgaaggagcggaacatacagttccaaaggtacaataaacttagacactcagtcatttacattcaagcaatttttcgtggaaagaaggcccgtaggcatctgaagatgatgcacattgctgctacgctgatccaacgccgtttcaggacactgatgatgcgtaggagattcctgagtctgaaaaagaccgctatcttgattcagagaaagtatcgcgcacacctgtgtacaaagcaccatctgcagttcttgcaggtccagaatgccgtgatcaagatacaaagcagctatagacgttggatgattcgtaagcggatgcgggagatgcacagggcggcaaccttcattcagtcaacctttagaatgcatagattgcatatgagatatcaggcactcaaacaggcctctgttgtaatacaacagcaataccaggccaatagggcagccaagttacagagacaacattacctccgtcagcgtcacagcgctgtgatactacaggctgctttccgtggtatgaagacccggcgacacctgaaatcaatgcacagtagcgccacactgatacagtcgcgatttagaagtctgctggttcggcgtcggttcatcagcttgaaaaaggctactatattcgtacaacgaaagtacagagctacaatttgtgccaagcataaattgtaccagttcctccacctgagaaaagcagcaatcaccattcaaagcagctaccgacggcttatggtgaagaagaaactacaggagatgcaaagagccgcagtgctaatccaagccacctttcgtatgtaccggacttatatcacatttcagacttggaagcacgcatccattttaatacagcagcactaccgaacataccgtgctgccaaacttcagcgcgagaactatatacggcaatggcactctgcggtagtgattcaggcggcttataagggtatgaaggcgaggcaactgttgagggaaaaacacaaggcaagcattgtaattcaatccacctaccgtatgtacaggcaatactgtttctaccagaaacttcagtgggctacaaaaattatccaggagaagtatagagcaaataagaagaagcagaaggtgttccagcataatgaattgaaaaaagaaacgtgcgtacaggccggatttcaggacatgaacataaagaaacagatccaggagcagcaccaggccgcaattatcattcagaaacattgcaaggcttttaagattcgtaaacactacttgcatctgagagccaccgtggtttcgatccagcgccgatatcgcaagttaaccgctgtgcgcactcaggccgttatttgtatccaatcttattatcgtggattcaaggtccgtaaggacatccaaaacatgcaccgggcagctactttgattcagtctttctaccggatgcaccgcgcaaaggtggattatgaaaccaagaagactgcgatcgtggtgatccaaaactattatagactctatgttcgtgtgaagacagagaggaagaatttcctcgctgttcagaagagcgtgagaaccatacaggccgcttttagaggtatgaaagttaggcaaaaattgaagaacgtgtctgaggaaaagatggcagcgatagtcaaccagagcgcactgtgttgctaccgatccaagacccagtacgaggctgttcagtcagaaggagtaatgatacaggaatggtacaaggcttccgggctggcgtgctctcaggaggcagagtaccattctcagagcagagccgcagttactatccagaaagcattttgtcggatggtgacccggaaacttgagactcagaagtgcgccgctctgaggatccagttttttcttcagatggcagtctacagacgaagattcgtgcaacagaaaagggcggcaattacactccaacactactttaggacctggcagactagaaagcagttccttctgtatagaaaggcggcagtcgtactgcagaaccactatcgggctttcctcagcgctaagcaccagcgccaggtatacttacaaatacggagcagcgtgattattatccaggccaggtctaaaggttttattcagaagcgaaagtttcaggaaattaagaacagtaccatcaagatccaggcaatgtggcggaggtatagagcaaaaaaatatttgtgtaaggtgaaagcagcttgcaagatacaagcgtggtaccgatgttggagggcccataaagaatacttggcgatcttaaaagctgtaaagattatccagggatgcttttatacaaagctcgagcgtacccggtttcttaacgtgagggccagcgctataatcattcaacggaaatggagggccatcctacctgctaagattgcgcacgagcatttccttatgatcaaacgacatagggcggcatgcctgatccaggcccattacagaggttataagggcagacaggtgttccttaggcagaagagtgctgccctgatcattcaaaagtacattcgcgcaagggaggccggtaaacacgaaaggatcaagtacatcgaattcaaaaaatccactgtcatccttcaagccctggtgagaggctggctggttaggaaaagattcctggagcagcgtgcaaagattaggctgcttcacttcacagcagccgcttattaccacctcaatgctgtgaggattcaaagggcctataagctctacctggccgttaagaacgcaaacaagcaggtaaatagtgtcatatgcattcagaggtggttccgcgctaggcttcaggagaagaggttcatccagaagtaccactcaatcaaaaagatcgagcatgaaggccaggagtgtctctctcagagaaatagagccgcaagcgtcattcagaaggctgtgcgccactttctgctccggaagaagcaggaaaaattcacctctggcataatcaagattcaggctctgtggaggggatacagctggcgtaagaagaatgactgtactaagatcaaggcgatacggctgagcctgcaggtggtgaatagggagattagagaggaaaataagctgtacaagcggactgccctggccctgcactatctgctcacctataagcatctgtcagctatcttagaggctctcaagcatcttgaggtggttacccgactctcgcccttatgttgtgaaaatatggcgcagagcggggcaatcagcaaaatttttgtcttaataaggagctgtaaccgtagtattccgtgtatggaggtgattcgctacgctgtgcaggttctgctgaacgtgtcaaaatatgagaagactacatcagcggtgtacgacgtggaaaattgtattgatatcctgttggaattgcttcaaatctaccgcgagaagcctgggaacaaagtggctgataaaggcggaagcatcttcacaaaaacatgttgtctgctggccatccttcttaaaacaactaaccgggcatctgtatctatcagccaactcccattctttaaaattatctttttgtggtcttag

SEQ ID NO: 196822 - DNA, 10434 bp, Artificial Sequence
  derived and/or modified sequence
atggcaaatagaagggtggggaggggttgttgggaggtttctcccactgagaggcgacccccagccggtttgaggggcccagctgccgaggaggaagcaagctcccccccagtgttgtctctgtcacatttttgccgcagcccattcctgtgcttcggagacgtgctgctcggggcatcccggacactgagcctggcactggataatcccaacgaagaggtggcagaagtgaaaatcagccattttcccgctgccgaccttgggttcagtgtcagtcagagatgcttcgtgcttcagccgaaggaaaaaattgtcattagtgtgaattggaccccccttaaggaaggacgcgtgagagagataatgacattcctcgttaatgatgtcctgaaacaccaggctattctgctggggaacgctgaggagcagaagaaaaaaaagagatccctctgggacaccatcaaaaagaagaagattagtgcatcgacctcccacaatagacgcgtgagtaacatccaaaatgttaataagaccttttccgtgagccagaaggtagatagagtaaggtccccgctgcaggcttgtgagaacctggcaatgaatgaaggcggtccacccaccgaaaacaactccctcatcctcgaagagaataagataccaatttcaccaatcagtcctgctttcaatgagtgtcatggcgctacatgcctgccattgtcagtgcggaggtcgactacctactcatctctccatgcatcagagaatcgtgagttactgaacgtgcattctgctaacgtttcaaaggtgtcatttaacgagaaagcagttacggagacatcatttaactctgtgaatgtaaacggacagcgaggtgaaaattcaaagctcagcttgacacccaactgcagttctactctgaacattactcaatctcagatccactttctttccccagacagcttcgtgaacaacagtcatggtgctaataacgaactcgagcttgtgacatgtttatctagcgatatgttcatgaaagataactcccagcctgtgcacctcgagagtactatcgctcatgagatttaccagaagatactctcaccagactcattcattaaagataactacggtcttaaccaggatttggaatccgagtctgtgaaccccatcctcagcccaaatcagtttctgaaggacaacatggcctatatgtgcactagccaacagacatgtaaagtgccacttagtaatgagaattcgcaggtgcctcaaagtccggaggactggagaaaatcagaagtctctccccgaatccctgaatgtcagggtagcaagtcacctaaagccatcttcgaggagctggtggagatgaagagtaattactattccttcatcaagcagaataatccgaagttcagtgctgtgcaggatatttccagtcatagtcacaataagcagccaaagcgacgccctatcttgtccgcgaccgtgactaagcgcaaggctacttgcacaagagagaatcagaccgagatcaataagcctaaggccaagcgctgcctgaattcagctgtaggagagcacgagaaggtgataaataaccaaaaagagaaagaagacttccactcctatctgccaataattgacccaatcctgtcaaaatcaaaatcatacaagaacgaggtcacacctagtagtactaccgcgtcagtggctaggaaaagaaaaagtgatggcagcatggaggacgccaacgtgcgcgtggctatcacagagcatactgaagtgagagagatcaagcggatccacttttctccttcggagccgaagacctcagcggtaaagaagaccaaaaatgtgaccacacctatctctaaaagaataagcaatagggagaagttgaacttgaaaaaaaagaccgatttgtccattttccgtacacctatctcaaaaactaacaagcgaaccaagccgattatcgccgtggctcagtccagtctcacgtttataaagcctctcaagactgatatacctcggcacccaatgcccttcgccgctaagaacatgttttatgatgagagatggaaggagaaacaagagcaggggtttacttggtggctgaattttatattgactcccgacgacttcacggtgaagaccaacatttcggaagtgaatgccgcaaccctgctcttaggtattgagaaccaacacaagattagcgtacctcgagcacctaccaaggaggagatgagcctgcgtgcctataccgctcgatgccggctgaacagactgcggagggccgcttgtcgtctctttactagcgaaaaaatggtgaaggcaatcaaaaaactcgaaatcgagattgaagcgcgtcggctcatcgtgcggaaggataggcatctctggaaagatgtgggagagcgacagaaggtgttgaattggctgctctcctacaaccccctctggctcaggattggccttgaaactacttacggggaattgatcagcctggaggacaacagcgacgtaaccgggttggcgatgtttatcctgaataggttgctctggaacccggatattgcggcagagtaccgtcaccccacagttcctcacctgtaccgagacgggcacgaagaagctctcagtaagttcactctaaaaaaattgctgctgctggtgtgctttcttgattacgcaaaaatctctcggctgatcgatcatgacccatgcctcttctgcaaggacgctgaatttaaagcctcgaaggaaatccttctggcttttagtagagacttcctttctggcgagggcgatctctcccgccatttaggtctactgggactgcctgtgaaccacgtgcagactccatttgatgagttcgacttcgccgtaacaaacttggctgtggacctccagtgcggcgtgcggctggttcgcaccatggaacttctcacccagaactgggacctgagtaaaaagctgagaattccagcaattagcagactccaaaaaatgcataatgtggatattgttctgcaagtcctgaaaagccgaggaatagaactgagtgacgaacatggcaatacgatcctgagtaaggatattgttgaccgccaccgggaaaagactcttcgcctcctgtggaaaatagcattcgccttccaggtggacatcagtttaaacttggaccagctgaaggaagagatcgcgtttctgaaacacacaaagtccattaaaaaaaccatctctctgctctcatgtcattccgacgatctgataaacaaaaagaagggcaaaagggattccggctcattcgagcagtatagtgagaatataaaactccttatggattgggtgaatgccgtgtgtgccttctacaacaagaaggtcgaaaacttcactgtctcattttcagacggacgagtcttgtgctacctcatccatcattatcacccatgctatgtgcctttcgacgcaatttgccagcgaaccacccagactgtggagtgtacacaaactgggagtgtggtgctcaatagctcgagtgaaagtgacgactcatccctggacatgagcctcaaagcattcgaccacgaaaatacgtctgagctctacaaggaactgcttgagaatgaaaagaagaattttcacctggtccgctcggccgtaagagatttgggagggataccagcaatgattaatcatagcgatatgtcaaacacaattcctgacgagaaggtggtgattacctatctgagttttctctgcgccagattgctcgacttgcggaaggaaatccgagcggcaagactgatccaaactacatggcgcaagtacaagctcaagaccgacctaaagaggcaccaggagcgggaaaaggccgcacggataatacaactagctgtgattaatttcctagccaagcaaagacttaggaagcgggttaatgcagctctcgtcattcagaagtactggagacgggttctggctcagcgcaagttgctgatgcttaaaaaagagaagctcgagaaggtgcagaataaggcagcctcgctcatacagggctactggagacgttacagcacccgacagcgctttctgaagctcaaatactacagcataatcttacagagccggataagaatgataattgctgtgacgtcctataagagatacctgtgggctaccgtgacaatccagcgccactggcgggcttatttgcgcagaaaacaggaccaacagcggtatgaaatgctgaagagctccactctgattatccagtccatgttcagaaaatggaagcagagaaaaatgcaaagccaggtgaaagcgacagttattctgcagcgggctttccgggagtggcatctgagaaagcaagccaaggaagaaaactcagccatcatcatccaatcatggtatcgaatgcacaaggagctcagaaagtatatctacattcgtagctgtgtcgtgatcattcaaaaaagattcagatgttttcaggcccaaaagttgtataaaagaagaaaggagtcgatacttaccatccagaagtattacaaggcatacctgaaaggcaaaattgagaggactaactacctgcaaaagcgcgctgctgctatacaacttcaggcagcctttcgcaggctgaaggcacacaacctttgtagacagatcagggcggcttgcgtaatccaaagctactggagaatgaggcaggatcgcgtgaggtttctgaacttaaagaagacaataataaagttccaagcacatgtgcggaaacatcagcagaggcaaaagtataagaaaatgaagaaggcagctgtgatcatccagacccacttcagggcttacattttcgctatgaaggttttggctagttatcagaaaactcgtagtgccgttatcgtgctgcagtctgcgtacaggggaatgcaggctagaaagatgtacattcacatcctcacctcggtgatcaagattcagagctattatcgcgcttacgtgtccaaaaaggaattccttagcctgaaaaacgcaactatcaagttacaatctacggtcaagatgaaacagacacgaaaacagtacttgcatctgcgtgcagcggcactcttcattcagcaatgttacagaagcaaaaagattgccgcacagaagcgtgaagagtacatgcagatgcgagaatcctgcatcaaactccaggcattcgtgagggggtacctggtgcggaagcaaatgagactgcagagaaaggcagtgatatctctccagtcatattttaggatgaggaaagctcgacaatactatttgaaaatgtataaggcaatcatcgtgattcagaattactaccacgcttacaaagctcaggtgaaccagcgcaaaaacttcctgcaggttaaaaaggcagctacctgccttcaggccgcataccgcggttacaaggtccgccagctgattaaacagcagtcaattgctgctttaaagatccagtccgcattccgaggctacaataaacgagtaaagtaccagagcgtattacagtccatcattaaaattcagcgctggtaccgtgcttataaaaccttgcatgacacaaggacacatttcctgaaaaccaaagctgccgttatatcactacagagcgcttatagaggttggaaggtaaggaagcagattcggagggaacaccaagctgcccttaaaatccagtcagcttttcgaatggcaaaagctcagaagcagtttcgcctcttcaagacagctgctctggtaattcagcagaacttccgcgcttggactgcaggcagaaagcaatgcatggaatacattgagctgcgccacgctgtgctagtgctacagtctatgtggaagggcaagacactcaggcggcagctgcagaggcagcataagtgtgctataattatccagtcctactaccgcatgcatgtacagcagaagaagtggaaaattatgaaaaaggctgccctccttatccagaagtattacagggcctatagtatcggacgggaacaaaaccacctgtacttgaaaactaaggcagcggtggtcactctgcagtcggcttacagaggcatgaaggtccgaaaaagaatcaaggactgcaacaaggcagcagtgacgatccaatcaaaatatagagcctacaagacaaaaaagaaatatgccacgtatcgggcatcggccattataattcagagatggtatcggggaatcaaaatcacaaaccaccagcacaaagagtatcttaaccttaagaagacggctattaagatccagtccgtataccgtggtatacgggtacgtaggcatattcagcacatgcatcgggctgcgacatttatcaaggcaatgttcaagatgcaccagagtagaattagctatcacaccatgagaaaagctgcaattgtgatacaggttaggtgccgagcatattatcagggtaagatgcagcgggaaaaatacctgaccatcctgaaagctgttaaagtattacaggctagcttccggggagttcgggttaggcggaccttgcggaaaatgcagaccgcagccaccttgatacaaagtaattatcggaggtaccgccaacagacctattttaacaaactgaagaaaataacaaagactgtgcaacagaggtactgggccatgaaggagaggaacatccagttccagcggtacaacaaactaaggcactctgttatatacatccaggcaatcttccgagggaaaaaggccaggcgacatttaaagatgatgcatatcgctgccactctaatccagagacgcttcaggacgctgatgatgaggcgccgttttttgtcactcaaaaaaaccgccatcctgattcagcggaagtatcgggctcacctgtgtaccaaacaccaccttcagtttctccaggtccagaatgcagtgatcaaaattcagtcctcctataggcggtggatgatccgcaagcgaatgcgagagatgcaccgggcagctacgttcatacagtcaactttccggatgcatcggttgcatatgaggtatcaggctttaaagcaagcaagcgtagtgattcaacagcagtaccaagccaacagagccgcaaagctccagaggcagcattacctgagacagaggcattcggcagttattctccaagccgctttccggggaatgaagacgagacgtcatctcaaaagcatgcattcatccgctactctaatccagtctcggttccgctccctattggtgaggcgtcgctttattagcctcaaaaaggccaccatcttcgtgcagagaaaataccgggcaacaatctgcgctaaacataagctatatcaatttttacatctgcgtaaggccgcaatcactatacagtctagctaccgaaggttgatggtgaagaagaagctgcaggagatgcagcgggctgctgtgctcattcaggctacgtttcgaatgtaccgcacctacatcacatttcagacatggaagcacgccagcatccttattcagcagcattataggacttacagggccgctaagctccaaagggagaattacattaggcagtggcacagcgccgttgtgatccaggccgcatacaaaggaatgaaagcccgacagctgttgagggaaaagcataaagcatccatcgtgatccagagtacctaccgcatgtaccgccaatattgtttttaccagaagctccagtgggccactaaaatcatccaggaaaaatatagagctaataagaagaagcagaaggtatttcagcataatgaactcaagaaggaaacttgtgtgcaggctgggttccaagacatgaacatcaagaagcaaatccaagagcagcaccaagccgcaatcatcattcagaagcactgcaaagctttcaaaatccgcaagcactacctccatttgcgagccaccgtggtctctattcagagacgataccggaaactcacggcagttcggacccaggcagtcatatgcatccaatcttattataggggattcaaggtccgaaaggatattcaaaacatgcatagagccgctaccttaatccagtctttctaccggatgcatagggcgaaagtggactatgagactaagaagactgcaatagtcgttatccagaattactatcgtctatacgtgcgcgtgaaaaccgagaggaaaaactttcttgccgtgcaaaagagtgtgaggactattcaagcggctttccgtggcatgaaggtacggcagaaacttaaaaatgtttctgaggaaaagatggccgctattgttaatcaatccgccctctgttgctaccgcagcaagacacagtacgaagccgtacagtccgagggagtcatgatccaggaatggtacaaagctagcggactggcttgtagtcaagaggctgagtaccatagtcagagccgcgcagcagtaaccattcaaaaagctttctgccggatggtcaccaggaagttggagacacagaagtgcgcagctctgcggatccagttttttctccagatggcagtatatagacgaagattcgtccaacaaaaacgagccgcaatcactctccagcattactttcgtacttggcagacccgtaagcaatttttgctgtatcggaaggcggctgtggtcctgcaaaaccactatcgggcattcctttcggccaagcaccagcggcaagtgtacctacagatacggtcctctgttataattatccaagcacgttccaaagggttcattcagaaaaggaagttccaggaaataaaaaatagcacaattaaaatacaggctatgtggcgaaggtatagagctaagaaatacttgtgtaaggtcaaggccgcatgtaagatccaggcttggtacagatgctggcgagcgcacaaggagtacctggcaatccttaaggcagtgaaaattatccaaggctgcttttacactaaactggagcggacccgattcctcaacgtccgggcttctgcaataattattcagcgcaaatggagggcgatcctgcccgctaaaattgcgcacgaacatttccttatgatcaagcgccaccgcgctgcgtgtcttattcaagctcactatcgcggatataagggccgacaggtattcttgcggcagaagtcagccgctctgattatacagaagtacatccgggcaagggaagcgggaaagcatgagcgcataaaatatattgagtttaagaagtctaccgtaattctccaggctctggtacggggttggctcgtcaggaagcgcttcctcgagcaacgcgctaagatacggctgctgcacttcacagctgcagcttactaccatctcaatgcggttcgcattcaaagagcctataaattatacttagccgtcaaaaatgccaataagcaggtgaattcggtgatttgcattcagcggtggtttcgggcacgcctgcaggaaaaacgctttatccagaagtaccatagcattaagaagatcgagcatgaggggcaggaatgtttgagccagaggaacagggcagccagtgtgatacaaaaagcagtgcgccactttctgcttaggaagaaacaggagaagttcacctcaggaatcatcaagatccaggcgctctggcggggatattcatggaggaagaaaaatgattgtaccaaaattaaagccattcggctgagcttgcaggtggtgaatagagagatccgcgaggaaaataagttgtataaaagaaccgcactcgccctccattaccttctgacatacaaacacctgagtgcgattctcgaggccctgaaacacctggaggtggtcacccgactcagccccttgtgctgcgagaacatggcacagagtggtgcaatatctaaaatattcgttctgattcggtcttgcaataggagcatcccttgcatggaggttattagatatgccgtccaggtcctcctgaacgtctccaagtatgaaaagacaacatctgccgtctatgacgtggagaactgcattgacatccttctcgagctgctacaaatttaccgggaaaaaccgggaaataaggtggcagataaagggggatctatatttaccaagacgtgctgcctcctagctattttactgaagaccaccaatagagcttccgatgtgaggtccaggagcaaggtggtggaccggatctatagcctgtacaagctgacagcgcacaagcacaaaatgaatacagaaaggatcctctacaaacagaagaaaaattcctccatctctatacccttcattccagagacaccggtgaggacacgaattgtgagcaggcttaagcctgactgggtattgcggcgtgataatatggaagaaataacgaacccacttcaggccattcagatggtgatggatacgcttgggatcccgtactac

SEQ ID NO: 196823 - DNA, 4259 bp, Artificial Sequence
  derived and/or modified sequence
atggcgaaccggcgagtggggcgaggctgctgggaagtgagcccgaccgagcggaggccgcccgcggggctgcggggccccgcggccgaggaggaggcgtcttccccgccggtcctgtctctcagccacttctgcaggtctcctttcctttgcttcggggacgttctcctgggagcctcacggacgctgtctctggccctagacaaccctaacgaggaggtggcagaagtgaagatctcccacttcccggccgcggacctgggcttcagtgtgtcgcagcgctgtttcgtgttgcagcctaaagagaaaattgttatttctgttaactggacaccactcaaagaaggccgagtaagagagattatgacatttcttgtaaatgatgttctgaaacaccaagctatattactaggaaatgcagaagagcagaaaaagaaaaagaggagtctttgggataccattaaaaagaagaaaatttcagcctctacaagtcacaacagaagggtttcaaatattcagaatgttaataaaacatttagtgtttcccaaaaagttgacagaagatacagacagcaaacatactttaataagttaaagaaaataacaaaaacagtacagcaaagatactgggcaatgaaagaaagaaacatacaatttcaaaggtataacaaactgaggcattctgtaatatacattcaggctatttttaggggaaagaaagctagaagacatttaaaaatgatgcatatagccgcaactctcattcagaggagatttagaactctaatgatgagaagaagattcctctctctcaagaaaactgctattttgattcagagaaaatatcgggcacatctttgtacaaagcatcacttacagttccttcaggtacaaaatgcagttattaaaatccagtcatcatacagaagatggatgataaggaaaaggatgcgagagatgcacagggctgctactttcatccagtctactttcagaatgcacagattacatatgagatatcaggctttgaaacaggcctccgttgtgatccaacagcaataccaagcaaatagagctgcaaaactgcagaggcagcattatctcagacaaagacactctgctgtgatccttcaggctgcattcaggggtatgaaaactagaagacatttgaagagtatgcattcctctgcaacccttattcagagtaggtttagatcattactggtgaggagaagattcatttccctcaaaaaagctactatttttgttcagaggaaatatcgagccaccatttgtgccaaacataaattgtaccaattcttgcacttaagaaaggcagccattacaatacagtcatcttacagaagactgatggtaaagaagaagttacaagaaatgcaaagggctgcagttctcattcaggctactttcaggatgtacagaacatatattacatttcagacttggaaacatgcttcaattctaattcagcaacattatcgaacatatagagctgcaaaattacaaagagaaaattatatcagacaatggcattctgctgtggttattcaggctgcatataaaggaatgaaagcaagacaacttttaagggaaaaacacaaagcttctatcgtaatacaaagcacctacagaatgtataggcagtattgtttctaccaaaagcttcagtgggctacaaaaatcatacaagaaaaatatagagcaaataaaaagaaacagaaagtatttcaacacaatgaacttaagaaagagacttgtgttcaggcaggttttcaggacatgaacataaaaaaacagattcaggaacagcaccaggctgccattattattcagaagcattgtaaagcctttaaaataaggaagcattatctccaccttagagcaacagtagtttctattcaaagaagatacagaaaactaactgcagtgcgtacccaagcagttatttgtatacagtcttattacagaggctttaaagtacgaaaggatattcaaaatatgcaccgggctgccacactaattcagtcattctatcgaatgcacagggccaaagttgattatgaaacaaagaaaactgcaattgtggttatacagaattattataggttgtatgttagagtaaaaacagaaagaaaaaactttttagcagttcagaaatctgtacgaactattcaggctgcttttagaggcatgaaagttagacaaaaattgaaaaatgtatcagaggaaaagatggcagccattgttaaccaatctgcactctgctgttacagaagtaaaactcagtatgaagctgttcaaagtgaaggtgttatgattcaagagtggtataaagcttctggccttgcttgttcacaggaagcagagtatcattctcaaagtagggctgcagtaacaattcaaaaagctttttgtagaatggtcacaagaaaactggaaacacagaaatgtgctgccctacggattcagttcttccttcagatggctgtgtatcggagaagatttgttcagcagaaaagagctgctatcactttacagcattattttaggacgtggcaaaccagaaaacagtttttactatatagaaaagcagcagtggttttacaaaatcactacagagcatttctgtctgcaaaacatcaaagacaagtctatttacagatcagaagcagtgttatcattattcaagctagaagtaaaggatttatacagaaacggaagtttcaggaaattaaaaatagcaccataaaaattcaggctatgtggaggagatatagagccaagaaatatttatgtaaagtgaaagctgcctgcaagattcaagcctggtatagatgttggagagcacacaaagaatatctagctatattaaaagctgttaaaattattcaaggttgcttctataccaaactagagagaacacggtttttgaatgtgagagcatcagcaattatcattcagagaaaatggagagctatacttcctgcaaagatagctcatgaacacttcttaatgataaaaagacatcgagctgcttgtttgatccaagcacattatagaggatataaaggaaggcaggtctttcttcggcagaaatctgctgctttgatcatacaaaaatatatacgagccagggaggctggaaagcatgaaaggataaaatatattgaatttaaaaaatctacagttatcctacaagcactggtgcgtggttggctagtacgaaaaagatttttagaacagagagccaaaattcgacttcttcacttcactgcagctgcatattatcacctgaatgctgttagaattcaaagagcctataaactttacctggctgtgaagaatgctaacaagcaggttaattcagtcatctgtattcagagatggtttcgagcaagattacaagaaaagagatttattcagaaatatcatagcatcaaaaagattgagcatgaaggtcaagaatgtctgagccagcgaaatagggctgcatcagtaatacagaaagcagtgcgccattttctcctccgtaaaaagcaggaaaaattcactagtggaatcattaaaattcaggcattatggagaggctattcttggaggaagaaaaatgattgtacaaaaattaaagctatacgactaagtcttcaagttgttaatagggagattcgagaagaaaacaaactctacaaaagaactgcacttgcacttcattaccttttgacatataagcacctttctgccattcttgaggccttaaaacacctagaggtagttactagattgtctccactttgttgtgagaacatggcccagagtggagcaatttctaaaatatttgttttgatccgaagttgtaatcgcagtattccttgtatggaagtcatcagatatgctgtgcaagtcttgcttaatgtatctaagtatgagaaaactacttcagcagtttatgatgtagaaaattgtatagatatactattggagcttttgcagatataccgagaaaagcctggtaataaagttgcagacaaaggcggaagcatttttacaaaaacttgttgtttgttggctattttactgaagacaacaaatagagcctctgtaagtattagtcagttgcctttctttaagattatttttctgtggtcttaagtctatgacttttatagttttcctttagtaattatcactctaaaatagggttttatgtgtgttcaaacctgctttttgcacggataaaa

SEQ ID NO: 196824 - DNA, 10887 bp, Artificial Sequence
  derived and/or modified sequence
attggtggaggcggcaagtttaaacagagtcaaaacgccatacttgtttggctcctctttttaatttgcgagtttattgggcttgttttctgttttctagggagtaggttagtggaaaagaaaaagggccgaattcactcccacgacctctacagccgcccctgaggggaagcggtcagcgtaagtcccggatccccgctccggagccgcctcgtgggagcggggcaaggagatccaggaggggtctcgaatctgccatggcgaaccggcgagtggggcgaggctgctgggaagtgagcccgaccgagcggaggccgcccgcggggctgcggggccccgcggccgaggaggaggcgtcttccccgccggtcctgtctctcagccacttctgcaggtctcctttcctttgcttcggggacgttctcctgggagcctcacggacgctgtctctggccctagacaaccctaacgaggaggtggcagaagtgaagatctcccacttcccggccgcggacctgggcttcagtgtgtcgcagcgctgtttcgtgttgcagcctaaagagaaaattgttatttctgttaactggacaccactcaaagaaggccgagtaagagagattatgacatttcttgtaaatgatgttctgaaacaccaagctatattactaggaaatgcagaagagcagaaaaagaaaaagaggagtctttgggataccattaaaaagaagaaaatttcagcctctacaagtcacaacagaagggtttcaaatattcagaatgttaataaaacatttagtgtttcccaaaaagttgacagagttaggagcccactacaagcttgtgaaaacttggctatgaatgaaggcggtcccccaacagaaaacaattctttaatacttgaagaaaataaaatacccatatcacctattagccctgctttcaatgaatgccatggtgcaacttgcttgccactctctgtacgtcgatctactacctactcatctcttcatgcatcagaaaatagggaactattaaatgtacacagtgccaacgtttcaaaagtttcttttaatgagaaagctgtaactgaaacttcctttaattccgtaaatgttaatggccaaagaggagagaatagtaaacttagtcttacccccaactgttcttcaactttgaacattacacaaagccaaatacattttctaagtccagattcttttgtaaataatagtcatggagctaataatgaactagaattagtaacatgtctttcatcagatatgtttatgaaagataattcacagcctgtgcatttggaatcaacaattgcacatgaaatttatcagaaaattttaagtccagattctttcataaaagataattatggactaaatcaggatctagaatcagagtcagttaatcctattttatcccctaatcaatttttaaaagataacatggcatatatgtgtacatctcagcaaacatgtaaagtaccattatcaaatgaaaattctcaagtcccacagtctcctgaagattggagaaaaagtgaagtttcgccacgtattcctgaatgtcagggttcaaaatctcccaaagctatttttgaagaactagtagaaatgaagtcaaattactacagttttataaaacaaaataatcctaaattttctgcagttcaggatatttctagtcatagccacaataaacaacctaagagacgtccaatactttctgccactgttactaaaaggaaggccacctgtaccagagaaaaccaaactgagattaataaaccaaaagcaaaaagatgtctcaacagtgcagtgggtgaacatgaaaaagtaataaataatcaaaaggaaaaagaagattttcattcttatcttccaattatagatccaatattaagtaaatctaagagttataaaaacgaggtaacaccctcttcgacaacagcttcagttgctcggaaaagaaagagcgatggaagcatggaagatgcaaatgtgagagttgcaattacagaacatacagaagtgcgagaaatcaaaagaatccatttttctccctcagagcctaaaacatcagctgttaagaaaacaaaaaatgtgacaacacccatctcaaaacgtattagcaacagagagaaattaaacctgaagaagaaaactgatttatcaatattcagaactccaatttctaaaacaaacaaaaggacaaaacccattatcgctgtggcacagtccagtttgaccttcataaaaccattaaaaacagatattcccagacacccgatgccatttgctgcaaaaaacatgttttatgatgaacgctggaaggaaaagcaggaacagggcttcacttggtggttaaattttatattaacccctgatgacttcactgtaaaaacaaatatttctgaagtaaatgctgctactcttcttttgggaatagagaatcaacataaaataagtgttcctagagcacctacaaaagaggaaatgtctctcagagcttatactgctcggtgtaggttaaacagactacgtcgtgcagcatgccgtttgtttacttctgaaaaaatggttaaagctattaaaaagcttgaaattgaaattgaagctaggcggttaattgttcgaaaagatagacacctatggaaagatgtgggagaacgtcagaaagtcctgaattggctgttgtcctacaatcctttgtggcttcgaattggtctagagacaacttatggagaactcatatctttggaagataacagtgatgtcacagggttggctatgtttattctgaatcgcctactttggaatcctgatatagcagctgagtatagacaccccactgttcctcacctgtatagagatggtcatgaagaagctttgtccaagtttacattgaaaaagttattgttgttggtctgttttcttgattatgctaaaatttccagactcattgatcatgatccttgtctcttctgtaaagatgccgaattcaaggctagtaaagaaatccttttggctttttcacgagatttcctaagtggtgaaggtgacctttcccgtcaccttggcttattgggattacctgttaaccatgttcagacaccatttgatgaatttgattttgccgttacaaatcttgccgtagacttgcaatgtggagtgcgccttgtgcgaaccatggaacttctcacacagaactgggacctctcaaagaaactcaggattccggcaataagtcgtcttcaaaagatgcacaatgttgacattgttcttcaagttcttaaatcacgaggaattgaattaagtgatgagcatggaaatacaattctatctaaggatattgtggataggcacagagaaaaaactctcaggttgctttggaaaatagcgtttgcttttcaggtggatatttcccttaacttagatcaattaaaggaagaaattgcctttctaaaacacacaaagagtataaagaaaacaatatctctactatcatgccattctgatgatcttattaataagaaaaaaggcaaaagggatagtggttcctttgaacaatatagtgaaaacataaagttattgatggattgggtaaatgctgtttgtgccttctataataaaaaggtggagaattttacagtgtctttctcagacggccgtgtgttatgttacctgatccaccattaccatccttgctatgtgccatttgacgctatatgtcagcgtactactcaaactgtggaatgtacgcaaactggttcagtggtattaaattcatcatctgaatctgatgacagttctctggatatgtctcttaaagcatttgatcatgaaaatacttcagagctatacaaagagctcctagaaaatgaaaagaaaaattttcacttggttaggtctgcagttagagaccttggtggaatacctgctatgattaatcattcagatatgtcaaatacaattccagatgaaaaggtggttattacctatttgtcatttctttgtgcaaggcttttggatcttcgtaaagaaataagagctgctcgactcatacaaacaacatggagaaaatataaactaaaaacagatctcaaacgccatcaggagagagagaaagctgcaagaattattcaattggctgtaatcaattttctagcaaaacaaagattgagaaaaagagttaatgcagcactcgtcattcagaaatattggcgaagagtcttagcacagagaaaattattaatgttaaaaaaggaaaagctggaaaaagttcaaaataaagcagcatcacttattcagggatattggagaagatattccactagacaaagatttctgaaattgaaatattattcaatcatcctgcaatctaggataagaatgataattgctgttacatcttataaacgatatctttgggctacagttacaattcagaggcattggcgtgcttatttaagaagaaaacaagatcaacaaagatatgaaatgctaaaatcatcaactcttataatccaatctatgttcagaaaatggaagcaacgtaaaatgcaatcacaagtaaaagctacagtaatattgcaaagagcttttagagaatggcatttaagaaaacaagctaaagaagaaaattctgctattatcatacaatcatggtatagaatgcataaagaattacggaaatatatttatattagatcttgtgttgttatcattcagaaaagatttcggtgctttcaagcccaaaagttatataaaagaagaaaagagtccatactaaccatccagaagtactacaaagcatatctgaaaggaaagattgagcgcaccaactatttgcagaaacgagctgcagccattcaattacaagctgcttttaggagactgaaagctcataatttatgtagacaaattagagctgcttgtgttattcagtcatactggagaatgagacaagacagagttcgatttttaaaccttaagaagactattatcaaatttcaggcacatgtaagaaaacatcaacaacgacagaaatataagaagatgaagaaagcagctgttataattcagactcatttccgagcttatatttttgccatgaaagttctagcatcttaccagaaaacacgctctgctgtcattgtgctgcagtctgcatatagagggatgcaagccaggaaaatgtatattcacatcctcacatctgttataaagattcaatcatattatcgtgcttatgtttctaaaaaggaatttttgagcctaaaaaatgctacaataaaattgcagtcaactgttaagatgaaacaaacacgtaaacaatatttgcatttaagagcagctgcactatttatccagcaatgttaccgttccaaaaaaatagctgcacaaaagagagaagagtatatgcagatgcgggaatcttgtatcaaactgcaagcatttgttagaggataccttgtccgaaagcagatgaggttacaaagaaaagctgttatttcactacagtcttatttcagaatgagaaaggctcggcagtattatctgaaaatgtataaagcaattattgtcattcagaattactatcatgcatacaaagcacaggtcaatcagaggaagaacttcttgcaagtcaaaaaagcagctacttgcttgcaagcagcttacagaggttataaagtacgccagctaatcaaacaacaatctatagctgctcttaaaattcagtctgcttttagaggctataataaaagggtaaaatatcaatctgtgcttcaatctataataaagattcagagatggtacagggcgtacaagactcttcatgatacaagaacacattttttgaagacaaaggcagctgtgatttccctccagtctgcttatcgtggctggaaggttcggaaacagattagaagggaacatcaagctgccttgaagattcagtctgcttttagaatggccaaggcccagaaacagtttagattgtttaaaacagcagcattagtcatccagcaaaatttcagagcatggactgcaggaaggaagcaatgtatggagtatattgaactccgtcatgcggtactggtgcttcaatctatgtggaagggaaaaacactgagaagacagcttcaaaggcaacataaatgtgctatcatcatacagtcatactatagaatgcatgtgcaacaaaagaagtggaaaatcatgaaaaaagctgctcttctgattcaaaagtattatagggcttacagtattggaagagaacagaatcatttatatttgaaaacaaaagcagctgtagtaactttacagtcagcttatcgtggtatgaaagtgagaaaaagaataaaggattgcaacaaagcagcagtcactatacagtctaaatacagagcttacaaaaccaaaaagaaatatgcaacctatagagcttcagctattataattcagagatggtatcgaggtattaaaattacaaaccatcagcataaggagtatcttaatttgaagaagacagcaattaaaatccaatctgtttatagaggtattagagttagaagacatattcaacacatgcacagggcagccacttttattaaagccatgtttaaaatgcatcagtcaagaataagttaccatacaatgagaaaagcagctattgttattcaagtaagatgtagagcatattatcaaggtaaaatgcagcgtgaaaagtacctgacaattttgaaagctgttaaagtccttcaggcaagttttagaggagtaagagttagacggactcttagaaagatgcagactgcagcaacactcattcagtcaaactacagaagatacagacagcaaacatactttaataagttaaagaaaataacaaaaacagtacagcaaagatactgggcaatgaaagaaagaaacatacaatttcaaaggtataacaaactgaggcattctgtaatatacattcaggctatttttaggggaaagaaagctagaagacatttaaaaatgatgcatatagccgcaactctcattcagaggagatttagaactctaatgatgagaagaagattcctctctctcaagaaaactgctattttgattcagagaaaatatcgggcacatctttgtacaaagcatcacttacagttccttcaggtacaaaatgcagttattaaaatccagtcatcatacagaagatggatgataaggaaaaggatgcgagagatgcacagggctgctactttcatccagtctactttcagaatgcacagattacatatgagatatcaggctttgaaacaggcctccgttgtgatccaacagcaataccaagcaaatagagctgcaaaactgcagaggcagcattatctcagacaaagacactctgctgtgatccttcaggctgcattcaggggtatgaaaactagaagacatttgaagagtatgcattcctctgcaacccttattcagagtaggtttagatcattactggtgaggagaagattcatttccctcaaaaaagctactatttttgttcagaggaaatatcgagccaccatttgtgccaaacataaattgtaccaattcttgcacttaagaaaggcagccattacaatacagtcatcttacagaagactgatggtaaagaagaagttacaagaaatgcaaagggctgcagttctcattcaggctactttcaggatgtacagaacatatattacatttcagacttggaaacatgcttcaattctaattcagcaacattatcgaacatatagagctgcaaaattacaaagagaaaattatatcagacaatggcattctgctgtggttattcaggctgcatataaaggaatgaaagcaagacaacttttaagggaaaaacacaaagcttctatcgtaatacaaagcacctacagaatgtataggcagtattgtttctaccaaaagcttcagtgggctacaaaaatcatacaagaaaaatatagagcaaataaaaagaaacagaaagtatttcaacacaatgaacttaagaaagagacttgtgttcaggcaggttttcaggacatgaacataaaaaaacagattcaggaacagcaccaggctgccattattattcagaagcattgtaaagcctttaaaataaggaagcattatctccaccttagagcaacagtagtttctattcaaagaagatacagaaaactaactgcagtgcgtacccaagcagttatttgtatacagtcttattacagaggctttaaagtacgaaaggatattcaaaatatgcaccgggctgccacactaattcagtcattctatcgaatgcacagggccaaagttgattatgaaacaaagaaaactgcaattgtggttatacagaattattataggttgtatgttagagtaaaaacagaaagaaaaaactttttagcagttcagaaatctgtacgaactattcaggctgcttttagaggcatgaaagttagacaaaaattgaaaaatgtatcagaggaaaagatggcagccattgttaaccaatctgcactctgctgttacagaagtaaaactcagtatgaagctgttcaaagtgaaggtgttatgattcaagagtggtataaagcttctggccttgcttgttcacaggaagcagagtatcattctcaaagtagggctgcagtaacaattcaaaaagctttttgtagaatggtcacaagaaaactggaaacacagaaatgtgctgccctacggattcagttcttccttcagatggctgtgtatcggagaagatttgttcagcagaaaagagctgctatcactttacagcattattttaggacgtggcaaaccagaaaacagtttttactatatagaaaagcagcagtggttttacaaaatcactacagagcatttctgtctgcaaaacatcaaagacaagtctatttacagatcagaagcagtgttatcattattcaagctagaagtaaaggatttatacagaaacggaagtttcaggaaattaaaaatagcaccataaaaattcaggctatgtggaggagatatagagccaagaaatatttatgtaaagtgaaagctgcctgcaagattcaagcctggtatagatgttggagagcacacaaagaatatctagctatattaaaagctgttaaaattattcaaggttgcttctataccaaactagagagaacacggtttttgaatgtgagagcatcagcaattatcattcagagaaaatggagagctatacttcctgcaaagatagctcatgaacacttcttaatgataaaaagacatcgagctgcttgtttgatccaagcacattatagaggatataaaggaaggcaggtctttcttcggcagaaatctgctgctttgatcatacaaaaatatatacgagccagggaggctggaaagcatgaaaggataaaatatattgaatttaaaaaatctacagttatcctacaagcactggtgcgtggttggctagtacgaaaaagatttttagaacagagagccaaaattcgacttcttcacttcactgcagctgcatattatcacctgaatgctgttagaattcaaagagcctataaactttacctggctgtgaagaatgctaacaagcaggttaattcagtcatctgtattcagagatggtttcgagcaagattacaagaaaagagatttattcagaaatatcatagcatcaaaaagattgagcatgaaggtcaagaatgtctgagccagcgaaatagggctgcatcagtaatacagaaagcagtgcgccattttctcctccgtaaaaagcaggaaaaattcactagtggaatcattaaaattcaggcattatggagaggctattcttggaggaagaaaaatgattgtacaaaaattaaagctatacgactaagtcttcaagttgttaatagggagattcgagaagaaaacaaactctacaaaagaactgcacttgcacttcattaccttttgacatataagcacctttctgccattcttgaggccttaaaacacctagaggtagttactagattgtctccactttgttgtgagaacatggcccagagtggagcaatttctaaaatatttgttttgatccgaagttgtaatcgcagtattccttgtatggaagtcatcagatatgctgtgcaagtcttgcttaatgtatctaagtatgagaaaactacttcagcagtttatgatgtagaaaattgtatagatatactattggagcttttgcagatataccgagaaaagcctggtaataaagttgcagacaaaggcggaagcatttttacaaaaacttgttgtttgttggctattttactgaagacaacaaatagagcctctgatgtacgaagtaggtccaaagttgttgaccgtatttacagtctctacaaacttacagctcataaacataaaatgaatactgaaagaatactttacaagcaaaagaagaattcttctataagcattccttttatcccagaaacacctgtaaggaccagaatagtttcaagacttaagccagattgggttttgagaagagataacatggaagaaatcacaaatcccctgcaagctattcaaatggtgatggatacgcttggcattccttattagtaaatgtaaacattttcagtatgtatagtgtaaagaaatattaaagccaatcatgagtacgtaaagtgatttttgctctccgtgtacaacttttaaaatctgactttgttttaaaaaaacataaactgttcattacattcttcatttttatcatttatagttttatgcatgtaataaactaatatgtcataagatg

SEQ ID NO: 196825 - DNA, 4170 bp, Artificial Sequence
  derived and/or modified sequence
atggccaacagaagagtgggcagaggctgctgggaggtgagccccaccgagagaagaccccccgccggcctgagaggccccgccgccgaggaggaggccagcagcccccccgtgctgagcctgagccacttctgcagaagccccttcctgtgcttcggcgacgtgctgctgggcgccagcagaaccctgagcctggccctggacaaccccaacgaggaggtggccgaggtgaagatcagccacttccccgccgccgacctgggcttcagcgtgagccagagatgcttcgtgctgcagcccaaggagaagatcgtgatcagcgtgaactggacccccctgaaggagggcagagtgagagagatcatgaccttcctggtgaacgacgtgctgaagcaccaggccatcctgctgggcaacgccgaggagcagaagaagaagaagagaagcctgtgggacaccatcaagaagaagaagatcagcgccagcaccagccacaacagaagagtgagcaacatccagaacgtgaacaagaccttcagcgtgagccagaaggtggacagaagatacagacagcagacctacttcaacaagctgaagaagatcaccaagaccgtgcagcagagatactgggccatgaaggagagaaacatccagttccagagatacaacaagctgagacacagcgtgatctacatccaggccatcttcagaggcaagaaggccagaagacacctgaagatgatgcacatcgccgccaccctgatccagagaagattcagaaccctgatgatgagaagaagattcctgagcctgaagaagaccgccatcctgatccagagaaagtacagagcccacctgtgcaccaagcaccacctgcagttcctgcaggtgcagaacgccgtgatcaagatccagagcagctacagaagatggatgatcagaaagagaatgagagagatgcacagagccgccaccttcatccagagcaccttcagaatgcacagactgcacatgagataccaggccctgaagcaggccagcgtggtgatccagcagcagtaccaggccaacagagccgccaagctgcagagacagcactacctgagacagagacacagcgccgtgatcctgcaggccgccttcagaggcatgaagaccagaagacacctgaagagcatgcacagcagcgccaccctgatccagagcagattcagaagcctgctggtgagaagaagattcatcagcctgaagaaggccaccatcttcgtgcagagaaagtacagagccaccatctgcgccaagcacaagctgtaccagttcctgcacctgagaaaggccgccatcaccatccagagcagctacagaagactgatggtgaagaagaagctgcaggagatgcagagagccgccgtgctgatccaggccaccttcagaatgtacagaacctacatcaccttccagacctggaagcacgccagcatcctgatccagcagcactacagaacctacagagccgccaagctgcagagagagaactacatcagacagtggcacagcgccgtggtgatccaggccgcctacaagggcatgaaggccagacagctgctgagagagaagcacaaggccagcatcgtgatccagagcacctacagaatgtacagacagtactgcttctaccagaagctgcagtgggccaccaagatcatccaggagaagtacagagccaacaagaagaagcagaaggtgttccagcacaacgagctgaagaaggagacctgcgtgcaggccggcttccaggacatgaacatcaagaagcagatccaggagcagcaccaggccgccatcatcatccagaagcactgcaaggccttcaagatcagaaagcactacctgcacctgagagccaccgtggtgagcatccagagaagatacagaaagctgaccgccgtgagaacccaggccgtgatctgcatccagagctactacagaggcttcaaggtgagaaaggacatccagaacatgcacagagccgccaccctgatccagagcttctacagaatgcacagagccaaggtggactacgagaccaagaagaccgccatcgtggtgatccagaactactacagactgtacgtgagagtgaagaccgagagaaagaacttcctggccgtgcagaagagcgtgagaaccatccaggccgccttcagaggcatgaaggtgagacagaagctgaagaacgtgagcgaggagaagatggccgccatcgtgaaccagagcgccctgtgctgctacagaagcaagacccagtacgaggccgtgcagagcgagggcgtgatgatccaggagtggtacaaggccagcggcctggcctgcagccaggaggccgagtaccacagccagagcagagccgccgtgaccatccagaaggccttctgcagaatggtgaccagaaagctggagacccagaagtgcgccgccctgagaatccagttcttcctgcagatggccgtgtacagaagaagattcgtgcagcagaagagagccgccatcaccctgcagcactacttcagaacctggcagaccagaaagcagttcctgctgtacagaaaggccgccgtggtgctgcagaaccactacagagccttcctgagcgccaagcaccagagacaggtgtacctgcagatcagaagcagcgtgatcatcatccaggccagaagcaagggcttcatccagaagagaaagttccaggagatcaagaacagcaccatcaagatccaggccatgtggagaagatacagagccaagaagtacctgtgcaaggtgaaggccgcctgcaagatccaggcctggtacagatgctggagagcccacaaggagtacctggccatcctgaaggccgtgaagatcatccagggctgcttctacaccaagctggagagaaccagattcctgaacgtgagagccagcgccatcatcatccagagaaagtggagagccatcctgcccgccaagatcgcccacgagcacttcctgatgatcaagagacacagagccgcctgcctgatccaggcccactacagaggctacaagggcagacaggtgttcctgagacagaagagcgccgccctgatcatccagaagtacatcagagccagagaggccggcaagcacgagagaatcaagtacatcgagttcaagaagagcaccgtgatcctgcaggccctggtgagaggctggctggtgagaaagagattcctggagcagagagccaagatcagactgctgcacttcaccgccgccgcctactaccacctgaacgccgtgagaatccagagagcctacaagctgtacctggccgtgaagaacgccaacaagcaggtgaacagcgtgatctgcatccagagatggttcagagccagactgcaggagaagagattcatccagaagtaccacagcatcaagaagatcgagcacgagggccaggagtgcctgagccagagaaacagagccgccagcgtgatccagaaggccgtgagacacttcctgctgagaaagaagcaggagaagttcaccagcggcatcatcaagatccaggccctgtggagaggctacagctggagaaagaagaacgactgcaccaagatcaaggccatcagactgagcctgcaggtggtgaacagagagatcagagaggagaacaagctgtacaagagaaccgccctggccctgcactacctgctgacctacaagcacctgagcgccatcctggaggccctgaagcacctggaggtggtgaccagactgagccccctgtgctgcgagaacatggcccagagcggcgccatcagcaagatcttcgtgctgatcagaagctgcaacagaagcatcccctgcatggaggtgatcagatacgccgtgcaggtgctgctgaacgtgagcaagtacgagaagaccaccagcgccgtgtacgacgtggagaactgcatcgacatcctgctggagctgctgcagatctacagagagaagcccggcaacaaggtggccgacaagggcggcagcatcttcaccaagacctgctgcctgctggccatcctgctgaagaccaccaacagagccagcgtgagcatcagccagctgcccttcttcaagatcatcttcctgtggagctag

SEQ ID NO: 196826 - DNA, 10434 bp, Artificial Sequence
  derived and/or modified sequence
atggccaacagaagagtgggcagaggctgctgggaggtgagccccaccgagagaagaccccccgccggcctgagaggccccgccgccgaggaggaggccagcagcccccccgtgctgagcctgagccacttctgcagaagccccttcctgtgcttcggcgacgtgctgctgggcgccagcagaaccctgagcctggccctggacaaccccaacgaggaggtggccgaggtgaagatcagccacttccccgccgccgacctgggcttcagcgtgagccagagatgcttcgtgctgcagcccaaggagaagatcgtgatcagcgtgaactggacccccctgaaggagggcagagtgagagagatcatgaccttcctggtgaacgacgtgctgaagcaccaggccatcctgctgggcaacgccgaggagcagaagaagaagaagagaagcctgtgggacaccatcaagaagaagaagatcagcgccagcaccagccacaacagaagagtgagcaacatccagaacgtgaacaagaccttcagcgtgagccagaaggtggacagagtgagaagccccctgcaggcctgcgagaacctggccatgaacgagggcggcccccccaccgagaacaacagcctgatcctggaggagaacaagatccccatcagccccatcagccccgccttcaacgagtgccacggcgccacctgcctgcccctgagcgtgagaagaagcaccacctacagcagcctgcacgccagcgagaacagagagctgctgaacgtgcacagcgccaacgtgagcaaggtgagcttcaacgagaaggccgtgaccgagaccagcttcaacagcgtgaacgtgaacggccagagaggcgagaacagcaagctgagcctgacccccaactgcagcagcaccctgaacatcacccagagccagatccacttcctgagccccgacagcttcgtgaacaacagccacggcgccaacaacgagctggagctggtgacctgcctgagcagcgacatgttcatgaaggacaacagccagcccgtgcacctggagagcaccatcgcccacgagatctaccagaagatcctgagccccgacagcttcatcaaggacaactacggcctgaaccaggacctggagagcgagagcgtgaaccccatcctgagccccaaccagttcctgaaggacaacatggcctacatgtgcaccagccagcagacctgcaaggtgcccctgagcaacgagaacagccaggtgccccagagccccgaggactggagaaagagcgaggtgagccccagaatccccgagtgccagggcagcaagagccccaaggccatcttcgaggagctggtggagatgaagagcaactactacagcttcatcaagcagaacaaccccaagttcagcgccgtgcaggacatcagcagccacagccacaacaagcagcccaagagaagacccatcctgagcgccaccgtgaccaagagaaaggccacctgcaccagagagaaccagaccgagatcaacaagcccaaggccaagagatgcctgaacagcgccgtgggcgagcacgagaaggtgatcaacaaccagaaggagaaggaggacttccacagctacctgcccatcatcgaccccatcctgagcaagagcaagagctacaagaacgaggtgacccccagcagcaccaccgccagcgtggccagaaagagaaagagcgacggcagcatggaggacgccaacgtgagagtggccatcaccgagcacaccgaggtgagagagatcaagagaatccacttcagccccagcgagcccaagaccagcgccgtgaagaagaccaagaacgtgaccacccccatcagcaagagaatcagcaacagagagaagctgaacctgaagaagaagaccgacctgagcatcttcagaacccccatcagcaagaccaacaagagaaccaagcccatcatcgccgtggcccagagcagcctgaccttcatcaagcccctgaagaccgacatccccagacaccccatgcccttcgccgccaagaacatgttctacgacgagagatggaaggagaagcaggagcagggcttcacctggtggctgaacttcatcctgacccccgacgacttcaccgtgaagaccaacatcagcgaggtgaacgccgccaccctgctgctgggcatcgagaaccagcacaagatcagcgtgcccagagcccccaccaaggaggagatgagcctgagagcctacaccgccagatgcagactgaacagactgagaagagccgcctgcagactgttcaccagcgagaagatggtgaaggccatcaagaagctggagatcgagatcgaggccagaagactgatcgtgagaaaggacagacacctgtggaaggacgtgggcgagagacagaaggtgctgaactggctgctgagctacaaccccctgtggctgagaatcggcctggagaccacctacggcgagctgatcagcctggaggacaacagcgacgtgaccggcctggccatgttcatcctgaacagactgctgtggaaccccgacatcgccgccgagtacagacaccccaccgtgccccacctgtacagagacggccacgaggaggccctgagcaagttcaccctgaagaagctgctgctgctggtgtgcttcctggactacgccaagatcagcagactgatcgaccacgacccctgcctgttctgcaaggacgccgagttcaaggccagcaaggagatcctgctggccttcagcagagacttcctgagcggcgagggcgacctgagcagacacctgggcctgctgggcctgcccgtgaaccacgtgcagacccccttcgacgagttcgacttcgccgtgaccaacctggccgtggacctgcagtgcggcgtgagactggtgagaaccatggagctgctgacccagaactgggacctgagcaagaagctgagaatccccgccatcagcagactgcagaagatgcacaacgtggacatcgtgctgcaggtgctgaagagcagaggcatcgagctgagcgacgagcacggcaacaccatcctgagcaaggacatcgtggacagacacagagagaagaccctgagactgctgtggaagatcgccttcgccttccaggtggacatcagcctgaacctggaccagctgaaggaggagatcgccttcctgaagcacaccaagagcatcaagaagaccatcagcctgctgagctgccacagcgacgacctgatcaacaagaagaagggcaagagagacagcggcagcttcgagcagtacagcgagaacatcaagctgctgatggactgggtgaacgccgtgtgcgccttctacaacaagaaggtggagaacttcaccgtgagcttcagcgacggcagagtgctgtgctacctgatccaccactaccacccctgctacgtgcccttcgacgccatctgccagagaaccacccagaccgtggagtgcacccagaccggcagcgtggtgctgaacagcagcagcgagagcgacgacagcagcctggacatgagcctgaaggccttcgaccacgagaacaccagcgagctgtacaaggagctgctggagaacgagaagaagaacttccacctggtgagaagcgccgtgagagacctgggcggcatccccgccatgatcaaccacagcgacatgagcaacaccatccccgacgagaaggtggtgatcacctacctgagcttcctgtgcgccagactgctggacctgagaaaggagatcagagccgccagactgatccagaccacctggagaaagtacaagctgaagaccgacctgaagagacaccaggagagagagaaggccgccagaatcatccagctggccgtgatcaacttcctggccaagcagagactgagaaagagagtgaacgccgccctggtgatccagaagtactggagaagagtgctggcccagagaaagctgctgatgctgaagaaggagaagctggagaaggtgcagaacaaggccgccagcctgatccagggctactggagaagatacagcaccagacagagattcctgaagctgaagtactacagcatcatcctgcagagcagaatcagaatgatcatcgccgtgaccagctacaagagatacctgtgggccaccgtgaccatccagagacactggagagcctacctgagaagaaagcaggaccagcagagatacgagatgctgaagagcagcaccctgatcatccagagcatgttcagaaagtggaagcagagaaagatgcagagccaggtgaaggccaccgtgatcctgcagagagccttcagagagtggcacctgagaaagcaggccaaggaggagaacagcgccatcatcatccagagctggtacagaatgcacaaggagctgagaaagtacatctacatcagaagctgcgtggtgatcatccagaagagattcagatgcttccaggcccagaagctgtacaagagaagaaaggagagcatcctgaccatccagaagtactacaaggcctacctgaagggcaagatcgagagaaccaactacctgcagaagagagccgccgccatccagctgcaggccgccttcagaagactgaaggcccacaacctgtgcagacagatcagagccgcctgcgtgatccagagctactggagaatgagacaggacagagtgagattcctgaacctgaagaagaccatcatcaagttccaggcccacgtgagaaagcaccagcagagacagaagtacaagaagatgaagaaggccgccgtgatcatccagacccacttcagagcctacatcttcgccatgaaggtgctggccagctaccagaagaccagaagcgccgtgatcgtgctgcagagcgcctacagaggcatgcaggccagaaagatgtacatccacatcctgaccagcgtgatcaagatccagagctactacagagcctacgtgagcaagaaggagttcctgagcctgaagaacgccaccatcaagctgcagagcaccgtgaagatgaagcagaccagaaagcagtacctgcacctgagagccgccgccctgttcatccagcagtgctacagaagcaagaagatcgccgcccagaagagagaggagtacatgcagatgagagagagctgcatcaagctgcaggccttcgtgagaggctacctggtgagaaagcagatgagactgcagagaaaggccgtgatcagcctgcagagctacttcagaatgagaaaggccagacagtactacctgaagatgtacaaggccatcatcgtgatccagaactactaccacgcctacaaggcccaggtgaaccagagaaagaacttcctgcaggtgaagaaggccgccacctgcctgcaggccgcctacagaggctacaaggtgagacagctgatcaagcagcagagcatcgccgccctgaagatccagagcgccttcagaggctacaacaagagagtgaagtaccagagcgtgctgcagagcatcatcaagatccagagatggtacagagcctacaagaccctgcacgacaccagaacccacttcctgaagaccaaggccgccgtgatcagcctgcagagcgcctacagaggctggaaggtgagaaagcagatcagaagagagcaccaggccgccctgaagatccagagcgccttcagaatggccaaggcccagaagcagttcagactgttcaagaccgccgccctggtgatccagcagaacttcagagcctggaccgccggcagaaagcagtgcatggagtacatcgagctgagacacgccgtgctggtgctgcagagcatgtggaagggcaagaccctgagaagacagctgcagagacagcacaagtgcgccatcatcatccagagctactacagaatgcacgtgcagcagaagaagtggaagatcatgaagaaggccgccctgctgatccagaagtactacagagcctacagcatcggcagagagcagaaccacctgtacctgaagaccaaggccgccgtggtgaccctgcagagcgcctacagaggcatgaaggtgagaaagagaatcaaggactgcaacaaggccgccgtgaccatccagagcaagtacagagcctacaagaccaagaagaagtacgccacctacagagccagcgccatcatcatccagagatggtacagaggcatcaagatcaccaaccaccagcacaaggagtacctgaacctgaagaagaccgccatcaagatccagagcgtgtacagaggcatcagagtgagaagacacatccagcacatgcacagagccgccaccttcatcaaggccatgttcaagatgcaccagagcagaatcagctaccacaccatgagaaaggccgccatcgtgatccaggtgagatgcagagcctactaccagggcaagatgcagagagagaagtacctgaccatcctgaaggccgtgaaggtgctgcaggccagcttcagaggcgtgagagtgagaagaaccctgagaaagatgcagaccgccgccaccctgatccagagcaactacagaagatacagacagcagacctacttcaacaagctgaagaagatcaccaagaccgtgcagcagagatactgggccatgaaggagagaaacatccagttccagagatacaacaagctgagacacagcgtgatctacatccaggccatcttcagaggcaagaaggccagaagacacctgaagatgatgcacatcgccgccaccctgatccagagaagattcagaaccctgatgatgagaagaagattcctgagcctgaagaagaccgccatcctgatccagagaaagtacagagcccacctgtgcaccaagcaccacctgcagttcctgcaggtgcagaacgccgtgatcaagatccagagcagctacagaagatggatgatcagaaagagaatgagagagatgcacagagccgccaccttcatccagagcaccttcagaatgcacagactgcacatgagataccaggccctgaagcaggccagcgtggtgatccagcagcagtaccaggccaacagagccgccaagctgcagagacagcactacctgagacagagacacagcgccgtgatcctgcaggccgccttcagaggcatgaagaccagaagacacctgaagagcatgcacagcagcgccaccctgatccagagcagattcagaagcctgctggtgagaagaagattcatcagcctgaagaaggccaccatcttcgtgcagagaaagtacagagccaccatctgcgccaagcacaagctgtaccagttcctgcacctgagaaaggccgccatcaccatccagagcagctacagaagactgatggtgaagaagaagctgcaggagatgcagagagccgccgtgctgatccaggccaccttcagaatgtacagaacctacatcaccttccagacctggaagcacgccagcatcctgatccagcagcactacagaacctacagagccgccaagctgcagagagagaactacatcagacagtggcacagcgccgtggtgatccaggccgcctacaagggcatgaaggccagacagctgctgagagagaagcacaaggccagcatcgtgatccagagcacctacagaatgtacagacagtactgcttctaccagaagctgcagtgggccaccaagatcatccaggagaagtacagagccaacaagaagaagcagaaggtgttccagcacaacgagctgaagaaggagacctgcgtgcaggccggcttccaggacatgaacatcaagaagcagatccaggagcagcaccaggccgccatcatcatccagaagcactgcaaggccttcaagatcagaaagcactacctgcacctgagagccaccgtggtgagcatccagagaagatacagaaagctgaccgccgtgagaacccaggccgtgatctgcatccagagctactacagaggcttcaaggtgagaaaggacatccagaacatgcacagagccgccaccctgatccagagcttctacagaatgcacagagccaaggtggactacgagaccaagaagaccgccatcgtggtgatccagaactactacagactgtacgtgagagtgaagaccgagagaaagaacttcctggccgtgcagaagagcgtgagaaccatccaggccgccttcagaggcatgaaggtgagacagaagctgaagaacgtgagcgaggagaagatggccgccatcgtgaaccagagcgccctgtgctgctacagaagcaagacccagtacgaggccgtgcagagcgagggcgtgatgatccaggagtggtacaaggccagcggcctggcctgcagccaggaggccgagtaccacagccagagcagagccgccgtgaccatccagaaggccttctgcagaatggtgaccagaaagctggagacccagaagtgcgccgccctgagaatccagttcttcctgcagatggccgtgtacagaagaagattcgtgcagcagaagagagccgccatcaccctgcagcactacttcagaacctggcagaccagaaagcagttcctgctgtacagaaaggccgccgtggtgctgcagaaccactacagagccttcctgagcgccaagcaccagagacaggtgtacctgcagatcagaagcagcgtgatcatcatccaggccagaagcaagggcttcatccagaagagaaagttccaggagatcaagaacagcaccatcaagatccaggccatgtggagaagatacagagccaagaagtacctgtgcaaggtgaaggccgcctgcaagatccaggcctggtacagatgctggagagcccacaaggagtacctggccatcctgaaggccgtgaagatcatccagggctgcttctacaccaagctggagagaaccagattcctgaacgtgagagccagcgccatcatcatccagagaaagtggagagccatcctgcccgccaagatcgcccacgagcacttcctgatgatcaagagacacagagccgcctgcctgatccaggcccactacagaggctacaagggcagacaggtgttcctgagacagaagagcgccgccctgatcatccagaagtacatcagagccagagaggccggcaagcacgagagaatcaagtacatcgagttcaagaagagcaccgtgatcctgcaggccctggtgagaggctggctggtgagaaagagattcctggagcagagagccaagatcagactgctgcacttcaccgccgccgcctactaccacctgaacgccgtgagaatccagagagcctacaagctgtacctggccgtgaagaacgccaacaagcaggtgaacagcgtgatctgcatccagagatggttcagagccagactgcaggagaagagattcatccagaagtaccacagcatcaagaagatcgagcacgagggccaggagtgcctgagccagagaaacagagccgccagcgtgatccagaaggccgtgagacacttcctgctgagaaagaagcaggagaagttcaccagcggcatcatcaagatccaggccctgtggagaggctacagctggagaaagaagaacgactgcaccaagatcaaggccatcagactgagcctgcaggtggtgaacagagagatcagagaggagaacaagctgtacaagagaaccgccctggccctgcactacctgctgacctacaagcacctgagcgccatcctggaggccctgaagcacctggaggtggtgaccagactgagccccctgtgctgcgagaacatggcccagagcggcgccatcagcaagatcttcgtgctgatcagaagctgcaacagaagcatcccctgcatggaggtgatcagatacgccgtgcaggtgctgctgaacgtgagcaagtacgagaagaccaccagcgccgtgtacgacgtggagaactgcatcgacatcctgctggagctgctgcagatctacagagagaagcccggcaacaaggtggccgacaagggcggcagcatcttcaccaagacctgctgcctgctggccatcctgctgaagaccaccaacagagccagcgacgtgagaagcagaagcaaggtggtggacagaatctacagcctgtacaagctgaccgcccacaagcacaagatgaacaccgagagaatcctgtacaagcagaagaagaacagcagcatcagcatccccttcatccccgagacccccgtgagaaccagaatcgtgagcagactgaagcccgactgggtgctgagaagagacaacatggaggagatcaccaaccccctgcaggccatccagatggtgatggacaccctgggcatcccctactag

SEQ ID NO: 196827 - protein, 837 aa, Artificial Sequence
  derived and/or modified sequence
MAKAAASSSLEDLDLSGEEVQRLTSAFQDPEFRRMFSQYAEELTDPENRRRYEAEITALERERGVEVRFVHPEPGHVLRTSLDGARRCFVNVCSNALVGAPSSRPGSGGDRGAAPGSHWSLPYSLAPGREYAGRSSSRYMVYDVVFHPDALALARRHEGFRQMLDATALEAVEKQFGVKLDRRNAKTLKAKYKGTPEAAVLRTPLPGVIPARPDGEPKGPLPDFPYPYQYPAAPGPRAPSPPEAALQPAPTEPRYSVVQRHHVDLQDYRCSRDSAPSPVPHELVITIELPLLRSAEQAALEVTRKLLCLDSRKPDYRLRLSLPYPVDDGRGKAQFNKARRQLVVTLPVVLPAARREPAVAVAAAAPEESADRSGTDGQACASAREGEAGPARSRAEDGGHDTCVAGAAGSGVTTLGDPEVAPPPAAAGEERVPKPGEQDLSRHAGSPPGSVEEPSPGGENSPGGGGSPCLSSRSLAWGSSAGRESARGDSSVETREESEGTGGQRSACAMGGPGTKSGEPLCPPLLCNQDKETLTLLIQVPRIQPQSLQGDLNPLWYKLRFSAQDLVYSFFLQFAPENKLSTTEPVISISSNNAVIELAKSPESHGHWREWYYGVNNDSLEERLFVNEENVNEFLEEVLSSPFKQSMSLTPPLIEVLQVTDNKIQINAKLQECSNSDQLQGKEERVNEESHLTEKEYIEHCNTPTTDSDSSIAVKALQIDSFGLVTCFQQESLDVSQMILGKSQQPESKMQSEFIKEKSATCSNEEKDNLNESVITEEKETDGDHLSSLLNKTTVHNIPGFDSIKETNMQDGSVQVIKDHVTNCAFSFQNSLLYDLD

SEQ ID NO: 196828 - DNA, 2514 bp, Artificial Sequence
  derived and/or modified sequence
atggccaaggccgccgccagcagcagcctggaggacctggacctgagcggcgaggaggtgcagagactgaccagcgccttccaggaccccgagttcagaagaatgttcagccagtacgccgaggagctgaccgaccccgagaacagaagaagatacgaggccgagatcaccgccctggagagagagagaggcgtggaggtgagattcgtgcaccccgagcccggccacgtgctgagaaccagcctggacggcgccagaagatgcttcgtgaacgtgtgcagcaacgccctggtgggcgcccccagcagcagacccggcagcggcggcgacagaggcgccgcccccggcagccactggagcctgccctacagcctggcccccggcagagagtacgccggcagaagcagcagcagatacatggtgtacgacgtggtgttccaccccgacgccctggccctggccagaagacacgagggcttcagacagatgctggacgccaccgccctggaggccgtggagaagcagttcggcgtgaagctggacagaagaaacgccaagaccctgaaggccaagtacaagggcacccccgaggccgccgtgctgagaacccccctgcccggcgtgatccccgccagacccgacggcgagcccaagggccccctgcccgacttcccctacccctaccagtaccccgccgcccccggccccagagcccccagcccccccgaggccgccctgcagcccgcccccaccgagcccagatacagcgtggtgcagagacaccacgtggacctgcaggactacagatgcagcagagacagcgcccccagccccgtgccccacgagctggtgatcaccatcgagctgcccctgctgagaagcgccgagcaggccgccctggaggtgaccagaaagctgctgtgcctggacagcagaaagcccgactacagactgagactgagcctgccctaccccgtggacgacggcagaggcaaggcccagttcaacaaggccagaagacagctggtggtgaccctgcccgtggtgctgcccgccgccagaagagagcccgccgtggccgtggccgccgccgcccccgaggagagcgccgacagaagcggcaccgacggccaggcctgcgccagcgccagagagggcgaggccggccccgccagaagcagagccgaggacggcggccacgacacctgcgtggccggcgccgccggcagcggcgtgaccaccctgggcgaccccgaggtggcccccccccccgccgccgccggcgaggagagagtgcccaagcccggcgagcaggacctgagcagacacgccggcagcccccccggcagcgtggaggagcccagccccggcggcgagaacagccccggcggcggcggcagcccctgcctgagcagcagaagcctggcctggggcagcagcgccggcagagagagcgccagaggcgacagcagcgtggagaccagagaggagagcgagggcaccggcggccagagaagcgcctgcgccatgggcggccccggcaccaagagcggcgagcccctgtgcccccccctgctgtgcaaccaggacaaggagaccctgaccctgctgatccaggtgcccagaatccagccccagagcctgcagggcgacctgaaccccctgtggtacaagctgagattcagcgcccaggacctggtgtacagcttcttcctgcagttcgcccccgagaacaagctgagcaccaccgagcccgtgatcagcatcagcagcaacaacgccgtgatcgagctggccaagagccccgagagccacggccactggagagagtggtactacggcgtgaacaacgacagcctggaggagagactgttcgtgaacgaggagaacgtgaacgagttcctggaggaggtgctgagcagccccttcaagcagagcatgagcctgaccccccccctgatcgaggtgctgcaggtgaccgacaacaagatccagatcaacgccaagctgcaggagtgcagcaacagcgaccagctgcagggcaaggaggagagagtgaacgaggagagccacctgaccgagaaggagtacatcgagcactgcaacacccccaccaccgacagcgacagcagcatcgccgtgaaggccctgcagatcgacagcttcggcctggtgacctgcttccagcaggagagcctggacgtgagccagatgatcctgggcaagagccagcagcccgagagcaagatgcagagcgagttcatcaaggagaagagcgccacctgcagcaacgaggagaaggacaacctgaacgagagcgtgatcaccgaggagaaggagaccgacggcgaccacctgagcagcctgctgaacaagaccaccgtgcacaacatccccggcttcgacagcatcaaggagaccaacatgcaggacggcagcgtgcaggtgatcaaggaccacgtgaccaactgcgccttcagcttccagaacagcctgctgtacgacctggactag

SEQ ID NO: 196829 - DNA, 2963 bp, Artificial Sequence
  derived and/or modified sequence
cccagaaactctgaggcggatcccccaacccagtgtcagactgatcgcctttggcccgagggcgaggagccacaggacagtatggccaaagcggcggcctcctcgtcgctggaggacttggacctgagcggagaggaggtccagcggctcacctccgccttccaggacccggagttccggcgaatgttctcccagtacgccgaggagctcaccgacccggagaaccggcggcgctacgaggcggagatcaccgcgctagagcgtgagcgcggggtggaagtgcggttcgtgcacccggagcccggccatgtgctgcgcaccagcctggacggggcgcggcgctgctttgtgaatgtctgcagcaacgcgttggtgggcgcgcccagcagccggcccggctccggtggcgaccggggcgcagctcctggcagccactggtccctgccctacagcctggcgcccggccgcgagtacgcggggcgcagcagcagccgctacatggtctacgacgtggtcttccatccagacgcgcttgcgctggcccggcggcacgagggcttccgccagatgctggacgccacggccctggaggccgtcgagaagcagttcggcgtgaagctggaccgcaggaatgccaagaccctgaaggccaagtataaggggaccccagaggctgcggtgctgcgcacgcccctgcccggggtcatccccgcaaggcctgacggggagccgaagggtcctctcccggacttcccctacccttaccagtacccggcagcccccgggccccgggcgccctcccctccggaagcggccttgcagcccgcccccaccgagcctcgctacagcgtggtgcagcgccaccacgtggacctccaggattaccgctgctccagggactcagccccgagccccgtgccccatgagctggtgatcaccatcgaactgccgctgttgcgctcggccgagcaggcggcgctggaggtaacgagaaagctgctgtgcctcgactcgaggaaacctgactaccggctgcggctctcgctcccgtacccagtggacgatggccgcggcaaggcacaattcaacaaggcccggcggcagctggtggttacgctgccagtggtgctgccggccgcgcgccgggagcccgctgtcgccgtcgccgccgccgcgccggaagagtccgcggaccggtccggaactgacggccaggcctgcgcttccgctcgcgagggggaggcgggacccgcgaggagtcgcgcggaggacggaggccacgatacctgcgtggctggggctgcgggctccggggtcaccaccctgggcgacccggaggtggcgcctccgccggccgcagctggagaggagcgtgtccccaagccgggggagcaggacttgagcaggcacgcggggtcaccgccgggcagcgtggaggagccatctcctggaggagaaaactcacctggtggcggaggctccccttgtttgtcctcccggagcctggcgtggggttcttctgcgggaagagagagtgcgcgcggagatagcagtgtggaaacacgcgaggagtcggagggcacgggcggccagcgctcagcctgcgccatgggtggtcccgggaccaagagcggggagcctttgtgtcctccgttactgtgtaatcaggacaaagaaaccttgactctgctcattcaggtgcctcggatccagccgcaaagtcttcaaggagatttgaatcccctctggtacaaattacgcttctccgcacaagacttagtttattccttctttttgcaatttgctccagagaataaattgagtaccacagaacctgtgattagcatttcttcaaacaatgcagtgatagaactggcaaaatctccagagagccatggacattggagagagtggtattatggtgtaaacaacgattctttggaggaaaggttatttgtcaatgaagaaaatgttaatgagtttcttgaagaggtcctgagctctccattcaaacagtctatgtccttgaccccaccattaattgaagttcttcaagttactgataataagattcaaattaatgcaaagttgcaagaatgtagtaactctgatcagctacaaggaaaggaggaaagagtaaatgaagaaagtcatctaactgaaaaggaatatatagaacattgtaacacccctacaactgattctgattcatctatagcagttaaagcactacaaatagatagctttggtttagttacatgctttcaacaagagtctcttgatgtttctcaaatgatacttggaaaatctcagcaacctgagtcaaaaatgcaatctgaatttataaaagaaaaaagtgctacttgttcaaatgaggaaaaagataacttaaacgagtcagtaataactgaagagaaagaaacagatggagatcacctatcttcattactgaacaaaactacggttcacaatatacctggattcgacagcataaaagaaaccaatatgcaggatggtagtgtgcaggtcattaaagatcatgtgaccaattgtgcattcagttttcagaattctttgctatatgatttggattaattctatataattttggacttttaaatattaaggttaaaaaatacctgtatctaaaattgattctgttaactgttgtcttaaaactaaaggtattaaagtataaaattaaaatttgcaattttttttaaaaaattgcaattttgattctcatgggggaaattggagataatttttttttttttgcctctggagtttaaagtttccttatggagataagttttgtgattcctgtaatagatgtgtatgttttctatttgagagttaaaacatttgagagttaaaacatttagttttaatacaacctatgtatatatacttctgtgttaaattttgctttgtcattaataaaatttaaaaatattcactaa

SEQ ID NO: 196830 - DNA, 2514 bp, Artificial Sequence
  derived and/or modified sequence
atggctaaggcggctgcatcgtcatctctggaagacttagatttatctggcgaggaagtgcagcgtctgacctctgcattccaggatcctgagttccggagaatgttctcacagtatgccgaggaactgacagaccctgaaaacaggagaaggtatgaggccgaaataacagccctggaacgggaacgaggcgtggaggtgaggtttgtgcatccagagcccggacacgtgctgagaacaagtctcgacggcgcccgccgctgcttcgtaaatgtctgtagcaacgccctggttggagcaccctccagccggcccgggagtggaggcgaccgaggcgctgccccagggtcgcattggtccttaccttactcactggccccaggtagagagtacgcgggacgctctagttcccgatacatggtgtacgatgtagtgtttcatcccgacgccctggctttagcgcgcaggcacgaaggttttcgccaaatgctcgatgctactgcactcgaagcagttgaaaagcagttcggtgttaagctggacagacgaaatgcaaagaccctcaaggcaaaatacaagggtacgccagaggccgcagtgttgcgtacccccctccccggcgtgatacctgcaaggccagacggtgaacctaaaggacctctgcccgattttccctacccatatcaatatccagcagctccaggtccacgggctccgagcccacccgaagctgcattgcaaccagcccccacggaaccacgctattccgtggtacagcggcatcacgtggatctacaggattaccgctgctcacgggatagcgcacctagccctgtacctcatgaactggtcatcactattgaattaccacttctgcgctccgccgaacaggccgctttagaagtcacccggaagctcctctgtctggactcccggaagcctgactataggctacgactgagcctcccctacccagtagacgacggcagaggaaaagcccaattcaacaaggccaggcggcagttggtggtgacactgccagttgtgcttcccgcagcaagacgcgaacccgcagtggctgttgcggccgcggcgcccgaggaaagcgccgaccgctcagggacggatggccaggcctgtgcaagtgcccgggagggggaggctggacctgcccgatccagggcagaggacggaggacatgacacctgtgtcgcaggggccgcaggtagtggcgtcacaactctgggtgaccccgaagtggccccacccccagcggcagcaggcgaagaaagagttcctaaacctggggagcaggatctgtcgcgacatgccggcagccctcccgggagtgtagaggagccctcgcctggtggagagaacagccccggaggcggagggtcaccctgcctgtcgtctaggtccctggcctggggtagctccgccgggagagagtctgccagaggtgactcgagcgtggaaaccagggaggagagtgaaggcaccggcggccagcgatcggcatgcgccatgggtggcccagggaccaaatcaggggaacccttgtgccctccattgctttgcaaccaggacaaggaaactctgactctattaatccaggtccctcgtattcagccgcagagtctccagggagacttgaaccccctgtggtacaagttgcgctttagtgcacaggatctcgtctattccttctttctgcagttcgcccctgagaacaagctctccaccacagaacccgtaatttccatatcatctaacaacgcagtcattgaattggccaaatctcccgaatctcacgggcactggcgtgaatggtactatggggttaacaacgactcgttggaggagaggctgtttgtcaacgaggagaacgtaaatgaattcttggaagaggtcttgtcctctccatttaagcaaagcatgagcctgactcccccactaattgaggtcctgcaggtgaccgataataagatacagataaatgcaaaattgcaggagtgcagcaactctgaccagctccaaggtaaggaggagcgggtgaatgaggaatctcacctgacagaaaaggagtacatcgaacactgtaatacgccaacaactgactcagactcttccatagccgtcaaggccctacagatagattcctttggcttagttacatgtttccagcaagaaagtctagacgtgagccaaatgatcctcggcaagtcacaacagcctgagtcaaagatgcagtccgagttcattaaggaaaaatccgccacttgctcaaatgaagaaaaggacaacctcaacgagtccgtcattactgaggaaaaagagacggacggcgaccacctgtcaagcctgctgaacaagaccaccgttcataacataccagggttcgattctattaaggagactaacatgcaagatggctctgttcaggtgattaaagatcacgtgaccaactgtgccttctcattccaaaactctctgctgtatgacctggattag

SEQ ID NO: 196831 - DNA, 2514 bp, Artificial Sequence
  derived and/or modified sequence
atggccaaggctgctgccagcagcagcctggaggacctggacctgagcggggaggaggtgcagaggctgaccagcgccttccaggaccctgagttccggaggatgttcagccagtatgcagaggagctgacagatcctgaaaatagaagaagatatgaggccgagatcacagccctggagcgggagcggggcgtggaggtgcgctttgtgcaccctgagcccggccacgtgctgcggaccagcctggatggagcccggcgctgctttgtgaatgtgtgcagcaatgccctggtgggcgcccccagcagcaggcctggcagcggcggggacagaggagctgcccctggcagccactggagcctgccctacagcctggcccctggccgggagtatgccggccgcagcagcagccgctacatggtgtatgatgtggtgttccacccagatgccctggccctggccaggagacatgagggcttccggcagatgctggatgccacagccctggaggccgtggagaagcagtttggagtgaagctggacagaagaaatgccaagaccctgaaggccaagtacaagggcaccccagaggccgctgtgctgcggacccccctgcccggggtcatcccagcccggccagatggagagcccaagggccccctgcctgacttcccctacccctaccagtacccagctgcccctggcccccgggcccccagccccccagaggccgccctgcagcctgcccccacagagccccgctacagcgtggtgcagaggcaccacgtggacctgcaggactaccgctgcagccgggacagcgcccccagccctgtgccccatgagctggtgatcaccatcgagctgcccctgctgcggtctgctgagcaggccgccctggaggtgaccaggaagctgctgtgcctggacagcaggaagccagactaccgcctgcggctgagcctgccctaccctgtggatgatggccggggcaaggcccagttcaacaaggcccggcggcagctggtggtgaccctgcctgtggtgctgcctgctgcccggcgggagcctgctgtggccgtggccgccgccgcccctgaggagagcgctgacagaagtggcacagatggccaggcctgtgccagcgcccgggagggggaggccggccctgcccggagcagagcagaagatggcggccatgacacctgtgtggccggggccgccggcagcggcgtgaccaccctgggggaccctgaggtggcccctcctcctgctgctgctggggaggagcgggtgcccaagccaggagagcaggacctgagcagacatgctggcagccccccaggctctgtggaggagcccagccctggaggagagaacagccctgggggcggcggcagcccctgcctgagcagccgcagcctggcctggggcagcagcgctggccgggagagcgcccggggggacagctctgtggagacccgggaggagagcgagggcactggaggccagaggtctgcctgtgccatgggcggccctggcaccaagtctggagagcccctgtgcccccccctgctgtgcaaccaggacaaggagaccctgaccctgctgatccaggtgccccgcatccagccccagagcctgcagggcgacctgaaccccctgtggtacaagctgcgcttcagcgcccaggacctggtgtacagcttcttcctgcagtttgcccctgagaacaagctgagcaccacagagcctgtgatcagcatcagcagcaacaatgctgtgattgagctggccaagagccctgagagccacggccactggagggagtggtactatggagtgaacaatgacagcctggaggagcggctgtttgtgaatgaagaaaatgtgaatgagttcctggaggaggtgctgagcagccccttcaagcagagcatgagcctgaccccacccctcatcgaggtgctgcaggtgacagacaacaagatccagatcaatgccaagctgcaggagtgcagcaacagcgaccagctgcagggcaaggaggagcgggtgaatgaggagagccacctgacagagaaggagtacatcgagcactgcaacacccccaccacagacagcgacagcagcattgctgtgaaggccctgcagattgacagctttggcctggtgacctgcttccagcaggagagcctggatgtgtcccagatgatcctgggcaagagccagcagcctgagagcaagatgcagagcgagttcatcaaggagaagagcgccacctgcagcaatgaggagaaggacaacctgaatgaatctgtcatcacagaggagaaggagacagatggagaccacctgagcagcctgctgaacaagaccaccgtgcacaacatccctggctttgacagcatcaaggagaccaacatgcaggacggctctgtgcaggtgatcaaggaccacgtgaccaactgtgccttctccttccagaacagcctgctgtatgacctggactag

SEQ ID NO: 196832 - DNA, 2514 bp, Artificial Sequence
  derived and/or modified sequence
atggccaaggccgccgccagcagcagcctggaggacctggacctgagcggggaggaagtgcagaggctcacatctgcattccaggatccagagtttcgtagaatgttttcacagtatgcagaggaattgaccgatcctgaaaacagaagacgctacgaagccgaaataacggcactggagcgtgagcgcggagtggaggtccgattcgtgcacccggagccggggcacgtgctgcgaacgtcgctcgacggagctcggagatgtttcgtgaatgtgtgttctaatgctctcgtgggtgcgccgagcagccgccccggttcagggggggatagaggcgcggctccagggagtcactggtctctcccgtacagcctggcccctggaagagagtatgcgggacgcagttcctcacgttacatggtttatgatgtagttttccatcccgacgccctggccctggcccggagacacgaagggttccggcagatgctggacgcgaccgcgctcgaagcagtcgaaaaacagttcggtgtcaagctcgatcggcgcaatgcaaagaccctgaaagctaaatacaagggaaccccagaagccgccgtgctgcgcaccccactgcctggggttattccagcacgccccgatggcgagccaaagggtccactaccggacttcccgtacccatatcagtatcctgcagcgcctggacctcgcgctccttcgccacctgaggctgccttgcagccggccccaaccgaaccacgttactccgtggtgcaacgtcaccacgtcgacctccaagactatcgatgttctcgtgactcagccccatcgcccgttccccacgaactcgtgattaccattgagttgccgctgctgcgcagtgctgaacaggccgctctggaagtgactagaaaactgctttgtctggattcccgcaaacccgattacagattgcgcttgtcccttccctatccggtggatgacggtcgtggcaaggcgcaattcaataaggcacgacgtcagttggtcgtcacactgcccgtcgtgctgccagcagcccgacgggagcccgccgttgcagtggccgctgcggcgcccgaagaaagcgctgaccgcagcgggaccgatggccaggcttgcgccagcgcccgtgaaggtgaggcaggacccgctagatctcgcgccgaggacggggggcacgatacctgcgtcgcaggcgccgctggatcaggcgtgactactctaggagatccggaggtcgctcccccacctgctgcggccggggaagagcgcgtccccaaacctggtgagcaggacctaagccgacacgcagggtccccccctggcagcgttgaggagccaagtcctggcggcgaaaactctcccggcggcggtggctcaccatgcctgtcttctaggagcctggcctggggaagctcagctggacgggaatcagcaaggggcgacagttcggtggaaacgagagaagaatccgagggtaccggcgggcagaggtccgcctgtgctatgggaggcccaggcactaagagcggcgagccgttgtgcccccccctcctctgtaatcaggataaggaaaccctaaccctgttgatccaggttcctagaattcagccccagtctctccagggtgacctgaaccctctctggtacaagctccgcttcagcgcccaggacctggtatactcattttttttacagtttgctcctgaaaacaagctcagtactacggaaccagtcatttccatcagttctaataatgccgtgattgagcttgccaagtctcccgaatctcacgggcattggagagaatggtactatggagtgaataatgatagcctcgaagaacgcctcttcgtaaatgaggaaaacgtgaacgaattcctggaagaggtcctttcaagcccattcaaacaatccatgagtctgactccgccccttatcgaagtgttacaggtcaccgataacaagatccagataaatgccaaactgcaggagtgcagcaattcggaccagttgcaaggtaaggaagaacgagttaatgaggaaagtcacctgacggagaaggagtacatagagcactgcaacactccaacaacagatagtgattcttccatcgcagtgaaagcactgcagattgattcctttggcctcgtaacctgctttcagcaggaatcactcgacgtgtctcaaatgattttaggaaagtcacagcagccagagagtaagatgcagtccgagttcataaaggagaagtctgctacctgcagcaatgaggaaaaagataacttgaacgagtctgtgatcactgaagagaaggagactgatggcgaccatctgagctcactgctaaataagaccaccgttcataacatccctggtttcgattcaatcaaagagactaatatgcaggacggatccgtgcaggtgatcaaagatcatgtgactaactgtgccttttcattccagaattcactgctctacgacctagattag

SEQ ID NO: 196833 - DNA, 2514 bp, Artificial Sequence
  derived and/or modified sequence
atggctaaggccgcagctagctcctcactggaagatttggatctttccggtgaggaagtgcagcggcttacctccgcctttcaggatcccgagtttcggagaatgttctcacagtatgcagaggagctgacagaccccgagaataggagacggtatgaagccgaaatcaccgccctcgagcgagagaggggcgtagaagtgagattcgtccaccccgagcctgggcacgtcttacggacttcactggacggggctcgcaggtgcttcgtaaacgtgtgcagtaatgcgctcgtaggggctcccagtagtaggcccggatctggcggtgataggggggctgcaccagggagccactggagccttccctacagtttggcacccggtcgagaatacgcaggtcgctcctcttctagatacatggtgtacgacgtggtgtttcatcctgacgctcttgctctcgcgaggcgccatgagggattccgacagatgctcgatgccactgctctggaggctgtggagaaacagtttggtgtgaaactggataggagaaatgccaaaaccctgaaggccaagtacaagggcactccagaagctgcagttctgcggacaccccttcctggtgtcattcctgccagacccgatggcgagccgaaggggccattgccagatttcccctatccctatcagtacccggcagcgccaggacccagagctcccagccccccagaagcagccttgcagcccgcacctactgaaccacggtactctgtggtgcagcgccaccacgtagatctgcaggattaccgatgcagtcgggactctgccccttctcccgtgccacacgagctcgttatcacaatcgagctgccgcttctgaggtcggctgaacaggccgctttagaggtcacgaggaaactgctctgcctggattcccggaagccagattaccgtttacggttaagtcttccatacccagtcgacgatggacggggtaaggctcagttcaataaagccagaagacagttggtggtgaccctacccgtcgtgcttcccgctgcacgccgagaacccgctgtcgccgtggccgctgctgcccctgaggagagcgctgaccgctcggggactgatggacaggcctgcgcgagcgcgcgagaaggtgaggcgggtcccgctcggtctagggccgaagatggaggtcacgatacctgcgtcgccggagccgctgggagtggtgtgacaactctaggtgacccggaagtcgcgccacccccagctgccgcaggcgaagaacgcgtgccgaaacccggtgaacaggacctttcacgccatgccggttccccacccggaagcgtggaggagcctagcccaggcggagaaaattctcccggtgggggagggagcccttgcctctccagtcgatcgctcgcgtggggatcatcagccggaagagagagcgcgagaggcgattccagcgtggaaacgagagaggaatctgaagggaccgggggacagaggagcgcctgcgctatggggggaccgggaaccaagtccggtgaacccctgtgcccccctctcctgtgtaatcaagataaggaaacgctcaccctgctcatccaggtcccacgaatacaacctcagagtttgcaaggagacctaaatcccctttggtacaagctgcgattttccgcacaagaccttgtttacagcttctttctgcagtttgcccctgaaaataagttgtcaactacggagccggtcatctccatttcctctaataacgctgttatcgagcttgctaagtctcctgaaagtcacggtcactggagagagtggtattacggagtgaataatgacagtttggaggagcggctgttcgtcaatgaagagaacgtcaacgaatttttggaggaggtcctaagcagccctttcaagcagagcatgagcttgaccccccctttgatcgaggtcctgcaggtgaccgacaacaaaatacagattaacgccaagctgcaggaatgtagcaactctgatcagctgcagggcaaggaggaaagggtaaacgaggaatcacacctgacggaaaaggaatacattgaacactgtaatactcccactaccgatagcgatagctcaattgccgtgaaggctttgcagatcgatagctttggcctcgtcacctgctttcagcaagagagcttggacgtaagccaaatgatactcggtaaatctcaacagcctgaaagtaaaatgcagtccgagttcataaaagaaaagagtgccacatgtagcaatgaggagaaagacaaccttaacgaatctgtcatcactgaggaaaaggagaccgacggcgatcatctgtcaagcctgttgaataaaactacggtccacaacatcccaggttttgattccattaaggaaacaaacatgcaggatggttctgttcaggtgattaaggatcacgttaccaattgcgctttcagtttccagaactctcttttatacgacctggattag

SEQ ID NO: 196834 - protein, 647 aa, Artificial Sequence
  derived and/or modified sequence
MARAGPRLVLSEEAVRAKSGLGPHRDLAELQSLSIPGTYQEKITHLGHSLMSLTGLKSLDLSRNSLVSLEGIQYLTALESLNLYYNCISSLAEVFRLHALTELVDVDFRLNPVVKVEPDYRLFVVHLLPKLQQLDDRPVRASERKASRLHFASEDSLDSKESVPASLKEGRPHHPRAKCTEALAKQSLVMDADDEAVLNLIAECEWDLGRPPGSTSFSQKGREADSRGSQESRHLLSPQLVQYQCGDSGKQGRETRRSSCRGCCLEKMPWSQLCGELPPLYGAEPEASRAPRPHTYFTPHPDSMDTEDSASSQKLDLSGEMVPGPLPAPGKCRKRRMPVGRFQTFSDQEGLGCPERTHGSSVPKESLSRQDSSESRNGRTLSQPEASETEEQRSRGVTDTREPSPGSHSALPGKKTALQAALLETLLDLVDRSWGGCRSLHSNEAFLAQARHILSSVEEFTAAQDSSAMVGEDVGSLALESKSLQSRLAEQQQQHAREMSEVTAELHHTHKELDDLRQHLDKSLEENSRLKSLLLSMKKEVKSADTAATLNLQIAGLQTSVKRLCGEIVELKQHLEHYDKIQELTQMLQESHSSLVSTNEHLLQELSQVRAQHRAEVEQMHWSYQELKKTMALFPHSSASHGGCQAC

SEQ ID NO: 196835 - protein, 193 aa, Artificial Sequence
  derived and/or modified sequence
MARAGPRLVLSEEAVRAKSGLGPHRDLAELQSLSIPGTYQEKITHLGHSLMSLTGLKSLDLSRNSLVSLEGIQYLTALESLNLYYNCISSLAEVFRLHALTELVDVDFRLNPVVKVEPDYRLFVVHLLPKLQQLDDRPVRASERKASRLHFASEDSLDSKESVPASLKEGRIQTSVEPAVGTVPVWGLWEAGP

SEQ ID NO: 196836 - DNA, 582 bp, Artificial Sequence
  derived and/or modified sequence
atggccagagccggccccagactggtgctgagcgaggaggccgtgagagccaagagcggcctgggcccccacagagacctggccgagctgcagagcctgagcatccccggcacctaccaggagaagatcacccacctgggccacagcctgatgagcctgaccggcctgaagagcctggacctgagcagaaacagcctggtgagcctggagggcatccagtacctgaccgccctggagagcctgaacctgtactacaactgcatcagcagcctggccgaggtgttcagactgcacgccctgaccgagctggtggacgtggacttcagactgaaccccgtggtgaaggtggagcccgactacagactgttcgtggtgcacctgctgcccaagctgcagcagctggacgacagacccgtgagagccagcgagagaaaggccagcagactgcacttcgccagcgaggacagcctggacagcaaggagagcgtgcccgccagcctgaaggagggcagaatccagaccagcgtggagcccgccgtgggcaccgtgcccgtgtggggcctgtgggaggccggcccctag

SEQ ID NO: 196837 - DNA, 1944 bp, Artificial Sequence
  derived and/or modified sequence
atggcccgtgctgggccacggttagtcctgtctgaagaagcggtacgggcaaagagtggtctgggtcctcaccgcgatcttgctgagctgcaaagcctgagcatacctggaacatatcaggagaagataacgcatctcgggcactccttgatgtccctcaccggcttaaagtcacttgacctctcccggaactcgctggtttccttggaggggattcagtatcttacagccctggaatccctgaacctttattacaattgcatttcttcactggcagaagtatttaggctgcacgctctgacggagcttgtcgatgtggacttccggctcaatcctgtagtgaaagtggaacctgactacaggttgttcgtggtgcatctgctcccgaagctgcaacagctcgatgatagaccagtcagagcaagtgagaggaaggctagccggctgcatttcgcttccgaagatagtctggactctaaggagagtgtgcctgcgagcttaaaagaggggcggccccatcacccccgagccaaatgtacggaggctctcgcaaagcagtctttggtgatggacgccgatgatgaggccgtcctcaacctgatcgccgaatgcgagtgggacctgggcagacccccgggatccacttcattttctcagaaaggacgtgaagctgatagcaggggatcccaggagtccagacatttgctctccccacagcttgtacaataccagtgcggggactccggaaagcaggggagagagacaagacggtcctcctgcaggggctgttgtctggaaaaaatgccttggagccagttatgtggcgagcttcccccactgtacggcgctgaaccggaagctagccgcgcccctcggccccacacatattttaccccccatcccgactctatggacacagaggattctgccagctctcagaagctcgacctgagcggtgagatggtgcccggcccccttccagctcccggaaagtgcaggaagaggagaatgcccgtggggaggttccaaacattcagtgaccaggagggattaggctgtcctgagcgaacgcatggtagctcagttcccaaggagagccttagcagacaggactcctccgagagccggaatggcagaactttgtcccagcctgaggcaagcgaaacggaagagcagaggagtaggggggtcaccgatactcgcgaaccgagtccaggaagccacagcgccctgcccggtaaaaagacagcgctgcaggctgcattactggaaaccttgctggacctggtcgataggagttggggtgggtgccgtagcttgcacagcaatgaggcattccttgcacaggcccgacacatactgagtagtgtcgaggagtttacggcagcccaggattccagcgccatggtgggcgaagacgtgggcagtttagcgctggagagcaaatcgcttcagagtagactggctgagcagcagcagcagcatgcacgcgaaatgtcagaggtgaccgccgagttgcatcatacccataaggagctcgacgatttacggcaacacctggacaaatccctagaagagaactcacgccttaaatccctactgctctcaatgaagaaagaggtgaaaagtgcagacaccgcagcgacccttaatcttcaaatcgcagggttacagacctccgtgaaaagactgtgcggagagatcgtggaactcaagcagcacttggaacactacgacaagatccaggagctcacgcaaatgctccaggagtctcattctagcctcgtctcaaccaatgagcaccttttgcaggagttgtcccaggtccgggcccaacatagggctgaggtggagcagatgcattggagttaccaggagctgaagaaaaccatggcactcttcccccacagtagtgcttctcacggcggctgtcaggcctgttag

SEQ ID NO: 196838 - DNA, 582 bp, Artificial Sequence
  derived and/or modified sequence
atggcccgcgcaggccctcggttggtgctcagcgaggaagcagtaagggctaagagtggactgggtccacatcgggacctggccgagttgcagagcttgagtatccctggcacttaccaggagaaaatcacccacttaggccactcactgatgagcctgaccggactaaagagtctcgatctgtccagaaatagcctggtgtctctggaaggcatccagtatttgactgctttagaatcattaaacttgtattacaactgcatcagctctcttgccgaggtgttccgcctccatgcactgactgaactcgtggatgttgacttccgtctcaaccccgtggtgaaggtggagcccgactatagactgttcgtcgtgcacctgctgccgaaactgcagcagttggatgatagacccgttcgagccagtgaacgcaaagcaagcagattgcatttcgcctctgaagacagtctggacagtaaggagtccgtgcctgctagcctgaaggaggggaggattcaaacgagcgtggaacccgcggtggggacagtgcccgtttggggcttgtgggaggctggaccatag

SEQ ID NO: 196839 - DNA, 1944 bp, Artificial Sequence
  derived and/or modified sequence
atggcccgggccggcccccggctggtgctgtctgaggaggccgtgcgggccaagagcggcctgggcccccaccgggacctggccgagctgcagagcctgagcatccctggcacctaccaggagaagatcacccacctgggccacagcctgatgagcctgaccggcctgaagagcctggacctgagcaggaacagcctggtgtccctggagggcatccagtacctgacagccctggagagcctgaacctgtactacaactgcatcagcagcctggccgaggtgttccggctgcacgccctgacagagctggtggatgtggacttccggctgaaccctgtggtgaaggtggagccagactaccgcctgtttgtggtgcacctgctgcccaagctgcagcagctggatgacaggcctgtgcgggccagcgagaggaaggccagccggctgcactttgccagcgaggacagcctggacagcaaggagagcgtgcctgccagcctgaaggagggccggccccaccacccccgggccaagtgcacagaggccctggccaagcagagcctggtgatggatgctgatgatgaggccgtgctgaacctgattgctgaatgtgagtgggacctgggccggcccccaggcagcaccagcttcagccagaagggccgggaggccgacagccggggcagccaggagagccgccacctgctgagcccccagctggtgcagtaccagtgtggggacagcggcaagcagggccgggagacccggcgcagcagctgccggggctgctgcctggagaagatgccctggagccagctgtgtggggagctgccccccctgtatggagctgagcctgaggccagccgggccccccggccccacacctacttcaccccccacccagacagcatggacacagaagattctgccagcagccagaagctggacctgagcggggagatggtgcccggccccctgcctgcccctggaaaatgtaggaagaggaggatgcctgtgggccgcttccagaccttcagtgaccaggagggcctgggctgcccagagaggacccacggcagctctgtgcccaaggagagcctgagccggcaggacagcagcgagagcagaaatggaagaaccctgagccagcctgaggccagcgagacagaggagcagaggagccggggcgtgacagacacccgggagcccagccctggcagccacagcgccctgcccgggaagaagacagccctgcaggccgccctgctggagaccctgctggacctggtggaccgctcctggggcggctgccgcagcctgcacagcaatgaggccttcctggcccaggcccggcacatcctgagctctgtggaggagttcaccgctgcccaggacagcagcgccatggtgggggaggatgtgggcagcctggccctggagagcaagagcctgcagagccggctggccgagcagcagcagcagcacgcccgggagatgtctgaggtgacagctgagctgcaccacacccacaaggagctggatgacctgcggcagcacctggacaagagcctggaggagaacagccggctgaagagcctgctgctgtccatgaagaaggaggtgaagtctgctgacacagctgccaccctgaacctgcagattgctggcctgcagacctctgtgaagaggctgtgtggggagatcgtggagctgaagcagcacctggagcactatgacaagatccaggagctgacccagatgctgcaggagagccacagcagcctggtgtccaccaatgagcacctgctgcaggagctgagccaggtgcgggcccagcacagagctgaggtggagcagatgcactggagctaccaggagctgaagaagaccatggccctcttcccccacagcagcgccagccatggaggctgccaggcctgctag

SEQ ID NO: 196840 - DNA, 582 bp, Artificial Sequence
  derived and/or modified sequence
atggcccgggccggcccccggctggtgctgtctgaggaggccgtgcgggccaagagcggcctgggcccccaccgggacctggccgagctgcagagcctgagcatccctggcacctaccaggagaagatcacccacctgggccacagcctgatgagcctgaccggcctgaagagcctggacctgagcaggaacagcctggtgtccctggagggcatccagtacctgacagccctggagagcctgaacctgtactacaactgcatcagcagcctggccgaggtgttccggctgcacgccctgacagagctggtggatgtggacttccggctgaaccctgtggtgaaggtggagccagactaccgcctgtttgtggtgcacctgctgcccaagctgcagcagctggatgacaggcctgtgcgggccagcgagaggaaggccagccggctgcactttgccagcgaggacagcctggacagcaaggagagcgtgcctgccagcctgaaggagggccgcatccagacctctgtggagcctgctgtgggcaccgtgcctgtgtggggcctgtgggaggccggcccctag

SEQ ID NO: 196841 - DNA, 1944 bp, Artificial Sequence
  derived and/or modified sequence
atggcccgggccggcccccggctggtgctgagcgaggaggccgtgcgcgctaaatccggactcggcccccaccgggaccttgccgagcttcagagtctctccatacctggaacctaccaagaaaagatcacccacctaggtcacagcctgatgtctttgaccggattaaaatcgctggacctctcgaggaactcactcgtgagcctcgaggggatccaatacctcactgctctggaatccctgaatctgtattataactgcatctcctccctagcagaggtctttcgacttcacgctctgacagagctggtggatgtagactttcgcctcaatccagtcgtaaaggttgaaccagactacagactcttcgtggtacacctcttgccaaagctccagcagctggacgatcgccctgtgagagcatcagagaggaaggcctcccggctgcactttgccagcgaagacagtctcgactccaaggagtcagtccctgcctcgctgaaagaggggagaccacaccacccgcgcgccaagtgtaccgaagccctggctaaacaaagcctggtgatggatgccgacgatgaagccgttttgaatctgatcgcagagtgcgaatgggacttgggcaggcctcccggcagtacatccttttcccagaagggtagggaggccgactcccggggctcccaagagagccgccacctcttatctccgcagttggttcagtaccaatgcggagactcaggaaagcagggacgcgaaacacgcagatcctcttgccgaggttgttgtctggaaaagatgccctggagtcagctgtgtggtgaacttccacccctatacggcgcagagcccgaggcctcgagggctcctcgtccacatacatactttacaccacatcctgattccatggacaccgaggatagcgcatcatctcaaaagctggatctgtccggtgaaatggtccctggccctctaccagctcccggcaaatgtcgcaagcgcagaatgcctgtgggtcgcttccagactttttccgatcaggagggattgggttgtccggaacgaacacacggcagtagcgtcccgaaggagtcactctctagacaagatagctcagaaagtaggaacggtagaaccctttctcaacccgaagcatcggagacagaagaacagagatctcgcggcgtcactgatactcgtgagccatccccaggctcccactccgctctccctggaaagaagacagcgctgcaggccgcactactggaaaccctcttagatctggtggatagaagctggggtggctgccgatctctgcacagcaatgaagcttttctcgcccaggcaagacatatattgagcagtgttgaggagttcactgctgcccaggactcctctgccatggtcggcgaggatgtggggagtctggcccttgaaagcaaaagcctacagtctagacttgcagagcagcaacaacagcacgcccgcgagatgagcgaagtgacagctgaactgcaccacactcataaggaacttgacgatttgagacaacatcttgataagtctcttgaggaaaatagccgactcaaatcccttctactcagtatgaaaaaggaggttaaaagcgctgacactgctgcgacactcaacctgcagattgccggactacagacctcagtgaagaggctgtgcggggagatcgtcgagctgaaacagcatctggaacattatgacaaaattcaggaactcacacagatgctgcaggagtcccactcttcactggtcagcaccaacgaacacctgctgcaggagttgtcacaggttagagcccagcacagggccgaagtcgagcagatgcattggtcttaccaagagcttaaaaaaaccatggcactcttcccacatagtagcgccagccacggggggtgccaggcatgttag

SEQ ID NO: 196842 - DNA, 582 bp, Artificial Sequence
  derived and/or modified sequence
atggcccgggccggcccccggctggtgctgagcgaggaggccgtgcgggccaaatccgggttgggcccacatcgcgacctcgctgaactgcagagtttgagcattccaggtacgtaccaggaaaagattactcatctgggccacagtctcatgagcctgaccggactcaaatcattggatctgagccgcaacagcctggtatctttggaagggattcaatacctcacggctctggagtccctgaatctctattacaattgtatatccagtcttgccgaggttttccgcctgcacgcactgacagaactcgttgatgtagatttcaggttgaaccccgtggtgaaggtggaacctgactacagactgtttgtggtgcaccttctccccaaactgcagcagctggatgaccgccctgtcagggcgagcgagcgaaaagcttcacggctacactttgcatcggaagactctctggatagcaaggaaagtgtccctgcgtctctgaaagaagggcgcatccagaccagtgtggagcctgctgttggtactgtgccagtgtggggtctttgggaggccggcccttag

SEQ ID NO: 196843 - DNA, 1944 bp, Artificial Sequence
  derived and/or modified sequence
atggccagggccggacccaggctcgtgctctccgaggaagcagtcagggccaagagtggcctgggaccccatcgggatctggctgaactgcagagcctgtccatccccggaacctatcaggaaaagattacacatctggggcacagcctcatgagcctaacgggactcaaaagcctggatttatctcggaactctctggtctccctggagggaatccagtatcttactgcgctggagagtttgaacctttactacaactgcatttcctcactggcggaagtctttagactccacgctctgactgagctcgtggatgtagacttcagacttaacccggtggtgaaagtggagccagactaccggttatttgtcgtgcacttgctgcccaagctgcagcagctcgatgaccgacctgtgagggcctctgaacggaaggcatctagactacacttcgccagcgaggattcactcgacagcaaagagtctgtccccgctagcttaaaagaaggacgaccccaccatcccagggccaagtgtactgaagcattggcaaagcagtccttggtgatggatgctgacgatgaagccgtgctaaatctgatagcggaatgtgaatgggacctcggtcggccacccggttctacttccttcagtcagaagggacgggaggctgactccagaggtagccaagaatcacgacaccttctgagtccccagttagtgcagtatcaatgtggagacagcgggaagcaagggagggagacccggagatcgtcctgccgaggatgctgcttagaaaagatgccgtggtcccaactctgcggagagcttccaccactatatggagcagagcccgaggcttcacgagctcctcgaccacatacttattttacgccccacccagatagtatggatacagaggattcagcctctagtcagaaattggatctgtcaggcgaaatggtccccggtcccctgcccgctccagggaagtgccgcaagcgacggatgcctgtcgggaggttccagacattctcagatcaggagggcttgggctgccctgaacggacacacggtagctccgttcccaaggaatccctcagtagacaagattcgagtgaatcacggaatgggaggactctgtctcagccggaagcatctgagaccgaagaacagcggtcccgaggggtgaccgacacccgcgagccgagtcctggatcccatagcgccctgcccggaaagaagaccgcgctgcaggctgcactcctcgagaccctactcgacctggtggatcgctcatggggtggatgtcgttctctgcatagtaacgaagctttccttgcacaagccaggcacatcctctctagcgttgaggagtttacagccgcacaggactcatccgcaatggtcggggaggatgtgggctcactagctctggagtccaagagcctccagtctcgcctggctgagcaacagcagcagcacgcaagggagatgtcagaggttacagctgagcttcaccatactcacaaagagctcgacgaccttaggcagcacctggacaagtcgctagaggaaaacagtcggctaaaaagtctgcttttgagtatgaaaaaggaagtgaagtctgcagacaccgctgccacgctgaacttacagatagcaggcttgcaaaccagtgtgaagagactgtgtggagagatcgtggagcttaagcagcacctggaacactatgacaagatccaggagctaacgcagatgctccaggagtctcattcatcccttgtttcaaccaacgaacacttactgcaagagctcagccaggtgagggctcagcatagggcagaggtggagcagatgcattggagttatcaggaattgaagaagaccatggctctttttccacattccagcgccagccacggcggatgccaggcatgttag

SEQ ID NO: 196844 - DNA, 582 bp, Artificial Sequence
  derived and/or modified sequence
atggccagagcgggtcccaggctggtcctgtctgaggaagctgtcagagccaagtccggcctgggaccccaccgcgacctcgccgagctccaatcattgagcattccgggtacataccaagaaaaaataacgcatctcggtcattcactgatgtccctgaccggcctgaagtctttggacctttcaaggaattccctggtgtctcttgaaggaatccagtacctgaccgccctagagagtctcaatctgtattacaactgtatcagcagcctggcagaagtattccgattgcacgccttgaccgagctggtggacgtggatttccggctcaaccccgtggttaaagtcgagcctgactaccgcctcttcgttgtgcatcttctgccgaagctccaacagcttgacgacagaccagtccgcgcaagcgagcgcaaggccagtcgcctacacttcgcttccgaggattccctagattcaaaggaatccgtgcccgcttccctcaaggagggacggattcagacatctgttgagcctgcagtcggcacagttcccgtgtgggggctttgggaggcaggaccctag

SEQ ID NO: 196845 - DNA, 2434 bp, Artificial Sequence
  derived and/or modified sequence
ggctctcggttctgccgacgcaggtcccgcccctctcgtagcctcgccccgcccgccgcgcaggcgccgtccgagggctccgtttgaaacatggcgcgggctggccctcggctggtgctgagcgaggaggcggttcgggcgaagagcggcttagggcctcaccgcgacctggctgagcttcagtcattgtctattcctggaacttaccaagagaagatcacccacctgggacattctctgatgagtttaacaggtctgaaatctttggatctctcgcgcaactccttggttagtctggagggcattcagtacctgactgcattggagagtctcaatctctactacaactgcatctcctcgttggcagaagtgtttcggctccacgccttaaccgagctcgtggatgtggacttccggctgaaccccgtggtgaaggttgagcctgactaccgcctttttgttgtgcacctgctccccaagctccagcagctggacgatcgccccgtgagagcaagcgagcggaaggcttcccgactgcattttgcatcagaggactcactcgactccaaagagagcgtcccagcttctttgaaagagggcagaccacaccaccccagagccaagtgcaccgaggccttggccaagcagagcctggtcatggatgcggatgacgaggcagtcctgaacctcattgcagagtgcgagtgggacctcggcaggcctcccgggagcacgagcttcagccagaaggggcgtgaggccgactctcgtggttcccaagaatccagacatctgttgagcccgcagttggtacagtaccagtgtggggactctgggaagcagggccgtgagacgaggaggagcagctgcagagggtgctgtctggagaagatgccttggagccagctctgtggagagcttccgccactgtacggagcggagccagaggcctcccgtgcccccaggccacacacgtacttcaccccacacccagactccatggataccgaggactcggcctcttctcagaagttggatttgtcaggagaaatggtgcctggtcccctgccagcccccggaaagtgcaggaagcgaagaatgcctgttggaagattccagacgttttcggaccaggagggtttgggctgcccggagagaactcatgggtcctccgtgcccaaggagagcctgagcagacaggacagctcagaaagcaggaacgggaggaccttgtctcagcctgaggcctcggagactgaggagcagaggtctcggggtgtgaccgacaccagagagccgtctcccgggtcacactcggctctacccgggaagaagacggccctgcaggcggcgctcctggagacgctcttggacctggtggacaggagctggggcggctgcaggtccctgcacagcaacgaggcattccttgctcaggcaagacacatcttgtcatctgttgaagaattcacagcagctcaggacagctctgcgatggtgggtgaagatgtcggctccctggctctggagagtaagtccctgcaaagccgccttgctgagcagcagcagcagcacgcccgggagatgagcgaggtgacggcggagctgcaccacacacacaaggagctggatgatttgagacaacatttagataaatctttggaagagaacagtaggttaaaatcgcttttgttgagtatgaaaaaggaagtgaagagtgcagacactgcagccacgttaaatttgcagatcgctggacttcaaacaagtgtgaagaggctgtgtggcgagattgtggaactgaagcagcacctggagcactacgacaagatccaggagctcacgcagatgctgcaggagagccacagctccctggtcagcaccaatgaacacctgctgcaggagctgagccaggtgcgggcgcagcacagagccgaggtggagcagatgcactggagctaccaggagctcaagaagaccatggccctgtttccacacagcagcgccagccatggaggctgccaggcctgctgactcctgccgagaagctgggccaccccttaagcttcctggtaaagttacattgtctgcacctttgtacttctttattgagtgtactggctggcaagagttctctcttctgttggtaattatttaggatttttggaatgtattcaggacctgtagcttggttttctaaagcacctcgtaaaatgatatgattactccaagccctctgcatgttttcagacagaacacattgacatattttgagacaaactgactattaatcttgtatccagtatcctgagatgaagtaaatgcagtgttctactgcctgatgtgaaagagagctatgtatgataattaaagaaaataattttctgtgtaacaagcaatctttatttaataaacaaatacattgttctgaaaa

SEQ ID NO: 196846 - DNA, 1944 bp, Artificial Sequence
  derived and/or modified sequence
atggccagagccggccccagactggtgctgagcgaggaggccgtgagagccaagagcggcctgggcccccacagagacctggccgagctgcagagcctgagcatccccggcacctaccaggagaagatcacccacctgggccacagcctgatgagcctgaccggcctgaagagcctggacctgagcagaaacagcctggtgagcctggagggcatccagtacctgaccgccctggagagcctgaacctgtactacaactgcatcagcagcctggccgaggtgttcagactgcacgccctgaccgagctggtggacgtggacttcagactgaaccccgtggtgaaggtggagcccgactacagactgttcgtggtgcacctgctgcccaagctgcagcagctggacgacagacccgtgagagccagcgagagaaaggccagcagactgcacttcgccagcgaggacagcctggacagcaaggagagcgtgcccgccagcctgaaggagggcagaccccaccaccccagagccaagtgcaccgaggccctggccaagcagagcctggtgatggacgccgacgacgaggccgtgctgaacctgatcgccgagtgcgagtgggacctgggcagaccccccggcagcaccagcttcagccagaagggcagagaggccgacagcagaggcagccaggagagcagacacctgctgagcccccagctggtgcagtaccagtgcggcgacagcggcaagcagggcagagagaccagaagaagcagctgcagaggctgctgcctggagaagatgccctggagccagctgtgcggcgagctgccccccctgtacggcgccgagcccgaggccagcagagcccccagaccccacacctacttcaccccccaccccgacagcatggacaccgaggacagcgccagcagccagaagctggacctgagcggcgagatggtgcccggccccctgcccgcccccggcaagtgcagaaagagaagaatgcccgtgggcagattccagaccttcagcgaccaggagggcctgggctgccccgagagaacccacggcagcagcgtgcccaaggagagcctgagcagacaggacagcagcgagagcagaaacggcagaaccctgagccagcccgaggccagcgagaccgaggagcagagaagcagaggcgtgaccgacaccagagagcccagccccggcagccacagcgccctgcccggcaagaagaccgccctgcaggccgccctgctggagaccctgctggacctggtggacagaagctggggcggctgcagaagcctgcacagcaacgaggccttcctggcccaggccagacacatcctgagcagcgtggaggagttcaccgccgcccaggacagcagcgccatggtgggcgaggacgtgggcagcctggccctggagagcaagagcctgcagagcagactggccgagcagcagcagcagcacgccagagagatgagcgaggtgaccgccgagctgcaccacacccacaaggagctggacgacctgagacagcacctggacaagagcctggaggagaacagcagactgaagagcctgctgctgagcatgaagaaggaggtgaagagcgccgacaccgccgccaccctgaacctgcagatcgccggcctgcagaccagcgtgaagagactgtgcggcgagatcgtggagctgaagcagcacctggagcactacgacaagatccaggagctgacccagatgctgcaggagagccacagcagcctggtgagcaccaacgagcacctgctgcaggagctgagccaggtgagagcccagcacagagccgaggtggagcagatgcactggagctaccaggagctgaagaagaccatggccctgttcccccacagcagcgccagccacggcggctgccaggcctgctag

SEQ ID NO: 196847 - protein, 991 aa, Artificial Sequence
  derived and/or modified sequence
MAGPVSLRDLLMGASAWMGSESPGGSPTEGGGSAAGGPEPPWREDEICVVGIFGKTALRLNSEKFSLVNTVCDRQVFPLFRHQDPGDPGPGIRTEAGAVGEAGGAEDPGAAAGGSVRGSGAVAEGNRTEAGSQDYSLLQAYYSQESKVLYLLLTSICDNSQLLRACRALQSGEAGGGLSLPHAEAHEFWKHQEKLQCLSLLYLFSVCHILLLVHPTCSFDITYDRVFRALDGLRQKVLPLLKTAIKDCPVGKDWKLNCRPCPPRLLFLFQLNGALKVEPPRNQDPAHPDKPKKHSPKRRLQHALEDQIYRIFRKSRVLTNQSINCLFTVPANQAFVYIVPGSQEEDPVGMLLDQLRSHCTVKDPESLLVPAPLSGPRRYQVMRQHSRQQLSFHIDSSSSSSSGQLVDFTLREFLWQHVELVLSKKGFDDSVGRNPQPSHFELPTYQKWISAASKLYEVAIDGKEEDLGSPTGELTSKILSSIKVLEGFLDIDTKFSENRCQKALPMAHSAYQSNLPHNYTMTVHKNQLAQALRVYSQHARGPAFHKYAMQLHEDCYKFWSNGHQLCEERSLTDQHCVHKFHSLPKSGEKPEADRNPPVLYHNSRARSTGACNCGRKQAPRDDPFDIKAANYDFYQLLEEKCCGKLDHINFPVFEPSTPDPAPAKNESSPAPPDSDADKLKEKEPQTQGESTSLSLALSLGQSTDSLGTYPADPQAGGDNPEVHGQVEVKTEKRPNFVDRQASTVEYLPGMLHSNCPKGLLPKFSSWSLVKLGPAKSYNFHTGLDQQGFIPGTNYLMPWDIVIRTRAEDEGDLDTNSWPAPNKAIPGKRSAVVMGRGRRRDDIARAFVGFEYEDSRGRRFMCSGPDKVMKVMGSGPKESALKALNSDMPLYILSSSQGRGLKPHYAQLMRLFVVVPDAPLQIILMPQVQPGPPPCPVFYPEKQEITLPPDGLWVLRFPYAYVTERGPCFPPKENVQLMSYKVLRGVLKAVTQ

SEQ ID NO: 196848 - protein, 974 aa, Artificial Sequence
  derived and/or modified sequence
MAGPVSLRDLLMGASAWMGSESPGGSPTEGGGSAAGGPEPPWREDEICVVGIFGKTALRLNSEKFSLVNTVCDRQVFPLFRHQDPGDPGPGIRTEAGAVGEAGGAEDPGAAAGGSVRGSGAVAEGNRTEAGSQDYSLLQAYYSQESKVLYLLLTSICDNSQLLRACRALQSGEAGGGLSLPHAEAHEFWKHQEKLQCLSLLYLFSVCHILLLVHPTCSFDITYDRVFRALDGLRQKVLPLLKTAIKDCPVGKDWKLNCRPCPPRLLFLFQLNGALKVEPPRNQDPAHPDKPKKHSPKRRLQHALEDQIYRIFRKSRVLTNQSINCLFTVPANQAFVYIVPGSQEEDPVGMLLDQLRSHCTVKDPESLLVPAPLSGPRRYQVMRQHSRQQLSFHIDSSSSSSSGQLVDFTLREFLWQHVELVLSKKGFDDSVGRNPQPSHFELPTYQKWISAASKLYEVAIDGKEEDLGSPTGELTSKILSSIKVLEGFLDIDTKFSENRCQKALPMAHSAYQSNLPHNYTMTVHKNQLAQALRVYSQHARGPAFHKYAMQLHEDCYKFWSNGHQLCEERSLTDQHCVHKFHSLPKSGEKPEADRNPPVLYHNSRARSTGACNCGRKQAPRDDPFDIKAANYDFYQLLEEKCCGKLDHINFPVFEPSTPDPAPAKNESSPAPPDSDADKLKEKEPQTQGESTSLSLALSLGQSTDSLGTYPADPQAGGDNPEVHGQVEVKTEKRPNFVDRQASTVEYLPGMLHSNCPKGLLPKFSSWSLVKLGPAKSYNFHTGLDQQGFIPGTNYLMPWDIVIRTRAEDEGDLDTNSWPAPNKAIPGKRSAVVMGRGRRRDDIARAFVGFEYEDSRGRRFMCSGPDKVMKVMGSGPKESALKALNSDMPLYILSSSQGRGLKPHYAQLMRLFVVVPDAPLQIILMPQVQPGPPPCPVFYPEKQEITLPPDGLWVLRFPYAYLREDLVSPLRKMCS

SEQ ID NO: 196849 - DNA, 2976 bp, Artificial Sequence
  derived and/or modified sequence
atggccgggcctgtctctttaagagacctcttgatgggtgccagcgcttggatgggcagtgagagcccaggcggctcccctaccgagggtgggggttccgcagctggcggaccagaacctccctggagagaggacgagatctgtgtggttggcatctttggcaaaacagcgctgcgcctgaattctgagaaattctcccttgttaatactgtttgtgacagacaggtgttcccccttttccgccatcaggaccctggagatcccgggcctgggattcggacagaggccggggccgtcggcgaggctgggggagccgaggaccctggggccgctgccggcggctccgtgcgtggttccggggccgtcgctgagggtaataggacagaggcgggtagccaggattactcacttctgcaggcctactactcacaggagagcaaggtgctgtacttattgctgacctcgatctgtgataattcccaactgctgcgagcctgtcgggccctgcagagcggagaggcgggcgggggactgtccctgcctcacgcagaggcccatgagttctggaagcatcaggaaaagcttcagtgcctgagccttctttacttattttccgtatgtcacatcctgctgcttgtgcaccccacttgttcatttgatattacctatgaccgagtgtttagagcactggacggattgaggcaaaaggtccttcctcttctgaagacagcgatcaaagattgtcccgtgggaaaggattggaagctcaattgccgcccttgcccgcctcgcctgttgtttttgtttcagcttaatggcgctctcaaggttgaaccccccaggaaccaagatcccgcccatccggacaaacctaaaaagcatagccctaaaaggcgcctgcagcacgccctcgaagaccagatatacaggattttccggaagtcacgagtgttgaccaaccagtccatcaattgtctttttaccgtgcctgccaaccaagcatttgtctacatcgtgccagggagtcaggaggaggaccccgtcgggatgcttctggatcagcttagatctcactgtacagttaaggaccccgagtcactattggtcccggctcccttgtcagggcctcgtcgataccaagtgatgcgtcaacattccagacagcagctctcattccatatcgacagcagctcgtcctcatcttctggacagctggtggactttacactaagggaattcctctggcaacacgtggagttagtgctcagcaagaaagggttcgatgattccgtgggcaggaatccccagccaagtcatttcgagctccctacatatcagaaatggatcagcgctgcctcaaaactctatgaagtcgcaatcgatgggaaagaggaagatctcgggagtcctaccggggaacttacttccaagatcctcagctcaataaaggtacttgaggggtttctggacatcgatacgaagtttagcgaaaaccgctgtcagaaagccctgccgatggcgcactcagcatatcagagtaatctaccacacaactacaccatgacagtgcataagaaccagctagcgcaagccctgagagtttattcccagcatgcaagaggacctgccttccataagtacgcaatgcagctgcatgaggattgttataagttctggagcaatggccaccagctctgtgaagaaagatcactcactgaccagcattgtgttcataaatttcactctctgccaaaatcgggcgagaagccagaagcggatcggaatccaccagtcctataccacaattctcgcgctcggagcactggcgcttgtaattgcggtcgcaaacaggcaccacgcgacgacccatttgacattaaagccgccaattacgacttctatcagcttttggaggagaagtgctgcgggaaactggatcatattaattttcccgtgttcgaacctagtacccccgaccccgcacccgccaaaaatgagagcagtcccgctccccccgacagcgacgccgataaactgaaagagaaagagccccagactcaaggtgagagcacttctctgtctctggccctttctcttgggcagagtaccgattccctgggcacataccctgccgacccccaggcaggtggcgacaatccagaagtgcatggacaggtcgaagtcaaaaccgagaagcgaccaaacttcgtcgatagacaggcatctactgtggagtacctccctggaatgttgcacagcaattgtcccaagggactgttgcccaaattcagtagctggtctttagtcaaactgggaccagctaagtcatataacttccatacaggcctggaccagcaggggtttattcccgggacaaactatctcatgccatgggacattgtgatcaggacccgcgccgaagatgaaggggacctcgacacaaatagctggcccgcacccaataaagcaattccaggaaaaaggagcgctgtggtgatgggacgcggccggaggagagacgacattgcccgcgcgtttgtggggtttgagtatgaagattcccgcgggaggcgatttatgtgttctgggcccgacaaggtgatgaaagtgatgggatccggccccaaggaaagcgctttgaaggctctaaacagtgatatgcctttatacattctcagcagttcccaaggacgcggtcttaaacctcattacgctcagttgatgcgcctgttcgttgtcgtgcctgacgctcccttgcagatcatccttatgcctcaggtccaacccgggccacctccttgccctgtcttctatcctgaaaaacaggagatcacactgccgccggatggcctgtgggttttgcggtttccctacgcttatgtcaccgagagaggaccgtgttttccccctaaagagaacgtgcagttgatgagctataaggtcctgcggggtgtgctgaaggcagtaacgcagtag

SEQ ID NO: 196850 - DNA, 2925 bp, Artificial Sequence
  derived and/or modified sequence
atggctggccctgtctcgctgagagatctcttaatgggagccagcgcttggatgggcagcgaaagccctggggggtcccctacagagggaggtgggagcgccgcaggtggtcctgaacctccttggagggaagatgagatttgcgtagtggggattttcgggaaaaccgccctccggcttaacagcgaaaaattctctctggtgaatactgtgtgtgaccgacaggtttttcctctgttccgtcaccaagatccaggcgatcctggaccagggatccgcacagaagcaggggccgtgggagaggccggaggggccgaggaccccggagctgccgctgggggctccgttagaggcagcggtgcagtcgcggagggcaaccgcaccgaggctgggagccaagattattcgcttttgcaggcttattacagtcaagagtcgaaggtactttacctgctcttgaccagcatctgcgacaatagccagctacttcgggcttgccgggcactacagagcggcgaagcaggggggggtctgtctctgccccatgcagaggcccatgagttctggaagcaccaagagaaactgcaatgtctgagcctcctatacctgttttctgtgtgtcatatcctactcctcgtgcacccaacatgcagctttgatatcacgtacgaccgtgtctttcgagccttggacggacttcgacaaaaagtgctgcccttgttaaagactgctatcaaagattgccctgttgggaaagactggaaactgaactgtcgcccgtgccctccacggcttttgttcctgttccagctgaacggagccctcaaagtggaacctccacgaaaccaagatcccgcacatccagacaagcctaagaaacactcccccaagcggcggctacagcacgctctggaggaccagatatacaggatcttccgcaaatctcgcgtacttaccaatcagtccattaactgtctctttacggtgcctgcaaatcaggccttcgtgtacatcgtgccagggagtcaggaagaggatcccgtgggcatgctactggatcaacttcgctcccattgtaccgtcaaggacccagagtccctgcttgtgcctgcaccattatccgggcctagaagataccaggtcatgcgccaacactctcgccagcagttgtcattccacatcgattcatcatcatcgagtagctccggacaactcgtcgactttacactgagggagttcctatggcagcacgtggagctagtattaagtaagaaaggatttgacgactctgttggacgaaacccccagccttctcattttgaactgcctacgtaccaaaaatggattagcgcagcctccaagttgtacgaagtggcgatcgatggtaaggaagaagatctgggctcgccaacgggagagcttacgagcaaaattctgagctccattaaagtgctcgaggggtttttggacatagataccaagttttcagagaatcgctgccaaaaggcgctcccgatggctcactccgcataccagagtaacctgccccacaattacacaatgacagtccacaaaaatcagctggctcaggccctgcgggtatatagccaacacgcgaggggccccgctttccataaatacgccatgcagcttcatgaggattgctataaattctggtccaacggccaccagctgtgtgaggagcgttctctgacagatcaacattgtgtgcataagttccattctttgccaaagagtggtgagaagcccgaggccgaccggaatcctcctgtcctttaccacaattccagggctcgtagcaccggcgcctgtaattgcgggaggaaacaggcccctcgtgacgatccgttcgatattaaggctgctaactatgacttctatcagctactggaagaaaaatgctgtggtaaactggaccacatcaacttccctgtgttcgaaccatctacgccagacccagcgcccgctaagaatgagagcagcccagcaccacccgattctgatgcggataaactgaaagaaaaagaacctcagactcagggagagtccacctcgttgagtctggcattgtctcttggacaaagcacggattcattagggacttaccctgccgaccctcaggctggaggcgataacccggaggtacacggccaagttgaagtaaaaaccgagaagcggcctaactttgtggaccggcaggctagcaccgtcgagtatctacccggaatgctccatagtaactgtcccaagggattattgccaaagttctcttcctggagcctagtcaagttaggccctgctaaatcatataactttcatacagggctggaccagcagggcttcattcccggcaccaactacctcatgccttgggacatagtcatacgcaccagggctgaggatgaaggtgaccttgacacgaactcttggcctgccccaaataaggcaattcctggcaagcgttctgccgtggtcatgggacgtggtaggcgccgcgacgatattgccagggcctttgtcggctttgagtatgaagactcaaggggcaggcgattcatgtgcagtggcccagacaaagtgatgaaggtgatggggtcaggtccaaaagagtctgcactcaaagccctgaactctgacatgcctctatatattctgagctcttctcaggggcggggcctgaagcctcactatgcacagttgatgagattgtttgtggtagtccctgacgctcctcttcaaatcattctgatgcctcaggtccagccaggtcctcccccctgtccggtgttttacccggaaaaacaggagataacgttaccacctgatggattatgggtgctgagattcccatatgcgtacctccgggaggacctggtctctcctttgcgtaaaatgtgcagctag

SEQ ID NO: 196851 - DNA, 2976 bp, Artificial Sequence
  derived and/or modified sequence
atggccggccctgtgtccctgcgggacctgctgatgggcgccagcgcctggatgggcagcgagagccctgggggcagccccacagagggcggcggcagcgctgctgggggccctgagcccccctggagagaagatgagatctgtgtggtgggcatctttgggaagacagccctgcggctgaacagcgagaagttcagcctggtgaacacagtgtgtgaccggcaggtgttccccctcttccgccaccaggaccccggggaccccggccctggcatcagaacagaggccggggctgtgggggaggccggcggcgctgaggaccccggggctgctgctgggggctctgtgcggggcagcggggctgtggccgagggcaacagaacagaggccggcagccaggactacagcctgctgcaggcctactacagccaggagagcaaggtgctgtacctgctgctgaccagcatctgtgacaacagccagctgctgcgggcctgccgggccctgcagagcggggaggccggcggcggcctgagcctgccccatgctgaggcccacgagttctggaagcaccaggagaagctgcagtgcctgagcctgctgtacctgttctctgtgtgccacatcctgctgctggtgcaccccacctgcagctttgacatcacctatgacagagtcttccgggccctggatggcctgcggcagaaggtgctgcccctgctgaagacagccatcaaggactgccctgtgggcaaggactggaagctgaactgccggccctgccccccccggctgctcttcctgttccagctgaatggagccctgaaggtggagcccccaagaaaccaggaccctgcccacccagacaagcccaagaagcacagccccaagaggcggctgcagcacgccctggaggaccagatctaccgcatcttcaggaagagccgggtgctgaccaaccagagcatcaactgcctcttcaccgtgcctgccaaccaggcctttgtgtacatcgtgcccggcagccaggaggaggaccctgtgggcatgctgctggaccagctgcggagccactgcaccgtgaaggaccctgagagcctgctggtgcctgcccccctgagcggcccccggcgctaccaggtgatgaggcagcacagccggcagcagctgtccttccacatcgacagcagcagcagcagcagcagcggccagctggtggacttcaccctgcgggagttcctgtggcagcacgtggagctggtgctgagcaagaagggctttgatgacagcgtgggcaggaacccccagcccagccactttgagctgcccacctaccagaagtggatctctgctgccagcaagctgtatgaggtggccattgatggcaaggaggaggacctgggcagccccactggagagctgaccagcaagatcctgagcagcatcaaggtgctggagggcttcctggacatcgacaccaagttctctgaaaatcgctgccagaaggccctgcccatggcccacagcgcctaccagagcaacctgccccacaactacaccatgacagtgcacaagaaccagctggcccaggccctgcgggtgtacagccagcacgcccggggccctgccttccacaagtatgccatgcagctgcacgaggactgctacaagttctggagcaatggccaccagctgtgtgaggagaggagcctgacagaccagcactgtgtgcacaagttccacagcctgcccaagagcggggagaagccagaggccgacaggaacccccctgtgctgtaccacaacagccgggcccggagcactggagcctgcaactgtggcaggaagcaggcccccagagatgacccctttgacatcaaggccgccaactatgacttctaccagctgctggaggagaagtgctgcggcaagctggaccacatcaacttccctgtgtttgagcccagcaccccagaccctgccccagccaagaatgaaagcagccctgcccccccagacagtgatgctgacaagctgaaggagaaggagccccagacccagggcgagagcaccagcctgagcctggccctgagcctgggccagagcacagacagcctgggcacctacccagctgacccccaggccggcggggacaaccctgaggtgcacggccaggtggaggtgaagacagagaagaggcccaactttgtggaccggcaggccagcacagtggagtacctgcccggcatgctgcacagcaactgccccaagggcctgctgcccaagttcagctcctggagcctggtgaagctgggccctgccaagagctacaacttccacacaggcctggaccagcagggcttcatccctggcaccaactacctgatgccctgggacatcgtcatccgcaccagggcagaagatgaaggagacctggacaccaacagctggccagcccccaacaaggccatccctgggaagaggtctgctgtggtgatgggccggggcagaagaagagatgacatcgcccgggcctttgtgggctttgaatatgaggacagccggggccgccgcttcatgtgcagcggccctgacaaggtgatgaaggtgatgggcagcggccccaaggagagcgccctgaaggccctgaacagcgacatgcccctgtacatcctgagcagcagccagggccggggcctgaagccccactacgcccagctgatgaggctgtttgtggtggtgcctgatgcccccctgcagatcatcctgatgccccaggtgcagcccggccccccaccctgccctgtgttctacccagagaagcaggagatcaccctgcccccagatggcctgtgggtgctgcgcttcccctatgcctacgtgacagagcggggcccctgcttcccccccaaggaaaatgtgcagctgatgagctacaaggtgctgcggggcgtgctgaaggctgtgacccagtag

SEQ ID NO: 196852 - DNA, 2925 bp, Artificial Sequence
  derived and/or modified sequence
atggccggccctgtgtccctgcgggacctgctgatgggcgccagcgcctggatgggcagcgagagccctgggggcagccccacagagggcggcggcagcgctgctgggggccctgagcccccctggagagaagatgagatctgtgtggtgggcatctttgggaagacagccctgcggctgaacagcgagaagttcagcctggtgaacacagtgtgtgaccggcaggtgttccccctcttccgccaccaggaccccggggaccccggccctggcatcagaacagaggccggggctgtgggggaggccggcggcgctgaggaccccggggctgctgctgggggctctgtgcggggcagcggggctgtggccgagggcaacagaacagaggccggcagccaggactacagcctgctgcaggcctactacagccaggagagcaaggtgctgtacctgctgctgaccagcatctgtgacaacagccagctgctgcgggcctgccgggccctgcagagcggggaggccggcggcggcctgagcctgccccatgctgaggcccacgagttctggaagcaccaggagaagctgcagtgcctgagcctgctgtacctgttctctgtgtgccacatcctgctgctggtgcaccccacctgcagctttgacatcacctatgacagagtcttccgggccctggatggcctgcggcagaaggtgctgcccctgctgaagacagccatcaaggactgccctgtgggcaaggactggaagctgaactgccggccctgccccccccggctgctcttcctgttccagctgaatggagccctgaaggtggagcccccaagaaaccaggaccctgcccacccagacaagcccaagaagcacagccccaagaggcggctgcagcacgccctggaggaccagatctaccgcatcttcaggaagagccgggtgctgaccaaccagagcatcaactgcctcttcaccgtgcctgccaaccaggcctttgtgtacatcgtgcccggcagccaggaggaggaccctgtgggcatgctgctggaccagctgcggagccactgcaccgtgaaggaccctgagagcctgctggtgcctgcccccctgagcggcccccggcgctaccaggtgatgaggcagcacagccggcagcagctgtccttccacatcgacagcagcagcagcagcagcagcggccagctggtggacttcaccctgcgggagttcctgtggcagcacgtggagctggtgctgagcaagaagggctttgatgacagcgtgggcaggaacccccagcccagccactttgagctgcccacctaccagaagtggatctctgctgccagcaagctgtatgaggtggccattgatggcaaggaggaggacctgggcagccccactggagagctgaccagcaagatcctgagcagcatcaaggtgctggagggcttcctggacatcgacaccaagttctctgaaaatcgctgccagaaggccctgcccatggcccacagcgcctaccagagcaacctgccccacaactacaccatgacagtgcacaagaaccagctggcccaggccctgcgggtgtacagccagcacgcccggggccctgccttccacaagtatgccatgcagctgcacgaggactgctacaagttctggagcaatggccaccagctgtgtgaggagaggagcctgacagaccagcactgtgtgcacaagttccacagcctgcccaagagcggggagaagccagaggccgacaggaacccccctgtgctgtaccacaacagccgggcccggagcactggagcctgcaactgtggcaggaagcaggcccccagagatgacccctttgacatcaaggccgccaactatgacttctaccagctgctggaggagaagtgctgcggcaagctggaccacatcaacttccctgtgtttgagcccagcaccccagaccctgccccagccaagaatgaaagcagccctgcccccccagacagtgatgctgacaagctgaaggagaaggagccccagacccagggcgagagcaccagcctgagcctggccctgagcctgggccagagcacagacagcctgggcacctacccagctgacccccaggccggcggggacaaccctgaggtgcacggccaggtggaggtgaagacagagaagaggcccaactttgtggaccggcaggccagcacagtggagtacctgcccggcatgctgcacagcaactgccccaagggcctgctgcccaagttcagctcctggagcctggtgaagctgggccctgccaagagctacaacttccacacaggcctggaccagcagggcttcatccctggcaccaactacctgatgccctgggacatcgtcatccgcaccagggcagaagatgaaggagacctggacaccaacagctggccagcccccaacaaggccatccctgggaagaggtctgctgtggtgatgggccggggcagaagaagagatgacatcgcccgggcctttgtgggctttgaatatgaggacagccggggccgccgcttcatgtgcagcggccctgacaaggtgatgaaggtgatgggcagcggccccaaggagagcgccctgaaggccctgaacagcgacatgcccctgtacatcctgagcagcagccagggccggggcctgaagccccactacgcccagctgatgaggctgtttgtggtggtgcctgatgcccccctgcagatcatcctgatgccccaggtgcagcccggccccccaccctgccctgtgttctacccagagaagcaggagatcaccctgcccccagatggcctgtgggtgctgcgcttcccctatgcctacctgcgggaggacctggtgagccccctgaggaagatgtgcagctag

SEQ ID NO: 196853 - DNA, 2976 bp, Artificial Sequence
  derived and/or modified sequence
atggccggccccgtgagcctgcgggacctgctgatgggcgccagcgcctggatgggtagcgaatcccccgggggatcccccaccgaggggggaggcagcgcagctggaggccctgaacccccatggagagaggacgaaatatgcgtggtcggcatttttggaaaaacggctctgaggctcaattcagagaagttttcactggtaaatactgtttgcgacagacaggtcttcccactcttcaggcaccaagatccaggcgaccctggacctgggatccggacagaagctggagctgttggggaggcaggtggtgcggaggatccaggggcagccgcaggagggagtgtgcgtggaagtggcgcagtggcagagggaaaccgtacagaagccggttcacaggactacagccttctgcaggcttattacagtcaggaatccaaggtgttgtatctgctgctgacctccatatgtgataattcccagctcctgcgagcatgccgcgcattgcagtccggggaagcaggcgggggactcagcctgccacatgctgaagcacacgagttctggaagcaccaggaaaaactccagtgccttagtttgctctatcttttcagtgtctgccatattctgctgttggtgcatcctacctgttcattcgatataacctatgaccgagtgtttcgcgcactggatggcctccggcagaaagtcctgcctctgctgaaaacagcaattaaggattgccccgtgggaaaggactggaaacttaactgccgcccgtgtccgcctagactcctctttctgttccagctcaacggggccctgaaggtggagccaccccgtaaccaggacccagcacatcccgataaaccaaagaagcactcaccaaagcggcgactgcaacatgctctcgaagatcagatctaccgcatttttaggaaatcgcgtgtccttactaatcagtccattaattgcttattcaccgtgcctgctaaccaggctttcgtctatatagtcccgggatcccaggaggaggatcccgttggaatgctgttggaccagctgcgcagccattgcaccgtcaaagaccctgagagtctgctggtccccgcacccctaagtggtcctaggcgatatcaggtaatgaggcagcactctcgccagcagttgtcattccacatcgatagctcctccagttcatcatcagggcaattagtagattttacactccgggaattcttgtggcagcatgttgagcttgtactttccaaaaagggattcgatgacagcgtcggcagaaaccctcagccgtctcacttcgagttacctacataccagaagtggatctcggcagcctcgaagctatatgaggtggcaatcgacgggaaagaagaggacctgggatcacctactggtgagctgactagcaagatactctcaagcattaaggttctggaaggcttcttagacattgataccaagttctcagagaaccgctgtcaaaaggcgctgcccatggctcatagcgcctaccagagcaacttgccacacaattacacaatgaccgttcataagaatcaattggctcaggccttaagggtgtactcacagcatgcaaggggacccgcatttcacaaatatgccatgcaactgcacgaggattgctataaattttggtcaaatggtcatcagctgtgtgaagagcggtcactgacagaccaacactgtgtccataagtttcactctcttcccaaaagcggcgagaaaccagaagccgaccggaaccccccagtactttatcataacagcagagcccgcagtactggagcatgtaattgcggacggaagcaggccccgagggatgatccttttgacatcaaggccgccaattatgacttttaccagttgcttgaagagaagtgttgcggaaagctcgatcacatcaattttcccgtgttcgaaccctccacgcctgatcctgcaccggccaagaatgaaagtagcccagctccaccagattcagatgccgataaacttaaggagaaagagcctcagacccagggcgagagcacttccctgagtctggcactaagccttggtcagagtacagattctctgggtacctatcccgccgacccgcaggccggtggtgataacccggaggtgcacggccaggtagaagtgaaaacggagaaacgccccaacttcgtggaccgacaggcctctactgtagaatatctccctggaatgctgcattctaactgccccaaaggcctgcttcccaagttcagcagttggtccctcgtaaagctcggtcccgccaaatcatataattttcataccggcctggaccaacagggctttatacctggcaccaactacctcatgccttgggacatcgtgattcggacccgcgctgaagatgaaggagacctggacacgaactcctggccagctcctaataaggccatccctggaaagcgctcggctgtcgtgatgggccggggtcggcggagggatgacattgccagagcattcgtaggatttgagtatgaggactcacgcggcaggcgatttatgtgttccggccctgataaagtgatgaaggtgatgggatctgggcctaaggagagcgcattaaaggccttgaattccgatatgcccttatacatactgtccagtagtcagggacgcgggctcaagccccactacgcacagctgatgcggctgtttgtcgtagtgccagacgcccctctgcagatcattcttatgcctcaggttcagccaggccccccgccttgccccgtgttttatcctgagaagcaggagatcactttgcccccggacgggctttgggtgctgcggtttccttacgcctacgtcactgagcgaggcccttgcttccctcccaaggaaaatgtgcagctgatgagttataaggtattaaggggggtcttgaaggccgtcactcagtag

SEQ ID NO: 196854 - DNA, 2925 bp, Artificial Sequence
  derived and/or modified sequence
atggccggccccgtgagcctgcgggacctgctgatgggcgccagcgcctggatggggagtgaatcacccggcgggtcaccaacagaaggcggaggctctgcagcaggcggcccggagccaccttggagagaagatgagatttgcgtggtgggcatattcggaaaaaccgcactgaggctcaacagcgaaaagttctccttagtaaacaccgtgtgcgatagacaggtcttcccactctttcgccaccaggaccccggagatcctggacctggaatccggactgaggctggtgcagtgggcgaggcaggcggagcggaagatccaggggccgccgccggtggcagcgtgaggggctcaggcgcagtagccgagggcaataggaccgaagctggctcacaggattactccctgctccaggcatactactcccaggaatctaaggtgctgtatttgctgctcacttctatctgtgataactctcagttgctcagggcctgccgcgctctgcagtcaggagaagccggggggggactgagtctccctcatgcagaagcacatgagttttggaagcaccaggaaaagctgcagtgcctttctctactttacctgttctcagtgtgtcacattctgttactggttcatcccacttgtagctttgatattacatacgacagagtgttcagagccctggacggccttcgacagaaagtgctgccgttactgaagaccgcaatcaaggattgtccggtggggaaagactggaagcttaattgtaggccatgtcctcccagacttctgtttctgtttcagcttaacggggcactcaaggtggaacccccacgcaaccaggatccagcccacccagataaacctaaaaagcattcacccaaacggcggctgcagcatgccctggaggaccagatctatagaatttttagaaaatctcgggtgttaacgaatcagtccataaactgtcttttcacagtccctgctaatcaggcattcgtatacattgtcccaggtagccaggaagaagaccctgtgggtatgcttctggaccagctgaggtctcactgcactgtcaaagaccccgaaagcctgctggtgccagcgcccctgagcgggccgagaaggtatcaggtgatgaggcagcactccagacagcagctcagcttccatatagacagttcatcatcctcaagcagcggccagttggtcgattttacactccgggaattcctctggcagcacgttgagctagttctcagcaaaaagggcttcgacgactccgttggtagaaacccccagccctcgcacttcgaactgccaacttaccagaagtggataagcgccgcgagcaaactctacgaggtagcaatcgatggcaaggaggaggacctcggctcccccacaggagagcttacatctaagatcctttcctctatcaaggtcctcgaaggctttttagacatagataccaaattcagcgagaacaggtgccaaaaggccttgccaatggcacatagcgcataccagtctaatctgccacataactatacaatgacggtgcataaaaatcagctggctcaggctctgagagtctattcccagcacgccaggggtcccgctttccacaagtacgcgatgcagctccatgaggactgctataaattttggagcaatggtcaccagctttgtgaagagaggtccttgaccgaccaacactgcgtgcacaagttccactcgctgccaaagagcggcgaaaagccggaggctgatagaaatcctccagtgttataccacaattcacgcgccagatccaccggggcatgtaactgcgggcgcaagcaggctcccagggatgatcccttcgatattaaagccgccaactacgatttctaccaattgctggaagagaagtgctgcgggaaattagatcacatcaattttcctgtcttcgagccctccacccccgaccctgcacccgccaaaaatgaaagctcacctgccccgcctgacagcgacgcagacaaactgaaagagaaagagccccagacccagggagagagcacatcgttatcactggctttgagcctgggtcagagtacagacagtttggggacatatcccgctgatccacaagcaggtggagacaacccggaggttcacggccaagtggaggtgaagaccgaaaaacgtcccaacttcgttgaccgccaggcctctacagtggaatatctcccagggatgctccattcaaattgtcctaaagggctgttgcctaaattcagttcgtggtcattggtgaagctgggacctgctaagagctataattttcataccggcctggatcagcagggctttattcctggcacaaattatctgatgccatgggacatcgtcatccggacccgggcagaagacgagggggatctcgacaccaacagctggcctgcacccaacaaagcaatccccggtaagcgtagtgctgtggtcatggggcgtggaagaaggcgcgacgatattgcaagggccttcgtggggtttgagtatgaagattcccgcgggcgccgattcatgtgttccgggcctgataaagtaatgaaagtgatgggatccggccctaaggaatccgccttaaaggctctgaattctgacatgcccctctacatcctcagctcttctcagggccgcgggctgaaaccgcactacgcgcaactcatgcgcctatttgtggtggtgccggacgctcccctgcagatcatactcatgccccaggtgcagcccgggcctcctccatgccccgtcttctaccctgaaaagcaagaaattacactgccacccgatggactttgggtgcttagatttccttacgcatacctgcgagaggatctcgtgagccccctgagaaagatgtgcagctag

SEQ ID NO: 196855 - DNA, 2976 bp, Artificial Sequence
  derived and/or modified sequence
atggctggccctgtgtctttacgggatctcctgatgggtgctagtgcatggatgggctctgagtctcctggagggagcccaactgagggaggcggatctgcagccggtggcccagagcccccttggcgcgaggacgaaatctgcgtggtaggcatatttgggaagacagcactgcgcctgaacagtgagaagttctccttggtgaataccgtgtgtgaccgacaagtattccctctgtttagacaccaggacccaggcgatccgggtcccggaatccgcacagaggccggagccgtgggcgaagccggaggcgctgaggatcctggcgcagccgctgggggatcggtgagaggaagcggcgctgtcgctgagggcaatcggaccgaggctgggagtcaggattattctctgctgcaggcctactatagccaggaaagtaaagtcctgtacctactcctgacctctatttgtgataattcacagctacttcgggcatgcagggcactgcagtctggcgaggccggagggggtctctcacttcctcacgctgaggctcatgagttctggaaacaccaggaaaaactgcagtgcctaagtctactttacctcttcagtgtctgtcacatcttattgttggttcatcccacctgctcctttgatatcacttatgacagggtgttcagagctctggacggactgagacaaaaggtcctacccctcttgaaaacagccattaaagactgtcccgttggaaaagactggaaacttaattgcaggccatgtcctcccagactgttgtttctattccagttgaacggagcattaaaagtggagcctccaaggaatcaggatccagcacatccagacaaacctaagaagcactccccaaaacgcaggctccaacacgctctagaggaccagatttatagaatctttcgcaaatcccgcgtcttaacaaaccagtctatcaattgtttatttactgtcccagctaaccaggcctttgtgtatattgtgcccggttctcaagaggaggaccctgtgggaatgcttttagatcagctgaggagccactgcactgttaaggacccagaatctcttctggttccagcacctctatcaggacccaggcggtaccaggtgatgagacaacattctcgccagcagttgagtttccacatagattcttccagcagttcttcaagcgggcaactggtcgacttcacactgcgagagttcctttggcagcatgtagaattggtcttgagtaagaagggatttgatgactctgtcggcaggaaccctcagcctagccactttgagctgccaacctatcagaaatggatctctgccgcttccaaactgtacgaggtcgccatcgacgggaaggaagaggacttgggatcccctacaggcgagctgacaagcaagatactatccagcataaaagtcttggaaggattccttgacatcgacaccaagttctccgaaaaccggtgccagaaggcccttcctatggcccacagtgcttatcagtccaatttgcctcacaactacactatgaccgtccacaagaaccaattagcccaagccctaagagtttacagccagcacgcaagggggccagctttccacaagtatgccatgcagcttcacgaggactgttataaattctggtctaatggacaccaactgtgcgaggagcggagcttaacagatcaacactgcgtacacaaattccacagtctcccaaagtccggcgagaaacccgaagccgatcgcaatccaccagttctctatcacaattctagggccaggtccactggagcgtgcaattgtggcagaaagcaagccccaagagacgatccattcgatattaaagctgcaaactacgacttctatcagcttcttgaagaaaagtgctgtggtaagttggatcatattaatttccccgtcttcgagccaagtacccctgaccctgctcctgccaagaatgaaagctccccagcgccacccgactccgatgctgacaaactcaaggagaaagaacctcagacccaaggagaatcaacatctctgtccttggccctgagtttggggcaaagtacggactccctgggcacctatccagcggatcctcaagcaggaggcgataacccagaagtccatggccaagtggaggtaaagacggagaaacgacctaacttcgtggatcgtcaggcctcaaccgttgagtacctgcctggtatgttacactccaactgccctaaaggcctgttacctaagttttcctcgtggtctttggtcaagttgggacccgcaaaatcctataactttcatactgggttagatcaacagggcttcatcccaggtactaactacctgatgccttgggacatcgtaattaggactcgagccgaggacgagggggatctggataccaattcctggcctgctccaaacaaggcaataccaggcaagaggagtgctgttgttatgggaaggggcagacggagggatgatatcgcccgagcattcgtggggttcgagtacgaagactcaagggggcgaagatttatgtgttcaggaccagacaaggttatgaaagtaatgggcagcggcccaaaagaatctgcactcaaggctctgaattccgatatgcccctctatatccttagctcctctcagggaagaggactgaagccccattatgctcagctgatgcgccttttcgtggtcgttccagatgcccctctgcagatcattctgatgcctcaagttcagcccggacccccaccatgcccagtcttctaccccgaaaaacaggaaattaccttaccgccagacgggctttgggttctgcgttttccctacgcctatgtaactgagaggggcccttgttttcctcccaaggaaaacgtgcagctaatgagttataaggtgctgcgcggtgtgttgaaagccgtgactcagtag

SEQ ID NO: 196856 - DNA, 2925 bp, Artificial Sequence
  derived and/or modified sequence
atggccggaccggttagcttgagggacctcctcatgggcgcttctgcttggatggggagtgagtcacccggaggctctccaacagagggcggtgggtctgccgctggaggccctgaacccccatggcgggaagacgagatctgtgtcgtcggcatcttcggaaaaaccgccttacgtctgaattccgagaaattttcactcgtgaatactgtctgtgaccggcaagtgttccccctgttccggcatcaggatcctggggatcccggaccgggtattcgaaccgaagcgggtgctgtgggtgaggcaggcggagccgaagacccgggtgccgctgctggtggttctgtcaggggctccggcgcagtagcggaaggaaaccgcacagaggccggatcccaggactatagtttactgcaggcctactacagtcaagaaagtaaggttttatacctccttctcactagcatctgcgataactcccagctgctcagagcctgtcgagccctacagagtggtgaagctggcggtggcctctcactcccccacgccgaagctcacgaattttggaaacaccaggagaagcttcagtgcctgagcctgctctatctcttctctgtgtgccatattttattgctcgtccatcctacttgctcctttgatattacctatgatcgcgtgtttagagccctcgacggactcaggcaaaaagtacttccattgttgaagacggctatcaaggactgtcccgtgggaaaagattggaagctcaactgcaggccgtgtccgccacgcctgctgttcctgttccagcttaacggcgctctgaaggtggagccacctagaaatcaggacccggcacaccccgataagccaaagaagcactcacctaagcgacgtctgcagcacgcactggaggaccagatttatcgcatcttcagaaagtctagagtgcttaccaatcagtccatcaattgcctgttcactgtgcctgccaatcaggcatttgtttatattgtcccaggatcacaggaggaggatccagtgggcatgcttctagaccagttgaggagccactgtacagttaaagaccctgagagcctactggtgcctgcacccctctcagggccacgccgatatcaggtgatgcgtcagcatagcaggcagcagctctcatttcatattgatagttcttcttctagtagttcaggccaactggttgacttcacgttgagggaatttctgtggcagcacgtggagctcgtgctgtcaaaaaaagggttcgatgattccgtaggacgtaaccctcagcctagccacttcgagctcccaacgtatcagaaatggattagcgcagcaagcaaactgtatgaggtggctattgacggaaaagaggaggaccttggctctcctaccggtgagctgactagcaaaattctgtcatcaatcaaagttctggaaggatttctggacatcgatactaagttcagtgagaataggtgtcagaaggctctgccgatggcccattcagcttaccaaagcaacctacctcataactacaccatgactgtacacaagaatcagctagcacaggcattgcgcgtttatagtcagcacgccagggggcctgcgttccacaagtacgcaatgcagctgcacgaagactgttataaattttggtctaacggccaccagctatgtgaggaacgctccctgactgatcagcactgcgtgcacaaattccattccctgccgaaaagcggagagaagcccgaagccgatagaaatccgcctgtcctataccacaattccagagccagaagcaccggagcttgcaactgcggacgtaagcaggcccctcgcgatgatccattcgatattaaagctgccaattatgacttctaccagttgctagaagagaaatgctgcgggaaactggaccacatcaattttcctgtgtttgaacccagcacccctgatcccgcaccagctaagaacgagtctagcccagccccacctgattcagatgccgacaaactgaaagagaaggaaccccaaacacagggggagtctacgtcgctttcattagcattgtctcttggccaatccaccgattctctcggcacctaccccgcagacccacaagctgggggagataaccctgaagttcacggccaagtggaggtcaaaacagaaaagcgcccaaatttcgttgaccggcaagcctccacagtcgagtacctccccggaatgctccacagcaactgtcccaagggcctgctgcctaaattctcctcatggtctctggtgaagttgggtcccgcaaaatcttataactttcatacaggactcgaccaacagggattcatcccaggaacgaattacctaatgccctgggatattgtgattcgaacccgagcagaagatgagggtgacctcgatacaaattcctggcccgctccaaacaaagccatcccaggcaagagaagcgccgtcgttatggggagaggaaggagaagggatgacatagctcgcgcatttgtgggcttcgagtacgaagattccaggggcagacggttcatgtgttccggcccagacaaggttatgaaggtgatgggcagcgggcctaaggagagtgcgcttaaggcactgaacagcgacatgcctctgtacatcctctccagttcgcaagggcgaggacttaagcctcactatgctcagctcatgagattatttgttgtagtgccagatgctcctcttcagattatcctcatgcctcaggtacagccgggacccccaccatgtcccgtgttctatcctgaaaaacaagagatcactcttccaccggatgggctttgggtgttaagatttccttacgcataccttcgcgaggatctggtgagtccgctgaggaagatgtgtagttag

SEQ ID NO: 196857 - DNA, 3263 bp, Artificial Sequence
  derived and/or modified sequence
tttactaacggaccggaaggactctagagaacgctctgcactatggctggtcccgtgagcttgcgagaccttctaatgggagcatcagcctggatgggctctgaaagtcccggagggtcccctactgagggcggagggagcgcggctggcggaccggagcctccatggcgggaggatgagatctgcgttgtgggaatcttcggcaagacggctctacgcctgaattccgagaagttctctcttgtgaatacggtgtgcgaccgacaggtctttcctctctttcgccaccaagatcctggggatccaggacctggaatcagaactgaggctggcgccgtgggtgaggccggtggagccgaggaccctggggctgcagccgggggttcagttcggggaagtggagctgtcgcggaaggtaaccgaactgaggcaggctcccaggactacagccttctgcaggcctactacagtcaggaaagcaaagttctgtatcttctcctcacctccatctgtgacaattcacagcttctccgggcttgtcgggctcttcagagcggggaagctggaggtggactctctttacctcatgcagaagcacacgagttctggaagcatcaagagaagctgcagtgcctcagtctcctttacctattctctgtctgtcatatcttgcttctggtccatcccacttgttcctttgatatcacttatgatcgagtattcagagccctggatgggctgagacagaaggtcctgccgctccttaaaacagccattaaggattgtccagttggcaaagactggaagctaaactgccgaccttgcccacctagactccttttcctctttcaactcaatggagccctcaaggtagaacctcctcggaaccaagacccagctcatccagacaagcccaagaaacattctcccaaaaggaggctgcagcatgccctggaggaccagatctatagaatcttccggaagagtcgtgtcttgactaatcagagcatcaactgcctctttactgtgcctgccaaccaagctttcgtgtacatagtaccgggaagccaggaggaggacccagtaggtatgttgctggaccaacttaggagtcattgtactgtgaaggacccggaatctttgctggtgcctgcacccctttctgggcctaggcgataccaggtgatgaggcagcacagccgacaacaactttcctttcacattgacagcagcagttccagttcttcaggccagctagtggatttcactcttcgggaattcctatggcagcatgtggagctagttctaagcaagaaaggtttcgatgacagtgtgggcaggaacccacagccttcccattttgaacttcctacttatcagaagtggatctcagcagcttcaaaactgtatgaggtggctattgatgggaaagaagaggacttggggtcacccactggagagctaacatctaagattttaagcagtattaaagtcttggaaggatttttggatattgacacaaaattctcagaaaaccgatgccaaaaagctttacccatggcccacagtgcctaccagtcaaatttgcctcataattacacaatgactgtccataagaatcagcttgcccaggctcttcgagtgtacagtcaacatgctagaggtccagcatttcacaaatacgccatgcagttacatgaggactgctacaaattttggagcaatggccatcagctctgtgaggagaggagtttaactgatcaacactgtgtgcacaaatttcactcattacctaaatcaggagaaaaaccagaggctgatagaaatccgcctgtgctatatcacaatagccgagctcgatctactggtgcttgcaactgtggaaggaaacaagcacctcgagatgatccctttgatatcaaagcagccaattatgacttctatcagcttctggaagaaaagtgttgtggaaaattggatcatatcaatttcccagtatttgaaccaagtactccagatcctgctcctgctaaaaatgaatcctctcctgctcctccagattcggatgctgataaacttaaagaaaaagaacctcaaacccaaggagagagcacgagcctgagtttagctttgagtttgggccaatccacagatagcttaggtacctatccagctgatccacaagcaggaggagataatccagaagttcatggtcaagtagaagtgaaaactgagaagaggccaaacttcgttgatcgacaggcatccacagttgagtatctcccaggcatgctacattcaaattgccctaaaggtctcctacccaaattctccagctggtctttggttaaactaggccctgctaagtcttataactttcatacaggtttggaccaacagggctttattccaggaacaaattatcttatgccttgggacattgtcatcaggactagagctgaagatgaaggagacttagacacaaactcttggcctgctccaaataaagctattcctggaaagagaagtgcggttgtaatgggaagaggaagacggcgagatgacatagctcgagcttttgtgggctttgaatatgaagactctcgaggtcggagattcatgtgctctgggcctgacaaagtaatgaaagtaatgggaagtgggccaaaggaatcagctttaaaagccctaaatagtgacatgcccttatatattctgtcatcctctcaaggtagagggctgaaacctcattatgctcaacttatgaggctttttgttgtggttcctgatgctcctttgcagataatactaatgcctcaggttcagccaggcccaccaccatgtccggtattctacccagaaaaacaagaaatcacccttccacctgatggcctttgggttttgagatttccttatgcatatgtgactgagagaggaccttgtttcccccctaaggaaaatgtgcagttaatgagctacaaggtgctccgtggggttcttaaggcagtaacacaataagtgttttccagccagttcaatcctatacttgagctggtttttgtttttggtatttgtggctgtgtttttggtatgtgtttactgtgttttcccaaatccaaaatgtgttttggttacaggagttcagtatttggaaactaatttgttctactttttcattatattgttgatatttattgtaaacgtgactacaactttctaataaagattggttgttctagaaaagaatataaaatacatggatg

SEQ ID NO: 196858 - DNA, 3232 bp, Artificial Sequence
  derived and/or modified sequence
agaacgctctgcactatggctggtcccgtgagcttgcgagaccttctaatgggagcatcagcctggatgggctctgaaagtcccggagggtcccctactgagggcggagggagcgcggctggcggaccggagcctccatggcgggaggatgagatctgcgttgtgggaatcttcggcaagacggctctacgcctgaattccgagaagttctctcttgtgaatacggtgtgcgaccgacaggtctttcctctctttcgccaccaagatcctggggatccaggacctggaatcagaactgaggctggcgccgtgggtgaggccggtggagccgaggaccctggggctgcagccgggggttcagttcggggaagtggagctgtcgcggaaggtaaccgaactgaggcaggctcccaggactacagccttctgcaggcctactacagtcaggaaagcaaagttctgtatcttctcctcacctccatctgtgacaattcacagcttctccgggcttgtcgggctcttcagagcggggaagctggaggtggactctctttacctcatgcagaagcacacgagttctggaagcatcaagagaagctgcagtgcctcagtctcctttacctattctctgtctgtcatatcttgcttctggtccatcccacttgttcctttgatatcacttatgatcgagtattcagagccctggatgggctgagacagaaggtcctgccgctccttaaaacagccattaaggattgtccagttggcaaagactggaagctaaactgccgaccttgcccacctagactccttttcctctttcaactcaatggagccctcaaggtagaacctcctcggaaccaagacccagctcatccagacaagcccaagaaacattctcccaaaaggaggctgcagcatgccctggaggaccagatctatagaatcttccggaagagtcgtgtcttgactaatcagagcatcaactgcctctttactgtgcctgccaaccaagctttcgtgtacatagtaccgggaagccaggaggaggacccagtaggtatgttgctggaccaacttaggagtcattgtactgtgaaggacccggaatctttgctggtgcctgcacccctttctgggcctaggcgataccaggtgatgaggcagcacagccgacaacaactttcctttcacattgacagcagcagttccagttcttcaggccagctagtggatttcactcttcgggaattcctatggcagcatgtggagctagttctaagcaagaaaggtttcgatgacagtgtgggcaggaacccacagccttcccattttgaacttcctacttatcagaagtggatctcagcagcttcaaaactgtatgaggtggctattgatgggaaagaagaggacttggggtcacccactggagagctaacatctaagattttaagcagtattaaagtcttggaaggatttttggatattgacacaaaattctcagaaaaccgatgccaaaaagctttacccatggcccacagtgcctaccagtcaaatttgcctcataattacacaatgactgtccataagaatcagcttgcccaggctcttcgagtgtacagtcaacatgctagaggtccagcatttcacaaatacgccatgcagttacatgaggactgctacaaattttggagcaatggccatcagctctgtgaggagaggagtttaactgatcaacactgtgtgcacaaatttcactcattacctaaatcaggagaaaaaccagaggctgatagaaatccgcctgtgctatatcacaatagccgagctcgatctactggtgcttgcaactgtggaaggaaacaagcacctcgagatgatccctttgatatcaaagcagccaattatgacttctatcagcttctggaagaaaagtgttgtggaaaattggatcatatcaatttcccagtatttgaaccaagtactccagatcctgctcctgctaaaaatgaatcctctcctgctcctccagattcggatgctgataaacttaaagaaaaagaacctcaaacccaaggagagagcacgagcctgagtttagctttgagtttgggccaatccacagatagcttaggtacctatccagctgatccacaagcaggaggagataatccagaagttcatggtcaagtagaagtgaaaactgagaagaggccaaacttcgttgatcgacaggcatccacagttgagtatctcccaggcatgctacattcaaattgccctaaaggtctcctacccaaattctccagctggtctttggttaaactaggccctgctaagtcttataactttcatacaggtttggaccaacagggctttattccaggaacaaattatcttatgccttgggacattgtcatcaggactagagctgaagatgaaggagacttagacacaaactcttggcctgctccaaataaagctattcctggaaagagaagtgcggttgtaatgggaagaggaagacggcgagatgacatagctcgagcttttgtgggctttgaatatgaagactctcgaggtcggagattcatgtgctctgggcctgacaaagtaatgaaagtaatgggaagtgggccaaaggaatcagctttaaaagccctaaatagtgacatgcccttatatattctgtcatcctctcaaggtagagggctgaaacctcattatgctcaacttatgaggctttttgttgtggttcctgatgctcctttgcagataatactaatgcctcaggttcagccaggcccaccaccatgtccggtattctacccagaaaaacaagaaatcacccttccacctgatggcctttgggttttgagatttccttatgcatatctgagagaggaccttgtttcccccctaaggaaaatgtgcagttaatgagctacaaggtgctccgtggggttcttaaggcagtaacacaataagtgttttccagccagttcaatcctatacttgagctggtttttgtttttggtatttgtggctgtgtttttggtatgtgtttactgtgttttcccaaatccaaaatgtgttttggttacaggagttcagtatttggaaactaatttgttctactttttcattatattgttgatatttattgtaaacgtgactacaactttctaataaagattggttgttctagaaaagaatataaaatacatggatg

SEQ ID NO: 196859 - DNA, 2976 bp, Artificial Sequence
  derived and/or modified sequence
atggccggccccgtgagcctgagagacctgctgatgggcgccagcgcctggatgggcagcgagagccccggcggcagccccaccgagggcggcggcagcgccgccggcggccccgagcccccctggagagaggacgagatctgcgtggtgggcatcttcggcaagaccgccctgagactgaacagcgagaagttcagcctggtgaacaccgtgtgcgacagacaggtgttccccctgttcagacaccaggaccccggcgaccccggccccggcatcagaaccgaggccggcgccgtgggcgaggccggcggcgccgaggaccccggcgccgccgccggcggcagcgtgagaggcagcggcgccgtggccgagggcaacagaaccgaggccggcagccaggactacagcctgctgcaggcctactacagccaggagagcaaggtgctgtacctgctgctgaccagcatctgcgacaacagccagctgctgagagcctgcagagccctgcagagcggcgaggccggcggcggcctgagcctgccccacgccgaggcccacgagttctggaagcaccaggagaagctgcagtgcctgagcctgctgtacctgttcagcgtgtgccacatcctgctgctggtgcaccccacctgcagcttcgacatcacctacgacagagtgttcagagccctggacggcctgagacagaaggtgctgcccctgctgaagaccgccatcaaggactgccccgtgggcaaggactggaagctgaactgcagaccctgcccccccagactgctgttcctgttccagctgaacggcgccctgaaggtggagccccccagaaaccaggaccccgcccaccccgacaagcccaagaagcacagccccaagagaagactgcagcacgccctggaggaccagatctacagaatcttcagaaagagcagagtgctgaccaaccagagcatcaactgcctgttcaccgtgcccgccaaccaggccttcgtgtacatcgtgcccggcagccaggaggaggaccccgtgggcatgctgctggaccagctgagaagccactgcaccgtgaaggaccccgagagcctgctggtgcccgcccccctgagcggccccagaagataccaggtgatgagacagcacagcagacagcagctgagcttccacatcgacagcagcagcagcagcagcagcggccagctggtggacttcaccctgagagagttcctgtggcagcacgtggagctggtgctgagcaagaagggcttcgacgacagcgtgggcagaaacccccagcccagccacttcgagctgcccacctaccagaagtggatcagcgccgccagcaagctgtacgaggtggccatcgacggcaaggaggaggacctgggcagccccaccggcgagctgaccagcaagatcctgagcagcatcaaggtgctggagggcttcctggacatcgacaccaagttcagcgagaacagatgccagaaggccctgcccatggcccacagcgcctaccagagcaacctgccccacaactacaccatgaccgtgcacaagaaccagctggcccaggccctgagagtgtacagccagcacgccagaggccccgccttccacaagtacgccatgcagctgcacgaggactgctacaagttctggagcaacggccaccagctgtgcgaggagagaagcctgaccgaccagcactgcgtgcacaagttccacagcctgcccaagagcggcgagaagcccgaggccgacagaaacccccccgtgctgtaccacaacagcagagccagaagcaccggcgcctgcaactgcggcagaaagcaggcccccagagacgaccccttcgacatcaaggccgccaactacgacttctaccagctgctggaggagaagtgctgcggcaagctggaccacatcaacttccccgtgttcgagcccagcacccccgaccccgcccccgccaagaacgagagcagccccgccccccccgacagcgacgccgacaagctgaaggagaaggagccccagacccagggcgagagcaccagcctgagcctggccctgagcctgggccagagcaccgacagcctgggcacctaccccgccgacccccaggccggcggcgacaaccccgaggtgcacggccaggtggaggtgaagaccgagaagagacccaacttcgtggacagacaggccagcaccgtggagtacctgcccggcatgctgcacagcaactgccccaagggcctgctgcccaagttcagcagctggagcctggtgaagctgggccccgccaagagctacaacttccacaccggcctggaccagcagggcttcatccccggcaccaactacctgatgccctgggacatcgtgatcagaaccagagccgaggacgagggcgacctggacaccaacagctggcccgcccccaacaaggccatccccggcaagagaagcgccgtggtgatgggcagaggcagaagaagagacgacatcgccagagccttcgtgggcttcgagtacgaggacagcagaggcagaagattcatgtgcagcggccccgacaaggtgatgaaggtgatgggcagcggccccaaggagagcgccctgaaggccctgaacagcgacatgcccctgtacatcctgagcagcagccagggcagaggcctgaagccccactacgcccagctgatgagactgttcgtggtggtgcccgacgcccccctgcagatcatcctgatgccccaggtgcagcccggcccccccccctgccccgtgttctaccccgagaagcaggagatcaccctgccccccgacggcctgtgggtgctgagattcccctacgcctacgtgaccgagagaggcccctgcttcccccccaaggagaacgtgcagctgatgagctacaaggtgctgagaggcgtgctgaaggccgtgacccagtag

SEQ ID NO: 196860 - DNA, 2925 bp, Artificial Sequence
  derived and/or modified sequence
atggccggccccgtgagcctgagagacctgctgatgggcgccagcgcctggatgggcagcgagagccccggcggcagccccaccgagggcggcggcagcgccgccggcggccccgagcccccctggagagaggacgagatctgcgtggtgggcatcttcggcaagaccgccctgagactgaacagcgagaagttcagcctggtgaacaccgtgtgcgacagacaggtgttccccctgttcagacaccaggaccccggcgaccccggccccggcatcagaaccgaggccggcgccgtgggcgaggccggcggcgccgaggaccccggcgccgccgccggcggcagcgtgagaggcagcggcgccgtggccgagggcaacagaaccgaggccggcagccaggactacagcctgctgcaggcctactacagccaggagagcaaggtgctgtacctgctgctgaccagcatctgcgacaacagccagctgctgagagcctgcagagccctgcagagcggcgaggccggcggcggcctgagcctgccccacgccgaggcccacgagttctggaagcaccaggagaagctgcagtgcctgagcctgctgtacctgttcagcgtgtgccacatcctgctgctggtgcaccccacctgcagcttcgacatcacctacgacagagtgttcagagccctggacggcctgagacagaaggtgctgcccctgctgaagaccgccatcaaggactgccccgtgggcaaggactggaagctgaactgcagaccctgcccccccagactgctgttcctgttccagctgaacggcgccctgaaggtggagccccccagaaaccaggaccccgcccaccccgacaagcccaagaagcacagccccaagagaagactgcagcacgccctggaggaccagatctacagaatcttcagaaagagcagagtgctgaccaaccagagcatcaactgcctgttcaccgtgcccgccaaccaggccttcgtgtacatcgtgcccggcagccaggaggaggaccccgtgggcatgctgctggaccagctgagaagccactgcaccgtgaaggaccccgagagcctgctggtgcccgcccccctgagcggccccagaagataccaggtgatgagacagcacagcagacagcagctgagcttccacatcgacagcagcagcagcagcagcagcggccagctggtggacttcaccctgagagagttcctgtggcagcacgtggagctggtgctgagcaagaagggcttcgacgacagcgtgggcagaaacccccagcccagccacttcgagctgcccacctaccagaagtggatcagcgccgccagcaagctgtacgaggtggccatcgacggcaaggaggaggacctgggcagccccaccggcgagctgaccagcaagatcctgagcagcatcaaggtgctggagggcttcctggacatcgacaccaagttcagcgagaacagatgccagaaggccctgcccatggcccacagcgcctaccagagcaacctgccccacaactacaccatgaccgtgcacaagaaccagctggcccaggccctgagagtgtacagccagcacgccagaggccccgccttccacaagtacgccatgcagctgcacgaggactgctacaagttctggagcaacggccaccagctgtgcgaggagagaagcctgaccgaccagcactgcgtgcacaagttccacagcctgcccaagagcggcgagaagcccgaggccgacagaaacccccccgtgctgtaccacaacagcagagccagaagcaccggcgcctgcaactgcggcagaaagcaggcccccagagacgaccccttcgacatcaaggccgccaactacgacttctaccagctgctggaggagaagtgctgcggcaagctggaccacatcaacttccccgtgttcgagcccagcacccccgaccccgcccccgccaagaacgagagcagccccgccccccccgacagcgacgccgacaagctgaaggagaaggagccccagacccagggcgagagcaccagcctgagcctggccctgagcctgggccagagcaccgacagcctgggcacctaccccgccgacccccaggccggcggcgacaaccccgaggtgcacggccaggtggaggtgaagaccgagaagagacccaacttcgtggacagacaggccagcaccgtggagtacctgcccggcatgctgcacagcaactgccccaagggcctgctgcccaagttcagcagctggagcctggtgaagctgggccccgccaagagctacaacttccacaccggcctggaccagcagggcttcatccccggcaccaactacctgatgccctgggacatcgtgatcagaaccagagccgaggacgagggcgacctggacaccaacagctggcccgcccccaacaaggccatccccggcaagagaagcgccgtggtgatgggcagaggcagaagaagagacgacatcgccagagccttcgtgggcttcgagtacgaggacagcagaggcagaagattcatgtgcagcggccccgacaaggtgatgaaggtgatgggcagcggccccaaggagagcgccctgaaggccctgaacagcgacatgcccctgtacatcctgagcagcagccagggcagaggcctgaagccccactacgcccagctgatgagactgttcgtggtggtgcccgacgcccccctgcagatcatcctgatgccccaggtgcagcccggcccccccccctgccccgtgttctaccccgagaagcaggagatcaccctgccccccgacggcctgtgggtgctgagattcccctacgcctacctgagagaggacctggtgagccccctgagaaagatgtgcagctag

SEQ ID NO: 196861 - protein, 2472 aa, Artificial Sequence
  derived and/or modified sequence
MTARGQSPLAPLLETLEDPSASHGGQTDAYLTLTSRMTGEEGKEVITEIEKKLPRLYKVLKTHISSQNSELSSAALQALGFCLYNPKITSELSEANALELLSKLNDTIKNSDKNVRTRALWVISKQTFPSEVVGKMVSSIIDSLEILFNKGETHSAVVDFEALNVIVRLIEQAPIQMGEEAVRWAKLVIPLVVHSAQKVHLRGATALEMGMPLLLQKQQEIASITEQLMTTKLISELQKLFMSKNETYVLKLWPLFVKLLGRTLHRSGSFINSLLQLEELGFRSGAPMIKKIAFIAWKSLIDNFALNPDILCSAKRLKLLMQPLSSIHVRTETLALTKLEVWWYLLMRLGPHLPANFEQVCVPLIQSTISIDSNASPQGNSCHVATSPGLNPMTPVHKGASSPYGAPGTPRMNLSSNLGGMATIPSIQLLGLEMLLHFLLGPEALSFAKQNKLVLSLEPLEHPLISSPSFFSKHANTLITAVHDSFVAVGKDAPDVVVSAIWKELISLVKSVTESGNKKEKPGSEVLTLLLKSLESIVKSEVFPVSKTLVLMEITIKGLPQKVLGSPAYQVANMDILNGTPALFLIQLIFNNFLECGVSDERFFLSLESLVGCVLSGPTSPLAFSDSVLNVINQNAKQLENKEHLWKMWSVIVTPLTELINQTNEVNQGDALEHNFSAIYGALTLPVNHIFSEQRFPVATMKTLLRTWSELYRAFARCAALVATAEENLCCEELSSKIMSSLEDEGFSNLLFVDRIIYIITVMVDCIDFSPYNIKYQPKVKSPQRPSDWSKKKNEPLGKLTSLFKLIVKVIYSFHTLSFKEAHSDTLFTIGNSITGIISSVLGHISLPSMIRKIFATLTRPLALFYENSKLDEVPKVYSCLNNKLEKLLGEIIACLQFSYTGTYDSELLEQLSPLLCIIFLHKNKQIRKQSAQFWNATFAKVMMLVYPEELKPVLTQAKQKFLLLLPGLETVEMMEESSGPYSDGTENSQLNVKISGMERKSNGKRDSFLAQTKNKKENMKPAAKLKLESSSLKVKGEILLEEEKSTDFVFIPPEGKDAKERILTDHQKEVLKTKRCDIPAMYNNLDVSQDTLFTQYSQEEPMEIPTLTRKPKEDSKMMITEEQMDSDIVIPQDVTEDCGMAEHLEKSSLSNNECGSLDKTSPEMSNSNNDERKKALISSRKTSTECASSTENSFVVSSSSVSNTTVAGTPPYPTSRRQTFITLEKFDGSENRPFSPSPLNNISSTVTVKNNQETMIKTDFLPKAKQREGTFSKSDSEKIVNGTKRSSRRAGKAEQTGNKRSKPLMRSEPEKNTEESVEGIVVLENNPPGLLNQTECVSDNQVHLSESTMEHDNTKLKAATVENAVLLETNTVEEKNVEINLESKENTPPVVISADQMVNEDSQVQITPNQKTLRRSSRRRSEVVESTTESQDKENSHQKKERRKEEEKPLQKSPLHIKDDVLPKQKLIAEQTLQENLIEKGSNLHEKTLGETSANAETEQNKKKADPENIKSEGDGTQDIVDKSSEKLVRGRTRYQTRRASQGLLSSIENSESDSSEAKEEGSRKKRSGKWKNKSNESVDIQDQEEKVVKQECIKAENQSHDYKATSEEDVSIKSPICEKQDESNTVICQDSTVTSDLLQVPDDLPNVCEEKNETSKYAEYSFTSLPVPESNLRTRNAIKRLHKRDSFDNCSLGESSKIGISDISSLSEKTFQTLECQHKRSRRVRRSKGCDCCGEKSQPQEKSLIGLKNTENNDVEISETKKADVQAPVSPSETSQANPYSEGQFLDEHHSVNFHLGLKEDNDTINDSLIVSETKSKENTMQESLPSGIVNFREEICDMDSSEAMSLESQESPNENFKTVGPCLGDSKNVSQESLETKEEKPEETPKMELSLENVTVEGNACKVTESNLEKAKTMELNVGNEASFHGQERTKTGISEEAAIEENKRNDDSEADTAKLNAKEVATEEFNSDISLSDNTTPVKLNAQTEISEQTAAGELDGGNDVSDLHSSEETNTKMKNNEEMMIGEAMAETGHDGETENEGITTKTSKPDEAETNMLTAEMDNFVCDTVEMSTEEGIIDANKTETNTEYSKSEEKLDNNQMVMESDILQEDHHTSQKVEEPSQCLASGTAISELIIEDNNASPQKLRELDPSLVSANDSPSGMQTRCVWSPLASPSTSILKRGLKRSQEDEISSPVNKVRRVSFADPIYQAGLADDIDRRCSIVRSHSSNSSPIGKSVKTSPTTQSKHNTTSAKGFLSPGSRSPKFKSSKKCLISEMAKESIPCPTESVYPPLVNCVAPVDIILPQITSNMWARGLGQLIRAKNIKTIGDLSTLTASEIKTLPIRSPKVSNVKKALRIYHEQQVKTRGLEEIPVFDISEKTVNGIENKSLSPDEERLVSDIIDPVALEIPLSKNLLAQISALALQLDSEDLHNYSGSQLFEMHEKLSCMANSVIKNLQSRWRSPSHENSI

SEQ ID NO: 196862 - DNA, 7419 bp, Artificial Sequence
  derived and/or modified sequence
atgaccgccagaggccagagccccctggcccccctgctggagaccctggaggaccccagcgccagccacggcggccagaccgacgcctacctgaccctgaccagcagaatgaccggcgaggagggcaaggaggtgatcaccgagatcgagaagaagctgcccagactgtacaaggtgctgaagacccacatcagcagccagaacagcgagctgagcagcgccgccctgcaggccctgggcttctgcctgtacaaccccaagatcaccagcgagctgagcgaggccaacgccctggagctgctgagcaagctgaacgacaccatcaagaacagcgacaagaacgtgagaaccagagccctgtgggtgatcagcaagcagaccttccccagcgaggtggtgggcaagatggtgagcagcatcatcgacagcctggagatcctgttcaacaagggcgagacccacagcgccgtggtggacttcgaggccctgaacgtgatcgtgagactgatcgagcaggcccccatccagatgggcgaggaggccgtgagatgggccaagctggtgatccccctggtggtgcacagcgcccagaaggtgcacctgagaggcgccaccgccctggagatgggcatgcccctgctgctgcagaagcagcaggagatcgccagcatcaccgagcagctgatgaccaccaagctgatcagcgagctgcagaagctgttcatgagcaagaacgagacctacgtgctgaagctgtggcccctgttcgtgaagctgctgggcagaaccctgcacagaagcggcagcttcatcaacagcctgctgcagctggaggagctgggcttcagaagcggcgcccccatgatcaagaagatcgccttcatcgcctggaagagcctgatcgacaacttcgccctgaaccccgacatcctgtgcagcgccaagagactgaagctgctgatgcagcccctgagcagcatccacgtgagaaccgagaccctggccctgaccaagctggaggtgtggtggtacctgctgatgagactgggcccccacctgcccgccaacttcgagcaggtgtgcgtgcccctgatccagagcaccatcagcatcgacagcaacgccagcccccagggcaacagctgccacgtggccaccagccccggcctgaaccccatgacccccgtgcacaagggcgccagcagcccctacggcgcccccggcacccccagaatgaacctgagcagcaacctgggcggcatggccaccatccccagcatccagctgctgggcctggagatgctgctgcacttcctgctgggccccgaggccctgagcttcgccaagcagaacaagctggtgctgagcctggagcccctggagcaccccctgatcagcagccccagcttcttcagcaagcacgccaacaccctgatcaccgccgtgcacgacagcttcgtggccgtgggcaaggacgcccccgacgtggtggtgagcgccatctggaaggagctgatcagcctggtgaagagcgtgaccgagagcggcaacaagaaggagaagcccggcagcgaggtgctgaccctgctgctgaagagcctggagagcatcgtgaagagcgaggtgttccccgtgagcaagaccctggtgctgatggagatcaccatcaagggcctgccccagaaggtgctgggcagccccgcctaccaggtggccaacatggacatcctgaacggcacccccgccctgttcctgatccagctgatcttcaacaacttcctggagtgcggcgtgagcgacgagagattcttcctgagcctggagagcctggtgggctgcgtgctgagcggccccaccagccccctggccttcagcgacagcgtgctgaacgtgatcaaccagaacgccaagcagctggagaacaaggagcacctgtggaagatgtggagcgtgatcgtgacccccctgaccgagctgatcaaccagaccaacgaggtgaaccagggcgacgccctggagcacaacttcagcgccatctacggcgccctgaccctgcccgtgaaccacatcttcagcgagcagagattccccgtggccaccatgaagaccctgctgagaacctggagcgagctgtacagagccttcgccagatgcgccgccctggtggccaccgccgaggagaacctgtgctgcgaggagctgagcagcaagatcatgagcagcctggaggacgagggcttcagcaacctgctgttcgtggacagaatcatctacatcatcaccgtgatggtggactgcatcgacttcagcccctacaacatcaagtaccagcccaaggtgaagagcccccagagacccagcgactggagcaagaagaagaacgagcccctgggcaagctgaccagcctgttcaagctgatcgtgaaggtgatctacagcttccacaccctgagcttcaaggaggcccacagcgacaccctgttcaccatcggcaacagcatcaccggcatcatcagcagcgtgctgggccacatcagcctgcccagcatgatcagaaagatcttcgccaccctgaccagacccctggccctgttctacgagaacagcaagctggacgaggtgcccaaggtgtacagctgcctgaacaacaagctggagaagctgctgggcgagatcatcgcctgcctgcagttcagctacaccggcacctacgacagcgagctgctggagcagctgagccccctgctgtgcatcatcttcctgcacaagaacaagcagatcagaaagcagagcgcccagttctggaacgccaccttcgccaaggtgatgatgctggtgtaccccgaggagctgaagcccgtgctgacccaggccaagcagaagttcctgctgctgctgcccggcctggagaccgtggagatgatggaggagagcagcggcccctacagcgacggcaccgagaacagccagctgaacgtgaagatcagcggcatggagagaaagagcaacggcaagagagacagcttcctggcccagaccaagaacaagaaggagaacatgaagcccgccgccaagctgaagctggagagcagcagcctgaaggtgaagggcgagatcctgctggaggaggagaagagcaccgacttcgtgttcatcccccccgagggcaaggacgccaaggagagaatcctgaccgaccaccagaaggaggtgctgaagaccaagagatgcgacatccccgccatgtacaacaacctggacgtgagccaggacaccctgttcacccagtacagccaggaggagcccatggagatccccaccctgaccagaaagcccaaggaggacagcaagatgatgatcaccgaggagcagatggacagcgacatcgtgatcccccaggacgtgaccgaggactgcggcatggccgagcacctggagaagagcagcctgagcaacaacgagtgcggcagcctggacaagaccagccccgagatgagcaacagcaacaacgacgagagaaagaaggccctgatcagcagcagaaagaccagcaccgagtgcgccagcagcaccgagaacagcttcgtggtgagcagcagcagcgtgagcaacaccaccgtggccggcacccccccctaccccaccagcagaagacagaccttcatcaccctggagaagttcgacggcagcgagaacagacccttcagccccagccccctgaacaacatcagcagcaccgtgaccgtgaagaacaaccaggagaccatgatcaagaccgacttcctgcccaaggccaagcagagagagggcaccttcagcaagagcgacagcgagaagatcgtgaacggcaccaagagaagcagcagaagagccggcaaggccgagcagaccggcaacaagagaagcaagcccctgatgagaagcgagcccgagaagaacaccgaggagagcgtggagggcatcgtggtgctggagaacaacccccccggcctgctgaaccagaccgagtgcgtgagcgacaaccaggtgcacctgagcgagagcaccatggagcacgacaacaccaagctgaaggccgccaccgtggagaacgccgtgctgctggagaccaacaccgtggaggagaagaacgtggagatcaacctggagagcaaggagaacaccccccccgtggtgatcagcgccgaccagatggtgaacgaggacagccaggtgcagatcacccccaaccagaagaccctgagaagaagcagcagaagaagaagcgaggtggtggagagcaccaccgagagccaggacaaggagaacagccaccagaagaaggagagaagaaaggaggaggagaagcccctgcagaagagccccctgcacatcaaggacgacgtgctgcccaagcagaagctgatcgccgagcagaccctgcaggagaacctgatcgagaagggcagcaacctgcacgagaagaccctgggcgagaccagcgccaacgccgagaccgagcagaacaagaagaaggccgaccccgagaacatcaagagcgagggcgacggcacccaggacatcgtggacaagagcagcgagaagctggtgagaggcagaaccagataccagaccagaagagccagccagggcctgctgagcagcatcgagaacagcgagagcgacagcagcgaggccaaggaggagggcagcagaaagaagagaagcggcaagtggaagaacaagagcaacgagagcgtggacatccaggaccaggaggagaaggtggtgaagcaggagtgcatcaaggccgagaaccagagccacgactacaaggccaccagcgaggaggacgtgagcatcaagagccccatctgcgagaagcaggacgagagcaacaccgtgatctgccaggacagcaccgtgaccagcgacctgctgcaggtgcccgacgacctgcccaacgtgtgcgaggagaagaacgagaccagcaagtacgccgagtacagcttcaccagcctgcccgtgcccgagagcaacctgagaaccagaaacgccatcaagagactgcacaagagagacagcttcgacaactgcagcctgggcgagagcagcaagatcggcatcagcgacatcagcagcctgagcgagaagaccttccagaccctggagtgccagcacaagagaagcagaagagtgagaagaagcaagggctgcgactgctgcggcgagaagagccagccccaggagaagagcctgatcggcctgaagaacaccgagaacaacgacgtggagatcagcgagaccaagaaggccgacgtgcaggcccccgtgagccccagcgagaccagccaggccaacccctacagcgagggccagttcctggacgagcaccacagcgtgaacttccacctgggcctgaaggaggacaacgacaccatcaacgacagcctgatcgtgagcgagaccaagagcaaggagaacaccatgcaggagagcctgcccagcggcatcgtgaacttcagagaggagatctgcgacatggacagcagcgaggccatgagcctggagagccaggagagccccaacgagaacttcaagaccgtgggcccctgcctgggcgacagcaagaacgtgagccaggagagcctggagaccaaggaggagaagcccgaggagacccccaagatggagctgagcctggagaacgtgaccgtggagggcaacgcctgcaaggtgaccgagagcaacctggagaaggccaagaccatggagctgaacgtgggcaacgaggccagcttccacggccaggagagaaccaagaccggcatcagcgaggaggccgccatcgaggagaacaagagaaacgacgacagcgaggccgacaccgccaagctgaacgccaaggaggtggccaccgaggagttcaacagcgacatcagcctgagcgacaacaccacccccgtgaagctgaacgcccagaccgagatcagcgagcagaccgccgccggcgagctggacggcggcaacgacgtgagcgacctgcacagcagcgaggagaccaacaccaagatgaagaacaacgaggagatgatgatcggcgaggccatggccgagaccggccacgacggcgagaccgagaacgagggcatcaccaccaagaccagcaagcccgacgaggccgagaccaacatgctgaccgccgagatggacaacttcgtgtgcgacaccgtggagatgagcaccgaggagggcatcatcgacgccaacaagaccgagaccaacaccgagtacagcaagagcgaggagaagctggacaacaaccagatggtgatggagagcgacatcctgcaggaggaccaccacaccagccagaaggtggaggagcccagccagtgcctggccagcggcaccgccatcagcgagctgatcatcgaggacaacaacgccagcccccagaagctgagagagctggaccccagcctggtgagcgccaacgacagccccagcggcatgcagaccagatgcgtgtggagccccctggccagccccagcaccagcatcctgaagagaggcctgaagagaagccaggaggacgagatcagcagccccgtgaacaaggtgagaagagtgagcttcgccgaccccatctaccaggccggcctggccgacgacatcgacagaagatgcagcatcgtgagaagccacagcagcaacagcagccccatcggcaagagcgtgaagaccagccccaccacccagagcaagcacaacaccaccagcgccaagggcttcctgagccccggcagcagaagccccaagttcaagagcagcaagaagtgcctgatcagcgagatggccaaggagagcatcccctgccccaccgagagcgtgtacccccccctggtgaactgcgtggcccccgtggacatcatcctgccccagatcaccagcaacatgtgggccagaggcctgggccagctgatcagagccaagaacatcaagaccatcggcgacctgagcaccctgaccgccagcgagatcaagaccctgcccatcagaagccccaaggtgagcaacgtgaagaaggccctgagaatctaccacgagcagcaggtgaagaccagaggcctggaggagatccccgtgttcgacatcagcgagaagaccgtgaacggcatcgagaacaagagcctgagccccgacgaggagagactggtgagcgacatcatcgaccccgtggccctggagatccccctgagcaagaacctgctggcccagatcagcgccctggccctgcagctggacagcgaggacctgcacaactacagcggcagccagctgttcgagatgcacgagaagctgagctgcatggccaacagcgtgatcaagaacctgcagagcagatggagaagccccagccacgagaacagcatctag

SEQ ID NO: 196863 - DNA, 264 bp, Artificial Sequence
  derived and/or modified sequence
atgaccgccagaggccagagccccctggcccccctgctggagaccctggaggaccccagcgccagccacggcggccagaccgacgcctacctgaccctgaccagcagaatgaccggcgaggagggcaaggaggtgatcaccgagatcgagaagaagctgcccagactgtacaaggtgctgaagacccacatcagcagccagaacagcgagctgagcagcgccgccctgcaggccctgggcttctgcctgtacaaccccaagtag

SEQ ID NO: 196864 - DNA, 7419 bp, Artificial Sequence
  derived and/or modified sequence
atgaccgccagagggcagtcaccgttggctcctctgctggaaaccctggaggatcccagcgcttcacacggtgggcagacggatgcgtaccttacgcttacttctcggatgaccggtgaggaggggaaagaagtgattactgagattgaaaaaaaactaccaagattgtacaaagtgctcaaaacccatatttcttctcagaattcagaactgtccagcgcagccctacaggctctgggcttctgcctgtacaaccctaaaattacttctgaactttccgaggcaaacgcactcgaactgttgagtaaactgaatgacaccattaagaactccgataagaatgtcaggacccgggccctgtgggtcatctcgaagcagacgttcccctcggaggtcgttggcaagatggtcagttccattatagacagtctggaaattctattcaacaaaggagagactcacagtgctgtggtggattttgaagcactgaatgtgatcgtgcggctgattgagcaggcccccattcagatgggcgaagaggccgttaggtgggccaagctggtgatccctctggtggtccattccgctcaaaaggtgcacttacgtggcgctacagctctcgagatggggatgcccctgttgctgcaaaagcagcaggaaattgcatctattacagagcagctgatgacaacaaagttaatctctgagttacagaagctgttcatgagtaaaaacgagacctatgtgctgaagctgtggcctttgttcgtgaaactgctgggacggaccctgcacaggtcaggtagcttcatcaacagtctcttgcagctggaagaattgggcttccggtctggcgctccaatgatcaagaagattgcattcattgcttggaagagcctaattgacaatttcgccctgaaccctgatatcttgtgttctgcaaaacgcttaaagctcctcatgcaacctctctcttcgattcatgttcgcactgaaactcttgctctcaccaaactggaagtttggtggtatctgctgatgaggctgggcccccacctgcccgctaacttcgaacaggtgtgtgtaccactgatccaatccaccatctccattgatagcaatgctagccctcagggtaactcgtgccatgtcgccacatcccctggattgaatcccatgacgcctgtgcacaagggggcttcatccccttacggagccccaggtaccccacggatgaacctatcttccaacttaggtggcatggccaccatacctagcattcaactgttgggactggaaatgcttctacatttccttttaggccccgaagcactctctttcgctaagcagaacaagctcgtgctgtcccttgagcctctggaacatccactaattagtagtccttcctttttttccaaacatgcgaataccctgatcacagccgttcacgattcatttgtcgctgtgggaaaagatgcacctgatgtggtggtgagcgccatctggaaggagcttatatcccttgtcaaaagtgtgacagaatctgggaacaagaaagagaagcctggatccgaagtgctgaccttactgctgaagagcctagaatccatcgttaaatctgaggtcttccctgtgtctaaaaccctggtgttgatggagatcaccatcaagggcctgcctcagaaggtcttggggtcacccgcttaccaagttgctaatatggatattctgaacggcacccctgcattgttcctgatccagctgatcttcaacaattttttagagtgtggggtttccgatgagagattttttcttagcctcgagtctctggtcggatgcgtcctgagcggccccactagtcccctcgcgttctctgactctgtactgaatgttattaaccagaatgcaaagcagcttgagaacaaggagcatctgtggaaaatgtggagcgtgatcgtgacccctctgacggagctgattaatcagaccaacgaggtgaaccaaggagatgcattagagcacaattttagtgctatatacggggcgctgactttaccggtgaatcacatcttttctgagcagagatttcctgttgccactatgaagactctgctgaggacatggagtgaactgtatagggccttcgcccgatgtgccgcgttggtggctacagccgaggagaatctctgctgtgaagaactctcttctaaaataatgtccagtctggaggacgaaggcttcagcaatcttctgttcgtcgacaggattatatatatcattactgtgatggtcgattgcattgatttctctccttataacataaagtaccaaccgaaggtgaagtccccacagcggccatccgactggagcaaaaagaaaaatgaacccttaggcaagctgaccagtctgtttaagttgattgttaaggtgatctactcgttccacaccctctcctttaaggaggctcattcagatactctgttcacaataggcaatagcatcactgggatcatttcctccgtcctgggacacatttccttgccctcgatgattaggaagatctttgcgaccttaacaagaccgctggctctgttttatgaaaactccaaactagacgaagtacccaaagtttacagttgtctcaataacaagctggaaaagctactgggagagatcatcgcttgcctgcagtttagttatacaggaacctatgactccgagcttttagagcagttgtcgccacttctctgcataattttcctgcacaagaacaagcagattcggaaacagtcagcccaattctggaacgccacgttcgcgaaggttatgatgctggtatatcccgaggagctgaagcctgtgttgacacaggccaagcagaagttcctcttgctgcttccaggcctcgagaccgttgagatgatggaagagagttccggcccgtacagtgacggtaccgagaactcccagctaaacgtgaaaattagcggtatggaaagaaagtcaaacggtaagcgcgatagcttccttgcccaaactaagaacaaaaaagagaatatgaagcccgctgcaaagctgaaactcgaatccagctccctgaaggtgaagggcgaaatcctgttggaggaagaaaaaagtaccgatttcgttttcatccctccggagggcaaagacgcaaaggagcgaattcttaccgaccatcaaaaggaggtgctcaagacgaagagatgcgatatccctgcaatgtacaacaatctggacgtgtcccaggacaccctgttcacccaatattctcaagaggaacctatggaaatccccactttgactcgcaagccaaaagaagatagcaaaatgatgattacggaggagcagatggactccgacatcgttatcccccaggacgtgactgaggattgcgggatggccgagcacttggagaagagctcactttctaacaatgagtgcggcagccttgacaaaacttcgccagagatgagcaactccaacaatgacgaacgaaaaaaggcgctcatcagtagtcggaagacaagcacagagtgcgcaagttcaactgagaattctttcgtcgtttcaagtagcagcgtgagtaacacgaccgtggctggcacacccccatacccaacctcaagaaggcagacattcattacactcgaaaagttcgatgggagtgagaaccggcctttcagtccctcaccattaaacaatataagctctaccgttacagtgaaaaacaatcaagagacaatgataaaaacagacttcctgcccaaagccaagcagcgggaaggaacctttagcaagagcgactctgagaagattgttaacgggaccaagcggagctctcggagggctggaaaggcagagcagacaggcaataagaggtccaagcctctgatgcgctcggagcccgaaaaaaacactgaagaaagcgtggagggcattgtagtgctcgagaacaaccctccagggctgctgaatcagactgaatgcgtatcggacaatcaggtccatctgtccgagtcaactatggaacatgacaacaccaagttgaaggctgccaccgtggagaacgccgtgctgctcgagactaacacagtcgaggagaagaacgtggagatcaatctcgagtctaaggagaatacaccaccagtggttatttcagctgaccagatggtgaacgaagacagccaggttcagatcactccgaatcagaaaactctccgccgtagctctaggaggaggagcgaggtggtggaatcgacaacggagtctcaggataaagaaaactcccaccagaaaaaagagcgacgaaaagaagaggagaaaccccttcagaagagccccctgcacattaaagatgatgtactgcccaaacagaaacttatcgctgaacagactcttcaggagaacttgattgagaaggggagcaacttgcatgaaaaaaccctaggcgaaacctccgctaatgcagagactgaacaaaacaaaaagaaagccgaccctgagaacattaaatcagaaggtgacggtacccaggacatagttgacaagagtagcgagaagctggtcaggggtcgcacgcgctatcaaactagacgagcctcccaaggtctactgtcttctatcgaaaattccgaatcagactccagcgaagctaaggaggagggcagccgtaagaagcgctcaggcaagtggaagaacaaatctaatgaaagtgtggacatacaggatcaagaggaaaaggtggtgaagcaggaatgtatcaaagctgagaaccaatcccacgactataaagccacttcagaggaagacgtttccattaagtcccctatctgcgaaaaacaggatgagtcaaacactgtgatatgtcaggattccacagtcacctctgatttgctgcaggtgcctgatgatctccccaatgtgtgcgaagaaaaaaatgaaacttcaaaatatgccgaatatagttttacaagcctgcctgtgcccgagtcaaacctgaggaccagaaatgccatcaaacggcttcataaacgggattccttcgacaactgctcacttggggagtcaagcaaaataggcatctctgacatctctagcctttccgaaaaaacctttcagaccctagaatgtcaacataaacgtagcaggagagtcagacgcagtaaaggttgtgattgttgcggcgagaaatcccagcctcaggagaaatccctgatcggacttaaaaataccgaaaataacgatgttgagattagcgagaccaaaaaggctgatgtgcaagctccggtaagcccaagcgagacttcgcaggccaatccttacagcgaaggacagtttttagacgaacaccattctgtcaatttccacctgggcctcaaggaggataacgacaccattaacgattctctcattgtgtcagaaactaagtcaaaagaaaataccatgcaggaaagcctcccgtcaggcatcgtgaacttccgagaggagatctgcgacatggactcgtcagaagcgatgtcacttgagagtcaagagtctcccaacgagaattttaagacagtaggcccttgccttggggatagcaagaatgtgtctcaggaatctctcgagactaaagaggagaagcctgaggagacccctaagatggagctgtcattggagaacgtcacggtggaaggaaacgcgtgtaaagttacagagagcaacctggagaaggccaaaacaatggaactgaatgtgggaaatgaggcttcattccacggccaggaacgtaccaagacaggcattagcgaagaggccgccatcgaggagaataaacgaaacgatgactctgaggcagacaccgccaagctcaatgccaaagaagtcgccaccgaggaatttaattctgacatctctctttctgacaataccacccccgtgaagctgaatgcacagacagagatatcagagcaaactgccgcaggtgagctggacggcggcaatgacgtctccgacctccactcttccgaagagaccaataccaaaatgaaaaacaatgaagagatgatgatcggagaagctatggctgaaaccggacatgacggggagacggaaaacgaggggatcacgactaagacaagtaagcccgacgaagccgaaacaaatatgcttacggcagaaatggacaattttgtgtgtgatacggtagagatgtctaccgaagaggggattatcgatgccaacaagacggagactaataccgaatacagcaagtccgaagagaagcttgacaacaatcaaatggttatggaaagcgatattttgcaagaggaccatcatacctcccagaaggtcgaggaaccgagccaatgtctggcctctggaacagctatctcggaactgatcatcgaggacaataacgcttctccacaaaaattaagagaactggatccctccctagtctcggccaacgattccccatcaggaatgcaaacgcggtgcgtttggtccccattggctagtccatctacgtcaatcctgaagcgagggctaaagcgaagccaggaggacgaaatttcaagcccggtcaacaaagtgaggcgcgtgtcctttgctgaccccatttaccaggcaggcctggccgatgacatcgatcgcaggtgtagtatcgttcgctcacacagtagcaattcctctcccattggaaagtccgtgaagaccagtccgaccactcaaagtaagcacaatactacatcagcaaaggggtttttaagccccggctctagatctcctaaatttaaatcctctaaaaagtgtctgatctcggagatggccaaggagtccatcccttgtcccaccgaatccgtgtacccccctctggtaaactgcgtagcccctgtagatataattctgcctcaaattaccagcaacatgtgggcacgcggactgggtcagctcatcagagcaaaaaatatcaagaccatcggggatttatccactttgacggccagcgaaatcaagacgctgcccatccggtcacccaaagttagcaacgttaagaaggcccttcggatctaccacgagcagcaggtcaagaccaggggcctcgaggaaattcctgtgttcgatatcagtgagaaaactgtaaatggaatcgagaataagagccttagccccgatgaggaaagacttgtgtcagatatcattgatccagtggctctggaaatacctctctccaaaaatctgctcgcgcagataagcgcactcgccttgcagctggacagcgaggatctccacaactattccggttcccagctcttcgaaatgcacgagaaactgtcctgtatggcaaactccgttattaagaatcttcaaagtaggtggcggagcccttcgcatgagaactcgatttag

SEQ ID NO: 196865 - DNA, 264 bp, Artificial Sequence
  derived and/or modified sequence
atgacggcccgcggccagtcacccctcgcccccctgctagaaactctcgaggacccatccgcctcccacggcggccagacagatgcttatctaaccttgacttcacgaatgactggagaggagggaaaggaggtgatcactgaaatcgagaagaagctgcccaggctgtacaaagtgctgaaaacccacataagctctcagaattccgaactctcttctgcagccttgcaagcgttggggttctgtctttacaatccaaaatag

SEQ ID NO: 196866 - DNA, 7419 bp, Artificial Sequence
  derived and/or modified sequence
atgaccgccagggggcagagtccactagcgccattgctcgagaccctggaagacccctcggcttcccatggcggccagacggatgcctatctgaccctaacttcccggatgacaggagaagagggaaaagaggttattaccgagattgaaaagaagctccccaggctgtataaggtgctgaagacacacatcagttcacaaaactcagagctgtcaagcgcagcactacaggctctgggcttctgtttgtataatcccaagattacctccgaattgagcgaagctaatgccctcgagcttttatccaaactgaatgacacaatcaagaatagtgataaaaacgttcgcacgcgcgcgttgtgggtgatatctaaacagacattccctagtgaagtggtgggcaaaatggtcagttccatcattgactctctggagatcctgttcaacaaaggagaaacccacagcgcggtagtggattttgaagcgcttaatgtcatagtgagattgattgaacaggcccctatccagatgggtgaggaagctgtgcgatgggccaaactcgtgatccccttggtcgttcactccgcccagaaggtgcacctacggggcgccacggccctcgagatgggcatgcctctgctgcttcagaagcagcaggagatcgcaagcataactgaacagctgatgactacaaaattgatttcagaactccagaagctcttcatgagcaaaaatgagacctacgtactgaaactgtggcccctgttcgtgaagctgctgggccgaactctgcataggagtgggagcttcatcaactcactgctgcagctggaggagctcgggtttcggtctggcgcgcccatgattaagaaaatcgctttcatcgcgtggaaatctctgattgataacttcgctttgaatcctgatattctttgttcagcaaagcgcctgaagctcctcatgcaacctctatcctctatccacgtccgaacagaaactctcgcactcaccaagctggaggtgtggtggtaccttctgatgcgactgggccctcacctgccagcaaatttcgaacaggtgtgtgtccctcttattcaaagtacaatttcgatagactcgaacgccagtccacaaggcaactcatgccatgtggccacatcgcccggcctcaaccccatgacccccgttcataaaggcgcctcaagtccgtacggcgcaccgggcacacctcggatgaatttatcctcaaatctcgggggcatggcaacaataccaagtatccagctcctgggccttgaaatgctgctgcatttcctgttaggccctgaggcactgagctttgccaagcagaacaagctagtactttcccttgagccgctagaacatccgctgattagttccccttctttctttagcaagcacgccaatacccttatcaccgctgtgcatgatagctttgtagccgttgggaaggacgctccagatgtggtcgtctccgcaatctggaaggagctaatcagtctcgtgaaaagcgtcactgagtccggaaacaaaaaggagaaacctggcagtgaagtgcttaccttgctgctcaaatctcttgaaagcatcgtgaaatccgaggtgttccctgtgagcaagacgctcgtactcatggagattaccatcaaggggctcccccagaaagttcttggatcgccggcttatcaggtagccaacatggacattctcaacggtaccccagccttgttcctgatacagctgatcttcaacaactttctcgaatgcggagtgtccgacgaaagattttttcttagtctggagagtctcgtcggctgtgtgctgtcaggcccgacctctcccctggcgttcagtgactccgtgctgaacgtcattaatcagaacgctaagcaattagaaaacaaggagcacctatggaaaatgtggtccgttattgtgacgcctctgactgagttgatcaatcagaccaacgaagtcaaccagggtgacgcactcgaacataatttcagtgccatttatggagctctgacactgcccgttaaccacatcttctcagaacagaggttccctgtcgcaactatgaaaacgttgctgagaacttggagtgaactctatcgggcttttgctcgatgcgccgctctagttgccactgcagaggagaacctctgttgcgaggaactatcctccaagataatgagctcgctggaggacgagggcttctctaatttactttttgtggatagaatcatctatattatcaccgtaatggtcgactgtatagactttagcccgtacaacatcaaataccagcctaaagtcaaaagcccgcaacgtccctccgattggagcaaaaagaaaaacgagccgctcggaaagctgaccagcctgttcaagctgattgtgaaggtcatatactcctttcacaccctaagtttcaaagaggctcacagcgatacgctgttcactatcgggaatagcattacaggcatcatttcaagcgttctaggtcatatctcattaccatcaatgattcggaaaatcttcgcaactctgactcggccactggcactattttacgagaatagcaaacttgacgaggtaccaaaagtttactcctgcttgaacaataagcttgagaagctgctgggtgaaattattgcatgccttcaattttcatacaccgggacatacgactccgagctgcttgaacagctgtcccctttgttatgcataatcttcttgcataaaaacaagcagataaggaagcagagcgcccagttttggaacgcaacttttgccaaagtgatgatgctggtttatccagaggaactaaaacccgtactgacccaagccaagcagaagtttttgctgttgctgcctggtctggaaaccgtggagatgatggaggagtcgtcgggaccttattcggacgggacagagaactcccaactcaacgtgaagatttccgggatggagcgtaaatccaacggtaagagagactccttccttgctcagactaagaataagaaagaaaacatgaagcctgccgcaaagttgaagctggaatcttccagcctgaaagtcaaaggtgagatcttgctcgaggaagagaagagcacagatttcgtgttcatccccccagagggcaaggacgccaaggagcgcatcttgaccgaccaccagaaagaggtgctgaagaccaagcgatgcgatatccctgccatgtataacaaccttgacgttagccaggacacgctattcacccagtattcccaggaggagcccatggagataccaacgctcacgaggaagcctaaagaagacagcaaaatgatgattacggaggaacagatggattcggacattgttatccctcaggatgtaactgaagattgcggaatggctgaacatctggagaaaagcagcttgagtaacaacgagtgtggctctctcgacaaaacgagccctgaaatgtctaacagtaacaacgacgagcgaaagaaggcccttatctccagcaggaaaacatccaccgaatgtgccagttcgacggaaaactcttttgtggtgtcttcctccagcgtaagcaacactaccgttgccggaacacctccttatcccacgtccagacggcagacattcatcactttagagaaattcgacgggtctgagaaccgcccatttagcccgtctcccctgaacaatatctcaagtaccgtcaccgtgaaaaataaccaggaaactatgatcaaaactgatttcttacccaaggccaagcagagagagggaacgttctccaagtctgatagcgagaagattgtcaatggaactaagaggtcttcacggcgggcagggaaagcagagcagactgggaataagcgtagcaaacccctcatgcggtccgaacccgaaaagaatactgaagagtcagtggagggcatcgttgtcctagagaataatccgccgggcctccttaaccagactgagtgcgtgtccgacaaccaggtgcatctgtcggagagcactatggaacatgataacaccaagcttaaagcagctaccgttgaaaacgccgtcctgctcgagactaatacggtggaagagaaaaatgtggaaatcaatctagaatctaaggaaaacactccaccggtagtcatcagcgcggaccagatggtaaacgaagacagtcaagttcaaatcactccaaaccagaagacactccggaggtcgtccagacgtcgctccgaggtagtggagtccaccacagaatcgcaggacaaagagaatagccaccagaaaaaggagcgtcggaaagaagaagaaaaacccctgcagaaaagtccacttcatataaaagacgatgttttgcctaagcagaagctgattgctgaacagactctacaggagaatttaatcgagaaggggtcgaaccttcacgaaaagacacttggcgagacgagtgctaatgccgagacagagcagaacaagaagaaggcggatccagagaatataaagagcgagggggatggcacacaggacatcgtagacaagagtagtgaaaagttagtgagggggcggacccgataccagacccggcgggcctctcagggactgctgagctctatcgagaattctgaatccgactctagcgaggccaaggaggaaggctcccggaagaagagatctgggaagtggaaaaacaagtcaaatgagagtgtggatatccaagaccaggaggagaaggtcgtgaagcaggaatgtatcaaggcggaaaatcagagccacgactacaaagctactagcgaagaagatgtgtcaattaagtcgccaatctgtgagaaacaggacgaatcaaacacggtgatctgccaagattcaaccgttaccagcgacctcctgcaggtgcccgacgatttaccaaatgtatgcgaagagaaaaacgaaacttctaaatatgccgagtattcattcacatcactccccgtgccggagtcaaaccttcggacccggaacgctataaagcggctgcataagagagatagttttgataattgctcacttggcgaaagttctaaaatcgggatctccgatatttctagtctgagcgagaaaaccttccaaaccctggaatgccagcacaagaggtcccggagagtgcgccggagcaagggctgcgattgttgcggtgagaaatcccagccacaggaaaaatcactcatcggcctgaagaacaccgagaacaacgacgtcgaaatctcagagactaaaaaagctgacgtgcaggctccggtatcgccaagcgagacttcccaggccaatccgtatagcgaaggtcagttcctggacgagcaccactctgtaaattttcacctcggcctcaaggaggacaacgatacaattaatgattctctgattgtctccgaaactaagtcaaaagaaaacactatgcaggagtccctgccctctggtattgtaaatttcagggaagagatctgcgatatggactcatcagaggccatgagcctcgaaagtcaggaatcgcctaatgaaaattttaaaactgtagggccttgcctaggggattctaaaaatgtaagccaggagagcctcgaaactaaggaagagaagcccgaggaaactccaaaaatggagctcagcttggaaaacgtgaccgtggaaggcaatgcttgtaaggtcaccgaatccaaccttgaaaaggccaagactatggaattgaatgtgggcaacgaggcctcattccacggccaggaacgtaccaaaaccggaattagcgaggaagcagctattgaggagaataaacgtaacgacgactccgaagccgacactgctaaactgaatgctaaggaggtggcgacggaggaatttaactctgacatcagcctgtctgataacaccactcccgtaaaactgaacgcacagaccgagatctctgagcagacggcagcaggagaattagacggagggaacgacgtgagcgacctgcacagctccgaggaaaccaacaccaaaatgaagaataatgaggaaatgatgataggagaagcaatggcagaaacaggacatgacggtgagacagaaaatgagggcatcactacaaagacaagtaagccagatgaggccgaaacaaacatgctgactgctgagatggataactttgtctgtgataccgtggaaatgagcactgaggagggcatcattgacgccaacaagacggaaactaacaccgagtacagtaaatccgaggaaaagctggacaacaaccagatggtcatggagtccgatatcctgcaagaagaccaccacacctcgcaaaaggtagaggaaccttcacagtgtctggcgtctggaacagccatctccgaactgataatcgaggacaacaacgcgtctccacagaagcttcgggagctggaccccagtctggttagcgccaatgactcaccatccggtatgcagaccagatgcgtttggagtccactggcctctccctccaccagcatcctgaagaggggcctgaagaggtcccaggaagacgaaatctcctcacctgtgaacaaagttaggagggtctctttcgctgaccctatctatcaggcaggtctagctgatgacatagaccgccgatgttccattgttcgctctcactccagcaactcctcaccaattggcaaatcagtgaaaacatcgcctactacacaaagcaaacataacaccacctcagctaaaggtttcttgtctcccggaagccggagccctaagttcaagagtagcaagaagtgtcttattagcgaaatggctaaggagtccattccatgtcctaccgagtctgtgtatcctcccttagtcaactgtgttgctcccgtcgatattatcttacctcagatcacctccaacatgtgggcaagggggttaggccagttgatccgggcgaaaaatataaagacaattggtgaccttagcacgttaacagccagcgagattaagacattaccaattaggagcccgaaggtgtccaacgtcaagaaggcactgcggatatatcacgagcaacaggtgaaaacgcgaggcctggaggaaattcccgtattcgacatcagcgagaagacagtgaacgggattgagaacaaaagcctttccccggacgaggagcggctggtctctgacatcattgatcccgtggccctggaaatcccactgtccaagaatctattagcacagataagcgcactggctcttcaattggactcagaggatctccataactactctggaagtcagctgtttgaaatgcacgaaaagctttcttgtatggctaacagtgtgattaaaaatctgcagtctcggtggcggagcccatcacatgaaaattctatctag

SEQ ID NO: 196867 - DNA, 7419 bp, Artificial Sequence
  derived and/or modified sequence
atgacagcccggggccagagccccctggcccccctgctggagaccctggaggaccccagcgccagccatggaggccagacagatgcctacctgaccctgaccagcaggatgaccggggaggagggcaaggaggtgatcacagaaattgagaagaagctgccccggctgtacaaggtgctgaagacccacatcagcagccagaacagcgagctgagcagcgctgccctgcaggccctgggcttctgcctgtacaaccccaagatcaccagcgagctgtctgaggccaatgccctggagctgctgagcaagctgaatgacaccatcaagaacagcgacaagaatgtgaggacccgggccctgtgggtgatcagcaagcagaccttccccagcgaggtggtgggcaagatggtgagcagcatcatcgacagcctggagatcctcttcaacaagggggagacccacagcgctgtggtggactttgaggccctgaatgtcatcgtgcggctcatcgagcaggcccccatccagatgggagaggaggccgtgcgctgggccaagctggtgatccccctggtggtgcacagcgcccagaaggtgcacctgcggggggccacagccctggagatgggcatgcccctgctgctgcagaagcagcaggagatcgccagcatcacagagcagctgatgaccaccaagctgatcagcgagctgcagaagctgttcatgagcaagaatgagacctacgtgctgaagctgtggcccctgtttgtgaagctgctgggccgcaccctgcacaggagcggcagcttcatcaacagcctgctgcagctggaggagctgggcttccgcagcggggcccccatgatcaagaagatcgccttcatcgcctggaagagcctgattgacaactttgccctgaacccagacatcctgtgcagcgccaagaggctgaagctgctgatgcagcccctgagcagcatccacgtgaggacagagaccctggccctgaccaagctggaggtgtggtggtacctgctgatgaggctgggcccccacctgcctgccaactttgagcaggtgtgtgtgcccctcatccagagcaccatcagcattgacagcaatgccagcccccagggcaacagctgccacgtggccaccagccctggcctgaaccccatgacccctgtgcacaagggggccagcagcccctacggggcccctggcacccccaggatgaacctgagcagcaacctgggcggcatggccaccatccccagcatccagctgctgggcctggagatgctgctgcacttcctgctgggccctgaggccctgagctttgccaagcagaacaagctggtgctgagcctggagcccctggagcaccccctcatcagcagccccagcttcttcagcaagcacgccaacaccctcatcacagctgtgcatgacagctttgtggccgtgggcaaggatgccccagatgtggtggtgtctgccatctggaaggagctgatcagcctggtgaagtctgtgacagaaagtggcaacaagaaggagaagccaggcagcgaggtgctgaccctgctgctgaagagcctggagagcatcgtgaagtctgaggtgtttcctgtgtccaagaccctggtgctgatggagatcaccatcaagggcctgccccagaaggtgctgggcagccctgcctaccaggtggccaacatggacatcctgaatggcaccccagccctcttcctgatccagctgatcttcaacaacttcctggagtgtggggtgtctgatgagcgcttcttcctgagcctggagagcctggtgggctgtgtgctgagcggccccaccagccccctggccttcagtgacagcgtgctgaatgtcatcaaccagaatgccaagcagctggagaacaaggagcacctgtggaagatgtggagcgtcatcgtgacccccctgacagagctgatcaaccagaccaatgaggtgaaccagggagatgccctggagcacaacttcagcgccatctacggggccctgaccctgcctgtgaaccacatcttcagcgagcagcgcttccctgtggccaccatgaagaccctgctgcggacctggagcgagctgtaccgggcctttgcccgctgtgccgccctggtggccacagctgaggagaacctgtgctgtgaggagctgagcagcaagatcatgagcagcctggaggatgagggcttcagcaacctgctgtttgtggaccgcatcatctacatcatcaccgtgatggtggactgcatcgacttcagcccctacaacatcaagtaccagcccaaggtgaagagcccccagaggcccagcgactggagcaagaagaagaatgagcccctgggcaagctgaccagcctcttcaagctgattgtgaaggtgatctacagcttccacaccctgtccttcaaggaggcccacagcgacaccctcttcaccatcggcaacagcatcaccggcatcatcagctctgtgctgggccacatcagcctgcccagcatgatcaggaagatctttgccaccctgacccggcccctggccctcttctatgagaacagcaagctggatgaggtgcccaaggtgtacagctgcctgaacaacaagctggagaagctgctgggggagatcatcgcctgcctgcagttctcctacacaggcacctatgacagcgagctgctggagcagctgagccccctgctgtgcatcatcttcctgcacaagaacaagcagatcaggaagcagagcgcccagttctggaatgccacctttgccaaggtgatgatgctggtgtacccagaggagctgaagcctgtgctgacccaggccaagcagaagttcctgctgctgctgcccggcctggagaccgtggagatgatggaggagagcagcggcccctacagtgatggaacagagaacagccagctgaatgtgaagatcagcggcatggagaggaagagcaatggcaagagggacagcttcctggcccagaccaagaacaagaaggagaacatgaagccagctgccaagctgaagctggagagcagcagcctgaaggtgaagggggagatcctgctggaggaggagaagagcacagactttgtgttcatccccccagagggcaaggatgccaaggagcgcatcctgacagaccaccagaaggaggtgctgaagaccaagagatgtgacatcccagccatgtacaacaacctggatgtgtcccaggacaccctcttcacccagtacagccaggaggagcccatggagatccccaccctgaccaggaagcccaaggaggacagcaagatgatgatcacagaggagcagatggacagcgacatcgtcatcccccaggatgtgacagaggactgtggcatggccgagcacctggagaagagcagcctgagcaacaatgaatgtggcagcctggacaagaccagccctgagatgagcaacagcaacaatgatgagaggaagaaggccctgatcagcagcaggaagaccagcacagaatgtgccagcagcacagagaacagctttgtggtgagcagcagctctgtgagcaacaccaccgtggccggcaccccaccctaccccaccagccggcggcagaccttcatcaccctggagaagtttgatggctctgaaaatcggcccttcagccccagccccctgaacaacatcagcagcacagtgacagtgaagaacaaccaggagaccatgatcaagacagacttcctgcccaaggccaagcagcgggagggcaccttcagcaagagtgacagcgagaagatcgtgaatggcaccaagaggagcagcagaagagctgggaaggccgagcagacaggcaacaagaggagcaagcccctgatgaggtctgagcctgagaagaacacagaggagagcgtggagggcatcgtggtgctggagaacaaccccccaggcctgctgaaccagacagaatgtgtgtctgacaaccaggtgcacctgtctgagagcaccatggagcatgacaacaccaagctgaaggccgccaccgtggagaatgctgtgctgctggagaccaacacagtggaggagaagaatgtggagatcaacctggagagcaaggagaacaccccacctgtggtgatctctgctgaccagatggtgaatgaagacagccaggtgcagatcacccccaaccagaagaccctgcggcgcagcagcagaagaagaagtgaggtggtggagagcaccacagagagccaggacaaggagaacagccaccagaagaaggagaggaggaaggaggaggagaagcccctgcagaagagccccctgcacatcaaggatgatgtgctgcccaagcagaagctgattgctgagcagaccctgcaggagaacctgattgagaagggcagcaacctgcacgagaagaccctgggggagaccagcgccaatgctgagacagagcagaacaagaagaaggctgaccctgagaacatcaagtcagaaggagatggcacccaggacatcgtggacaagagcagcgagaagctggtgcggggccgcacccgctaccagacccggcgggccagccagggcctgctgagcagcattgagaacagcgagagtgacagcagcgaggccaaggaggagggcagcaggaagaagaggtctgggaagtggaagaacaagagcaatgaatctgtggacatccaggaccaggaggagaaggtggtgaagcaggagtgcatcaaggccgagaaccagagccatgactacaaggccaccagcgaggaggatgtgtccatcaagagccccatctgtgagaagcaggatgagagcaacacagtcatctgccaggacagcacagtgaccagtgacctgctgcaggtgcctgatgacctgcccaacgtgtgtgaggagaagaatgagaccagcaaatatgcagagtacagcttcaccagcctgcctgtgcctgagagcaacctgcggaccagaaatgccatcaagaggctgcacaagagggacagctttgacaactgcagcctgggggagagcagcaagattggcatcagtgacatcagcagcctgtctgagaagaccttccagaccctggagtgccagcacaagaggagccggcgggtgagaagaagcaagggctgtgactgctgcggggagaagagccagccccaggagaagagcctgattggcctgaagaacacagaaaataatgatgtggagatcagcgagaccaagaaggcagatgtgcaggcccctgtgagccccagcgagaccagccaggccaacccctacagcgagggccagttcctggatgagcaccacagcgtgaacttccacctgggcctgaaggaggacaatgacaccatcaatgacagcctcatcgtgtctgagaccaagagcaaggagaacaccatgcaggagagcctgcccagcggcatcgtgaacttccgggaggagatctgtgacatggacagcagcgaggccatgagcctggagagccaggagagccccaatgaaaacttcaagacagtgggcccctgcctgggggacagcaagaatgtgtcccaggagagcctggagaccaaggaggagaagccagaggagacccccaagatggagctgagcctggagaatgtgacagtggagggcaatgcctgcaaggtgacagagagcaacctggagaaggccaagaccatggagctgaatgtgggcaatgaggccagcttccacggccaggagaggaccaagacaggcatcagcgaggaggccgccatcgaggagaacaagagaaatgatgacagcgaggccgacacagccaagctgaatgccaaggaggtggccacagaggagttcaacagcgacatcagcctgagtgacaacaccacccctgtgaagctgaatgcccagacagagatcagcgagcagacagctgctggggagctggatggcggcaatgatgtgtctgacctgcacagcagcgaggagaccaacaccaagatgaagaacaatgaggagatgatgattggagaggccatggccgagactggacatgatggagaaacagaaaatgaaggcatcaccaccaagaccagcaagccagatgaggccgagaccaacatgctgacagctgagatggacaactttgtgtgtgacacagtggagatgagcacagaggagggcatcattgatgccaacaagacagagaccaacacagagtacagcaagtctgaggagaagctggacaacaaccagatggtgatggagagtgacatcctgcaggaggaccaccacaccagccagaaggtggaggagcccagccagtgcctggccagcggcacagccatcagcgagctgatcatcgaggacaacaatgccagcccccagaagctgcgggagctggaccccagcctggtgtctgccaatgacagccccagcggcatgcagacccgctgtgtgtggagccccctggccagccccagcaccagcatcctgaagaggggcctgaagaggagccaggaggatgagatcagcagccctgtgaacaaggtgcggcgggtgtcctttgctgaccccatctaccaggccggcctggctgatgacatcgaccggcgctgcagcatcgtgcgcagccacagcagcaacagcagccccatcggcaagtctgtgaagaccagccccaccacccagagcaagcacaacaccaccagcgccaagggcttcctgagccctggcagccgcagccccaagttcaagagcagcaagaagtgcctgatcagcgagatggccaaggagagcatcccctgccccacagagagcgtgtacccacccctggtgaactgtgtggcccctgtggacatcatcctgccccagatcaccagcaacatgtgggcccggggcctgggccagctgatccgggccaagaacatcaagaccatcggggacctgagcaccctgacagccagcgagatcaagaccctgcccatccgcagccccaaggtgtccaatgtgaagaaggccctgcgcatctaccacgagcagcaggtgaagacccggggcctggaggagatccctgtgtttgacatcagcgagaagacagtgaatggaattgagaacaagagcctgagcccagatgaggagcggctggtgtctgacatcatcgaccctgtggccctggagatccccctgagcaagaacctgctggcccagatcagcgccctggccctgcagctggacagcgaggacctgcacaactacagcggcagccagctgtttgagatgcatgagaagctgagctgcatggccaacagcgtcatcaagaacctgcagagccgctggaggagccccagccatgaaaattccatctag

SEQ ID NO: 196868 - DNA, 264 bp, Artificial Sequence
  derived and/or modified sequence
atgacagcccggggccagagccccctggcccccctgctggagaccctggaggaccccagcgccagccatggaggccagacagatgcctacctgaccctgaccagcaggatgaccggggaggagggcaaggaggtgatcacagaaattgagaagaagctgccccggctgtacaaggtgctgaagacccacatcagcagccagaacagcgagctgagcagcgctgccctgcaggccctgggcttctgcctgtacaaccccaagtag

SEQ ID NO: 196869 - DNA, 7419 bp, Artificial Sequence
  derived and/or modified sequence
atgaccgcccggggccagagccccctggcccccctgctggagaccctcgaagatccaagtgccagccatgggggtcaaactgacgcttatttgaccctgacttctcggatgactggggaagagggtaaagaagtgatcaccgaaatcgagaagaaactccccaggctgtacaaagtcctgaaaacacatattagttcccagaattctgaactcagctctgccgctctccaggctctcggattctgtttgtataaccccaagatcacgagcgaactgagcgaggctaatgccctggagttactttctaaactgaatgacactatcaagaactcggacaagaacgttcggacccgtgctctctgggttatcagtaagcagacattcccttccgaggtagtgggcaagatggtgtcatccatcatcgattcactcgaaattcttttcaataaaggtgagacacattccgctgtggtggactttgaggccctgaatgtcattgtccgtctgattgagcaggcccccatacagatgggagaggaggccgtaagatgggcgaagctggtcattcccttagtggtgcattcggcccaaaaagtgcacctgagaggggccacagctctggagatggggatgcctcttttgctgcagaaacagcaggaaatagcaagcatcaccgaacagcttatgaccacgaaacttatcagtgagctgcagaaactgttcatgtcgaaaaatgagacatacgttctgaagctgtggccgttatttgtgaagctgttagggagaactctgcatcgttcgggctcattcataaattcactgctacagctggaggagctcgggtttcgaagcggggcacctatgatcaaaaaaatcgcatttatcgcttggaagtccctaatcgacaacttcgctctaaatcccgacattctttgctcagcaaagagattgaagctcttgatgcagccactgagttccatccacgttcggactgagacactggctctgacaaaactggaagtctggtggtacctgttaatgagactgggtccccacctgccagccaacttcgagcaggtgtgtgtgccactaattcaaagtaccatatccatcgattctaatgcgagcccacaggggaactcttgtcatgtcgcgacctcccctggcctgaaccccatgacgcctgtgcataagggtgcctccagtccctacggagccccaggtacgcctcgcatgaatctgagttccaatctcggcggcatggcaacaattcctagtatccagctcctgggactggagatgctcctgcactttctgcttggacccgaagccctaagttttgctaagcagaacaagcttgtactgagcctggaaccactcgaacacccacttatctcatcaccaagcttcttctcgaaacacgcaaatactttgattaccgccgttcatgatagtttcgtcgctgtggggaaggacgctcccgacgtggttgtgtcagccatttggaaggagttgatatctctggtgaagtcggttaccgagagcggcaacaagaaggagaagcctggctcagaggtcctgacgctgttattgaaaagtctggaaagtattgtgaaatccgaagtgttccctgttagtaagaccttggtattgatggaaattaccataaagggcctgccacagaaggtgcttggatcacctgcctatcaggtagcgaatatggatatactgaacggaacacccgcactgtttctcattcaactaatatttaataacttcctcgagtgcggcgtctctgacgaacgatttttcttgtcgctcgaatctctagtggggtgcgtgctctccggaccaacctcacccttggccttctccgactccgttctcaacgttataaatcagaatgccaagcagctggagaacaaagaacatctgtggaagatgtggtccgtgatcgtgacaccactcactgaactaataaatcagactaacgaagtgaatcagggcgacgctctcgaacacaacttcagtgccatttacggcgctctgactctgcctgtaaaccacatcttcagcgagcagagatttcctgtcgctaccatgaagaccctcctgcgcacttggagcgagctctacagggcgtttgcccggtgcgcggccctggtggcgaccgctgaggaaaatttgtgttgcgaggagcttagttcaaagattatgagctccctggaggacgaaggattcagcaatctgctgtttgtggatcgcatcatttatattattacggtcatggtagactgcattgacttctcgccttacaatataaagtatcagcctaaagttaagtcccctcagagaccaagtgactggagcaagaaaaaaaacgaacctcttggcaaactaacttctctgtttaaacttattgtgaaggtaatctatagttttcacacactttccttcaaggaggcccactcggacacgctttttaccattggcaacagcattactggcattatatcctcggtgttgggccatatctccctcccgtccatgatcagaaaaatttttgccacactgactcggcctttggctcttttctacgaaaactctaaactggacgaggtgcctaaggtgtatagctgtctgaacaacaaactggagaagctgttgggagagatcatcgcttgtctgcagttttcttacaccggcacctacgattcggagctgctagagcagttgagccccctgttatgtataatctttttgcacaagaataaacagataagaaaacagagcgcacagttttggaatgctacctttgctaaagttatgatgctcgtgtatcccgaagaactgaagcccgtgttaacccaggctaagcagaaattcttactgcttctgccaggactggagactgtggagatgatggaggagagcagcggaccttacagtgatggtaccgagaattcccagttgaacgtgaaaattagtgggatggagcgaaagtctaatggaaagagagactcttttctagcacaaacaaagaacaagaaagagaacatgaaacctgccgccaaactgaagctggaatctagctcgctgaaggttaaaggagagatcttacttgaggaggaaaaatcaaccgattttgtgttcattccgcctgaagggaaggatgctaaagaacgaattttgaccgatcatcaaaaggaggtgctgaaaacaaagcgttgcgatatcccagctatgtacaataacctggatgtctcccaggacactctgttcactcaatattcacaggaagagccgatggagatacccacgttgacacggaagccgaaagaagacagtaagatgatgatcacagaagagcagatggactccgatattgtcattcctcaagacgttaccgaggattgcggtatggcagagcacctggaaaaatctagcttgagcaataacgagtgcggatcactggacaagacgtcacccgagatgtcaaattccaacaatgacgagcgcaaaaaggctctgatcagcagccggaaaacatccacagagtgtgcctcaagtacagaaaattcatttgtggttagctcttcatccgtgtctaatacgacagtggcaggcacccctccatatcctacctcgaggcgccagacatttattacattagaaaagttcgacgggagcgagaatagacccttctcccccagcccactgaacaacatcagcagcacagtaacggtaaagaacaaccaggaaacaatgatcaagaccgactttttgcctaaggccaagcaaagagagggaacattttccaaatctgacagtgagaagatagtaaatggcacaaagcggtcctctcgccgcgctggcaaggccgagcagactggtaacaaacgcagcaaaccattgatgagatcagagccggagaagaacacggaggagtcagtagagggaattgtggttctcgaaaataaccccccagggctgctgaaccaaactgaatgtgtgagcgacaatcaggtgcatctctctgagagtaccatggaacatgataacaccaagctcaaggccgccacagtcgagaacgcagtgctcctggaaaccaacactgtggaagaaaagaacgttgagattaacttagagagcaaagagaacacgccacccgtggtgatttcagctgatcagatggtcaatgaggattcccaggtgcagataactccaaaccagaaaacgctaaggcgttcctccaggcgtcgcagcgaggtggtggaatctaccactgagagtcaggataaagaaaatagtcaccagaaaaaggaacggcggaaggaggaggaaaagcctttgcaaaagtccccactgcacattaaagacgatgtcctgccgaagcagaaattaattgccgaacagacactgcaggagaatctcattgagaagggcagcaatctgcatgagaagaccctgggagaaacctcggcgaacgctgagaccgagcagaacaagaaaaaggccgacccagagaacataaagtcggagggggatggaacacaggatatcgtcgataagtcttctgagaaactggtgaggggacgcactaggtaccagacacgtcgcgctagtcagggcctgctcagctcaatagaaaattctgaaagcgatagttcagaagctaaggaagaagggagtaggaaaaaacgaagtggcaaatggaaaaataagtccaacgagagtgtcgatatacaagatcaggaagaaaaggttgttaagcaggagtgcattaaggccgaaaaccagtctcacgactataaggcaaccagtgaggaagacgtatccatcaagtctcctatctgtgagaagcaggatgagtccaacacagttatctgccaggactctacagtgacatcagacctccttcaggtgccagacgacctgccaaatgtgtgtgaagagaagaacgaaacgtccaaatacgcagagtactcctttacctccctgcccgtccccgaatctaacctacgcacgcggaatgcgatcaagaggcttcacaagcgggacagctttgataattgctctctgggcgagtccagcaagattggcatttccgacatttcttctctcagcgaaaaaacgttccagacgctcgagtgccagcacaaacgctcaaggcgagtgcgccgttccaagggatgcgactgttgtggggagaagtcgcagcctcaggagaagagcctgatcggcctgaaaaacaccgaaaataacgacgtcgaaatcagcgaaaccaagaaagctgacgttcaggctcctgtgagtccatccgaaacatctcaggccaatccgtactctgaaggacagtttcttgatgagcatcatagtgttaactttcacctgggtttgaaggaggataacgacaccatcaacgactccctgattgtaagtgaaactaaatccaaggaaaacacaatgcaggaatcccttccatccggaatcgtgaacttccgtgaggagatctgcgacatggatagcagcgaggccatgtccctggagtcacaggaaagtcccaacgagaacttcaaaactgtgggcccttgtctcggcgacagtaaaaacgtctctcaggagtctctggagacaaaggaggaaaagccggaagaaacccccaagatggaactttctctcgagaacgttaccgtggaggggaacgcctgcaaggtcaccgagagtaacctggagaaggctaaaacaatggagctgaacgtaggaaacgaagcctcctttcatggacaagaaagaactaaaactgggatcagcgaggaggcggccatagaggagaataagagaaacgatgactcagaagccgacacagctaaactgaacgcaaaggaggtcgccactgaggaattcaacagcgacatttccctgtcggataataccacacctgtgaaactgaatgcccagacagagattagcgaacagacggcggccggggagctggatggtgggaacgatgtgtccgacctacacagctcagaggaaacaaatacgaagatgaagaataacgaggagatgatgatcggggaagctatggctgagactggccacgacggcgaaacagagaatgaaggcatcaccaccaagacctccaaacccgacgaggctgagaccaatatgcttactgccgagatggataacttcgtctgcgacaccgtggagatgtcgactgaagaggggatcatagatgcaaacaaaacagagactaacaccgagtattcgaagagcgaagaaaaactggataacaaccaaatggttatggagtcagacatcttacaggaagatcatcatacgagtcagaaggtggaagagccttcccaatgcctggcttcgggaaccgccattagcgagcttattattgaggacaacaacgcctccccacagaaactgcgggagctagacccttctctcgtatccgctaacgactctccttcaggcatgcagacccgctgcgtgtggtcccccctggcctccccctccacttctatcttgaagagaggcctaaaaagatcacaagaggacgaaattagctctcccgtaaataaggtcagaagagtcagtttcgctgatcctatttaccaggccggactcgccgacgacatcgaccggcggtgttccatcgtgcggtcccatagcagcaattccagccctatcgggaagtcagtgaagacctctcccaccacccaatctaaacacaatacaacctcggccaaaggttttctgtcgcctggatctcgaagtccaaagttcaagtcctctaagaaatgtctcatctcagaaatggctaaagagtcaatcccatgtccaacggagtctgtgtaccctcccctggtcaactgtgttgcgcccgtggacattatcttgccacagatcacatctaatatgtgggctcgaggcctcgggcaactcattagagcaaagaacatcaagaccataggagatctgagcaccctgaccgcaagtgaaataaaaactctgccaattcgctcacctaaggtgagcaacgtaaagaaggccctaagaatctaccacgagcagcaggtgaaaacacggggactcgaagaaatcccggtgttcgacatctcagaaaaaactgtgaatggcattgaaaataagagcctatctccggacgaggaacgtctggtctcagatattatcgatcccgtagcattggaaatacctctgagtaaaaatctcttagcacagatttcagccctggcactccaattagattctgaggaccttcataattattcaggcagccagctcttcgagatgcatgaaaaattatcttgtatggccaattcggtcattaagaacctgcaaagtcggtggcgcagcccgagccatgagaactccatctag

SEQ ID NO: 196870 - DNA, 264 bp, Artificial Sequence
  derived and/or modified sequence
atgaccgcccggggccagagccccctggcccccctgctggagaccttggaggacccatctgcttctcatggtggccagactgacgcttatctcaccttgacgagtaggatgacaggagaagaaggcaaagaggtcatcacggagattgagaaaaaacttcctcgcctctacaaggtgcttaagacccacatcagtagccaaaattcagagttgtcttcagccgcgctgcaagccttaggattttgcttgtataaccccaaatag

SEQ ID NO: 196871 - DNA, 7419 bp, Artificial Sequence
  derived and/or modified sequence
atgaccgcccggggccagagccccctggcccccctgctggagaccctggaagatccttctgccagtcacggaggccagactgatgcctatttgacccttacctctagaatgaccggggaagaaggaaaagaagtcattacagaaatcgagaagaagttgccaaggctttacaaagtgctgaagacacatattagctcccagaatagcgaactgtcctctgccgcgttgcaggcccttgggttctgcctgtacaatcccaaaataacctccgagctcagcgaggccaatgcccttgagctgctaagtaaacttaatgacaccataaagaactcggacaagaacgtgcgcacccgggccctgtgggtcatctctaaacagacgttcccctccgaggttgtgggaaagatggtgagtagcatcatcgattcgttggaaattctgtttaataagggcgaaacacatagtgccgtggttgattttgaagcgctgaacgtgatcgtcagactgattgagcaggcacccattcaaatgggcgaggaggccgtgcgatgggccaagctggtaatcccattggtggttcactccgcacagaaggtgcatctaagaggggccaccgccctggagatgggaatgcctctgctcctacagaaacagcaggagatcgcctccatcaccgagcagctgatgaccaccaagcttatctccgagctgcagaagctgttcatgtccaagaacgaaacttatgtgctgaagctttggccactctttgtcaagctattgggaagaactcttcatcggtctgggtctttcataaacagcctgctccagctagaggagctcggctttcgatccggggcgccaatgatcaaaaaaatagccttcattgcctggaagtccctaatcgacaatttcgccctgaaccctgatattttgtgtagtgccaagcgcctgaagctcttgatgcagccgttaagttctattcacgtcaggaccgagactctggcgttgacaaaactagaggtttggtggtacctcctcatgaggttaggacctcacctgcctgctaatttcgagcaggtttgtgtgcctctcatccagtctaccatttcgatcgacagtaatgcatcaccacagggcaatagctgtcacgtggccacctctcccggcttaaacccaatgacaccagttcataaaggggcgtcaagcccatatggtgcgcccgggaccccacgcatgaacctgagtagtaatctggggggaatggctacgatcccctccatacagttgctcggtctcgaaatgttgctgcacttcttgctcggacccgaggcattgtcatttgctaagcaaaacaaactcgtgctgtctctggaacccttagagcaccccttgatttcaagtccttctttcttctcaaaacacgcgaatacactgatcactgctgttcacgacagctttgtcgcggtgggtaaagacgcacccgacgtcgtggttagcgctatttggaaggagctgataagcctagtcaaatccgtaacagaatccgggaacaagaaggaaaagccgggaagcgaagttctaacgcttctcctgaagagcctagagtcgatcgtaaagtctgaagtttttccagttagcaagacccttgtcctgatggagatcacgataaaagggctccctcagaaagtactgggcagtccagcttaccaggtcgctaacatggatatcctcaacggcactcccgccctgttcctaatccagttaatattcaacaatttccttgaatgcggcgtgagtgacgaaagatttttcctgagcttggaatcgcttgtcgggtgtgtgctgtcaggacccacctctccactggctttctcggacagcgttttgaatgtgataaatcagaatgctaagcaattggaaaataaggagcacctgtggaaaatgtggtctgtcattgttactcccttgacagagctgattaaccagaccaatgaggtaaatcagggggatgcactagagcacaacttcagcgctatatatggcgctctcacattacccgttaaccacatcttctcggagcagaggtttcctgtagccaccatgaagacactcctccggacttggtccgaactttatagagcgtttgcgcgttgtgcagctctcgtcgccacggccgaagaaaatttgtgttgcgaggaattgagcagcaagatcatgtcaagtttggaggatgaaggctttagtaatctcctgtttgttgacagaataatctacattattaccgtgatggttgactgcatcgacttctccccgtacaacattaaatatcagcctaaagtcaaatccccgcagcgcccttccgattggtcaaagaaaaagaacgagccattaggtaaactgaccagtctgttcaaacttatcgtgaaagtcatctattcttttcacaccttatcttttaaggaggcccactccgatacactctttactatcggtaattcaatcactggaatcatcagctccgttctgggtcatattagtctcccaagtatgatccgcaagattttcgctactctaacccgtcccctggccctgttctatgaaaatagcaagctagacgaggtcccaaaggtgtactcctgcctgaacaataagctggagaagctgctcggagagatcattgcctgtctccagttctcctatactggcacttatgacagtgagctgcttgagcagctaagtcctttgctctgcatcatcttcctgcacaagaacaagcagatccgtaagcagtccgctcaattctggaacgctacctttgcaaaggtgatgatgcttgtttatccggaagagcttaaaccagtgctgacccaagccaaacaaaagtttctgctcttgttacctgggctggaaactgtggaaatgatggaggagtcatccggcccctacagcgacggaactgagaactctcagttgaatgtcaagatcagtggaatggagagaaagtccaacgggaagcgcgactccttccttgcccagacaaaaaataagaaggagaacatgaagcccgcagccaaattgaagttagagtcctcgtcgctgaaggtcaaaggtgagattctgttggaggaggagaaaagcacggactttgtctttattcctcctgaggggaaggatgcgaaggaaaggatcctcacagatcaccagaaggaagtgctgaaaacaaagcggtgcgatatacccgcaatgtacaataatctggatgtgagccaagataccctcttcacgcaatatagccaagaagagcctatggagatcccaacacttacaaggaagcccaaagaagactccaaaatgatgatcacagaagagcagatggacagcgacattgttatccctcaagacgtcaccgaagactgtgggatggctgaacatctggagaagtcctcgctgtccaacaatgagtgcggctctctcgataagacaagtcctgaaatgagcaatagcaataatgatgagcgtaagaaagcactcatatcatcgcgaaagacctcaaccgagtgcgcttcttcaaccgagaacagttttgtggtgtcaagcagctccgttagcaacacaacagtggcaggaaccccaccttatccgacctcccggcgtcagacatttataaccctggaaaaatttgacgggtccgagaataggccgttttcccccagcccgctaaacaatatttcatccacggtgacagttaaaaataatcaggaaaccatgataaagaccgactttctgcccaaagccaagcaacgggagggaacgttctctaaatctgactcagagaaaatagttaatggcaccaaacgctcctcaagaagggctggaaaagccgagcagactggcaataagagatcaaaaccactgatgcgatccgaacctgagaaaaatactgaggaatccgtggagggcatcgtggtcctggagaacaatccacctggcctcctcaaccagaccgaatgtgtgtcagataaccaagtacacctctcagagagcacaatggagcatgataacactaaactaaaagctgcaactgtagagaatgccgtgttgctcgaaactaatacggtggaggaaaaaaatgtcgagattaatctggaatctaaagagaataccccacctgtagtaatcagtgccgatcagatggtgaacgaggatagccaagtccaaattaccccaaaccagaaaactctccggcgtagtagtcggagaagatccgaagtagttgagtctacaaccgaatcccaggacaaggagaactcccatcagaagaaagagagacggaaagaggaggaaaaaccacttcagaaatccccgctgcacataaaggacgacgtgctacccaagcagaagctgatagcagagcaaacgcttcaggagaatcttatcgaaaaaggttctaatctgcatgaaaaaaccctcggagagaccagcgctaatgccgagacagagcagaacaagaagaaagcggaccctgagaacataaagtcggaaggcgatgggacgcaagacattgtagataagtctagcgaaaagttagtcagaggacgtactcggtaccagacaaggcgagcatcccagggtctgctctcatctatagaaaattccgaaagtgattcgagtgaggctaaggaagaggggagcagaaagaagaggagtggcaaatggaagaataagagcaatgagtctgtcgacatccaggatcaggaagagaaggtcgtgaagcaggaatgtataaaagccgaaaatcagtcccatgattacaaggccacttcagaggaggacgtgtcaattaagtctccaatttgcgaaaagcaggacgaaagcaatacggtgatctgtcaggattctactgttacatctgatctcctccaggtgcccgacgatctgccgaatgtctgcgaggagaagaacgaaacctctaaatacgccgaatacagctttacttcgttacccgttcccgaatcaaatctccggactcgaaatgcgatcaagcggcttcataaacgagatagctttgataactgcagcctcggtgagagttccaagatcggtatttcagacatctcttctctcagcgagaaaacttttcagaccctcgagtgccaacacaagagatcccgccgcgtgcgtcgatctaaaggttgcgactgctgtggtgagaaaagccagcctcaggagaagagtcttatcggacttaaaaacactgaaaacaacgatgtcgagatctcagagactaagaaagcggacgtgcaggcaccagtttccccttcagaaaccagccaggccaatccatatagcgagggacagttcctggacgaacatcacagcgtgaacttccatctggggctcaaagaagataacgatactatcaatgatagcctgatcgtcagcgaaaccaagagtaaagaaaacaccatgcaggagtccctgccctccggcattgtcaatttcagggaggagatatgcgacatggactcatcagaggccatgagtctggaatctcaggagagccccaacgagaacttcaaaacggtgggcccatgtctgggagattcaaagaacgtgtcgcaggagtctttggagaccaaggaggaaaagcctgaagagacacctaaaatggaattaagcttagagaatgtaaccgtggaaggaaacgcttgtaaggtgaccgaaagcaatcttgagaaggccaagaccatggagctaaacgtggggaatgaagcctcgttccatggccaagaacgcactaagaccggcatttccgaggaagctgccatcgaggagaataagcggaatgacgactctgaagcagacacagccaaactgaacgccaaggaagtagccaccgaagaattcaattccgatatctccttaagtgataacacgaccccagtgaagctcaatgcccagactgagatttcggaacagactgccgccggagagctggatggtggcaacgatgtctctgatctgcacagctccgaagagacaaacactaaaatgaaaaacaacgaagaaatgatgataggagaggctatggccgagaccggacacgatggggagaccgagaatgagggcatcactaccaaaacctcaaaacccgacgaagcagaaacaaatatgctgaccgccgaaatggacaattttgtctgtgacaccgtagagatgagtacggaagagggcatcatcgatgctaataaaacagagacgaataccgagtattctaaatctgaagagaaactggataacaatcagatggttatggagtccgacatcctgcaggaagaccatcatacgagccaaaaggtggaggaacctagtcagtgcttagccagcgggacggcaatttcagagttaatcatagaggataataatgcatccccgcagaagctccgcgagctagatccctccttggtgtccgccaacgacagcccttccggtatgcagacccgctgtgtctggtcccccttggcaagtccctcgaccagcatcctgaaacgcggcctgaaaagatcacaggaagatgagatctcctcacctgttaacaaagtgcggagagtgagtttcgccgaccctatctaccaagcgggcctggccgacgacatagaccgtcgatgttcgatcgtacggagccatagctcaaattctagccccatcggaaagtccgtgaagacctctccaactacacaatccaagcataatacgaccagcgccaaaggattcctcagcccagggtctaggagcccaaagtttaagagctccaagaagtgtctcatctcggagatggctaaagagtcaatcccgtgcccgactgaatctgtgtacccccccctggtgaactgtgtggctcctgttgacattatcctgccacagatcacctctaatatgtgggcccggggcctgggacaacttatccgcgctaagaatatcaaaacaataggagatctaagcacattaacagcttctgagatcaagacacttcctatcagatcaccgaaggtgtctaacgtgaagaaagccttacggatttaccatgagcaacaagtgaagacaagaggcttagaggaaatccccgttttcgacatttcggagaaaaccgttaatgggattgagaacaagtccctgagtccagacgaggagcgcctcgtgtcagatattatcgacccagtcgcccttgaaattccgctgtctaagaacctcctggcgcagatttccgcactcgctctgcagcttgattccgaagacttgcacaactactccgggtcccagctgtttgagatgcatgagaagctgagctgcatggctaattccgtgatcaaaaatctgcagtcacggtggcgcagtccttcgcacgaaaattcgatatag

SEQ ID NO: 196872 - DNA, 7419 bp, Artificial Sequence
  derived and/or modified sequence
atgactgctcggggacagtctcccctggctcccttgcttgaaacactggaagatccttctgcttctcacggaggtcaaacggatgcctatctgaccttgacctcccggatgacaggtgaggagggcaaggaagtgattacggaaattgagaagaagctccccaggctctacaaggtcctgaagacccacattagtagccagaactcagagctgtcatctgccgcattacaggccctcgggttctgcttatataatcctaaaatcaccagcgagctgagcgaggccaatgctctggaactcctgtcaaaactgaatgacaccattaaaaacagtgacaaaaacgtgagaacgagagcattatgggttatatccaaacagacttttcccagcgaagtggtgggaaaaatggtaagtagcattatcgactccctcgaaatcctgttcaacaaaggagagacacacagcgccgtggtggactttgaggccctgaacgtcatcgtacgcctgattgaacaagctccgattcagatgggggaagaggctgtacgctgggccaagttagtcatacctctagtagtccacagcgcacaaaaagtccacctcaggggcgcaacggccttggaaatgggcatgcctctgctcctccagaagcagcaggaaattgccagcattaccgaacaacttatgactactaagttaataagtgaactgcagaagctttttatgagcaagaacgagacctacgtgctcaagctgtggcccttgtttgtcaagctactgggtcggacactccaccggagtggttccttcatcaactctctgctgcagctcgaagagctggggttcaggtctggagcgcctatgatcaagaaaattgcctttatcgcatggaagagtcttattgacaacttcgccctgaatcctgacatcttgtgtagtgctaagcggctcaaacttttgatgcagcctctgagtagtatccatgttcgcaccgaaacacttgcgttgaccaaacttgaggtgtggtggtatctgctcatgagactcggtccccacttaccagctaattttgagcaagtgtgcgtaccactcattcagagtacaatcagtatcgacagcaacgccagtccacaagggaactcatgccacgtggccactagccccggactcaatcctatgactccggtccataaaggagcatcctcaccctacggagcaccaggcaccccccgaatgaacctgtcaagcaatcttgggggaatggccacgattcccagcatacagctgttgggtctggagatgctgcttcactttctgctcggcccagaggccctgagcttcgccaagcaaaacaaactggtgctgtcattagaacccttggagcatcctctgatctcgtccccctccttcttcagtaaacatgctaatactctgatcacagctgtccacgattcctttgtcgctgtagggaaggatgcacccgatgtggtagtaagcgcgatttggaaagagcttatctcactcgtcaaatctgtgaccgaaagtgggaacaagaaggagaaaccagggagcgaggtccttacacttttgctcaaatcacttgagtctattgtgaagtctgaagtgttccccgtcagtaagacactggtgctcatggagattacaatcaagggcttgccacaaaaagtacttgggtcgcctgcctatcaggtagcaaatatggatattctcaacggaactccagctctgtttcttattcagctcatcttcaacaactttctcgagtgcggcgtctccgatgagcggttttttctcagcctggagagtctggtgggctgtgtgctcagtgggcctaccagtccgctggccttctcggatagcgtgttgaatgtgataaatcagaatgcaaaacagcttgagaacaaggagcacctgtggaagatgtggtcagtgatcgtgacccctctgactgaactgataaaccaaaccaatgaagtgaatcagggtgatgctctcgaacacaacttttccgccatatatggagcccttactctccccgttaaccatatcttctcagagcagagattcccggtcgcaactatgaaaaccttattgagaacttggagcgaactttatcgagccttcgcacgctgcgctgcccttgtggctaccgccgaggagaacttgtgttgcgaagaactctcaagtaaaatcatgtcctccctggaggatgaaggattcagcaatctgctgtttgttgacagaattatatatatcatcacggtcatggtggactgtattgacttttcaccgtacaatatcaaatatcaacccaaggtcaagtcacctcagcggcctagcgactggtctaagaagaagaatgagcctctgggcaagctcaccagtttgtttaagttgatcgttaaggtgatttactctttccatacgttgtcttttaaagaggcccactctgacactctgtttacaataggtaacagcattaccggaattatttcatctgtcctgggccatatttcccttccttctatgattagaaaaatcttcgccacattaaccaggccactcgccttattttatgagaattcaaagctggacgaggtccccaaggtttatagctgccttaataataaactagagaaactgctgggtgaaattatagcgtgcctccagttctcatacacaggcacgtacgattctgaactgcttgaacagctttcgccactgttgtgcattatctttctccacaaaaataagcagattcgcaagcagagcgcccagttctggaacgcaacttttgccaaagtcatgatgcttgtgtacccagaggagctcaagcccgtcctgacacaggctaagcagaaattccttctcttgcttcctggcctggagacagttgagatgatggaggaaagcagcgggccttattccgatggtacagaaaatagtcagcttaatgtgaaaatctcaggtatggagaggaaatccaacggaaagcgcgacagttttcttgctcagactaaaaacaagaaggaaaacatgaagcccgcagcaaagctgaaattagagagctcaagcctgaaagttaagggcgagatccttctggaggaagaaaagagcaccgattttgtcttcatcccaccagagggcaaagacgctaaggaaagaattctcactgaccatcagaaggaagtgctgaagactaagaggtgcgacattcccgctatgtacaacaacctggacgtatctcaggatacactgtttacacagtattctcaggaggagcctatggagattccgaccttaaccagaaaacccaaagaggacagcaagatgatgatcactgaagaacagatggacagtgatatcgtgatacctcaggacgttaccgaggattgtggaatggcagagcacctggagaagtctagtctgtcaaacaatgaatgcggttctttggataaaacctctcccgagatgtccaattctaacaacgacgagcggaagaaggctctaatcagcagtcgcaagaccagcacagagtgcgccagctctactgaaaactctttcgtggtgtctagctcttccgtgtccaatactacagtggccggaacccctccatatcctacctcgcgcagacagacatttatcacactcgagaagttcgatggaagcgagaacaggcctttcagcccgtcccccctgaataacatctcaagtactgtgacagtcaagaacaatcaggaaaccatgatcaagaccgatttcctgccaaaagcaaagcagcgcgaaggaacattctccaagagcgatagcgaaaagattgtgaacggtactaagcgttcatcccgacgggcaggaaaagctgagcagactggcaacaaacgctctaagccactgatgagatcagagcccgaaaaaaataccgaagaatcggtggaaggtatcgtggtgctggaaaacaaccctcccggattgctaaatcagaccgaatgtgtctctgataaccaagtgcacctgtccgaatccactatggagcacgataacacgaaactaaaggctgccaccgtcgagaatgccgtcttactggagactaacaccgtggaggaaaagaatgtagagatcaacctggagtccaaggaaaatacaccacctgtggtcatctctgcggaccaaatggtgaacgaggatagccaggtccagatcacacctaaccagaagacacttcgcaggtcttcacggaggcgcagcgaggtcgtagagtctaccactgagagtcaggataaagagaactcccaccagaagaaagaacgccgaaaagaggaggagaagccattacagaagagccctctgcatattaaagacgatgtcctgcccaagcagaagctgatagcggagcaaacgcttcaagaaaatctcatcgaaaagggatccaatttacacgagaaaacactcggtgagacatcggccaatgcggagactgaacaaaacaaaaagaaagccgatcccgagaacataaagtcagaaggagatggcacccaggatatagtggacaaatccagtgagaagctggtccgtggacgcacaaggtaccagacccgcagggcctctcaaggccttctctcttccatcgaaaatagcgagtctgatagctccgaagccaaggaggagggcagtagaaaaaaacggtctggcaagtggaaaaacaaatcaaatgagagcgtcgacatccaggatcaggaggaaaaggtcgtcaagcaggagtgcattaaggccgagaatcaatcccatgactataaggctacatcggaggaggacgtatcgataaaatcgccgatctgcgagaaacaggatgaatcaaacacagtgatctgtcaagacagcaccgtgacatcagacctcctacaggtgcccgacgacctccctaatgtttgcgaggagaaaaacgagacgtccaaatatgccgaatattctttcacttccttgccggttcccgaatctaatctgcgcacgcggaatgccattaaacgactccacaagagagattctttcgataactgtagcctgggcgagtcctccaagataggcatttcagatatctccagcctgtcagaaaaaacattccaaacgctcgagtgtcagcacaaacgctcccgccgagtccgccgaagcaaagggtgtgattgttgcggcgagaagagtcagccacaggagaaatctctgattgggttaaaaaatacggagaataatgacgttgaaattagcgagactaaaaaagcagatgtgcaagctccggtgagtccttcagagaccagccaggcaaatccgtattcagaaggccaatttttggacgaacatcattctgtgaacttccacctcggacttaaggaagataacgataccattaacgacagcctaattgtgagcgagaccaagagcaaagagaatacaatgcaggagtcattacccagcggtatcgtcaacttccgcgaggaaatttgcgatatggatagcagtgaagcaatgtcgttggaatctcaggagtctcccaatgaaaattttaagacagttggcccttgcctcggagactctaaaaacgttagccaggagtccctggagaccaaagaagaaaagcctgaggagacaccgaaaatggaactcagcttggaaaatgtgaccgtagaaggcaacgcgtgtaaagtgacagagtctaatctggagaaggctaaaaccatggagctgaatgttggtaatgaggcttcatttcacgggcaagagagaactaaaactgggatatctgaggaagccgctatcgaagagaacaaacgcaatgacgattccgaagccgataccgcaaaactcaatgcaaaagaggtcgcaaccgaggagttcaacagcgatataagcctatcagataacacaaccccagtcaagctgaacgctcagacagaaatctctgaacaaactgcagcaggtgaactcgacggcggaaacgacgtgagtgacctccactcctctgaggagaccaacaccaagatgaaaaacaatgaggagatgatgattggagaggccatggctgagaccgggcatgacggagaaactgaaaacgagggcataacaaccaaaacctctaagcccgacgaggccgaaaccaacatgctcacggccgaaatggacaatttcgtgtgcgacaccgtagagatgtcaacagaagaggggattatcgacgccaacaaaactgagactaataccgagtactcgaagagcgaagaaaaactcgacaacaaccaaatggtcatggaaagtgacatactgcaggaagaccatcatacctcacagaaggttgaggagccttcccagtgccttgccagtggcacggccatatcagagctgattatcgaggataacaatgcaagccctcaaaagttgagggagctagatcccagcttggttagcgcaaacgattcgccctccgggatgcagacaaggtgcgtgtggtcaccgctggcttctccatctacctctatcctaaagcgcggactcaagaggtctcaagaggacgagatctctagccccgtcaataaagtgaggagagtgtcttttgcagaccccatttaccaagccggactagcggacgacatagatcgcagatgttccatcgtgcggtcccacagctctaacagcagccccatagggaagtccgttaaaacatcccccaccactcagtccaaacacaatactactagtgcaaagggattcctttccccaggtagcagatctccaaagtttaagtcttcaaaaaagtgcctgattagcgagatggcaaaggaatctattccttgtcccaccgagtcggtttacccccctctggtgaattgcgtggctcccgttgatataatccttcctcagatcacctctaacatgtgggcgagagggctgggtcaactcatcagggctaagaacatcaagacaattggtgacctcagcactctaactgcctctgagatcaaaacgctccctattcgctctcccaaggtgtccaacgtgaaaaaggcacttagaatctaccacgagcaacaggtgaaaacaaggggcctcgaagaaatccctgtatttgacataagcgaaaagaccgtgaatggaatcgaaaacaagagcttgagccctgatgaagagcgcctggtgagcgacatcattgaccctgtggcgctcgaaattcccctttctaaaaatctgctggctcaaataagcgcactggccttgcaactcgacagcgaagacctgcacaattattctggctcgcagctgttcgagatgcacgagaagttgagctgtatggcaaattctgtgatcaaaaacctccagagtaggtggagatccccctcgcatgagaactcaatctat

SEQ ID NO: 196873 - DNA, 264 bp, Artificial Sequence
  derived and/or modified sequence
atgaccgccagagggcagtcacctctggcccctctgctcgaaacactggaggatccttcggcatctcacggtggccagacggatgcttatctgactctgacctcacgtatgaccggggaagaaggcaaggaggtcatcactgaaatagaaaaaaaactgcccagattatacaaggtgctcaagacccatattagttcccaaaacagcgaactcagctccgccgcattgcaggctctggggttttgcctgtacaacccaaagtag

SEQ ID NO: 196874 - DNA, 7418 bp, Artificial Sequence
  derived and/or modified sequence
atgacagcaagaggtcagtccccgctggcccctctgctcgagaccctcgaagacccatcagcatcacacggcggacagacggacgcatatctcacactcaccagccgcatgacaggcgaggagggtaaggaagtgataaccgagatcgaaaaaaaactccctagattgtacaaggtgttaaaaactcacatttcatcccagaactctgagctctcctccgccgcactgcaggccctgggattttgtctgtataacccaaagatcacctcggaattaagtgaagctaacgccctggaattactgtccaagctcaacgataccataaagaattcggacaagaacgttcgaacgcgggctctgtgggttatctccaagcaaacgtttccttctgaggttgttggaaagatggttagtagtataatcgacagcctggaaatactgttcaacaaaggtgaaactcattccgcagtggtcgacttcgaggctcttaacgtcattgtgcgattgatcgagcaggcgccaatccagatgggagaagaagccgtacggtgggcaaagctggtaattcccctggtggtgcactccgctcaaaaagtgcatctgcggggtgcaactgcactggagatgggaatgcctctcctgctgcagaagcagcaggagatcgcttccatcacagaacagcttatgaccaccaaactgataagtgagcttcagaaactctttatgagtaagaacgagacttatgtgttgaagctgtggccactgttcgtgaaactcctgggcaggactttgcacagatctggctccttcattaattcgctgttgcaacttgaagagctaggatttaggtccggagccccaatgatcaaaaaaatagcctttatcgcgtggaaaagtctcatcgacaactttgcccttaaccccgacattctatgctcagccaagaggcttaaattactgatgcaacccttgtcgtccatccacgtgaggactgaaacgctcgcacttacaaagctcgaagtttggtggtaccttctcatgcgtctgggtccacatctgcctgccaactttgaacaggtctgtgtgcccctgattcaaagtacaatctcaattgactccaacgcttcaccacagggtaactcgtgccatgtcgccacctcgccgggtctgaatccaatgacaccagttcacaagggtgcgtcgagcccctacggtgccccaggtacgcctcggatgaatttgagctcgaatttgggaggcatggcaactattccaagtatccagctgctgggtctggaaatgcttctgcacttcctgctaggtcctgaagctctaagtttcgccaaacagaataaactggtactcagcttggagccacttgagcaccctctgatctcatcccccagttttttcagcaaacacgcaaatactttaattacggccgtgcacgacagctttgttgctgtaggaaaggacgccccagatgtcgtggtatccgccatctggaaagaattgatcagcctagtgaagtcagtgaccgagtcgggtaacaagaaggagaagcctggcagtgaggtccttacccttctgctgaagagccttgagagcattgtgaagagcgaagtttttcccgtgagcaagacactagttctcatggaaataacaatcaaaggtctgccgcaaaaggtcttgggctcacccgcttaccaggttgccaacatggatattctgaatggcacccctgccttgttcctgattcagctgattttcaataactttctggaatgcggagtctctgatgaacgcttttttctgagcctcgaatctctggtgggctgcgtcctgtctggccctacctccccactggccttcagcgattccgtgcttaatgttatcaaccaaaacgccaaacaacttgagaataaggaacatctgtggaagatgtggtctgtgattgttacccccttgaccgagctcatcaaccaaacaaacgaggtcaaccagggagacgctctcgagcataatttctcagcgatctacggcgctctgactttacccgtgaaccatatcttctctgagcagcggttcccagtggcaaccatgaaaacacttttgcggacatggtctgagctgtacagggctttcgctcggtgcgctgccctggtggccaccgccgaggaaaatctgtgttgtgaggagctcagctcaaagattatgtcctcactcgaggacgagggattctctaatctgctcttcgtcgataggattatctacattatcacggttatggttgattgtattgatttttcgccatacaatatcaaataccaacccaaggtgaaaagccctcagcgtccttccgactggagtaagaagaaaaatgagcccttgggcaagctgacctcactgttcaagctgatcgtaaaggttatctactccttccacacactgagcttcaaagaggcgcactcagatacgctcttcactatcggtaattccatcacaggcataatctccagcgttttaggccatatctctctaccctctatgattcgtaagatcttcgccacccttaccaggccactcgcattgttttatgaaaattccaaattagacgaggtccctaaggtttattcctgcctcaacaacaaacttgagaaactgctcggagaaatcatcgcatgcctacagtttagctataccgggacctacgattcagaactgctggaacagctaagcccgttgctctgtattatattcttgcataaaaacaaacaaatccgaaagcagagtgcgcagttctggaacgccacgtttgcaaaagtcatgatgctggtatatcccgaagaactcaaacctgtcctaacacaggcaaagcagaagtttttgctgctgctccctggacttgaaacagtggagatgatggaggagtcctccggcccttatagcgatggtactgagaacagtcaacttaacgtcaagattagtgggatggagaggaaatccaacggaaaaagagattccttcctggcacagacaaaaaacaaaaaggagaacatgaagccagctgccaagctgaagctggagagctcaagcttaaaggtaaagggagagatccttctggaagaagaaaaatctaccgatttcgtgtttatccccccagaaggaaaggatgcgaaagaaaggatcctgacagaccaccagaaggaggtgctcaagaccaagcgctgtgacatcccagcaatgtataataaccttgacgtgtcccaggatacactgttcacacagtacagtcaggaagagcccatggagatccccacattgactcgcaagcctaaagaagactcgaagatgatgattacggaggaacagatggactcggacatcgtgataccccaggacgtgactgaggattgcggaatggccgagcacctggagaagtccagcctgtcgaacaacgagtgtggtagcctggacaagacctcacctgaaatgtctaactctaataacgatgaacggaagaaggccctgatctcatctagaaaaacatccactgagtgtgctagcagcaccgagaatagttttgtggttagttcctcatctgtgtcgaatacaacagtagccggaacaccaccatacccaacgagcagacggcagactttcatcacactcgaaaaattcgacgggagcgaaaaccgtccattctccccgtccccactaaacaatatctcctccacagttaccgtcaaaaataatcaggaaaccatgatcaagaccgatttcctccctaaagctaagcagagggaaggcacatttagcaagtccgatagcgagaagatcgtgaatggaacgaaaaggtcctccagacgtgcgggaaaagctgaacagaccggtaataaacggagtaagcctctgatgcgctccgaacccgagaaaaataccgaggaatccgttgagggaattgtagtgctggagaataacccaccagggcttctgaaccagaccgaatgcgtgagcgacaaccaggtgcacttgagcgaaagcactatggaacacgacaacaccaagctgaaggccgcaacagtggaaaatgcagtcctgctggagacaaataccgtggaggagaaaaacgtcgagattaatcttgagagtaaggagaacacgcccccagtggtgatctcagctgaccagatggtgaatgaggattctcaagtgcagataaccccaaatcagaagacactccgtcgttcaagccgacggaggagtgaggtggtggagtcaacgacggagagccaggataaagagaatagtcaccagaaaaaggagcggagaaaagaggaggagaaacccctccagaaatctccgctgcacatcaaggatgatgtcctgcccaagcagaaactcatagccgagcagactctccaggaaaaccttatcgaaaaggggtcaaatctccacgagaaaaccctgggtgaaacgtctgccaacgccgaaacggagcaaaacaagaaaaaagctgatcctgaaaacattaaatctgagggggacggtacccaggacatcgtcgacaagagttcagaaaagcttgtgcgaggcagaactcgctaccagactagacgagccagtcaaggtttgctcagcagcatcgaaaacagcgagagtgactcctccgaggcaaaagaggaggggtccaggaagaagcgcagcgggaaatggaagaataagtccaatgaaagtgttgatatccaagatcaagaggaaaaggtggttaagcaggaatgtatcaaggccgagaaccagtcgcacgactataaagccacttctgaagaagatgttagtattaagagccccatatgtgaaaaacaggacgaatccaatacagtcatctgccaggatagcactgtgacatccgacctgctccaggtgcccgatgatctgcccaatgtgtgcgaggagaagaacgagacaagcaaatacgccgaatattcttttaccagcttaccggtgccagaatccaacctcagaacaaggaacgccattaagagacttcataaacgagactcattcgataattgttcattgggcgagagtagcaaaattgggatctctgatatcagcagcctgtctgagaagactttccaaaccctggagtgccagcacaagagatcgagaagagtgcggagaagtaagggatgtgattgctgtggagaaaagtcccagccccaggagaagtcactcatcggcctcaaaaatacagagaataacgacgtcgagatctccgaaacaaaaaaggcagacgtacaggccccagtgtccccaagcgagacaagtcaggcaaacccttacagcgagggccagttcctagatgagcaccactcagtcaacttccacttgggcctcaaggaggacaatgacactattaatgactccctcatagtttctgagactaagtcgaaagagaataccatgcaggaaagcctcccctccggtattgtgaattttcgtgaggagatttgcgacatggattctagcgaagctatgtctctggaaagtcaggagtctcccaacgaaaatttcaagacagttgggccatgtctgggtgattccaagaatgtcagtcaggagtcacttgaaactaaagaggagaagccagaagaaacacccaaaatggaactatccctcgaaaacgtcacagtggaaggcaacgcctgcaaggtgacagagtcgaacctcgagaaggccaagactatggagcttaacgtcggaaatgaggcgtctttccatgggcaggagcgaactaaaacagggatttctgaggaagccgcaattgaggagaataagcggaacgacgacagcgaagcagatactgcaaaactcaacgccaaggaggtcgccacagaagagtttaactccgacatcagtctgagcgacaataccacgcctgttaagctcaacgctcaaaccgagatctctgagcagaccgcagccggagaactagatggaggcaatgatgtaagcgacctccatagcagcgaagaaacaaataccaagatgaagaacaacgaggaaatgatgattggcgaggccatggcagaaaccggtcatgacggcgagactgaaaatgagggcattacaacaaaaacctccaagcctgacgaggcagagacaaatatgctgaccgccgagatggataactttgtgtgcgatacggtggaaatgtcgacagaagagggaatcatcgatgctaataagacagaaacgaacacagaatattctaaatcagaggagaagctggataacaaccagatggtgatggagtctgatatactgcaagaggaccaccacaccagtcagaaggttgaggagccgtcccagtgtctggcctctggcactgccatctcggagctgataattgaagacaacaacgcgagtcctcaaaaactgcgtgagttggacccctccctggtctccgccaacgatagcccttccggaatgcagaccaggtgcgtttggagccccctcgcctccccttccacctctattttaaagaggggcttgaagcgatcacaagaagacgaaattagctctccagttaataaggtcaggcgtgttagcttcgctgaccccatttatcaagctgggctggctgatgacatcgaccgcagatgctcaattgtgcgtagccactcttctaatagttctcctatagggaagtccgtgaagacttcgcccaccacgcagagcaagcataatactacatcagccaaggggttcctgagcccaggttcaaggtccccaaagtttaaaagttctaagaagtgtcttatctcagaaatggcaaaggagtccattccctgccccacagaaagcgtctaccccccacttgtgaattgcgtggcacccgtggacataattctgcctcaaattacaagcaatatgtgggccaggggcttaggtcagttgatccgcgctaagaatataaagaccattggggatctatcaaccctgacagcttcggaaatcaagactctgcctatccgatctccgaaagtgagcaatgtaaagaaggcgctccggatctaccatgagcaacaggtgaagactcggggacttgaagagatccccgtttttgatatctccgaaaaaacagtgaatgggatagaaaacaagagtctgtcacctgatgaggagaggttggttagcgatataatagaccccgttgcccttgagattcctctaagtaagaacctcctggcccagatttcggctcttgccttgcagttggattccgaagaccttcacaattattccggatcgcagcttttcgaaatgcatgagaagctgtcctgcatggcaaacagtgtgattaagaacctccagtccaggtggcgtagcccctcacacgaaaattccatcta

SEQ ID NO: 196875 - DNA, 10180 bp, Artificial Sequence
  derived and/or modified sequence
tgagtaaacagccggagctgggaaagtcgagctctggcagcgtctgggtgctgaggggcagaggcggagagaaccctgtcctgatcttcctaggtgggataaatatcggggtgacagtggtaggccgcggggaaccctcagtctgcccaccctccgccccctcgcggcgagatgcctcgttccccgggcttctcccgccctccgccgatctcctccctctgttgaaagctgcccgggaaagtggtggcgggagcgggcccaggcccgaatgtggcgtgggctcaggtgtctggtgtcgggcgccggaggaggttcgcgctggggtttggtgattcggaggcctggggtgcagacgcggcgtggctgtgaggcccgggcgggcgtgcgggtgtgagggccggactcacactgggccgccgcggggctgtttccatcggtcactggattttctcctcttccggttcgggcctcagggtggccgacatgacggccaggggtcagagccccctcgcgccgctgttggagactttggaagacccttctgcctcccatggagggcagactgacgcttacctgactctgaccagtcgtatgactggagaagaaggaaaagaagtaattacagaaattgagaaaaaacttcctcggctgtacaaagttttaaagactcacatttccagtcaaaactcggagctgagtagtgctgctctacaagccctggggttttgcttatataatcccaaaattacctcagaattatcagaggcaaatgctctagaattgctttcaaaattgaatgataccattaagaattcagacaaaaatgtacgtactagagcactttgggtgatatctaagcagacatttccctctgaagtggttggcaaaatggtatccagtataattgattcattagaaatactgtttaacaaaggagagacgcattctgctgttgttgattttgaagcattaaatgttatcgtaaggctaattgaacaagccccaattcaaatgggagaagaggcagtgaggtgggcaaaactggtcatacctttagtggttcattcagcacaaaaggtacatttgcggggagcaactgctctggagatgggaatgccattattgcttcagaaacagcaagaaatagcatctattacggagcagcttatgactactaaattaatctcagaacttcagaagctatttatgagtaaaaatgagacttacgtgttaaaattatggcctttgtttgtcaaactacttggaaggaccttgcatcgaagtgggagtttcatcaattctctcttgcaactagaagaacttggatttcgtagtggagcacccatgattaaaaagatagcttttattgcttggaagagtttaatagataattttgctttaaatccagatatactatgtagtgcaaaaagactcaagttgttaatgcagcctttgagttccatccatgtgagaacagaaactctagcattaacaaaactagaagtctggtggtatttactgatgagacttggacctcatcttcctgctaattttgaacaggtttgtgtgcctctgattcaaagtacaataagcattgattctaatgcctcacctcagggcaattcgtgtcatgtagctacatctccaggtttaaatcctatgactcctgtacacaaaggtgcttcctccccgtacggagccccgggaactccccgaatgaacctgagttcgaatttaggtggaatggccacaatcccatccattcaacttttgggacttgaaatgttgcttcatttcttgttgggtccagaagccttgagttttgctaagcaaaataaacttgtgctgagcttagagccattggaacatccgttaatcagcagcccttcctttttttccaaacatgcaaatacacttatcactgctgttcatgatagctttgttgcagttggaaaagatgcccccgatgtggttgtcagtgctatctggaaggagctaattagcttggtgaagtcagttactgaatcaggtaacaaaaaagagaaaccaggttctgaagttttgactctcttattaaagtctttggaaagcatagtaaagtctgaagtatttcctgtatcaaaaacgctggtcctcatggaaattacaattaaaggacttcctcagaaagtattaggttcaccagcatatcaggttgctaatatggatattcttaatggaactccagctttgttcttaattcaattaattttcaacaatttcttggaatgtggtgtatcagatgaaaggttctttctcagtttggaatcacttgtaggctgtgttctttctggtccaacttcaccactagctttcagtgactcagttttaaatgttattaatcaaaatgcaaagcagttggaaaataaggagcatctctggaaaatgtggagtgttatagtcaccccattaactgaattgattaatcagaccaatgaagtaaatcaaggtgatgccttagaacataattttagtgccatctatggtgcattgactttaccagtaaaccacattttttcagaacagagatttccagtggccaccatgaagactttgcttagaacttggtcagaattatatagagcatttgctcgttgtgctgctttggtggcaacagcagaagagaacttgtgctgtgaggaactttcttccaagataatgtccagtttggaagatgaaggcttttctaatttgttgttcgtggatagaattatttatattattactgtaatggttgattgcattgacttctcaccatataatattaaatatcagcccaaagttaaatcaccacagagaccttcagattggtccaaaaagaagaatgagcccctagggaaattgacttctttatttaaacttattgtgaaagtgatctattctttccacacactgagcttcaaggaagcacattctgataccctcttcactattggcaactcaatcaccggcattatttccagtgtacttgggcatatttctttgccttctatgatccgaaaaatatttgcaactttaacaagacctctggcattattttatgaaaactcaaagcttgatgaagttcctaaagtatatagttgtctgaacaacaagttagaaaagctactgggagaaattattgcttgtctgcaattcagctacaccggaacttatgatagtgaacttcttgaacaactctccccactattatgcataatatttctgcacaagaataaacagattcgaaaacagagtgctcagttctggaatgccacttttgccaaagtgatgatgttggtttatcctgaagagttaaaaccagtactaacacaagccaaacaaaaatttctgctcctgttgcctggtttggaaactgttgaaatgatggaggaatccagtggaccatattctgatggaacagaaaattcacaactaaatgtgaagataagtggcatggagagaaaatcaaatggaaaaagagattcatttttggcacaaacaaagaataaaaaagaaaatatgaaaccagcagccaaactgaaacttgaatcttcgtctttaaaagtaaagggtgaaattcttttggaagaggaaaagtctactgactttgtgtttatacctccagaaggaaaagatgcaaaggaaagaatattaactgatcatcaaaaagaagttctcaaaacaaagcggtgtgatattcctgccatgtataataatctggatgtttcccaagataccttatttactcagtatagtcaggaagagcctatggaaattcctactttaaccagaaaaccaaaggaggattctaagatgatgattacggaggagcaaatggacagtgacattgtcattcctcaagatgtcacggaagactgtggtatggctgaacatcttgaaaagtcctccctttcgaataatgagtgtggttctcttgacaaaaccagtccagaaatgtcaaacagtaataatgatgaaagaaaaaaagctttaatttcatcaaggaaaacatcaactgaatgtgcatctagtacagaaaattctttcgttgtcagcagtagttcagtttctaataccactgttgctggaactcccccataccctacaagtcggaggcaaacctttattactttggagaagtttgatggttcagaaaatagaccttttagtccatcccccttgaataatatttcatcaactgttacagtgaaaaataaccaggaaaccatgattaaaacagattttctaccaaaagcaaagcaaagagaagggactttttcaaaatctgattctgaaaaaatagtgaatggaactaagagatcaagccggagagctggtaaagctgaacaaacagggaataaaaggtctaagcccttaatgagatctgagccggagaaaaatactgaggaatctgttgaaggcattgtagtcttagaaaataacccacctggtttgcttaatcaaacagaatgtgtgtcagataatcaggttcatctttctgaatctacaatggagcatgacaatacaaagcttaaagcagcaacagtggaaaatgctgtattattggaaactaatactgtagaggagaaaaatgtagaaattaatttggaatccaaagagaatacacccccagtagtaatatcagcagatcaaatggtaaatgaggatagtcaggttcagataactccaaatcagaaaacccttagacggtcttcaaggcgacgttcagaagtagtagagtctaccactgaaagccaagataaggaaaatagtcatcaaaaaaaggaacgacgtaaggaagaagaaaaacctcttcagaagagtccattgcatataaaagatgatgtgttacctaaacaaaaactgattgctgaacaaactctacaggagaatttaattgagaaaggaagtaatttacatgagaagactcttggggaaactagtgctaatgcagaaactgaacaaaataaaaaaaaggcagaccctgagaacattaagtctgagggggatggtacccaggacattgtagataagtcctctgagaaactagtcagaggccgaacacggtatcaaactagaagagcatctcagggtttgctttccagcattgaaaactcagaatctgatagttcggaggcaaaagaagaaggttctaggaagaagagatctggaaaatggaaaaacaaaagcaatgaaagtgttgacattcaagatcaagaagagaaagtggtgaaacaggaatgtataaaagctgaaaatcagtcacatgattataaagcaacttctgaagaagatgtaagcataaaatctccgatttgcgaaaaacaagatgaaagtaatactgtaatatgtcaggattctacagtaacttcagatttgttgcaagttcctgatgatttaccaaatgtgtgtgaggaaaaaaatgaaactagcaaatatgcagaatattcctttacaagtctacctgtgccagaatcaaatctaaggactagaaatgccattaagagattacataagcgagactcttttgataattgtagtttgggagaatcctcaaaaatagggatatcagatatttcttcgctttcagaaaaaacttttcaaacacttgaatgccaacacaagagaagtaggagggtgaggagatctaaaggttgtgattgctgtggggaaaaatcacaacctcaggaaaagtcactcattgggttaaagaatacagaaaataatgacgtagagattagtgaaacaaaaaaggcagatgtgcaagcacctgtaagcccatcagaaacttctcaagctaatccatattctgaaggacaatttttagatgaacatcatagtgtgaattttcatttgggtctcaaagaggataatgatactattaatgattcattaattgtttctgaaaccaaatcaaaagaaaacactatgcaagaatctcttccttctggaatagtaaactttagagaggaaatttgtgatatggattctagtgaagcaatgtctcttgaaagccaggagtcacctaatgaaaattttaaaactgttggcccgtgtttaggagactcgaaaaatgtttcacaggaatctttggagacaaaagaagaaaaaccagaagaaaccccaaaaatggaactgagtctagagaatgttactgttgaaggaaatgcatgtaaagtaacagaatccaatctagagaaagcaaaaactatggaattgaatgtaggaaatgaagctagctttcatggacaagagagaaccaaaactggtatttctgaagaagcagcaatagaagaaaataaaagaaatgatgactctgaagcagacacagctaaactgaatgccaaagaagtagcaactgaggaatttaattcagatattagtctttctgataatactacacctgtaaaattgaatgctcaaactgagatttctgaacaaacagcagctggggaactagatggaggaaatgatgtatctgatctacactcatctgaagaaacgaataccaaaatgaaaaataatgaagaaatgatgatcggcgaggcaatggctgaaactggccatgatggtgaaacagagaatgagggcataactaccaaaacctcaaagcctgatgaagctgaaacaaacatgttgactgcagaaatggacaactttgtttgtgacacagttgaaatgagcactgaagaaggaatcattgacgctaataaaactgaaacaaatactgagtatagtaaatctgaagaaaaattagataacaatcaaatggtaatggaaagtgatattttacaggaagatcaccatacttcacagaaagtggaggaaccatcacagtgtctggcatctggaacagctatctctgagctaataatagaagacaataatgcatctcctcaaaaactaagggaacttgatccttcacttgtgtcagcaaatgacagtcctagtggcatgcagacacgctgtgtctggtctcctttggcttctccgtctacgagcattttaaagagaggactaaaaagatcccaagaagatgaaatctcatcacctgttaataaggttcgccgtgtctcctttgcagatccaatataccaagcaggattggcagatgacattgatagacggtgctctattgttaggtcccattcttccaatagttctcccataggaaaaagtgttaaaacttctcctactacacaatctaagcataataccacttcagccaaaggatttctgtccccaggatcacgtagccctaaatttaagagctcaaagaagtgtttaatttcagaaatggccaaagaatccataccatgcccaacagaaagtgtttacccaccattggtgaactgtgtggcaccagttgacatcattttacctcagattacatcaaacatgtgggcaagaggcctgggacaactcattagagctaagaatataaaaactattggtgatttgagtactcttacagcatctgaaataaaaactcttcctatccgttctccaaaagtgtccaatgtaaaaaaggctctcagaatatatcatgagcagcaggtgaagactcgtggactagaagagattccagtttttgatatttctgaaaaaacagtaaatggaatagaaaataaatctttgtcacctgatgaagaaagacttgtctcagatataattgatcctgttgctttagaaattccattatccaaaaaccttctggcacagattagtgctcttgctcttcagctggattcagaagatcttcataattattcaggaagccaactatttgaaatgcacgagaaactaagttgtatggcaaactctgtaataaaaaatctacagtcacgttggagatcaccatcccatgaaaattctatttagtattttcagagaaaattgaaggtttttttaaacatcactggatttcttgattgaggaaacaagttctgaaataatagcacaatttcaaagaagagactctttgcaaagttgataacatttcaaaccctgaaggacagtgacttattatgtaagttcaattttgtaagttcattatgtaagatccttttttttttcataatatgtattcttggctgctatgcgtggtttttcaggaaatttaattatcttactgagatgtgaaagcaaaactagtaacagaacttacattttatttcatgctttcttaaacccgtgcatattctggtgaaacatgtaaaatactttaagtaaaattgaacatttttatttgaatttttgctgaactgataaaggtgtttatatttttgtttgttggtttgtttaattcatgtttgttgggactgaggtttaggaagtttgttactggttaaaaacctcaaatgaaatgcgaaagaatttgaatttttcctgcatatgtcaactttggacagctttcaagaaaaatgagaaaagtttcaacttctggcggttaaaatattaatgcagaatttactaagattttattcatttgcattagcaaatattcatgcagcagcagttgactgaaaatttattcttatgagacgtatagtattcatttttaaatgcatgattgtacattatgtatagacgacaatgtttttaatttataaatttcattctttgttaattgcatgggtttttctgcagcttattgtgaataccttggttctgttcaatagaaacattttgtatatattaaatactgaaatatcagtatcgacggtggaagtgcttcatgggcttgctgcacatatttgtaggatactgtatctgcaaatgcaacaacaaatagttttgtacttggttaacagtcttagttaaaacatgagtttattttctaaaagtatccagaataagtaaaattatagaaataagaaaatgttacacaactttgctgttcatacccttaccttcttactacttttggtttggaggagggtatcaccactagaaagtgtgcctccttaagatttcttaaaggaaagttagtttcagtatttcacagcaagttggactacaaaatctagagttgatctgctttttaaaccttcatttaaaagcaaacttggaagaaatttgaaactgatgtttttaatatatgtctgtgttgcctaggttttctttttttaaagaggtatgtaattaaaacctttgtaaaatttgccaactaatattagtgcctgacttcccatatttgtttcatctttttaactgacagtatatctcacttcttctttgaatagaatgagtgagtgatctcagttttcacattttattcagaagctaatccctacttagcaaggcacacattctacagcaagtcatagaaagtttaatccttgtgcctccttagctctcgtatattcagggatctctataaaagttggtgtcttttttcatcatcataaattcatcataatcacagatatttttgggtctaagatattcatataccaaggatggttttgtaaagaattctgggatcattgaattaaggattgtggcttgaagtaactaaagaaaaatactaatttccttaaaaggaattataattatgatttacattttacatcattaatttcccaaattatatttaaccgtaaggaggtgcacatgagtttttagcaaacaggtatgaataagcagctatgtatatgtgtttggggcagaggggagcagattactttaacacacttcagaattaaaatcagttcgtttcatgactctgtgccttaacgtttgtgtgaactaaacttgctgattgaatgaaattcttgggaagccgaacagtaatagcagaaaatgtgaccaaatgagtatcatgtacttaaatcactgaattttatataagcacaagtattaattttaaaaacattatagtttaataaagctgcatttaaaaatatttgggagcaaagacaagcatgctaaatcttcattttgctatggctataagcatatatttttggcaacttatttgcaatattcttgccttaaagtttcctgcaaatttcccccttagtaattcccgaatagcaaaacattaatattccatgattagctctactgtgttgtctcactattaaaatggaattcgttttttcagatcttttctaatggttaataaaacaaatgtcagatcataataacactcaaa

SEQ ID NO: 196876 - DNA, 7897 bp, Artificial Sequence
  derived and/or modified sequence
cgcactcctgggcccgcccagccgccatcttggtctaggagggagcgcgccgcacgcgtgagtaaacagccggagctgggaaagtcgagctctggcagcgtctgggtgctgaggggcagaggcggagagaaccctgtcctgatcttcctagggtggccgacatgacggccaggggtcagagccccctcgcgccgctgttggagactttggaagacccttctgcctcccatggagggcagactgacgcttacctgactctgaccagtcgtatgactggagaagaaggaaaagaagtaattacagaaattgagaaaaaacttcctcggctgtacaaagttttaaagactcacatttccagtcaaaactcggagctgagtagtgctgctctacaagccctggggttttgcttatataatcccaaaattacctcagaattatcagaggcaaatgctctagaattgctttcaaaattgaatgataccattaagaattcagacaaaaatgtacgtactagagcactttgggtgatatctaagcagacatttccctctgaagtggttggcaaaatggtatccagtataattgattcattagaaatactgtttaacaaaggagagacgcattctgctgttgttgattttgaagcattaaatgttatcgtaaggctaattgaacaagccccaattcaaatgggagaagaggcagtgaggtgggcaaaactggtcatacctttagtggttcattcagcacaaaaggtacatttgcggggagcaactgctctggagatgggaatgccattattgcttcagaaacagcaagaaatagcatctattacggagcagcttatgactactaaattaatctcagaacttcagaagctatttatgagtaaaaatgagacttacgtgttaaaattatggcctttgtttgtcaaactacttggaaggaccttgcatcgaagtgggagtttcatcaattctctcttgcaactagaagaacttggatttcgtagtggagcacccatgattaaaaagatagcttttattgcttggaagagtttaatagataattttgctttaaatccagatatactatgtagtgcaaaaagactcaagttgttaatgcagcctttgagttccatccatgtgagaacagaaactctagcattaacaaaactagaagtctggtggtatttactgatgagacttggacctcatcttcctgctaattttgaacaggtttgtgtgcctctgattcaaagtacaataagcattgattctaatgcctcacctcagggcaattcgtgtcatgtagctacatctccaggtttaaatcctatgactcctgtacacaaaggtgcttcctccccgtacggagccccgggaactccccgaatgaacctgagttcgaatttaggtggaatggccacaatcccatccattcaacttttgggacttgaaatgttgcttcatttcttgttgggtccagaagccttgagttttgctaagcaaaataaacttgtgctgagcttagagccattggaacatccgttaatcagcagcccttcctttttttccaaacatgcaaatacacttatcactgctgttcatgatagctttgttgcagttggaaaagatgcccccgatgtggttgtcagtgctatctggaaggagctaattagcttggtgaagtcagttactgaatcaggtaacaaaaaagagaaaccaggttctgaagttttgactctcttattaaagtctttggaaagcatagtaaagtctgaagtatttcctgtatcaaaaacgctggtcctcatggaaattacaattaaaggacttcctcagaaagtattaggttcaccagcatatcaggttgctaatatggatattcttaatggaactccagctttgttcttaattcaattaattttcaacaatttcttggaatgtggtgtatcagatgaaaggttctttctcagtttggaatcacttgtaggctgtgttctttctggtccaacttcaccactagctttcagtgactcagttttaaatgttattaatcaaaatgcaaagcagttggaaaataaggagcatctctggaaaatgtggagtgttatagtcaccccattaactgaattgattaatcagaccaatgaagtaaatcaaggtgatgccttagaacataattttagtgccatctatggtgcattgactttaccagtaaaccacattttttcagaacagagatttccagtggccaccatgaagactttgcttagaacttggtcagaattatatagagcatttgctcgttgtgctgctttggtggcaacagcagaagagaacttgtgctgtgaggaactttcttccaagataatgtccagtttggaagatgaaggcttttctaatttgttgttcgtggatagaattatttatattattactgtaatggttgattgcattgacttctcaccatataatattaaatatcagcccaaagttaaatcaccacagagaccttcagattggtccaaaaagaagaatgagcccctagggaaattgacttctttatttaaacttattgtgaaagtgatctattctttccacacactgagcttcaaggaagcacattctgataccctcttcactattggcaactcaatcaccggcattatttccagtgtacttgggcatatttctttgccttctatgatccgaaaaatatttgcaactttaacaagacctctggcattattttatgaaaactcaaagcttgatgaagttcctaaagtatatagttgtctgaacaacaagttagaaaagctactgggagaaattattgcttgtctgcaattcagctacaccggaacttatgatagtgaacttcttgaacaactctccccactattatgcataatatttctgcacaagaataaacagattcgaaaacagagtgctcagttctggaatgccacttttgccaaagtgatgatgttggtttatcctgaagagttaaaaccagtactaacacaagccaaacaaaaatttctgctcctgttgcctggtttggaaactgttgaaatgatggaggaatccagtggaccatattctgatggaacagaaaattcacaactaaatgtgaagataagtggcatggagagaaaatcaaatggaaaaagagattcatttttggcacaaacaaagaataaaaaagaaaatatgaaaccagcagccaaactgaaacttgaatcttcgtctttaaaagtaaagggtgaaattcttttggaagaggaaaagtctactgactttgtgtttatacctccagaaggaaaagatgcaaaggaaagaatattaactgatcatcaaaaagaagttctcaaaacaaagcggtgtgatattcctgccatgtataataatctggatgtttcccaagataccttatttactcagtatagtcaggaagagcctatggaaattcctactttaaccagaaaaccaaaggaggattctaagatgatgattacggaggagcaaatggacagtgacattgtcattcctcaagatgtcacggaagactgtggtatggctgaacatcttgaaaagtcctccctttcgaataatgagtgtggttctcttgacaaaaccagtccagaaatgtcaaacagtaataatgatgaaagaaaaaaagctttaatttcatcaaggaaaacatcaactgaatgtgcatctagtacagaaaattctttcgttgtcagcagtagttcagtttctaataccactgttgctggaactcccccataccctacaagtcggaggcaaacctttattactttggagaagtttgatggttcagaaaatagaccttttagtccatcccccttgaataatatttcatcaactgttacagtgaaaaataaccaggaaaccatgattaaaacagattttctaccaaaagcaaagcaaagagaagggactttttcaaaatctgattctgaaaaaatagtgaatggaactaagagatcaagccggagagctggtaaagctgaacaaacagggaataaaaggtctaagcccttaatgagatctgagccggagaaaaatactgaggaatctgttgaaggcattgtagtcttagaaaataacccacctggtttgcttaatcaaacagaatgtgtgtcagataatcaggttcatctttctgaatctacaatggagcatgacaatacaaagcttaaagcagcaacagtggaaaatgctgtattattggaaactaatactgtagaggagaaaaatgtagaaattaatttggaatccaaagagaatacacccccagtagtaatatcagcagatcaaatggtaaatgaggatagtcaggttcagataactccaaatcagaaaacccttagacggtcttcaaggcgacgttcagaagtagtagagtctaccactgaaagccaagataaggaaaatagtcatcaaaaaaaggaacgacgtaaggaagaagaaaaacctcttcagaagagtccattgcatataaaagatgatgtgttacctaaacaaaaactgattgctgaacaaactctacaggagaatttaattgagaaaggaagtaatttacatgagaagactcttggggaaactagtgctaatgcagaaactgaacaaaataaaaaaaaggcagaccctgagaacattaagtctgagggggatggtacccaggacattgtagataagtcctctgagaaactagtcagaggccgaacacggtatcaaactagaagagcatctcagggtttgctttccagcattgaaaactcagaatctgatagttcggaggcaaaagaagaaggttctaggaagaagagatctggaaaatggaaaaacaaaagcaatgaaagtgttgacattcaagatcaagaagagaaagtggtgaaacaggaatgtataaaagctgaaaatcagtcacatgattataaagcaacttctgaagaagatgtaagcataaaatctccgatttgcgaaaaacaagatgaaagtaatactgtaatatgtcaggattctacagtaacttcagatttgttgcaagttcctgatgatttaccaaatgtgtgtgaggaaaaaaatgaaactagcaaatatgcagaatattcctttacaagtctacctgtgccagaatcaaatctaaggactagaaatgccattaagagattacataagcgagactcttttgataattgtagtttgggagaatcctcaaaaatagggatatcagatatttcttcgctttcagaaaaaacttttcaaacacttgaatgccaacacaagagaagtaggagggtgaggagatctaaaggttgtgattgctgtggggaaaaatcacaacctcaggaaaagtcactcattgggttaaagaatacagaaaataatgacgtagagattagtgaaacaaaaaaggcagatgtgcaagcacctgtaagcccatcagaaacttctcaagctaatccatattctgaaggacaatttttagatgaacatcatagtgtgaattttcatttgggtctcaaagaggataatgatactattaatgattcattaattgtttctgaaaccaaatcaaaagaaaacactatgcaagaatctcttccttctggaatagtaaactttagagaggaaatttgtgatatggattctagtgaagcaatgtctcttgaaagccaggagtcacctaatgaaaattttaaaactgttggcccgtgtttaggagactcgaaaaatgtttcacaggaatctttggagacaaaagaagaaaaaccagaagaaaccccaaaaatggaactgagtctagagaatgttactgttgaaggaaatgcatgtaaagtaacagaatccaatctagagaaagcaaaaactatggaattgaatgtaggaaatgaagctagctttcatggacaagagagaaccaaaactggtatttctgaagaagcagcaatagaagaaaataaaagaaatgatgactctgaagcagacacagctaaactgaatgccaaagaagtagcaactgaggaatttaattcagatattagtctttctgataatactacacctgtaaaattgaatgctcaaactgagatttctgaacaaacagcagctggggaactagatggaggaaatgatgtatctgatctacactcatctgaagaaacgaataccaaaatgaaaaataatgaagaaatgatgatcggcgaggcaatggctgaaactggccatgatggtgaaacagagaatgagggcataactaccaaaacctcaaagcctgatgaagctgaaacaaacatgttgactgcagaaatggacaactttgtttgtgacacagttgaaatgagcactgaagaaggaatcattgacgctaataaaactgaaacaaatactgagtatagtaaatctgaagaaaaattagataacaatcaaatggtaatggaaagtgatattttacaggaagatcaccatacttcacagaaagtggaggaaccatcacagtgtctggcatctggaacagctatctctgagctaataatagaagacaataatgcatctcctcaaaaactaagggaacttgatccttcacttgtgtcagcaaatgacagtcctagtggcatgcagacacgctgtgtctggtctcctttggcttctccgtctacgagcattttaaagagaggactaaaaagatcccaagaagatgaaatctcatcacctgttaataaggttcgccgtgtctcctttgcagatccaatataccaagcaggattggcagatgacattgatagacggtgctctattgttaggtcccattcttccaatagttctcccataggaaaaagtgttaaaacttctcctactacacaatctaagcataataccacttcagccaaaggatttctgtccccaggatcacgtagccctaaatttaagagctcaaagaagtgtttaatttcagaaatggccaaagaatccataccatgcccaacagaaagtgtttacccaccattggtgaactgtgtggcaccagttgacatcattttacctcagattacatcaaacatgtgggcaagaggcctgggacaactcattagagctaagaatataaaaactattggtgatttgagtactcttacagcatctgaaataaaaactcttcctatccgttctccaaaagtgtccaatgtaaaaaaggctctcagaatatatcatgagcagcaggtgaagactcgtggactagaagagattccagtttttgatatttctgaaaaaacagtaaatggaatagaaaataaatctttgtcacctgatgaagaaagacttgtctcagatataattgatcctgttgctttagaaattccattatccaaaaaccttctggcacagattagtgctcttgctcttcagctggattcagaagatcttcataattattcaggaagccaactatttgaaatgcacgagaaactaagttgtatggcaaactctgtaataaaaaatctacagtcacgttggagatcaccatcccatgaaaattctatttagtattttcagagaaaattgaaggtttttttaaacatcactggatttcttgattgaggaaacaagttctgaaataatagcacaatttcaaagaagagactctttgcaaagttgataacatttcaaaccctgaaggacagtgacttattatgtaagttcaattttgtaagttcattatgtaagatccttttttttttcataatatgtattcttggctgctatgcgtggtttttcaggaaatttaattatcttactgagatgtgaaagcaaaactagtaacagaacttacattttatttcatgctttcttaaacccgtgca

SEQ ID NO: 196877 - protein, 333 aa, Artificial Sequence
  derived and/or modified sequence
MATAERRALGIGFQWLSLATLVLICAGQGGRREDGGPACYGGFDLYFILDKSGSVLHHWNEIYYFVEQLAHKFISPQLRMSFIVFSTRGTTLMKLTEDREQIRQGLEELQKVLPGGDTYMHEGFERASEQIYYENRQGYRTASVIIALTDGELHEDLFFYSEREANRSRDLGAIVYCVGVKDFNETQLARIADSKDHVFPVNDGFQALQGIIHSILKKSCIEILAAEPSTICAGESFQVVVRGNGFRHARNVDRVLCSFKINDSVTLNEKPFSVEDTYLLCPAPILKEVGMKAALQVSMNDGLSFISSSVIITTTHCSLHKIASGPTTAACME

SEQ ID NO: 196878 - DNA, 1002 bp, Artificial Sequence
  derived and/or modified sequence
atggctactgccgagaggcgagctctgggcatcggatttcagtggctctctctggctacccttgtgctgatatgtgccggacagggaggacgacgggaagacggcgggccagcatgctatggcggattcgacttgtattttatcttggacaaatccggatctgttctccaccactggaacgagatctactatttcgttgaacagctggcccacaagtttattagtccacagctaaggatgagcttcatagttttcagcaccagaggaactactctgatgaagctcaccgaggacagagagcagatccggcaaggcttggaggagcttcagaaggtactccccggaggagacacatacatgcacgaagggtttgagcgggcttccgagcagatatactatgagaaccgacaaggatataggaccgcaagcgtgataattgcgttaactgatggtgagctgcatgaggaccttttcttttacagtgaaagagaagcaaacaggtcccgtgatctgggtgctatcgtgtactgtgttggcgtgaaggacttcaacgagacccaactggccagaatcgcagatagcaaggatcacgtgttccccgtcaacgatggcttccaggccctgcaaggaataatccacagcatcctcaagaaatcttgtatcgaaattctagctgccgagccctctactatctgtgctggtgagtcgttccaagtcgtggtccgcggcaacgggtttagacacgcgcgaaacgtggacagagtcttgtgttctttcaagatcaacgatagcgtgactctgaatgagaagccgttttccgtggaagatacttatttgctctgtccagcccccatattgaaagaggtgggcatgaaagctgcactccaagtgtccatgaacgatgggctgagttttatctccagctcagtgattatcacaaccacccattgcagccttcataagatagcttccgggccaactacagccgcctgtatggagtag

SEQ ID NO: 196879 - DNA, 1002 bp, Artificial Sequence
  derived and/or modified sequence
atggccacagctgagcggcgggccctgggcatcggcttccagtggctgagcctggccaccctggtgctgatctgtgccggccagggcggcagaagagaagatggcggccctgcctgctacggcggctttgacctgtacttcatcctggacaagagcggctctgtgctgcaccactggaatgagatctactactttgtggagcagctggcccacaagttcatcagcccccagctgaggatgtccttcatcgtgttcagcacccggggcaccaccctgatgaagctgacagaagatcgggagcagatccggcagggcctggaggagctgcagaaggtgctgcccggcggggacacctacatgcatgagggctttgagcgggccagcgagcagatctactatgagaaccggcagggctacagaacagccagcgtcatcatcgccctgacagatggagagctgcatgaagatctcttcttctacagcgagcgggaggccaacagaagccgggacctgggcgccatcgtgtactgtgtgggcgtgaaggacttcaatgagacccagctggccagaattgctgacagcaaggaccacgtgtttcctgtgaatgatggcttccaggccctgcagggcatcatccacagcatcctgaagaagagctgcatcgagatcctggccgctgagcccagcaccatctgtgccggggagagcttccaggtggtggtgagaggaaatggcttcagacatgccagaaatgtggacagagtgctgtgcagcttcaagatcaatgacagcgtgaccctgaatgagaagcccttctctgtggaggacacctacctgctgtgcccagcccccatcctgaaggaggtgggcatgaaggccgccctgcaggtgtccatgaatgatggcctgtccttcatcagcagcagcgtcatcatcaccaccacccactgcagcctgcacaagatcgccagcggccccaccacagctgcctgcatggagtag

SEQ ID NO: 196880 - DNA, 1002 bp, Artificial Sequence
  derived and/or modified sequence
atggccaccgccgagcggcgggccctgggcatcggcttccagtggcttagtctggcgacactggtactcatttgtgccgggcaggggggccggcgagaagatggagggccggcctgctacggtggcttcgatctgtactttatcctggacaaaagcgggagcgttctccaccactggaacgagatttactacttcgtggagcagctcgctcacaaatttatatcaccacagctacggatgtcttttattgtattttccacaagagggaccacacttatgaagttaaccgaggatagagagcagattcgccagggcttggaggagctccagaaggtcctcccaggcggagacacttacatgcacgagggcttcgagagggcatctgagcaaatctactatgaaaacagacaaggctaccgtaccgcttcagtgattatcgcactgacagatggagaactacacgaagacctctttttctactccgaacgtgaagctaatagatcacgcgacctcggtgcaattgtctattgcgtcggcgtaaaagattttaacgagacgcagcttgcccgcatcgctgactctaaggaccacgtctttccagtgaacgacggttttcaggccctccagggcatcattcattcgattctgaaaaagtcctgcattgagatcctcgccgctgagcctagcacaatctgtgccggagagagtttccaggtagtggtacgaggtaacggcttccggcatgctaggaatgtggatagagtcctctgctcctttaagattaacgattccgtcacactgaatgagaagccgttcagtgtcgaggacacctatttactgtgtccagcccctattctgaaagaggtgggcatgaaagccgccctccaagtgtccatgaatgatggtcttagctttatctcaagcagcgtgatcatcactaccacacattgctctcttcacaagatcgcttctggtcctactactgctgcatgtatggagtag

SEQ ID NO: 196881 - DNA, 1002 bp, Artificial Sequence
  derived and/or modified sequence
atggccacagcggagcggagggccctcggtatcggcttccagtggctgtccttagccaccctcgttctgatttgcgccggtcaaggcggaaggcgagaggatggcggaccagcatgttacggtggctttgatttatacttcatattagataaaagcgggagcgttctgcatcactggaatgaaatctactactttgtggagcagctcgcgcacaagttcatttctcctcagctgagaatgagcttcattgtgttttcaacccgaggcaccaccctgatgaaactgacagaggacagggaacagatccggcagggcttagaagaactgcagaaggtgctgccaggcggagacacgtacatgcacgaggggtttgaacgcgcatcagaacaaatttactacgaaaataggcaaggctaccgcaccgcatctgtaataatcgctctgaccgatggcgaacttcatgaagatctcttcttctacagtgaaagagaggctaacaggtccagggacttgggagcaatagtgtattgcgtgggtgtgaaagattttaacgagacacagctggcacggattgcagatagcaaggatcatgtgttccccgtcaacgatgggtttcaggctttacagggcatcatccatagtattctcaaaaaatcgtgtatcgagatacttgctgcagagccaagcactatctgtgccggagagtctttccaggtggttgtgcggggaaatggctttcgacacgcaagaaatgtggatcgcgtgctatgttccttcaaaattaacgactccgtgactttgaatgaaaagcccttctctgtggaagatacctacctcctgtgccccgctccaattctgaaggaagtgggaatgaaagctgccctgcaggtgtctatgaacgacgggttgagctttatctcgagctctgtgatcataactacgacccattgctccctgcataagatcgcttcgggcccaaccactgccgcatgcatggagtag

SEQ ID NO: 196882 - DNA, 2221 bp, Artificial Sequence
  derived and/or modified sequence
gaaacagcatcggagcggaaaccagaggggaaaccttgaactcctccagacaattgcttccggggagttgcgagggagcgagggggaataaaggacccgcgaggaagggcccgcggatggcgcgtccctgagggtcgtggcgagttcgcggagcgtgggaaggagcggaccctgctctccccgggctgcgggccatggccacggcggagcggagagccctcggcatcggcttccagtggctctctttggccactctggtgctcatctgcgccgggcaagggggacgcagggaggatgggggtccagcctgctacggcggatttgacctgtacttcattttggacaaatcaggaagtgtgctgcaccactggaatgaaatctattactttgtggaacagttggctcacaaattcatcagcccacagttgagaatgtcctttattgttttctccacccgaggaacaaccttaatgaaactgacagaagacagagaacaaatccgtcaaggcctagaagaactccagaaagttctgccaggaggagacacttacatgcatgaaggatttgaaagggccagtgagcagatttattatgaaaacagacaagggtacaggacagccagcgtcatcattgctttgactgatggagaactccatgaagatctctttttctattcagagagggaggctaataggtctcgagatcttggtgcaattgtttactgtgttggtgtgaaagatttcaatgagacacagctggcccggattgcggacagtaaggatcatgtgtttcccgtgaatgacggctttcaggctctgcaaggcatcatccactcaattttgaagaagtcctgcatcgaaattctagcagctgaaccatccaccatatgtgcaggagagtcatttcaagttgtcgtgagaggaaacggcttccgacatgcccgcaacgtggacagggtcctctgcagcttcaagatcaatgactcggtcacactcaatgagaagcccttttctgtggaagatacttatttactgtgtccagcgcctatcttaaaagaagttggcatgaaagctgcactccaggtcagcatgaacgatggcctctcttttatctccagttctgtcatcatcaccaccacacactgtagcctccacaaaattgcatcaggccccacaacagctgcttgcatggaatagcagagaataccgcctgctccctccggacagcacactcctgaaaacggggagagaggagccaaacatgctcggtttacactttccttatttactgaatgagtggagggcagagacaggcctggagttacgcacactgagtgccccaacatggaaagaaacatcaggagggacaggaaacgttccctccttaaccaacagttttcaagaccttactggaggcactttattggctacataatcactccatgcggtgggcatcaggcagaatcctggtgcagacccaactttgaggtggaggatttcacagtttctttattttgaacttcccccaggctcccactaattcctctccattctatcctcctccctttcccacaaaagaaaacagaaaggagcagcagtgtttgataccgtatcatccagaggcctggttctctcccattatagggcaaacaagccctggcaagatatttcactcccgccccatgccatgcattaaaaatccaaaattgcctatattccacctgccaagcaagagatgctttcattattgaagttccaaatgtatacctttgagaacagtgccttctcgtcttaaaagagaggtcctcattttgtgagttgggagcagagggaattaaagaaagccatgatgcagggatttggccattcaagccgggcagccttcagagaatgtcatccctaatgacacatgcccgaatgaaggagcggggctgagcttgtcctgccttcgtattgaatgttgcctgtctgcctccttaatagcgggcctctgtgtgagcatttgacaagacttaaaactattcattgaagaaaatggatgatcccccaacaggaagatgcaaccccatgggctgcctgcttgaccacagaagtgcttccagctccagttgctcatctgagaactccccccaccacttgctgttaaaattgttaaaattaaaggccatgttgattgattttttaaactttatttccattttttttaataaaataagaattgg

SEQ ID NO: 196883 - DNA, 1002 bp, Artificial Sequence
  derived and/or modified sequence
atggccaccgccgagagaagagccctgggcatcggcttccagtggctgagcctggccaccctggtgctgatctgcgccggccagggcggcagaagagaggacggcggccccgcctgctacggcggcttcgacctgtacttcatcctggacaagagcggcagcgtgctgcaccactggaacgagatctactacttcgtggagcagctggcccacaagttcatcagcccccagctgagaatgagcttcatcgtgttcagcaccagaggcaccaccctgatgaagctgaccgaggacagagagcagatcagacagggcctggaggagctgcagaaggtgctgcccggcggcgacacctacatgcacgagggcttcgagagagccagcgagcagatctactacgagaacagacagggctacagaaccgccagcgtgatcatcgccctgaccgacggcgagctgcacgaggacctgttcttctacagcgagagagaggccaacagaagcagagacctgggcgccatcgtgtactgcgtgggcgtgaaggacttcaacgagacccagctggccagaatcgccgacagcaaggaccacgtgttccccgtgaacgacggcttccaggccctgcagggcatcatccacagcatcctgaagaagagctgcatcgagatcctggccgccgagcccagcaccatctgcgccggcgagagcttccaggtggtggtgagaggcaacggcttcagacacgccagaaacgtggacagagtgctgtgcagcttcaagatcaacgacagcgtgaccctgaacgagaagcccttcagcgtggaggacacctacctgctgtgccccgcccccatcctgaaggaggtgggcatgaaggccgccctgcaggtgagcatgaacgacggcctgagcttcatcagcagcagcgtgatcatcaccaccacccactgcagcctgcacaagatcgccagcggccccaccaccgccgcctgcatggagtag

SEQ ID NO: 196884 - protein, 202 aa, Artificial Sequence
  derived and/or modified sequence
MAKVSVLNVAVLENPSPFHSPFRFEISFECSEALADDLEWKIIYVGSAESEEFDQILDSVLVGPVPAGRHMFVFQADAPNPSLIPETDAVGVTVVLITCTYHGQEFIRVGYYVNNEYLNPELRENPPMKPDFSQLQRNILASNPRVTRFHINWDNNMDRLEAIETQDPSLGCGLPLNCTPIKGLGLPGCIPGLLPENSMDCI

SEQ ID NO: 196885 - DNA, 609 bp, Artificial Sequence
  derived and/or modified sequence
atggcaaaggtgtctgtattgaacgtggctgtgctcgaaaatccctcacccttccactctccctttaggtttgagatctccttcgaatgttccgaggctttggccgacgatttggaatggaagatcatctacgtgggctctgctgagagcgaagagtttgatcagattctggacagcgtgctggtcggccctgtgcccgcgggccggcatatgtttgtcttccaagccgatgccccaaacccctcgctgatcccagaaaccgacgccgtgggagtgacagtcgtgctgatcacctgtacgtaccacggacaggaattcattcgggtgggctattacgtgaataacgagtatttaaacccggaattgagggagaaccccccaatgaagcctgatttctcccaactgcagcgcaatatactggcgagtaacccgagggtgacccggttccacatcaattgggataacaacatggatagattggaagccatcgagactcaggacccaagccttggctgtgggctgccactgaactgcactcctattaagggattgggattgccaggatgcatccccggtctgctgccggagaactccatggattgcatttag

SEQ ID NO: 196886 - DNA, 609 bp, Artificial Sequence
  derived and/or modified sequence
atggccaaggtgtctgtgctgaatgtggccgtgctggagaaccccagccccttccacagccccttccgctttgagatcagctttgaatgttctgaggccctggctgatgacctggagtggaagatcatctacgtgggcagcgctgagagcgaggagtttgaccagatcctggacagcgtgctggtgggccctgtgcctgctggccgccacatgtttgtgttccaggctgatgcccccaaccccagcctcatccctgagacagatgctgtgggcgtgacagtggtgctgatcacctgcacctaccacggccaggagttcatccgggtgggctactacgtgaacaatgagtacctgaaccctgagctgcgggagaacccccccatgaagccagacttcagccagctgcagaggaacatcctggccagcaacccccgggtgacccgcttccacatcaactgggacaacaacatggaccggctggaggccatcgagacccaggaccccagcctgggctgcggcctgcccctgaactgcacccccatcaagggcctgggcctgcccggctgcatccctggcctgctgcctgagaacagcatggactgcatctag

SEQ ID NO: 196887 - DNA, 609 bp, Artificial Sequence
  derived and/or modified sequence
atggccaaggtgagcgtgctgaacgtggccgtgctggagaacccctccccatttcacagtccatttagattcgagatttccttcgaatgcagtgaggctctggccgatgacctggagtggaagataatctatgtgggatccgccgagagtgaagagttcgatcagatcctcgactcagttctggtgggcccggtacctgccgggcgtcacatgtttgtttttcaagcagatgcaccgaacccttctctgattccagagacggacgcagtgggtgtcacagtggtgctcattacttgtacctaccacggtcaggaatttattcgtgtgggttactacgtcaacaatgagtacctgaatcccgaactgcgagaaaacccacccatgaagccagactttagccagctccagaggaacatcctggcctcaaatccgcgcgtgacccgattccatatcaattgggacaataacatggaccgcctcgaagccatagagacgcaagatccctcactcgggtgtggactccctctcaactgcacccctataaagggcctagggctgcccgggtgtatcccgggactcctgccagagaattccatggactgtatctag

SEQ ID NO: 196888 - DNA, 609 bp, Artificial Sequence
  derived and/or modified sequence
atggctaaagtgtcggttctgaacgtggccgtgctggaaaatccgagccccttccacagccctttccggttcgagatctctttcgagtgttctgaggcactcgccgacgatctcgaatggaagataatctatgttggctcagccgagtcagaggaattcgaccaaatcctggatagcgtcctggttggacctgtaccagcaggcagacatatgttcgtatttcaggccgacgccccaaacccttcacttattcctgagaccgacgcagttggtgtaactgtagtcctgattacctgtacctaccatggtcaagagtttatccgggtcggatattatgtcaataacgagtatctgaaccctgagctacgcgaaaacccacccatgaagccggacttctctcagttgcagcggaatatcttagcatcgaaccccagggtgaccagatttcatatcaattgggataacaatatggataggctcgaggctattgagacccaagatccgtcattgggatgcggcctgcctctgaattgcactcccattaagggattaggattaccaggttgtattccaggtctcctgcctgagaactccatggactgtatctag

SEQ ID NO: 196889 - DNA, 2059 bp, Artificial Sequence
  derived and/or modified sequence
cgctgcgcgctgcgggatgcatctcccggaaaagcgaggcgaggggcgggccacgccggtgcgggaaccctcaggattggccagaaggaggccggcgctgtgactccgtccattcccgccgttgacatccaagtcggagacgctggggattggtttccagcggacacgctaagaagcttggagatagtttcgccctcctcacacgctgcggagagggagctccgctgattggtccgaggagtctgggcgcgcgccgatcggcgctccaggactggctgagggggtgcgcgcgccgccagggagcgttggcggtgattggccagagggcggaggccggctatttgaaggcggcgcgcggactaggtgcgcacttcagttctcggagagaagaggcgggagtggacctggtcagccctaccccactgaccccaccggacccaggcgcggcctccgccacagccacagcccctgcccctgctgcggcgcggcgaggcgaggcgatggccaaggtgtcggtgctgaacgtggcggtcctggagaacccgagccctttccacagccccttccggttcgagatcagcttcgagtgcagtgaagccctggcggacgacctggagtggaagatcatttatgttggctcggctgagagtgaggaatttgatcagatcctagactcggtgctggtgggccctgtgccagcagggagacacatgtttgtctttcaggccgacgcccccaacccatccctcatcccagagactgatgccgtgggtgtgactgtggtcctcatcacctgcacctaccatggacaggagttcatccgagtgggctactacgtcaacaacgagtacctcaaccctgagctgcgtgagaacccgcccatgaagccagatttctcccagctccagcggaacatcttggcctcgaacccccgggtgacccgcttccatatcaactgggacaacaacatggacaggctggaggccatagagacccaggacccctccctgggctgcggcctcccactcaactgcactcctatcaagggcttggggctccctggctgcatccctggcctcctccctgagaactccatggactgcatctaactgcaggaacccagagtgtcccagcacgccgggaggggcaaccaggcctcccagcgagtcctgcagggcccatctagaggactttgggggccatcagctgcaatccaggtctgtcaaactcagcccctaggaaagaacaggccttgggtctcccctagtcctggccagaaggatgatctcgcttttcctctacaggcctataagaagcaggtacttcagttctaaattctgacttgtgttcttttcgtcttcataaattctaactaaggccactgtgccactgtgcacccttgagtaccattgatccaaagctttcccacagacctccctggcccacctagaggctttcttggtcagtgcctgtcaaggctccagtcctgctgagccaaaggctttgtcattcctttctcttcctgtacatctgagcagacccactccagctttctggtgtcacaggcgggaatgttagttagtaggtagacttagatcccatttctgtcctgctcccaggaagattcttaggtcctcttcaatccagcagcccctcccagaggtgtgatcagcaggatgctgaggaaccatgttgcctttcctgtcaatcacagccaccttcctgttatctcctaaatggatctggcttttcctggaggctgccatggttggaagatggtatcagagggcctgcctgggcagtctgtctccgggccagggtcagggaccctctgcctctggcagccttaacctgtcctctgctaggaccagggtgatttcaagccagggaagcaactgggaccctgaaaactgtccctccccagcccgctccccctctctgtgccctggtccccttgctgccatgtggatgctgttgtgattgctgtttgtatattatcaaaatgtttttatattaaaaatgtttggtctgaaaattaaaagcacttcatttagaatga

SEQ ID NO: 196890 - DNA, 609 bp, Artificial Sequence
  derived and/or modified sequence
atggccaaggtgagcgtgctgaacgtggccgtgctggagaaccccagccccttccacagccccttcagattcgagatcagcttcgagtgcagcgaggccctggccgacgacctggagtggaagatcatctacgtgggcagcgccgagagcgaggagttcgaccagatcctggacagcgtgctggtgggccccgtgcccgccggcagacacatgttcgtgttccaggccgacgcccccaaccccagcctgatccccgagaccgacgccgtgggcgtgaccgtggtgctgatcacctgcacctaccacggccaggagttcatcagagtgggctactacgtgaacaacgagtacctgaaccccgagctgagagagaacccccccatgaagcccgacttcagccagctgcagagaaacatcctggccagcaaccccagagtgaccagattccacatcaactgggacaacaacatggacagactggaggccatcgagacccaggaccccagcctgggctgcggcctgcccctgaactgcacccccatcaagggcctgggcctgcccggctgcatccccggcctgctgcccgagaacagcatggactgcatctag

SEQ ID NO: 196891 - protein, 310 aa, Artificial Sequence
  derived and/or modified sequence
MSQRDTLVHLFAGGCGGTVGAILTCPLEVVKTRLQSSSVTLYISEVQLNTMAGASVNRVVSPGPLHCLKVILEKEGPRSLFRGLGPNLVGVAPSRAIYFAAYSNCKEKLNDVFDPDSTQVHMISAAMAGFTAITATNPIWLIKTRLQLDARNRGERRMGAFECVRKVYQTDGLKGFYRGMSASYAGISETVIHFVIYESIKQKLLEYKTASTMENDEESVKEASDFVGMMLAAATSKTCATTIAYPHVVRTRLREEGTKYRSFFQTLSLLVQEEGYGSLYRGLTTHLVRQIPNTAIMMATYELVVYLLNG

SEQ ID NO: 196892 - DNA, 933 bp, Artificial Sequence
  derived and/or modified sequence
atgagccagagagacaccctggtgcacctgttcgccggcggctgcggcggcaccgtgggcgccatcctgacctgccccctggaggtggtgaagaccagactgcagagcagcagcgtgaccctgtacatcagcgaggtgcagctgaacaccatggccggcgccagcgtgaacagagtggtgagccccggccccctgcactgcctgaaggtgatcctggagaaggagggccccagaagcctgttcagaggcctgggccccaacctggtgggcgtggcccccagcagagccatctacttcgccgcctacagcaactgcaaggagaagctgaacgacgtgttcgaccccgacagcacccaggtgcacatgatcagcgccgccatggccggcttcaccgccatcaccgccaccaaccccatctggctgatcaagaccagactgcagctggacgccagaaacagaggcgagagaagaatgggcgccttcgagtgcgtgagaaaggtgtaccagaccgacggcctgaagggcttctacagaggcatgagcgccagctacgccggcatcagcgagaccgtgatccacttcgtgatctacgagagcatcaagcagaagctgctggagtacaagaccgccagcaccatggagaacgacgaggagagcgtgaaggaggccagcgacttcgtgggcatgatgctggccgccgccaccagcaagacctgcgccaccaccatcgcctacccccacgtggtgagaaccagactgagagaggagggcaccaagtacagaagcttcttccagaccctgagcctgctggtgcaggaggagggctacggcagcctgtacagaggcctgaccacccacctggtgagacagatccccaacaccgccatcatgatggccacctacgagctggtggtgtacctgctgaacggctag

SEQ ID NO: 196893 - DNA, 933 bp, Artificial Sequence
  derived and/or modified sequence
atgtcacagcgggatacactggtgcacctgttcgcaggcggatgtggagggaccgtgggtgccatcctaacctgtcctctggaagtggtgaagacaagactccagagttcgagcgtaactctgtatatttccgaggttcagttgaacactatggcaggggccagtgtgaatcgggtcgtatcacctggaccgctccactgcctgaaagtgatcctagagaaggaggggcctagaagtctgttcaggggccttggacctaaccttgttggtgtggctccttcacgggcaatctatttcgctgcctactcaaactgcaaagagaaactgaatgacgtcttcgacccggactcgacacaggtacacatgataagcgcagccatggccggattcaccgctataacagctacgaacccaatctggcttattaaaaccaggctacagcttgatgctagaaaccggggggagcgccgcatgggagcttttgaatgtgtacgcaaagtgtatcagacagacgggttgaaaggcttttacaggggcatgagcgccagttacgcaggcattagtgagaccgtaattcattttgtgatatacgaatctattaagcagaagctactggagtacaaaaccgccagcactatggagaacgacgaggagagcgtgaaagaggcctcggattttgtgggtatgatgctggcagctgcaacctccaaaacatgcgccacgacaatcgcctatccacatgtcgtgcgaacacgtctgagagaagagggcactaagtatcgcagtttcttccagactctttctctgctggtgcaggaggaggggtatggtagtctctatcgaggcctcacaactcatctcgtccggcagatccccaataccgctatcatgatggcaacctacgagctggtcgtatatctactgaacggatag

SEQ ID NO: 196894 - DNA, 933 bp, Artificial Sequence
  derived and/or modified sequence
atgagccagagggacaccctggtgcacctgtttgctgggggctgcggcggcaccgtgggcgccatcctgacctgccccctggaggtggtgaagacccggctgcagagcagctctgtgaccctgtacatcagcgaggtgcagctgaacaccatggccggggcctctgtgaacagagtggtgtccccaggccccctgcactgcctgaaggtgatcctggagaaggagggccccaggagcctcttccggggcctgggccccaacctggtgggcgtggcccccagccgggccatctactttgctgcctacagcaactgcaaggagaagctgaatgatgtgtttgatcctgacagcacccaggtgcacatgatctctgctgccatggccggcttcaccgccatcacagccaccaaccccatctggctgatcaagacccggctgcagctggatgccaggaacagaggagagaggaggatgggcgcctttgaatgtgtgaggaaggtgtaccagacagatggcctgaagggcttctaccggggcatgtctgccagctatgccggcatcagcgagaccgtcatccacttcgtcatctatgagagcatcaagcagaagctgctggagtacaagacagccagcaccatggagaatgatgaggagagcgtgaaggaggccagtgactttgtgggcatgatgctggccgccgccaccagcaagacctgtgccaccaccatcgcctacccccacgtggtgaggacccggctgcgggaggagggcaccaagtaccgctccttcttccagaccctgagcctgctggtgcaggaggagggctacggcagcctgtaccggggcctgaccacccacctggtgcggcagatccccaacacagccatcatgatggccacctatgagctggtggtgtacctgctgaatggatag

SEQ ID NO: 196895 - DNA, 933 bp, Artificial Sequence
  derived and/or modified sequence
atgagccagcgggacaccctggtgcacctgttcgccggcggctgcgggggcaccgttggtgctattcttacatgtccattggaggtggtcaagactcgtctgcagagctcatctgtgaccctttacatatctgaggtgcagttaaataccatggctggagccagtgtcaaccgtgtggtgagtcccgggcctttacattgcctgaaagtgatactagaaaaagagggtccacgctccctgttccgcggtctcggacccaatctggtgggagtagctccctccagagctatttacttcgccgcttacagtaactgcaaggaaaagctgaatgacgttttcgaccctgacagtacacaggttcacatgatctctgccgccatggctggtttcaccgcaataacagccaccaaccccatttggctgatcaagacacggctacagctggacgctcgtaaccgaggcgaaagacgcatgggagcttttgaatgcgtgagaaaagtgtaccagaccgatggcctgaaggggttctaccgcggaatgagcgcatcttatgcagggatctccgagactgtgatccacttcgtgatttacgaatctattaaacagaagttgctcgagtacaaaaccgcgtcgactatggagaatgatgaggagagtgtgaaggaggcctccgattttgtcgggatgatgctggctgctgcgacctctaagacatgcgcgaccaccattgcctacccacatgtagtacgaaccagactccgggaagaggggaccaaatatcggtccttcttccagaccttgtctctgctggtccaagaggagggctacgggtcactgtatagggggttgaccacacaccttgtgcggcagattcctaacactgcgatcatgatggctacttacgagctggtcgtgtatctgttgaacggctag

SEQ ID NO: 196896 - DNA, 933 bp, Artificial Sequence
  derived and/or modified sequence
atgtcccagcgtgataccttagtgcacttgtttgcaggtggttgtggcggaactgtgggagccattctcacctgccccctggaagtggtaaaaacccgcctgcagagctcttccgtcaccttgtatatctctgaagtgcaacttaatactatggccggtgctagcgtaaatagagtcgtaagcccaggcccattgcattgtttgaaagtcatccttgagaaagagggccctcgatccctgtttcgtggtcttggccctaacctcgtgggtgtggccccatctagggctatttattttgcagcgtacagcaactgcaaggaaaagctaaatgacgtgtttgaccctgattcaacccaggtgcacatgatcagcgctgcaatggctggattcacggctatcaccgctactaacccaatctggctcatcaaaacccgcttgcagcttgatgcgagaaacaggggggagaggcggatgggcgctttcgaatgtgtgcgtaaagtataccaaacagatggactgaaaggattctatcgtgggatgagcgcgtcttacgccggaatttcggaaacagttattcactttgtgatctatgaatcgattaagcagaaacttctagaatataagactgcatccacaatggagaacgacgaagagagtgtgaaggaggctagtgattttgtgggaatgatgctggcggctgctactagcaaaacctgcgccacgaccattgcttatccccacgtagttaggacacggctgcgcgaagaaggtaccaagtatcgctcattttttcagacattgtccctgctggtgcaggaggaaggatatggctcactttatagaggcctgacaacccaccttgtgcgacagatcccgaacacagccattatgatggcaacctacgagctggtggtgtaccttttgaacggctag

SEQ ID NO: 196897 - DNA, 4638 bp, Artificial Sequence
  derived and/or modified sequence
gctttcagcctctggtgaagggcggcgcgcttaggcaggcggtggcgcggctggagtgccgcggggagggctgtgccggttgctttctgcagccgcatctcggccagctctcctcgccgtccccggggcgctgtgcgtctccagtccgggaccgaagccgcctgccgtagcgggcggccagatccgcgtcccgcctcagcggccggaggacatgcgggagagagaatgagccagagggacacgctggtgcatctgtttgccggaggatgtggtggtacagtgggagctattctgacatgtccactggaagttgtaaaaacacgactgcagtcatcttctgtgacgctttatatttctgaagttcagctgaacaccatggctggagccagtgtcaaccgagtagtgtctcccggacctcttcattgcctaaaggtgatcttggaaaaagaagggcctcgttccttgtttagaggactaggccccaatttagtgggggtagccccttccagagcaatatactttgctgcttattcaaactgcaaggaaaagttgaatgatgtatttgatcctgattctacccaagtacatatgatttcagctgcaatggcaggttttactgcaatcacagcaaccaaccccatttggcttataaagactcggttacagcttgatgcaaggaaccgcggggaaaggcgaatgggtgcttttgaatgtgttcgtaaagtgtatcagacagatggactaaaaggattttataggggcatgtctgcttcatatgctggtatatcagagactgttatccattttgttatttatgaaagtataaaacaaaaactactggaatataagactgcttctacaatggaaaatgatgaagagtctgtgaaagaagcatcagattttgtgggaatgatgctagctgctgccacctcaaaaacttgtgccacaactatagcatatccacatgttgtaagaacaagactacgtgaagagggaacaaaatacagatctttttttcagactctatctttgcttgttcaagaagaaggttatgggtctctttatcgtggtctgacaactcatctagtgagacagattccaaacacagccattatgatggccacctatgaattggtggtttacctactcaatggatagcagcacgaggactgctgtactgcaaaaaaagaagaccaaaagattacagtggaccatgggatacagaagccagcatggcagacagaagaaaaatagtttgggaacatgtaactattctaagtggaagttttgttgtaggaattatagtaatcacaccacattacttggcctttcggtaatgtgaaaaaaaaaaaaaacctcagagcctccaaggaaatgcctttagaagcactcctctctcaaaattgccattttctctaccatgtcccccagacacagttgggttttgttgatttatggcagtcttctaaacaaagccatccttaattttacatactgtattgtaactatccaaagatagtattggcagtcataaatttataacttctggcctttgtttaattccagtaaaataacagcaatgacaatgagatcgtcagtattattttcacatttccctgagaggacctggcacaatattttaaatttaattatttggcagtagtcactgtttttgacaaccaatgaaatagcgtctaaatatcttgtatattttttagcatcaaaatgttttggtttccactgctgacaggtgcttgttgtttagcctaatgtggatatttaaattgttaacataccaaacacacatggtaatagtttgggacaaaataactagtaaaatgttgatttctcggctttttcactgactgcggcatgtcctcgtgtcttctctgattttgtggtacatgaatgaatgcatttatctttttagtgacttactagttacgaacttgaattatcacctctttgtcatacttaagtatcatttacataaagtgtaaaagattttttcacttttgaatctttacctacttgctttcacattaagaatttgaacttttgagttttttccaggtctatatataatagattacatttattttgtaaagaaaatagtaatttaaagttttgccattttaaggtgacaatatttgggacagtataaatattatagacaagggcccccttgctgtctgctttagcaggtagtgacattaattgacttatagttttgtgtaaatgaacaaactgcttttgacaagaaatttattctgtcctagtttcctgcgtggtaaatcatagaaagattcaagttcatttgggttaaatgtgctaataggatgtagcttttaaattctgctattgagtcagctgtaccttttaatactttaaatgtgttatttgtatggcccttataaaggtgtttgctgtaattctgttaaaagacttcgcctatgccatactggtgtataaaaactgccgcaattggacgccggtgtggtactcatttcagtatacctgaactgtacattttgtgcaatggctttatctaaaagaatgacgcttcgtgaaagcactttgtggccttttttgggggggagggtgagagagtaggagagaataccatgttaagattaaaaaaaaaaacaaaaacattggtcacgtattaggcagaaacagtgttcataacatttttctgggttttaaatatgttgtttcggatatccttaatataaatgttttaggtattctgtgtaccctgtcgtacccccaacattatagaatattgcagcgtgtcattgcaagctttctctgctgtcaccagtgaaacatagtgccctgttaaattcccccactttaacttccttgtgatcaacagtaactggatgtttttgaggtgctcaattggaataaaaatattccaatctatttggagaccaaaggcaaaatcagttttcttacctttggaattattcgtaccttttatggtaaatttcagctttgacatgtattatgaggaacgtaccaaaaaccggtttgtaacaaatctgtagagaaggtctgaatctatcgtgtttgccttttcaggtgccatttctactgcctaatacagtgccatttgccttgtgaagacccataaacattcattgtgttgaatgtaagatagagactctccctagtcttactgatctcagtaccccacaaatgattaagaatgatatgaaaaccagcagctaaggaacatcttattatttagttgtagcatattcataacaagtgtccttcaaggataaacatatattctctatttgtatttagcaagtaaaacttgtgttgacctttagtgcattatattcagcttttaacagtattatgtatgtactggaaagcaaagaaatcttagagtcttggacattgtttatttgtgcaacaactagaaaggagcaatgaagtttatttcagttgtatttttccctaagcacaatctgcaatagtttatgtatgacagagataattcaaaaaggaaaactatatataaaagttgtatataaagtttgtctctgaaatatttctttgaagtttttaaaaaatcgactcatgtttaaaaacaaaaacacatattcagagcattggacttttttaacttgttttcatctgtttatcatgacttttttatttctggtgtagagtccacattatttagtttgttgtacttttaaatttcaaagttcaaatctgaagaattagcgtttgtgatttcgggataccatgcagtggttttaatcccaggaaaaaaactatcaccaaaagttcgtttgattctcattatgtaactttgtagaaccatcctttctagatgggtccaccacagtgaatttgtaactttgaagtcaggatagaatatcattagattatctgtgagatagcattactatgttaggaccagcagagtttgggttggtaaaaataatgtttgctctattactgggttacagacatttcagcatttttaggttggttttaaatcactaaaaatatttattcggatttgaaggatttaagtgctaaaaatcaatccatttcttgcccttcaataattgtccatgcctgccttttgttgtttacatgctcttctgcccagactgttagtaatctagggaccccctttggagctgataagtacagttcagccttttctcctcaaatatataatgactttaacattcctaagaatataggtatttctgaatgatttaaatttgaggaattttaatacataaaatacaatgtacaaactttctgcccactcagatctcttctccatcatgtacttagtatttcccattaacctacacactgatttttatgctactccttgtagaaacaaaattctggtttgactcagtttttgtgtttataaacttttggaatgtgtaccccgtttatgtgaagaattatgacctatcagtcatagctaaatagtgaacctcaaaagtgttaacttttgactattcatgtgaggtttggtatcttgcatttatgtacatggctgtaaattatgtgcatttactctgtatttatgttatctagctgacttttacttgaattgttcaaattttaaaaattaaaatacgctca

SEQ ID NO: 196898 - protein, 796 aa, Artificial Sequence
  derived and/or modified sequence
MLAPLRNAPGREGATSPSPPTDATGSLGEWDVDRNVKTEGWVSKERISKLHRLRMADILSQSETLASQDLSGDFKKPALPVSPAARSKAPASSSSNPEEVQKEGPTALQDSNSGEPDIPPPQPDCGDFRSLQEEQSRPPTAVSSPGGPARAPPYQEPPWGGPATAPYSLETLKGGTILGTRSLKGTSYCLFGRLSGCDVCLEHPSVSRYHAVLQHRASGPDGECDSNGPGFYLYDLGSTHGTFLNKTRIPPRTYCRVHVGHVVRFGGSTRLFILQGPEEDREAESELTVTQLKELRKQQQILLEKKMLGEDSDEEEEMDTSERKINAGSQDDEMGCTWGMGEDAVEDDAEENPIVLEFQQEREAFYIKDPKKALQGFFDREGEELEYEFDEQGHSTWLCRVRLPVDDSTGKQLVAEAIHSGKKKEAMIQCSLEACRILDTLGLLRQEAVSRKRKAKNWEDEDFYDSDDDTFLDRTGLIEKKRLNRMKKAGKIDEKPETFESLVAKLNDAERELSEISERLKASSQVLSESPSQDSLDAFMSEMKSGSTLDGVSRKKLHLRTFELRKEQQRLKGLIKIVKPAEIPELKKTETQTTGAENKAKKLTLPLFGAMKGGSKFKLKTGTVGKLPPKRPELPPTLMRMKDEPEVEEEEEEEEEEEKEKEEHEKKKLEDGSLSRPQPEIEPEAAVQEMRPPTDLTHFKETQTHENMSQLSEEEQNKDYQDCSKTTSLCAGPSASKNEYEKSRGELKKKKTPGPGKLPPTLSSKYPEDDPDYCVWVPPEGQSGDGRTHLNDKYGY

SEQ ID NO: 196899 - DNA, 2391 bp, Artificial Sequence
  derived and/or modified sequence
atgctcgccccactgagaaatgccccaggcagggagggcgctactagcccgagccctcccaccgatgccaccggcagcctgggggagtgggacgtggatagaaatgttaagacagagggttgggtgtctaaggagcggatcagtaagttgcatagactgagaatggcagacatactctctcagtctgaaactctggcttcacaggacctctcaggagattttaagaagcctgctctacctgtgagccctgccgctagatccaaggctcccgcttcaagcagttcaaacccagaagaagtgcaaaaagaagggccaaccgccctgcaagactccaacagcggggagcccgacatacccccccctcaaccagactgcggggattttcgcagcttacaggaagagcagtcgcgtccacccaccgccgttagcagccccggcggcccagcacgcgcccctccataccaagaaccaccatggggtgggccagcaacagctccatactccctcgagacattgaaaggaggcaccatcctcggcacacggtctctcaagggaaccagctattgtctgtttgggcgactgtctggttgcgacgtgtgcctggaacatccctctgtgtcaaggtatcacgctgtgctgcagcatcgcgcttctggtcccgatggagagtgcgacagcaacgggccaggattctacttgtacgatttaggctctactcatggaaccttcctgaacaaaaccagaataccgcccaggacttattgtcgcgtccacgtgggccatgtggtcagattcggtggctccacccgtctgttcatccttcagggacccgaagaagaccgggaggccgagtcagaactgaccgtcactcagttgaaggagctgcggaaacagcagcagatactgctagaaaagaaaatgctaggggaagactcagacgaagaggaagagatggatacttctgaacggaagataaacgcaggcagccaggatgatgaaatgggctgtacctggggaatgggcgaagacgccgtcgaggacgatgctgaggaaaaccccatcgtgcttgaattccagcaggagcgcgaggccttctacataaaagatcccaaaaaggctttacagggtttttttgacagggaaggagaggaactcgagtatgagtttgacgagcagggccactcgacctggctctgtcgggtccgactgcctgtcgacgatagcaccgggaagcagttggttgccgaagcaatacacagcggaaaaaagaaagaggccatgattcagtgctcactggaagcatgtcgtatcctggatacactcgggctgctgagacaggaagcagttagccgtaagcggaaagctaagaactgggaagatgaggacttctacgattccgacgatgacacgtttcttgaccgcaccggccttatcgagaaaaaacggttgaatcgcatgaaaaaagccggaaagatcgacgaaaaacctgagacctttgaaagtctagtggcaaagctgaacgatgcggagcgcgagttgtctgagatctccgagagactgaaggcctcctcacaggtgctgtctgagagcccatcccaggactctctggacgcttttatgtctgagatgaagtcgggttctacattggacggggtgagccgcaagaagctgcaccttcgcaccttcgaactgagaaaagaacaacaaaggctgaaagggcttataaaaattgtgaaacccgctgagataccagagttaaagaagactgagacacaaactacaggcgccgaaaacaaagctaagaaactcaccttgcctttgtttggggcaatgaagggaggcagcaaattcaagctgaagaccgggactgtgggcaaactgccacccaagcggcccgaactgccgcccactctgatgcgcatgaaagatgagcccgaggtggaggaagaggaagaagaggaggaggaagaagagaaggagaaggaagagcacgaaaaaaagaaactggaggatgggtcactatcaaggccccagccagaaattgaaccagaggctgccgtccaagaaatgcgccccccaacggatctaacccacttcaaggagacccagacgcacgagaatatgtcacagctcagcgaggaggagcagaacaaggattaccaggattgtagcaagaccacctcactctgcgcaggtccctctgcatccaagaacgaatacgaaaagtccaggggggagttaaagaaaaaaaagacccccgggcctggcaaactgccccccactctgtcatccaagtaccccgaggatgacccggattattgcgtttgggtccccccggaaggccaatcaggggatggtaggacccacctaaacgataaatatggctattag

SEQ ID NO: 196900 - DNA, 2391 bp, Artificial Sequence
  derived and/or modified sequence
atgctggcccccctgagaaatgcccctggccgggagggcgccaccagccccagccccccaacagatgccaccggcagcctgggggagtgggatgtggacagaaatgtgaagacagagggctgggtgtccaaggagcgcatcagcaagctgcaccggctgaggatggctgacatcctgagccagagcgagaccctggccagccaggacctgagcggggacttcaagaagccagccctgcctgtgtccccagctgcccggagcaaggccccagccagcagcagcagcaaccctgaggaggtgcagaaggagggccccacagccctgcaggacagcaacagcggggagccagacatccccccaccccagcctgactgtggggacttccgcagcctgcaggaggagcagagccggcccccaacagctgtgagcagccctgggggccctgcccgggccccaccctaccaggagcccccctggggcggccctgccacagccccctacagcctggagaccctgaagggcggcaccatcctgggcaccaggagcctgaagggcaccagctactgcctgtttggccgcctgagcggctgtgatgtgtgcctggagcaccccagcgtgagccgctaccacgctgtgctgcagcaccgggccagcggcccagatggagaatgtgacagcaatggacctggcttctacctgtatgacctgggcagcacccacggcaccttcctgaacaagacccgcatcccccccaggacctactgccgggtgcacgtgggccacgtggtgcgctttggaggcagcaccaggctcttcatcctgcagggcccagaagaagatcgggaggccgagagcgagctgactgtgacccagctgaaggagctgaggaagcagcagcagatcctgctggagaagaagatgctgggggaggacagtgatgaggaggaggagatggacaccagcgagaggaagatcaatgccggcagccaggatgatgagatgggctgcacctggggcatgggagaagatgctgtggaggatgatgctgaggagaaccccatcgtgctggagttccagcaggagcgggaggccttctacatcaaggaccccaagaaggccctgcagggcttctttgaccgggagggggaggagctggagtatgaatttgatgagcagggccacagcacctggctgtgccgggtgcggctgcctgtggatgacagcacaggcaagcagctggtggccgaggccatccacagcggcaagaagaaggaggccatgatccagtgcagcctggaggcctgccgcatcctggacaccctgggcctgctgcggcaggaggccgtgtccaggaagaggaaggccaagaactgggaggatgaggacttctatgacagtgatgatgacaccttcctggacagaacaggcctcatcgagaagaagaggctgaacaggatgaagaaggccggcaagattgatgagaagccagagacctttgagagcctggtggccaagctgaatgatgctgagcgggagctgtctgagatcagcgagcggctgaaggccagcagccaggtgctgtctgagagccccagccaggacagcctggatgccttcatgtctgagatgaagagcggcagcaccctggatggagtgtccaggaagaagctgcacctgcggacctttgagctgaggaaggagcagcagaggctgaagggcctcatcaagatcgtgaagccagctgagatccctgagctgaagaagacagagacccagaccaccggggctgagaacaaggccaagaagctgaccctgcccctgtttggagccatgaagggcggcagcaagttcaagctgaagacaggaacagtgggcaagctgccccccaagaggcctgagctgccccccaccctgatgaggatgaaggatgagcctgaggtggaggaggaggaggaggaggaggaggaggaggagaaggagaaggaggagcacgagaagaagaagctggaggatggcagcctgagccggccccagcctgagattgagcctgaggccgctgtgcaggagatgaggcctcccacagacctgacccacttcaaggagacccagacccatgagaacatgagccagctgtctgaggaggagcagaacaaggactaccaggactgcagcaagaccaccagcctgtgtgccggccccagcgccagcaagaatgaatatgagaagagcagaggagagctgaagaagaagaagaccccaggccctgggaagctgccccccaccctgagcagcaagtacccagaagatgatcctgactactgtgtgtgggtgcccccagagggccagagcggagatggccgcacccacctgaatgacaagtatggctactag

SEQ ID NO: 196901 - DNA, 2391 bp, Artificial Sequence
  derived and/or modified sequence
atgctggcccccctgcggaacgcccccggccgggagggcgccacctctccaagccccccgaccgacgccaccggctcactaggcgaatgggatgtcgatcggaatgtaaaaacggaggggtgggtctcgaaagagagaatctcaaaactgcataggttgcggatggctgatattttgagccagagcgagacactggcttctcaagacctatctggggacttcaagaagcccgcgcttcccgtgtcccctgcagcccggtctaaggcaccagcctcctcatcttctaaccccgaggaagtccagaaggagggtcccacggctttgcaggattcaaacagtggcgaacctgatatacctcctccgcagcccgactgtggcgattttcgctctctacaagaggagcagtctcgcccaccaacagcggtctcttcaccagggggtcctgcgcgagcaccgccataccaggagcccccctggggtggcccagccactgcaccatactccctggagactcttaagggagggacaattctgggcactagatctttgaaggggacgtcatattgcctgtttggacgattatcgggttgtgacgtatgtcttgagcatcccagtgtgtctaggtatcatgccgttcttcagcatcgggcttccggcccggatggtgaatgtgatagtaacggacccggcttctacctgtacgatctggggtccactcacggtacgttcttgaataagacgcggatccctccaagaacatactgccgagtgcatgtgggacacgtcgtgcgtttcggaggttcaactcgcttgttcatccttcagggtcccgaggaggaccgggaagcagaatctgaacttacagtcacgcagttgaaggaactacgtaaacagcagcagattttgctagagaaaaaaatgctgggagaagactccgatgaggaggaggagatggatacttccgagcgaaagattaacgctggaagtcaggatgacgagatggggtgcacatggggcatgggagaggacgccgttgaagatgatgcagaggagaaccccattgtgttagagttccagcaagagcgagaagcgttttatatcaaggacccaaaaaaagccctacaggggttcttcgatcgcgaaggggaggagctggagtacgagttcgatgagcaaggacattccacatggctctgccgcgtcagactcccagtagacgatagcactgggaagcagctggttgccgaagccatacatagtgggaaaaaaaaggaggccatgatccagtgctcactggaagcctgccgcattctggacaccctaggcctactgcgccaagaagcggtctctcgtaagcggaaggctaagaattgggaagatgaagacttctacgactccgacgacgacacttttttggatagaactggacttatcgagaaaaaacgtctgaatcggatgaaaaaggcggggaaaatagatgagaagcctgagacttttgaaagcctcgtagctaagcttaacgacgctgaacgcgagttatctgaaataagtgaaaggttgaaagcaagttcacaagtgctgtccgaaagcccgtctcaagactcattagatgctttcatgtcggagatgaaatccggtagtactctggatggcgtctccaggaaaaaactgcacctgagaactttcgagctcagaaaagaacaacagaggcttaaaggtctgataaagatcgtcaagccagccgagattccagagttgaaaaaaaccgaaacacagactaccggagcagaaaataaagcaaaaaagctcacgctgcccctcttcggagctatgaaaggggggagcaagtttaagctcaagaccggcactgtggggaagttgccacctaaacgacctgagctgccacctaccctcatgagaatgaaggacgagcccgaggttgaggaagaggaggaagaggaagaggaagaagaaaaggagaaggaggaacacgagaaaaagaagctcgaggatggctcactctcaagaccccaacccgaaatcgagcccgaggcggccgtgcaggagatgcgcccacccaccgacttgacgcacttcaaggaaacacagacacacgagaatatgtctcagttgagtgaagaagagcagaataaggactaccaggactgtagcaagaccacgagtctctgcgcaggcccaagtgctagtaagaacgagtacgagaagtccagaggagaattgaaaaaaaaaaagacaccggggccagggaaactgcccccaactctcagcagcaaataccccgaggacgatcccgattattgcgtgtgggtgcctcctgaaggccagagcggcgatggtcggacacacctcaacgataaatacggctattag

SEQ ID NO: 196902 - DNA, 2391 bp, Artificial Sequence
  derived and/or modified sequence
atgctagcccctctgcgtaacgccccaggacgggaaggtgcgactagtccatcccctcctaccgatgctactgggagcctgggcgagtgggatgtggatagaaatgtgaagaccgagggttgggtgtccaaagagcgcatatctaaactgcacaggctccgcatggctgacatcctgagccagtccgaaaccttggcaagccaggatctctctggtgactttaaaaagcctgcactcccggtgagcccagctgcccgaagcaaggctcctgcttcttcatccagtaatcccgaggaggttcaaaaagaaggaccaactgccctccaggatagtaattccggagaaccagatatcccaccccctcagcctgactgtggagatttcaggagtctgcaagaagagcagagtcgtcctcctacagccgtgagcagtccaggcggacccgctcgggctccaccctaccaggagcctccttgggggggtcctgcaactgccccttatagcttagagaccctaaagggtggcactatcttgggcacacggtccctcaaaggcacatcctattgtctctttggcagactcagtggttgtgatgtttgtctggaacatccctctgtgtcaagatatcacgctgtccttcagcatcgagctagtggaccagatggtgaatgtgattcaaatggaccgggtttttatctttatgatctgggtagtactcatggcacttttttaaacaagaccagaatcccaccgagaacgtattgtagggtgcacgtgggccacgtggtaagattcgggggatcaacccgcctgtttatcctgcagggaccagaggaggatagggaggcggaatccgagctcacagtgacgcagctgaaggagctgcgtaagcagcaacagattctactagagaaaaaaatgctgggagaggatagtgatgaggaggaggagatggatacgtcagagaggaagattaatgcgggatcccaggacgacgagatgggatgtacatggggcatgggggaggatgccgtagaggacgacgctgaggagaatcctatcgttctggagtttcagcaggaaagagaagccttctatattaaggatcccaagaaggccctgcaggggtttttcgaccgggagggcgaagagctggagtacgagttcgacgagcagggacactctacttggctgtgcagagtaagattgcccgtcgacgacagtacggggaaacagctggtggctgaggctatccactccgggaaaaagaaagaagccatgattcagtgtagtctcgaggcatgccgcattcttgacaccctgggactcctcaggcaggaggcagtgtctcgcaagcgtaaggcaaagaattgggaagacgaagatttctacgacagcgatgatgacacttttttggataggactggcctgatcgagaaaaagagactaaatcggatgaagaaagccggtaaaatagacgaaaagcctgaaactttcgagtctcttgtggctaagctaaatgacgccgagcgggaactgtctgagattagcgagcggctgaaggcttctagccaggtattgtccgagtctcctagccaggacagcctcgacgcattcatgtctgagatgaagtcagggagcactctggacggggtcagcagaaaaaaactccacctcaggacgtttgagctgagaaaagaacaacagaggttaaaaggccttatcaagattgttaaacccgctgagatacctgagctcaaaaaaactgagacccagaccaccggggctgaaaacaaagctaaaaaactaacactcccgttatttggggcaatgaagggaggctctaagttcaagttgaagaccggtaccgtcggcaagcttccacccaagaggcctgaattacctccaactcttatgcgaatgaaggatgaacctgaagtcgaggaagaggaggaagaagaggaagaagaggagaaagaaaaagaggagcatgagaaaaaaaagctggaggacggatctctgtcccgcccacaaccagaaatagagcccgaggcggctgtgcaggaaatgagacctcctacagaccttacccactttaaggagacccagacgcacgaaaatatgtcacagctgagtgaagaagagcagaacaaggattatcaggactgtagcaaaacaacaagcctgtgtgccggtcccagcgcttcgaagaacgagtatgagaaaagccgtggggagctcaaaaaaaagaagactcccggacctgggaaactgccccctactctgtctagcaaatatccggaagatgatcccgattattgtgtgtgggtcccccctgagggccaatctggggatggacgtacgcacctcaatgataaatacggttattag

SEQ ID NO: 196903 - DNA, 2959 bp, Artificial Sequence
  derived and/or modified sequence
aggtctggacctgaaccgagacaaggaggtaccacactattcactgctgcgtcgcagagcgggctgggcggctgtctggacctcgagaggcctgaggcaaggatcgcgtcagaccccgaaagctggtttgttgattagtgatctaagaccgccggaagcgcttcttctcaatcaagctatgcaacaggaagtcattacgatcccgttgtaacctctaaatatgtccccgttctgcacagcatcccgataaccgttttgtttttctcatattatgaccttctcatgttagcaccacttcgcaacgctccaggtcgtgaaggagcaacttcaccatcgccgcctacagacgccactgggagcttgggagagtgggacgtggacaggaacgtaaagaccgaagggtgggtttcgaaggagcggatttcgaagttgcaccggttgaggatggctgacattctctctcagtcagagaccctggcgtcgcaagacctcagtggggacttcaagaagccagctctgccggtgtccccagcggcgcggagtaaggccccggccagcagttcttcaaaccctgaggaggtacagaaggaagggcccactgcgttgcaggactccaattctggggagcccgacatccctcctcctcagccggactgcggtgattttaggagtctacaggaggagcagtcgcgccccccgacagcggtttcttcccctggcggtccagcccgggctcccccctaccaagagcctccatggggtggccctgccacagccccctacagcttagagaccctgaagggcggcactatccttggcacccgtagcttgaaagggacgagttactgccttttcgggaggctgtctggctgcgacgtgtgcctggagcacccttcggtgtctcggtaccacgcagtgctgcagcacagggcgtccggccctgacggagaatgcgacagcaacgggccgggcttctacctctacgatctgggaagcacccatggcacttttctcaacaaaactcgcatcccacctcgcacctactgtcgagtccacgttgggcatgttgttcgctttggaggcagcacccggctctttatcctgcagggaccagaggaagaccgagaggcagaatccgagttaacagtaacacagttgaaggaattgcgcaagcagcagcaaatattgttggagaagaagatgctaggagaagactcagatgaagaagaggaaatggatacctctgaaaggaagataaatgctggtagccaagatgatgagatgggttgcacctggggaatgggagaagatgcagtagaggatgatgctgaagagaaccctattgtcttagagtttcagcaggaaagggaggccttttatataaaggatcccaaaaaggctctccaaggcttttttgaccgagaaggagaagaattagaatatgaatttgatgaacagggacatagcacttggctctgcagggtgagattacctgtggacgattcaactggaaaacaactggtggctgaggccattcactcaggaaagaaaaaagaagcaatgatccagtgctcattggaagcttgtcggattcttgacactttgggattgcttcggcaggaagcagtatctcggaaaaggaaagccaagaactgggaagatgaagacttttatgatagtgatgatgacacatttcttgataggactggcctgattgagaagaagcgtctgaacagaatgaagaaggctggcaagattgatgagaagccagagacctttgaatcattggttgcaaaattaaatgatgctgaaagggaactttctgaaatttctgagagattgaaagcctcaagccaagttctatcagagtctccatctcaggattctttagatgcgttcatgtcagaaatgaaatcaggcagtacattagatggtgtgtcccggaagaaacttcacctgagaacttttgaactgaggaaagaacaacagagacttaaagggttaataaaaattgtaaagccagcagagattccagaactaaaaaagactgaaactcagactacaggtgcagaaaacaaagctaaaaagcttacattgcctctatttggtgccatgaaaggaggaagcaaattcaaattaaaaactggaacagtagggaagttaccccccaagcgtccagaactccctccaactctaatgagaatgaaagatgagcctgaagtagaagaggaggaggaagaggaagaggaagaagagaaagaaaaggaggagcatgaaaagaaaaaactggaggatggaagcctcagtaggccacagccagagatagagccagaagcagcagtgcaggaaatgaggcctcccacagatctcacacattttaaagaaacccaaacccatgaaaacatgtctcaacttagcgaggaagaacagaataaagattatcaagactgtagcaaaaccacttcattgtgcgcaggaccctcagcatcaaagaatgaatatgagaaaagcagaggtgaattgaagaaaaagaaaacacctggtccaggcaaacttccaccaacactttcttccaaatatcctgaagatgacccagactactgtgtgtgggtcccacctgaaggtcaaagtggagatggcagaacccatcttaatgacaagtatggctattgattgcttcagaatcccaaaagaaaaccttgtggaccatgtgacatggaatatttgggataatgtatcaaattgaatggccagagaagtttagatgattatttgtaagatctggtgactggcttttcgttctgtgttcttggcttcctaaatttatctgcccatatgattctcatgcatttgatatttatgtttaaaagtgtttatatatgtatgtaaaaagggaaccatatgttttgagaatttgtaaagtgagagacatgatcctattaaaataagaaggcaaaaa

SEQ ID NO: 196904 - DNA, 2391 bp, Artificial Sequence
  derived and/or modified sequence
atgctggcccccctgagaaacgcccccggcagagagggcgccaccagccccagcccccccaccgacgccaccggcagcctgggcgagtgggacgtggacagaaacgtgaagaccgagggctgggtgagcaaggagagaatcagcaagctgcacagactgagaatggccgacatcctgagccagagcgagaccctggccagccaggacctgagcggcgacttcaagaagcccgccctgcccgtgagccccgccgccagaagcaaggcccccgccagcagcagcagcaaccccgaggaggtgcagaaggagggccccaccgccctgcaggacagcaacagcggcgagcccgacatcccccccccccagcccgactgcggcgacttcagaagcctgcaggaggagcagagcagaccccccaccgccgtgagcagccccggcggccccgccagagcccccccctaccaggagcccccctggggcggccccgccaccgccccctacagcctggagaccctgaagggcggcaccatcctgggcaccagaagcctgaagggcaccagctactgcctgttcggcagactgagcggctgcgacgtgtgcctggagcaccccagcgtgagcagataccacgccgtgctgcagcacagagccagcggccccgacggcgagtgcgacagcaacggccccggcttctacctgtacgacctgggcagcacccacggcaccttcctgaacaagaccagaatcccccccagaacctactgcagagtgcacgtgggccacgtggtgagattcggcggcagcaccagactgttcatcctgcagggccccgaggaggacagagaggccgagagcgagctgaccgtgacccagctgaaggagctgagaaagcagcagcagatcctgctggagaagaagatgctgggcgaggacagcgacgaggaggaggagatggacaccagcgagagaaagatcaacgccggcagccaggacgacgagatgggctgcacctggggcatgggcgaggacgccgtggaggacgacgccgaggagaaccccatcgtgctggagttccagcaggagagagaggccttctacatcaaggaccccaagaaggccctgcagggcttcttcgacagagagggcgaggagctggagtacgagttcgacgagcagggccacagcacctggctgtgcagagtgagactgcccgtggacgacagcaccggcaagcagctggtggccgaggccatccacagcggcaagaagaaggaggccatgatccagtgcagcctggaggcctgcagaatcctggacaccctgggcctgctgagacaggaggccgtgagcagaaagagaaaggccaagaactgggaggacgaggacttctacgacagcgacgacgacaccttcctggacagaaccggcctgatcgagaagaagagactgaacagaatgaagaaggccggcaagatcgacgagaagcccgagaccttcgagagcctggtggccaagctgaacgacgccgagagagagctgagcgagatcagcgagagactgaaggccagcagccaggtgctgagcgagagccccagccaggacagcctggacgccttcatgagcgagatgaagagcggcagcaccctggacggcgtgagcagaaagaagctgcacctgagaaccttcgagctgagaaaggagcagcagagactgaagggcctgatcaagatcgtgaagcccgccgagatccccgagctgaagaagaccgagacccagaccaccggcgccgagaacaaggccaagaagctgaccctgcccctgttcggcgccatgaagggcggcagcaagttcaagctgaagaccggcaccgtgggcaagctgccccccaagagacccgagctgccccccaccctgatgagaatgaaggacgagcccgaggtggaggaggaggaggaggaggaggaggaggaggagaaggagaaggaggagcacgagaagaagaagctggaggacggcagcctgagcagaccccagcccgagatcgagcccgaggccgccgtgcaggagatgagaccccccaccgacctgacccacttcaaggagacccagacccacgagaacatgagccagctgagcgaggaggagcagaacaaggactaccaggactgcagcaagaccaccagcctgtgcgccggccccagcgccagcaagaacgagtacgagaagagcagaggcgagctgaagaagaagaagacccccggccccggcaagctgccccccaccctgagcagcaagtaccccgaggacgaccccgactactgcgtgtgggtgccccccgagggccagagcggcgacggcagaacccacctgaacgacaagtacggctactag

SEQ ID NO: 196905 - protein, 164 aa, Artificial Sequence
  derived and/or modified sequence
MKCKPNQTRTYDPEGFKKRAACLCFRSEREDEVLLVSSSRYPDRWIVPGGGMEPEEEPGGAAVREVYEEAGVKGKLGRLLGVFEQNQDRKHRTYVYVLTVTELLEDWEDSVSIGRKREWFKVEDAIKVLQCHKPVHAEYLEKLKLGGSPTNGNSMAPSSPDSDP

SEQ ID NO: 196906 - DNA, 495 bp, Artificial Sequence
  derived and/or modified sequence
atgaagtgcaagcccaaccagaccagaacctacgaccccgagggcttcaagaagagagccgcctgcctgtgcttcagaagcgagagagaggacgaggtgctgctggtgagcagcagcagataccccgacagatggatcgtgcccggcggcggcatggagcccgaggaggagcccggcggcgccgccgtgagagaggtgtacgaggaggccggcgtgaagggcaagctgggcagactgctgggcgtgttcgagcagaaccaggacagaaagcacagaacctacgtgtacgtgctgaccgtgaccgagctgctggaggactgggaggacagcgtgagcatcggcagaaagagagagtggttcaaggtggaggacgccatcaaggtgctgcagtgccacaagcccgtgcacgccgagtacctggagaagctgaagctgggcggcagccccaccaacggcaacagcatggcccccagcagccccgacagcgacccctag

SEQ ID NO: 196907 - DNA, 495 bp, Artificial Sequence
  derived and/or modified sequence
atgaagtgcaaaccaaatcagaccagaacctatgacccagagggattcaagaagcgagcagcttgtttgtgctttaggtccgaacgggaggacgaggtcctgcttgtttcatcttccagatatccagacagatggatcgtcccgggcggaggaatggagccagaggaggagcccggtggggcagccgtgagagaggtgtatgaggaggctggggtgaaagggaaactgggtagactactgggggtgttcgagcagaaccaggacagaaagcatagaacctacgtctatgtgctcaccgtgaccgaacttcttgaggattgggaggattccgtctccatcggccgcaagagggagtggtttaaggttgaagacgcgattaaggtccttcagtgccataaaccggttcatgccgagtatctcgaaaaactgaagctgggcgggagtccaaccaatggcaacagtatggctccatcatcgcctgactccgatccttag

SEQ ID NO: 196908 - DNA, 495 bp, Artificial Sequence
  derived and/or modified sequence
atgaagtgcaagcccaaccagaccaggacctatgaccctgagggcttcaagaagagagctgcctgcctgtgcttccgctctgagcgggaggatgaggtgctgctggtgagcagcagccgctacccagaccgctggatcgtgcctgggggcggcatggagcctgaggaggagcccggcggcgctgctgtgcgggaggtgtatgaggaggccggcgtgaagggcaagctgggccgcctgctgggcgtgtttgagcagaaccaggacaggaagcacaggacctacgtgtatgtgctgactgtgacagagctgctggaggactgggaggacagcgtgtccattggaaggaagcgggagtggttcaaggtggaggatgccatcaaggtgctgcagtgccacaagcctgtgcatgctgagtacctggagaagctgaagctgggcggcagccccaccaatggaaacagcatggcccccagcagcccagacagcgacccctag

SEQ ID NO: 196909 - DNA, 495 bp, Artificial Sequence
  derived and/or modified sequence
atgaagtgcaagcccaaccagacccggacctacgaccccgagggctttaaaaagagggccgcctgcttgtgtttccggagcgaacgcgaggacgaggtgcttttggtatccagcagtcgctatcccgatagatggatcgtccccggcggcggcatggagcctgaagaggagcccgggggcgctgccgtccgtgaggtgtacgaagaggctggagttaaaggcaaattgggtcggctcctgggggtattcgaacagaatcaggatcgcaaacaccgcacctacgtctacgttcttaccgtcaccgagctactggaagattgggaggatagcgtatcaataggaaggaagcgggaatggtttaaggttgaagatgccatcaaggttcttcagtgccataaacccgttcacgcggagtacctggaaaaacttaagctggggggttctccaaccaacggcaactccatggcaccctcctctcccgactctgatccttag

SEQ ID NO: 196910 - DNA, 2385 bp, Artificial Sequence
  derived and/or modified sequence
gggcagacggaggcgcctctctttccccgcccctcgcctcggccctttctcttcccagcacctcggctgttccccggcggcggcagcggcagcggcggcccacacagcagcgagaggcgagaggaggctgcctcgaggaggctgcctcgaggatgaagtgcaaacccaaccagacgcggacctacgaccccgaggggttcaagaagcgggcggcgtgcctgtgcttccggagcgaacgcgaggacgaggtcctgttagtgagtagcagccggtacccggaccgctggatcgtgccgggcgggggcatggagcccgaggaggagccgggcggtgcggcggtccgagaggtgtacgaagaagcgggagtcaaggggaagttaggccggctcctgggcgtcttcgaacagaaccaggatcgcaagcacagaacgtacgtgtatgtactgactgtcacggagctgctggaggattgggaagattcggttagcattgggaggaagcgagagtggttcaaagtcgaagatgccatcaaggttctccagtgccacaagcccgtgcacgccgaatatctggagaaactaaagctgggcggttccccaaccaatggaaactccatggccccatcctcgccagatagcgatccctaatgaacagcaaagatgttcagtattgtgctgaaagaaacattgatgtgaacccagtgatcagtggaattgtcaagtacaggtgagcacttctgtgttcccaagaagacagctcatctggtttcttcctgcatcttgggacactccttccctgtctataccactgactcttgctctggttgttgtactcttatacgtgaatagactcttaattcagcacctatagccttttgttgtgcttttttgatgtgtctgccttcattagactatgatgtctttgagagcaaagactatttttccttactctttgcatattctgcatctgagacactacttgaaatatggttggcatcactgaaggttctttgattcaattaatattttgtaatcaccgtgtggcaaaacattccccttccaatctggtgctagtagagtatatgctatctaggcaccatgtgtgtggcttttgtgtatcaggtgtttcagaaatatttcaagacagttgtaagatgtttgaggacaagaattattactcctatttctatgtcataccacacagtagctgcacagttttaagattatgccatcacctagggtaatgttttgtagaatcagtccttcgtgtaacaactctagtgtttttgtactgttgatgatttgcttaaattttattcaaaaactatcacttgctataaaggtaattgtaaaaataaatacagtggacgcaaaataatgttgtgagtttttataaaaataaattttaaaatgatatataagacatttttttgcaatgcctgccctaaccacttcttacatgtcatcttaacatctctttgaggaaacactgtttcctcattttacagatttaacatactgtattatttgatgccagagccaacaggctatatcataggcagtttccaaacttaattatgccatttagtttgtctagatttcttttgcctctctcactgatccatttggctgtagttttcatcccttttccagtacacacagctagctcctcatcctacctggtttctgcatatgagaatgcagagggctgagagagggcaaaattgttgtcatttagaaaaggcatttaggaaagaggctgctattagaggggaacacaaagtgaaggtttttttaaaaaagaggacttgcatcagctgcctccagaacaattttaagaaaataacaaagatgtttagaagaaatcttacggagtttgccatgggatgtgtgatatcagcagtcttcagctccttacaaattaccaaaagtggttctaatatgctagtttgtttgattttttcttttatattataaagcaattgcatcgataaaagcttggactccattttagtgtgacactcttcctcatgataccagtgaaatgtattgattgtgtccccagttgttacataatttgaaataaaaatataacttcttgatttattgttttttaagatgtgatatggtactgtggttatgttgttttaaaaaatgattatcttttagagaagtatactgaaaaatgtacaggtgaaatgatatgttactggtattcgcttcaaaatcatctgagtgtggggtaattgagtacatagatgaaacaagattggccataaattggtaattgctgaagctgtgtgatggatgtttgagagttcattatactattctctatacttttgtatatgtttgaaattttccataataaaaattgaaaaaagta

SEQ ID NO: 196911 - DNA, 495 bp, Artificial Sequence
  derived and/or modified sequence
atgaagtgcaaacccaatcaaacgcgcacgtacgaccccgaaggatttaaaaaaagagccgcatgcctgtgtttcagatccgagcgcgaggatgaggttctgctcgtatcttcaagcaggtaccctgatcgctggatagtgcctggaggaggaatggagcctgaggaagagccagggggtgctgcagtacgcgaagtatatgaggaggcaggcgtgaaggggaagttagggagacttctgggcgtcttcgagcagaatcaagaccgcaaacaccgcacatatgtgtacgtcttaacggtgacagaacttttggaggactgggaagactctgtgtccattggacgcaagcgggagtggttcaaggtggaggacgccataaaggtgctccagtgtcacaagccagtccacgccgaatatttagagaagttaaaattgggcggaagtccaaccaacggaaacagcatggctccctcatcccccgactcagatccatag

SEQ ID NO: 196912 - protein, 706 aa, Artificial Sequence
  derived and/or modified sequence
MGRKVTVATCALNQWALDFEGNLQRILKSIEIAKNRGARYRLGPELEICGYGCWDHYYESDTLLHSFQVLAALVESPVTQDIICDVGMPVMHRNVRYNCRVIFLNRKILLIRPKMALANEGNYRELRWFTPWSRSRHTEEYFLPRMIQDLTKQETVPFGDAVLVTWDTCIGSEICEELWTPHSPHIDMGLDGVEIITNASGSHQVLRKANTRVDLVTMVTSKNGGIYLLANQKGCDGDRLYYDGCAMIAMNGSVFAQGSQFSLDDVEVLTATLDLEDVRSYRAEISSRNLAASRASPYPRVKVDFALSCHEDLLAPISEPIEWKYHSPEEEISLGPACWLWDFLRRSQQAGFLLPLSGGVDSAATACLIYSMCCQVCEAVRSGNEEVLADVRTIVNQISYTPQDPRDLCGRILTTCYMASKNSSQETCTRARELAQQIGSHHISLNIDPAVKAVMGIFSLVTGKSPLFAAHGGSSRENLALQNVQARIRMVLAYLFAQLSLWSRGVHGGLLVLGSANVDESLLGYLTKYDCSSADINPIGGISKTDLRAFVQFCIQRFQLPALQSILLAPATAELEPLADGQVSQTDEEDMGMTYAELSVYGKLRKVAKMGPYSMFCKLLGMWRHICTPRQVADKVKRFFSKYSMNRHKMTTLTPAYHAENYSPEDNRFDLRPFLYNTSWPWQFRCIENQVLQLERAEPQSLDGVD

SEQ ID NO: 196913 - protein, 446 aa, Artificial Sequence
  derived and/or modified sequence
MGISGQEVLTATLDLEDVRSYRAEISSRNLAASRASPYPRVKVDFALSCHEDLLAPISEPIEWKYHSPEEEISLGPACWLWDFLRRSQQAGFLLPLSGGVDSAATACLIYSMCCQVCEAVRSGNEEVLADVRTIVNQISYTPQDPRDLCGRILTTCYMASKNSSQETCTRARELAQQIGSHHISLNIDPAVKAVMGIFSLVTGKSPLFAAHGGSSRENLALQNVQARIRMVLAYLFAQLSLWSRGVHGGLLVLGSANVDESLLGYLTKYDCSSADINPIGGISKTDLRAFVQFCIQRFQLPALQSILLAPATAELEPLADGQVSQTDEEDMGMTYAELSVYGKLRKVAKMGPYSMFCKLLGMWRHICTPRQVADKVKRFFSKYSMNRHKMTTLTPAYHAENYSPEDNRFDLRPFLYNTSWPWQFRCIENQVLQLERAEPQSLDGVD

SEQ ID NO: 196914 - DNA, 2121 bp, Artificial Sequence
  derived and/or modified sequence
atgggccgcaaggtgactgtggcaacctgtgccttgaaccagtgggctcttgattttgagggcaatctgcagcggatactaaagtcaatcgaaatcgccaagaacaggggggcccgatataggctgggccctgaattggaaatctgtgggtatggctgctgggaccactactacgaatcagacactttactccacagtttccaggtcctggccgctcttgttgaaagtccagtcactcaagacatcatctgcgacgtgggaatgcccgtcatgcaccgcaatgtgaggtacaactgcagggttatctttcttaacagaaaaatcttactgattcgccccaagatggccttagccaacgagggcaactacagggaactccgctggtttaccccgtggtcccgctcccgccatactgaggaatatttcttgccacggatgattcaggacctcacgaaacaggagacagttcctttcggggatgccgtcctggttacctgggacacatgcattggctcagaaatttgtgaggagctgtggacccctcactctccccacatagatatgggtcttgatggagttgagattataaccaacgcttctgggagccaccaggtgctgcggaaggctaatacaagggtggatctggtgacaatggtgacgagtaagaatggcggcatttatctcctcgcgaaccagaaaggatgcgacggggatcgcctctactacgacgggtgcgccatgattgctatgaacgggtctgtgtttgcccaagggtcccagttttctcttgatgacgtggaggtcctgacagcaactttggatctggaggacgtgaggtcctaccgggccgagatttccagtcgaaatttagcagccagtcgggcgagtccttatcctcgggtgaaggttgacttcgctctctcttgccatgaggatctgcttgcacctatctccgagcctatcgaatggaagtatcactcacctgaagaggagatatccctcggacccgcatgctggctgtgggacttcctgcgtagatcccagcaggctggattcttgcttccactgtccggcggagttgattccgccgcaaccgcttgcctcatctattcaatgtgttgtcaggtttgcgaagccgtcaggagcgggaatgaagaagtgctggcggatgttcggaccattgtgaaccagatatcatataccccacaggatccgcgggatctgtgcggcaggattctgaccacctgctatatggcctccaaaaatagctctcaagaaacatgtactcgagctcgagaactggctcagcagataggctcacatcatatttcactcaatatcgatcccgcggtaaaggcagtgatggggatctttagcttagtgacaggcaagtctccgctgtttgccgcccacggagggagctcccgagagaacctggctctgcaaaacgtccaagcaaggataagaatggttctggcctatctgtttgcccagctgtccctgtggagcaggggcgtgcatggagggctcctggttctcggctcggctaacgtggatgaatcgctgcttgggtacctcacgaaatacgactgtagctctgctgatattaatcccatcggaggaatttcaaaaaccgacctgcgagcattcgtccagttttgtattcagaggtttcaactgccggccctgcaaagtattctcctagcccctgcaactgccgaactggagcctctggcagacggacaggtctcccagaccgacgaggaggatatgggcatgacctatgctgagttgagtgtctacggaaagctgcgaaaagtcgccaaaatgggaccctattctatgttttgcaaattgctgggcatgtggagacatatttgtacaccacgacaggtggctgataaggtcaaaaggtttttttccaaatactccatgaatagacataaaatgaccaccttgacccccgcttatcatgcagagaattactcccccgaagacaataggttcgacctgagaccttttctgtacaacacctcctggccatggcagttccggtgtattgaaaaccaagtgttgcagctggaaagggccgagccgcaatcactggacggggtcgattag

SEQ ID NO: 196915 - DNA, 1341 bp, Artificial Sequence
  derived and/or modified sequence
atgggaattagtggtcaagaggtgctcacagccacattagatttagaagatgtgaggagctacagagcagaaatttcctcaaggaatctcgccgcttccagggcatcaccatatccccgagtgaaggttgacttcgccctctcctgccacgaggacctgcttgccccgatctccgaacctattgagtggaaatatcacagtccagaggaggaaatcagccttggtcccgcgtgttggctgtgggactttttaagacgttcccaacaggctggatttctgctacctctctccgggggagtcgactccgccgccaccgcttgccttatatactcaatgtgttgtcaggtgtgtgaggctgttcgatccggcaatgaagaagttttagcggatgtccggacgatagtcaaccagattagctacacgccccaggacccaagagacttgtgtggccgaatcttgaccacttgttacatggcttccaaaaattcgagtcaggagacatgtactcgggctcgcgaactggcccaacagataggttcccaccacatatctttgaacatcgatcctgctgtgaaagctgtgatgggtatattcagcctggtgaccggtaagtcccccctcttcgctgcccacggcggcagcagtcgcgagaatctagcactgcagaacgtccaggctcgcattaggatggtgctggcctatttatttgcccagctgtctctttggagccgcggcgttcacggtggattactggtgctggggagtgcaaacgtggacgagtccctacttgggtaccttactaagtacgactgctccagcgcagacattaaccctatcggcggcatttctaaaacggacttgagagccttcgtacagttttgtatacagcgctttcaactgcccgccttgcaaagcatactcctggcaccagccacagccgagctcgagcccctggcagatggccaagtttctcagacagatgaggaagacatggggatgacatatgccgagctttccgtatacggtaaactcaggaaggtggctaagatggggccttactccatgttctgcaagctgctcggaatgtggcgccatatctgtactccccggcaggtcgctgataaggtcaaaaggttcttcagcaaatattccatgaacaggcataagatgacaacactaacccccgcttaccacgcagagaattactctcccgaggataatcgttttgacctgcgtccatttttgtacaatactagttggccctggcaatttagatgtattgaaaatcaagttcttcagttggaaagagctgaaccacagtctctggacggggtagattag

SEQ ID NO: 196916 - DNA, 2121 bp, Artificial Sequence
  derived and/or modified sequence
atgggcaggaaggtgacagtggccacctgtgccctgaaccagtgggccctggactttgagggcaacctgcagaggatcctgaagagcattgagatcgccaagaacagaggagcccgctaccgcctgggccctgagctggagatctgtggctacggctgctgggaccactactatgaaagtgacaccctgctgcacagcttccaggtgctggccgccctggtggagagccctgtgacccaggacatcatctgtgatgtgggcatgcctgtgatgcacagaaatgtgcgctacaactgcagggtcatcttcctgaacaggaagatcctgctgatccggcccaagatggccctggccaatgaaggcaactaccgggagctgcgctggttcaccccctggagccgcagccgccacacagaggagtacttcctgcccaggatgatccaggacctgaccaagcaggagaccgtgccctttggagatgctgtgctggtgacctgggacacctgcatcggcagcgagatctgtgaggagctgtggaccccccacagcccccacatcgacatgggcctggatggagtggagatcatcaccaatgccagcggcagccaccaggtgctgaggaaggccaacaccagggtggacctggtgaccatggtgaccagcaagaatggaggcatctacctgctggccaaccagaagggctgtgatggagaccggctgtactatgatggctgtgccatgattgccatgaatggatctgtgtttgcccagggcagccagttcagcctggatgatgtggaggtgctgacagccaccctggacctggaggatgtgcgcagctacagagctgagatcagcagcaggaacctggccgccagccgggccagcccctacccccgggtgaaggtggactttgccctgagctgccacgaggacctgctggcccccatcagcgagcccatcgagtggaagtaccacagccctgaggaggagatcagcctgggccctgcctgctggctgtgggacttcctgcggcgcagccagcaggccggcttcctgctgcccctgtctggaggagtggacagcgctgccacagcctgcctgatctacagcatgtgctgccaggtgtgtgaggccgtgcgctctggaaatgaggaggtgctggctgatgtgaggaccatcgtgaaccagatctcctacaccccccaggacccccgggacctgtgtggccgcatcctgaccacctgctacatggccagcaagaacagcagccaggagacctgcacccgggcccgggagctggcccagcagatcggcagccaccacatcagcctgaacattgatcctgctgtgaaggctgtgatgggcatcttcagcctggtgacaggcaagagccccctgtttgctgcccatggaggcagcagccgggagaacctggccctgcagaatgtgcaggcccgcatccgcatggtgctggcctacctgtttgcccagctgagcctgtggagcagaggagtgcatggaggcctgctggtgctgggcagcgccaacgtggatgagagcctgctgggctacctgaccaagtatgactgcagcagcgctgacatcaaccccatcggcggcatcagcaagacagacctgcgggcctttgtgcagttctgcatccagcgcttccagctgcctgccctgcagagcatcctgctggccccagccacagctgagctggagcccctggctgatggccaggtgtcccagacagatgaggaggacatgggcatgacctacgccgagctgtctgtgtatggcaagctgaggaaggtggccaagatgggcccctacagcatgttctgcaagctgctgggcatgtggaggcacatctgcaccccccggcaggtggccgacaaggtgaagcgcttcttcagcaagtacagcatgaacagacacaagatgaccaccctgaccccagcctaccacgccgagaactacagccctgaggacaacagatttgacctgcggcccttcctgtacaacacctcctggccctggcagttccgctgcatcgagaaccaggtgctgcagctggagagagctgagccccagagcctggatggagtggactag

SEQ ID NO: 196917 - DNA, 1341 bp, Artificial Sequence
  derived and/or modified sequence
atgggcatcagcggccaggaggtgctgacagccaccctggacctggaggatgtgcgcagctacagagctgagatcagcagcaggaacctggccgccagccgggccagcccctacccccgggtgaaggtggactttgccctgagctgccacgaggacctgctggcccccatcagcgagcccatcgagtggaagtaccacagccctgaggaggagatcagcctgggccctgcctgctggctgtgggacttcctgcggcgcagccagcaggccggcttcctgctgcccctgtctggaggagtggacagcgctgccacagcctgcctgatctacagcatgtgctgccaggtgtgtgaggccgtgcgctctggaaatgaggaggtgctggctgatgtgaggaccatcgtgaaccagatctcctacaccccccaggacccccgggacctgtgtggccgcatcctgaccacctgctacatggccagcaagaacagcagccaggagacctgcacccgggcccgggagctggcccagcagatcggcagccaccacatcagcctgaacattgatcctgctgtgaaggctgtgatgggcatcttcagcctggtgacaggcaagagccccctgtttgctgcccatggaggcagcagccgggagaacctggccctgcagaatgtgcaggcccgcatccgcatggtgctggcctacctgtttgcccagctgagcctgtggagcagaggagtgcatggaggcctgctggtgctgggcagcgccaacgtggatgagagcctgctgggctacctgaccaagtatgactgcagcagcgctgacatcaaccccatcggcggcatcagcaagacagacctgcgggcctttgtgcagttctgcatccagcgcttccagctgcctgccctgcagagcatcctgctggccccagccacagctgagctggagcccctggctgatggccaggtgtcccagacagatgaggaggacatgggcatgacctacgccgagctgtctgtgtatggcaagctgaggaaggtggccaagatgggcccctacagcatgttctgcaagctgctgggcatgtggaggcacatctgcaccccccggcaggtggccgacaaggtgaagcgcttcttcagcaagtacagcatgaacagacacaagatgaccaccctgaccccagcctaccacgccgagaactacagccctgaggacaacagatttgacctgcggcccttcctgtacaacacctcctggccctggcagttccgctgcatcgagaaccaggtgctgcagctggagagagctgagccccagagcctggatggagtggactag

SEQ ID NO: 196918 - DNA, 2773 bp, Artificial Sequence
  derived and/or modified sequence
agacggggcggggcgatccgtaggcagggcctgacgccgcagtcctccttggccggagcctcaacggatgggcggggagggggcggggccgggcaacccggaaggtccggcgtcccagccgcctacctcgctgggaccctggtcttgctgtcccccgctggcctcctgcccaagcgactgcggccaggatgggccggaaggtgaccgtggccacctgcgcactcaaccagtgggccctggacttcgagggcaatttgcaaagaattttaaagagtattgaaattgccaaaaacagaggagcaagatacaggcttggaccagagctggaaatatgcggctacggatgttgggatcattattacgagtcggacaccctcttgcactcgtttcaagtcctagcggcccttgtggagtctcccgtcactcaggacatcatctgcgacgtggggatgcctgtaatgcaccgaaacgtccgctacaactgcagagtgatattcctcaacaggaagatcctgctcatcagacccaagatggccttggccaatgaaggcaactaccgcgagctgcgctggttcaccccgtggtcgaggagtcggcacacagaggagtactttctgcctcggatgatacaggacctgacaaagcaggaaaccgtacccttcggagatgcggtgctggtgacatgggacacctgcattggaagtgagatctgtgaggagctctggacaccccacagcccgcacatcgacatgggcctggatggcgtggagatcatcaccaacgcctcgggcagccaccaagtgctgcgcaaagccaacaccagggtggatctcgtgactatggtcaccagcaagaacggtgggatttacttgctggccaaccagaagggttgtgacggggaccgcctgtactacgacggctgtgccatgattgccatgaacggaagcgtctttgctcaaggatcccagttttctctggatgacgtggaagtcctgacggccacgctggatctggaggacgtccggagctacagggcggagatttcatctcgaaacctggcggccagcagggcgagcccctaccccagagtgaaggtggactttgccctctcgtgccacgaggacttgctggcacccatctctgagcccatcgagtggaaataccacagccctgaggaggagataagccttggacctgcctgctggctctgggattttttaagacgaagtcaacaggcagggtttttgctgcccttgagtggcggggtggacagcgcagccaccgcctgcctcatctactccatgtgctgccaggtctgcgaggccgtgaggagtggaaatgaggaagtgctggctgatgtccgcaccatcgtgaaccagatcagctacaccccccaggatccccgagacctctgtggacgcatactgaccacctgctacatggccagcaagaactcctcccaggagacgtgcacccgggccagagagttggcccagcagattggaagccaccacatcagtctcaacatcgatccagccgtgaaggccgtcatgggcatcttcagcctggtgacggggaagagccctctgtttgcagctcatggaggaagcagcagggaaaacctggcgctgcaaaatgtgcaggctcgaatacggatggtcctcgcctatctgtttgctcagttgagcctctggtctcggggtgtccacggtgggctcctcgtgctgggatccgccaacgtggatgagagtctcctgggctacctgaccaagtacgactgctccagtgcggacatcaaccccataggcgggatcagcaagacggacctcagggccttcgtccagttctgcatccagcgcttccagcttcctgccctgcagagcatcctgttggcgccggccaccgcagagctggagcccttggctgatggacaggtgtcccagaccgacgaggaagatatggggatgacatatgcggagctctcggtctatgggaaactcaggaaggtggccaagatggggccctacagcatgttctgcaaactcctcggcatgtggagacacatctgcaccccgagacaggtcgctgacaaagtgaagcggtttttctccaagtactccatgaacagacacaagatgaccacgctcacacccgcgtaccacgccgagaactacagccctgaggacaacaggtttgatctgcgaccatttctgtacaacacaagctggccttggcagtttcggtgcatagaaaatcaggtgctacagctcgagagggcagagccacagtccctggacggcgtggactgaggccggttccttcctggaggcctcctgtcctcggggaccccagcacctcatcatcagcattgctggagccaagggtaggagccctacactaggagcccaggatgggacggcgcatcagccgagagggagggaacttttcagtcaaattcctcaaaaagaggctggaataaagcctgggcttaaaaagaggctggaatccaatgcacatgattttgacctcccgccagcgtgcgcttccccgcgaagtctggcattctccgaaggaagccgcctgggtaggagggttccaaccgccgccccgtgtggcatctttgctgcaggaacaagaacagtagctcccgggaagggaggggtgtcatgagcagaaaatgaaggagagaagaccttctctcccacccacacacaccttcctgtcctgggttccagaaggttctggggagatggtccctgcagagctttcttcc

SEQ ID NO: 196919 - DNA, 2304 bp, Artificial Sequence
  derived and/or modified sequence
atcattaaccgcgacagagctggaagggctttgaagagaaggattaagttcctgctgatgggaagtgtggtcctctccccgttcacgtcagagccacaggcacattggtggtcgtgttgattggcaggtgtgttggcaatcaatcacctgccccaggacccccgcaggttcccggccccacatcaagccaccaaatcggagtcctcgggggtctgtatatttagtgagcaccaggcagttgtttcgtgcattagaatccgggagccgttgccttacacgtctctagagttcctgatgttgcctgagagctccgtcgtaggctgtggccacaggcctgctgtattcagagtggccgcgctgtcctcaggctcgggccactgccctccaccaggtcctccgtggtgcacctgaaatggtcaacagaagtcttgtgacacgtggaatcatttcagagtcaccccttctgcctcctgctcaagcaacagacctgccgatcacccccgtcgggcccgcgtttctcagggtcttcctaatcccctgggctttccggcttgtcgtgtgcctggagtcaggccgccgtgcggcaggctgttaacctagcctcggggagagtgggatggagccaccttctcatggaacgatcctcgccttccctcatctccattgttttatggcttcacacggaccgtggctttctgcatggaagcttggtggccagggtgctgtcactttgggaagcagccagagaaccacaggatgcgtgaatcggtctccttgtcttcatgggcatctccggccaggaagtcctgacggccacgctggatctggaggacgtccggagctacagggcggagatttcatctcgaaacctggcggccagcagggcgagcccctaccccagagtgaaggtggactttgccctctcgtgccacgaggacttgctggcacccatctctgagcccatcgagtggaaataccacagccctgaggaggagataagccttggacctgcctgctggctctgggattttttaagacgaagtcaacaggcagggtttttgctgcccttgagtggcggggtggacagcgcagccaccgcctgcctcatctactccatgtgctgccaggtctgcgaggccgtgaggagtggaaatgaggaagtgctggctgatgtccgcaccatcgtgaaccagatcagctacaccccccaggatccccgagacctctgtggacgcatactgaccacctgctacatggccagcaagaactcctcccaggagacgtgcacccgggccagagagttggcccagcagattggaagccaccacatcagtctcaacatcgatccagccgtgaaggccgtcatgggcatcttcagcctggtgacggggaagagccctctgtttgcagctcatggaggaagcagcagggaaaacctggcgctgcaaaatgtgcaggctcgaatacggatggtcctcgcctatctgtttgctcagttgagcctctggtctcggggtgtccacggtgggctcctcgtgctgggatccgccaacgtggatgagagtctcctgggctacctgaccaagtacgactgctccagtgcggacatcaaccccataggcgggatcagcaagacggacctcagggccttcgtccagttctgcatccagcgcttccagcttcctgccctgcagagcatcctgttggcgccggccaccgcagagctggagcccttggctgatggacaggtgtcccagaccgacgaggaagatatggggatgacatatgcggagctctcggtctatgggaaactcaggaaggtggccaagatggggccctacagcatgttctgcaaactcctcggcatgtggagacacatctgcaccccgagacaggtcgctgacaaagtgaagcggtttttctccaagtactccatgaacagacacaagatgaccacgctcacacccgcgtaccacgccgagaactacagccctgaggacaacaggtttgatctgcgaccatttctgtacaacacaagctggccttggcagtttcggtgcatagaaaatcaggtgctacagctcgagagggcagagccacagtccctggacggcgtggactgaggccggttccttcctggaggcctcctgtcctcggggaccccagcacctcatcatcagcattgctggagccaagggtaggagccctacactaggagcccaggatgggacggcgcatcagccgagagggagggaacttttcagtcaaattcctcaaaaagaggctggaataaagcctgggctt

SEQ ID NO: 196920 - DNA, 2121 bp, Artificial Sequence
  derived and/or modified sequence
atgggccggaaggtgaccgtggccacctgcgccctgaaccagtgggctctcgactttgagggtaacttgcagaggatcctgaagtcaattgaaatagccaagaatcggggcgcgcgctaccggttggggccagaactcgagatctgtggatatggctgctgggatcactattacgagtccgatacgctgctgcacagctttcaagtgttagccgccctggtggagagccctgtcacccaagatatcatttgcgacgtgggtatgcctgtcatgcaccgcaatgttcgctataactgccgcgtcatttttctcaatcgcaaaatcctgctgatccggcctaaaatggccctcgccaatgaggggaattaccgggaactcaggtggttcacaccttggagcagaagccgtcacacagaagaatatttcttgcccaggatgatccaagacttgacaaagcaagagacggtaccctttggcgacgctgtccttgtcacgtgggatacatgcatcggcagcgaaatatgcgaagagctttggactccccactccccccacatcgatatgggcttggacggagtcgaaattattactaatgcgagcgggtcgcaccaagtgcttagaaaggccaataccagggttgatttagtaaccatggttacttctaaaaatggcggcatttacttgcttgcaaatcagaagggatgtgatggcgatagactttattatgacgggtgcgccatgatagcgatgaacgggtctgtattcgcccagggcagccagttcagcttggatgacgtcgaggtgctgacagcaacattagacctcgaggacgtgcgcagttaccgcgccgagatatcgtccaggaatctagctgccagcagggcctccccctatcccagggtcaaagtcgattttgccttgagctgccacgaggaccttcttgcccccatttcagaaccaatcgaatggaaatatcatagccctgaggaggaaatctccttgggacccgcgtgttggctctgggatttcctgagacgtagccagcaggcgggcttccttcttcctctgtctgggggggtcgacagcgccgcaactgcctgtttaatatattccatgtgctgtcaggtgtgtgaagccgtgcgctctggaaacgaggaggtactggcagatgttagaaccatcgtcaatcaaatttcctacaccccccaggacccaagagatctatgtggcagaattctgactacttgttacatggctagtaaaaacagttcccaggagacgtgtacccgtgcacgtgaactcgctcagcaaatagggagtcatcatatatcacttaatatcgatcctgccgttaaagcagtcatgggcatcttttctctagtgacggggaagtctcctttgtttgcggctcacggggggtcgagcagagaaaatctggctctccagaatgttcaggctaggattcggatggttctggcctacctcttcgcccagctctcactttggtcaagaggcgtgcacggcggactcctggtgctgggcagcgcgaacgtcgatgagtctttgcttggttacctaactaaatatgattgttcatctgccgatattaatcctataggtggcattagcaagactgacttgcgtgctttcgtgcagttctgcatacagagatttcagctgcccgcactccaatccattttgctggcaccagctaccgccgagctcgaacctctggctgatggccaggtaagtcagaccgacgaagaagatatgggaatgacctatgctgaactttcagtctacggcaagctgaggaaagtagcaaaaatggggccctactctatgttctgcaagctgctgggtatgtggcgtcacatttgtaccccacggcaggtggctgacaaagtgaaaaggtttttctctaagtactctatgaataggcacaagatgacgacactgaccccagcctatcacgcagagaactactccccagaagacaatcggtttgatttgcgcccctttctctacaatacctcatggccatggcagttccgttgtattgagaaccaagtactgcaattggaacgagcagaaccacagagtttagacggcgtggactag

SEQ ID NO: 196921 - DNA, 1341 bp, Artificial Sequence
  derived and/or modified sequence
atgggcatcagcggccaggaggtgctgaccgccaccctggacctggaagacgtgcggtcctatcgcgctgagatctcttcccggaatttggccgcttctagagcttccccttatcccagagtaaaagtcgattttgctctttcctgccacgaagacctactagctccaatctcagaacccattgaatggaaataccactctccagaggaggagattagccttggaccagcctgttggctttgggacttcctgagaagaagccagcaggccggttttctgttgcccctttcaggtggcgttgacagtgccgcaacagcgtgcctcatctattctatgtgctgtcaggtatgcgaagccgtacgatcggggaacgaagaggtcctcgcggacgtgcgaaccattgtgaaccaaatctcttacacaccccaagacccccgggatctgtgtgggcggatactgacaacctgctatatggcttcgaaaaatagttcacaggaaacctgtacaagggccagagaactcgcccagcaaattggttctcaccatatttctctcaatattgaccctgctgtgaaagctgtgatgggcatattctctcttgtgaccggcaaatctcctttgttcgcggctcacggcggatctagccgagaaaacttggccctgcaaaacgtgcaggcccgcatccgcatggttctggcctacttattcgcccagttgagcttatggagcaggggggtccatggggggctgttggtcttagggtcagcgaacgttgacgaaagcctgcttgggtacttgacgaagtatgattgtagtagtgcagatataaacccaatcggcggaatctctaagacagatctcagggccttcgtccagttttgtatccagcgatttcagctaccagcccttcagagcatactgcttgccccggctacagctgaactggaacctctcgcagacggccaggtatcccagaccgatgaagaggatatggggatgacttacgctgaactgtcggtttatggtaagttgaggaaggtggccaagatgggaccatattctatgttctgtaagctgcttggaatgtggcggcacatctgcacaccacgccaggtggctgacaaagtcaaaaggttcttcagtaagtactccatgaataggcataagatgacaacccttacccctgcatatcatgcagagaactactctcctgaagataatcgatttgaccttagacctttcctgtacaataccagctggccgtggcaattccgttgcatcgaaaaccaggtgttgcagttagaaagagctgaaccccagagtctggacggcgttgactag

SEQ ID NO: 196922 - DNA, 2121 bp, Artificial Sequence
  derived and/or modified sequence
atgggcagaaaagtcactgtggcaacctgcgctctgaaccagtgggcattggattttgaggggaacttacaacggattctgaaatcaatcgagatcgctaagaacagaggagcccgttatcggttagggccagagcttgaaatctgtggatacgggtgttgggatcactactatgagtcggacaccctgctccatagttttcaggttctcgccgcactcgtggaatcaccggttacccaggacataatctgtgatgtgggaatgccggtgatgcaccgcaatgtgcgctataactgtagggtgatatttctaaatcggaagattctgctgatacgcccaaaaatggcactggcaaatgagggaaactacagagaacttaggtggtttaccccctggtcaaggtcaaggcatactgaggagtatttcctgccaagaatgattcaagatttaaccaagcaggagactgtcccattcggagacgctgtgcttgtgacatgggatacctgtattgggagcgagatctgcgaagagctatggactccccactctccacatatcgacatgggcctcgacggtgtggaaataatcaccaatgccagtggctcacatcaggtgttgcggaaggccaacaccagagttgatttagtaacgatggtcacctctaagaacggtggcatctacctactcgccaatcagaaaggttgtgacggagaccgcttgtattacgacggatgtgctatgatcgcgatgaatggctctgtgttcgcccaggggtcccagttctcactcgatgacgtggaagtgctcaccgccacactggacttagaagacgttaggtcatatcgggcagagatttcctctaggaatctagctgcgagcagggcgtcaccctatcctcgtgttaaagtcgacttcgcgctttcttgtcacgaagatctcttagccccaatctcagaaccaatagaatggaagtaccacagtcccgaggaagaaatttcgttggggcctgcatgctggctgtgggattttttgcggcgatctcaacaagcaggcttcctactccctctttccggaggagtagacagcgccgcaacagcatgtcttatttacagtatgtgctgtcaggtctgtgaggcggtaaggtctggaaacgaagaggttttggccgatgtccgcaccatcgtcaatcagatcagttatacgccacaggatccaagggatctgtgcggcagaattctaaccacatgttatatggcatccaagaattcctctcaggaaacctgtacccgagccagagaactcgctcagcagatcggaagccatcacatttcattaaatattgaccccgctgtgaaggccgtgatgggcatcttctccctggtgactggcaagtctcccttgttcgctgcccatggtggatctagcagagagaacttagccctgcagaatgtccaggctaggattcgaatggtcctggcctacttgtttgcccagctgagcctatggtcacgaggggttcacggaggattgctggtgctgggttctgctaacgtagacgaatctcttttgggatacctgacgaagtacgactgttcaagcgccgatatcaatcctatagggggaataagcaaaaccgatttgagagcattcgtgcagttttgtatccagagattccagttgccagctctgcagtccattctgttggcccctgccacagccgagcttgagcccctcgcagatggccaggtaagccagactgatgaggaagatatgggcatgacttacgccgagctgtccgtgtacggaaagttgaggaaagtggcaaaaatgggtccgtatagtatgttttgtaaactgctgggaatgtggagacacatttgtaccccacgccaggtcgctgacaaggtgaagaggtttttctcaaagtacagcatgaatcgccataaaatgaccaccttaacccccgcataccatgctgagaactatagtcccgaagacaatcggttcgaccttagaccattcctgtataacacctcttggccctggcagttcagatgtattgagaaccaagtgttgcagttggagcgagctgaaccacaaagtctggacggtgtcgactag

SEQ ID NO: 196923 - DNA, 1341 bp, Artificial Sequence
  derived and/or modified sequence
atgggcatctccggccaggaggttctgaccgcaactctcgacctagaggacgtgaggagttaccgagccgaaataagctcacgtaacctcgctgctagtagggcgtcaccctaccctcgggtgaaagttgatttcgcactttcatgccatgaggatctcctcgccccaatctctgaacctatcgaatggaaatatcattctcctgaggaagaaatcagtctgggacctgcatgctggctttgggatttcctgcggaggagtcagcaggccggatttttgctgcctctcagcgggggtgtggacagcgccgctactgcttgtcttatctacagtatgtgctgccaggtctgtgaagcagtacgcagtgggaacgaggaggtgctcgccgatgtccgcacgattgtgaaccagatctcctataccccacaggaccctagggacttatgtggcaggattcttacaacgtgttacatggcctcgaagaattcttcccaggaaacctgtactcgcgcaagggagctcgcgcagcagatagggtcacaccatatctctctgaatatcgaccctgcagtgaaggcagttatgggaatatttagcttggtcactggcaaatcccctctctttgctgctcatggcggtagttctcgtgagaacttggccctgcagaacgtgcaggctcgaatccgtatggtcctggcctacttgtttgcgcaactcagcctttggagtcgcggagtccatgggggtcttttggtgctcggctccgccaacgtggacgaatcgttactcggctacctcaccaaatatgactgcagctccgcagatattaatcccattggtggaatctccaagacggacctgcgagctttcgttcaattttgcatccagagattccaactgcctgccctgcagtccattctcctcgctcctgcaacagctgagctcgagcctctcgccgatggccaggtctcacagaccgacgaagaggacatgggaatgacttacgccgaactttccgtgtacggaaaactcaggaaggtcgccaagatgggaccatattcaatgttttgtaaacttctcggtatgtggcggcatatatgcactcctagacaggtggccgacaaagtaaagagattctttagtaaatatagcatgaataggcataagatgacaacactcactcctgcctaccatgccgaaaactattcacccgaagacaaccgtttcgaccttaggcccttcctgtacaatacttcatggccctggcagttccgttgcatagaaaaccaggtgcttcagcttgagcgggctgaaccccagagcttggatggagtggactag

SEQ ID NO: 196924 - DNA, 2121 bp, Artificial Sequence
  derived and/or modified sequence
atgggcagaaaggtgaccgtggccacctgcgccctgaaccagtgggccctggacttcgagggcaacctgcagagaatcctgaagagcatcgagatcgccaagaacagaggcgccagatacagactgggccccgagctggagatctgcggctacggctgctgggaccactactacgagagcgacaccctgctgcacagcttccaggtgctggccgccctggtggagagccccgtgacccaggacatcatctgcgacgtgggcatgcccgtgatgcacagaaacgtgagatacaactgcagagtgatcttcctgaacagaaagatcctgctgatcagacccaagatggccctggccaacgagggcaactacagagagctgagatggttcaccccctggagcagaagcagacacaccgaggagtacttcctgcccagaatgatccaggacctgaccaagcaggagaccgtgcccttcggcgacgccgtgctggtgacctgggacacctgcatcggcagcgagatctgcgaggagctgtggaccccccacagcccccacatcgacatgggcctggacggcgtggagatcatcaccaacgccagcggcagccaccaggtgctgagaaaggccaacaccagagtggacctggtgaccatggtgaccagcaagaacggcggcatctacctgctggccaaccagaagggctgcgacggcgacagactgtactacgacggctgcgccatgatcgccatgaacggcagcgtgttcgcccagggcagccagttcagcctggacgacgtggaggtgctgaccgccaccctggacctggaggacgtgagaagctacagagccgagatcagcagcagaaacctggccgccagcagagccagcccctaccccagagtgaaggtggacttcgccctgagctgccacgaggacctgctggcccccatcagcgagcccatcgagtggaagtaccacagccccgaggaggagatcagcctgggccccgcctgctggctgtgggacttcctgagaagaagccagcaggccggcttcctgctgcccctgagcggcggcgtggacagcgccgccaccgcctgcctgatctacagcatgtgctgccaggtgtgcgaggccgtgagaagcggcaacgaggaggtgctggccgacgtgagaaccatcgtgaaccagatcagctacaccccccaggaccccagagacctgtgcggcagaatcctgaccacctgctacatggccagcaagaacagcagccaggagacctgcaccagagccagagagctggcccagcagatcggcagccaccacatcagcctgaacatcgaccccgccgtgaaggccgtgatgggcatcttcagcctggtgaccggcaagagccccctgttcgccgcccacggcggcagcagcagagagaacctggccctgcagaacgtgcaggccagaatcagaatggtgctggcctacctgttcgcccagctgagcctgtggagcagaggcgtgcacggcggcctgctggtgctgggcagcgccaacgtggacgagagcctgctgggctacctgaccaagtacgactgcagcagcgccgacatcaaccccatcggcggcatcagcaagaccgacctgagagccttcgtgcagttctgcatccagagattccagctgcccgccctgcagagcatcctgctggcccccgccaccgccgagctggagcccctggccgacggccaggtgagccagaccgacgaggaggacatgggcatgacctacgccgagctgagcgtgtacggcaagctgagaaaggtggccaagatgggcccctacagcatgttctgcaagctgctgggcatgtggagacacatctgcacccccagacaggtggccgacaaggtgaagagattcttcagcaagtacagcatgaacagacacaagatgaccaccctgacccccgcctaccacgccgagaactacagccccgaggacaacagattcgacctgagacccttcctgtacaacaccagctggccctggcagttcagatgcatcgagaaccaggtgctgcagctggagagagccgagccccagagcctggacggcgtggactag

SEQ ID NO: 196925 - DNA, 1341 bp, Artificial Sequence
  derived and/or modified sequence
atgggcatcagcggccaggaggtgctgaccgccaccctggacctggaggacgtgagaagctacagagccgagatcagcagcagaaacctggccgccagcagagccagcccctaccccagagtgaaggtggacttcgccctgagctgccacgaggacctgctggcccccatcagcgagcccatcgagtggaagtaccacagccccgaggaggagatcagcctgggccccgcctgctggctgtgggacttcctgagaagaagccagcaggccggcttcctgctgcccctgagcggcggcgtggacagcgccgccaccgcctgcctgatctacagcatgtgctgccaggtgtgcgaggccgtgagaagcggcaacgaggaggtgctggccgacgtgagaaccatcgtgaaccagatcagctacaccccccaggaccccagagacctgtgcggcagaatcctgaccacctgctacatggccagcaagaacagcagccaggagacctgcaccagagccagagagctggcccagcagatcggcagccaccacatcagcctgaacatcgaccccgccgtgaaggccgtgatgggcatcttcagcctggtgaccggcaagagccccctgttcgccgcccacggcggcagcagcagagagaacctggccctgcagaacgtgcaggccagaatcagaatggtgctggcctacctgttcgcccagctgagcctgtggagcagaggcgtgcacggcggcctgctggtgctgggcagcgccaacgtggacgagagcctgctgggctacctgaccaagtacgactgcagcagcgccgacatcaaccccatcggcggcatcagcaagaccgacctgagagccttcgtgcagttctgcatccagagattccagctgcccgccctgcagagcatcctgctggcccccgccaccgccgagctggagcccctggccgacggccaggtgagccagaccgacgaggaggacatgggcatgacctacgccgagctgagcgtgtacggcaagctgagaaaggtggccaagatgggcccctacagcatgttctgcaagctgctgggcatgtggagacacatctgcacccccagacaggtggccgacaaggtgaagagattcttcagcaagtacagcatgaacagacacaagatgaccaccctgacccccgcctaccacgccgagaactacagccccgaggacaacagattcgacctgagacccttcctgtacaacaccagctggccctggcagttcagatgcatcgagaaccaggtgctgcagctggagagagccgagccccagagcctggacggcgtggactag

SEQ ID NO: 196926 - protein, 706 aa, Artificial Sequence
  derived and/or modified sequence
MKIFSESHKTVFVVDHCPYMAESCRQHVEFDMLVKNRTQGIIPLAPISKSLWTCSVESSMEYCRIMYDIFPFKKLVNFIVSDSGAHVLNSWTQEDQNLQELMAALAAVGPPNPRADPECCSILHGLVAAVETLCKITEYQHEARTLLMENAERVGNRGRIICITNAKSDSHVRMLEDCVQETIHEHNKLAANSDHLMQIQKCELVLIHTYPVGEDSLVSDRSKKELSPVLTSEVHSVRAGRHLATKLNILVQQHFDLASTTITNIPMKEEQHANTSANYDVELLHHKDAHVDFLKSGDSHLGGGSREGSFKETITLKWCTPRTNNIELHYCTGAYRISPVDVNSRPSSCLTNFLLNGRSVLLEQPRKSGSKVISHMLSSHGGEIFLHVLSSSRSILEDPPSISEGCGGRVTDYRITDFGEFMRENRLTPFLDPRYKIDGSLEVPLERAKDQLEKHTRYWPMIISQTTIFNMQAVVPLASVIVKESLTEEDVLNCQKTIYNLVDMERKNDPLPISTVGTRGKGPKRDEQYRIMWNELETLVRAHINNSEKHQRVLECLMACRSKPPEEEERKKRGRKREDKEDKSEKAVKDYEQEKSWQDSERLKGILERGKEELAEAEIIKDSPDSPEPPNKKPLVEMDETPQVEKSKGPVSLLSLWSNRINTANSRKHQEFAGRLNSVNNRAELYQHLKEENGMETTENGKASRQ

SEQ ID NO: 196927 - protein, 605 aa, Artificial Sequence
  derived and/or modified sequence
MAALAAVGPPNPRADPECCSILHGLVAAVETLCKITEYQHEARTLLMENAERVGNRGRIICITNAKSDSHVRMLEDCVQETIHEHNKLAANSDHLMQIQKCELVLIHTYPVGEDSLVSDRSKKELSPVLTSEVHSVRAGRHLATKLNILVQQHFDLASTTITNIPMKEEQHANTSANYDVELLHHKDAHVDFLKSGDSHLGGGSREGSFKETITLKWCTPRTNNIELHYCTGAYRISPVDVNSRPSSCLTNFLLNGRSVLLEQPRKSGSKVISHMLSSHGGEIFLHVLSSSRSILEDPPSISEGCGGRVTDYRITDFGEFMRENRLTPFLDPRYKIDGSLEVPLERAKDQLEKHTRYWPMIISQTTIFNMQAVVPLASVIVKESLTEEDVLNCQKTIYNLVDMERKNDPLPISTVGTRGKGPKRDEQYRIMWNELETLVRAHINNSEKHQRVLECLMACRSKPPEEEERKKRGRKREDKEDKSEKAVKDYEQEKSWQDSERLKGILERGKEELAEAEIIKDSPDSPEPPNKKPLVEMDETPQVEKSKGPVSLLSLWSNRINTANSRKHQEFAGRLNSVNNRAELYQHLKEENGMETTENGKASRQ

SEQ ID NO: 196928 - DNA, 2121 bp, Artificial Sequence
  derived and/or modified sequence
atgaagatcttcagcgagagccacaagaccgtgttcgtggtggaccactgcccctacatggccgagagctgcagacagcacgtggagttcgacatgctggtgaagaacagaacccagggcatcatccccctggcccccatcagcaagagcctgtggacctgcagcgtggagagcagcatggagtactgcagaatcatgtacgacatcttccccttcaagaagctggtgaacttcatcgtgagcgacagcggcgcccacgtgctgaacagctggacccaggaggaccagaacctgcaggagctgatggccgccctggccgccgtgggcccccccaaccccagagccgaccccgagtgctgcagcatcctgcacggcctggtggccgccgtggagaccctgtgcaagatcaccgagtaccagcacgaggccagaaccctgctgatggagaacgccgagagagtgggcaacagaggcagaatcatctgcatcaccaacgccaagagcgacagccacgtgagaatgctggaggactgcgtgcaggagaccatccacgagcacaacaagctggccgccaacagcgaccacctgatgcagatccagaagtgcgagctggtgctgatccacacctaccccgtgggcgaggacagcctggtgagcgacagaagcaagaaggagctgagccccgtgctgaccagcgaggtgcacagcgtgagagccggcagacacctggccaccaagctgaacatcctggtgcagcagcacttcgacctggccagcaccaccatcaccaacatccccatgaaggaggagcagcacgccaacaccagcgccaactacgacgtggagctgctgcaccacaaggacgcccacgtggacttcctgaagagcggcgacagccacctgggcggcggcagcagagagggcagcttcaaggagaccatcaccctgaagtggtgcacccccagaaccaacaacatcgagctgcactactgcaccggcgcctacagaatcagccccgtggacgtgaacagcagacccagcagctgcctgaccaacttcctgctgaacggcagaagcgtgctgctggagcagcccagaaagagcggcagcaaggtgatcagccacatgctgagcagccacggcggcgagatcttcctgcacgtgctgagcagcagcagaagcatcctggaggacccccccagcatcagcgagggctgcggcggcagagtgaccgactacagaatcaccgacttcggcgagttcatgagagagaacagactgacccccttcctggaccccagatacaagatcgacggcagcctggaggtgcccctggagagagccaaggaccagctggagaagcacaccagatactggcccatgatcatcagccagaccaccatcttcaacatgcaggccgtggtgcccctggccagcgtgatcgtgaaggagagcctgaccgaggaggacgtgctgaactgccagaagaccatctacaacctggtggacatggagagaaagaacgaccccctgcccatcagcaccgtgggcaccagaggcaagggccccaagagagacgagcagtacagaatcatgtggaacgagctggagaccctggtgagagcccacatcaacaacagcgagaagcaccagagagtgctggagtgcctgatggcctgcagaagcaagccccccgaggaggaggagagaaagaagagaggcagaaagagagaggacaaggaggacaagagcgagaaggccgtgaaggactacgagcaggagaagagctggcaggacagcgagagactgaagggcatcctggagagaggcaaggaggagctggccgaggccgagatcatcaaggacagccccgacagccccgagccccccaacaagaagcccctggtggagatggacgagaccccccaggtggagaagagcaagggccccgtgagcctgctgagcctgtggagcaacagaatcaacaccgccaacagcagaaagcaccaggagttcgccggcagactgaacagcgtgaacaacagagccgagctgtaccagcacctgaaggaggagaacggcatggagaccaccgagaacggcaaggccagcagacagtag

SEQ ID NO: 196929 - DNA, 1818 bp, Artificial Sequence
  derived and/or modified sequence
atggccgccctggccgccgtgggcccccccaaccccagagccgaccccgagtgctgcagcatcctgcacggcctggtggccgccgtggagaccctgtgcaagatcaccgagtaccagcacgaggccagaaccctgctgatggagaacgccgagagagtgggcaacagaggcagaatcatctgcatcaccaacgccaagagcgacagccacgtgagaatgctggaggactgcgtgcaggagaccatccacgagcacaacaagctggccgccaacagcgaccacctgatgcagatccagaagtgcgagctggtgctgatccacacctaccccgtgggcgaggacagcctggtgagcgacagaagcaagaaggagctgagccccgtgctgaccagcgaggtgcacagcgtgagagccggcagacacctggccaccaagctgaacatcctggtgcagcagcacttcgacctggccagcaccaccatcaccaacatccccatgaaggaggagcagcacgccaacaccagcgccaactacgacgtggagctgctgcaccacaaggacgcccacgtggacttcctgaagagcggcgacagccacctgggcggcggcagcagagagggcagcttcaaggagaccatcaccctgaagtggtgcacccccagaaccaacaacatcgagctgcactactgcaccggcgcctacagaatcagccccgtggacgtgaacagcagacccagcagctgcctgaccaacttcctgctgaacggcagaagcgtgctgctggagcagcccagaaagagcggcagcaaggtgatcagccacatgctgagcagccacggcggcgagatcttcctgcacgtgctgagcagcagcagaagcatcctggaggacccccccagcatcagcgagggctgcggcggcagagtgaccgactacagaatcaccgacttcggcgagttcatgagagagaacagactgacccccttcctggaccccagatacaagatcgacggcagcctggaggtgcccctggagagagccaaggaccagctggagaagcacaccagatactggcccatgatcatcagccagaccaccatcttcaacatgcaggccgtggtgcccctggccagcgtgatcgtgaaggagagcctgaccgaggaggacgtgctgaactgccagaagaccatctacaacctggtggacatggagagaaagaacgaccccctgcccatcagcaccgtgggcaccagaggcaagggccccaagagagacgagcagtacagaatcatgtggaacgagctggagaccctggtgagagcccacatcaacaacagcgagaagcaccagagagtgctggagtgcctgatggcctgcagaagcaagccccccgaggaggaggagagaaagaagagaggcagaaagagagaggacaaggaggacaagagcgagaaggccgtgaaggactacgagcaggagaagagctggcaggacagcgagagactgaagggcatcctggagagaggcaaggaggagctggccgaggccgagatcatcaaggacagccccgacagccccgagccccccaacaagaagcccctggtggagatggacgagaccccccaggtggagaagagcaagggccccgtgagcctgctgagcctgtggagcaacagaatcaacaccgccaacagcagaaagcaccaggagttcgccggcagactgaacagcgtgaacaacagagccgagctgtaccagcacctgaaggaggagaacggcatggagaccaccgagaacggcaaggccagcagacagtag

SEQ ID NO: 196930 - DNA, 2121 bp, Artificial Sequence
  derived and/or modified sequence
atgaagatattttcagagagccataagaccgtttttgttgtagatcattgtccttatatggcagaaagctgcaggcagcacgtggagttcgacatgctcgtgaaaaacagaacccagggtataatcccactcgcccccattagcaagagcctgtggacctgttcagtggagagttccatggaatactgccgcatcatgtatgatatcttcccttttaaaaagcttgtaaacttcattgttagcgatagcggtgctcacgtcctaaattcctggacccaagaggatcagaatttgcaggaactaatggcagccttggctgcagtgggcccacctaacccacgggccgatccggagtgttgttctattctgcacggtctcgtggccgccgtggagaccctctgcaagatcacggagtaccaacacgaggcccggacccttctcatggaaaacgcagagagagtgggcaacaggggaagaattatttgtattactaacgctaagagcgactcacacgtgcgtatgttggaggattgtgtccaagagaccatccatgaacataataagcttgctgccaacagcgaccacctgatgcagatccaaaaatgtgagctagtgctgattcacacttacccagtaggggaagattcacttgtgtcggatcgcagtaagaaagagttaagccctgtgttaaccagtgaagtacattcagttcgggctggccggcacctagcaacaaagctgaatatcttggtccagcagcactttgatcttgcttctaccacgatcaccaacatccctatgaaggaggaacaacacgcaaatacatcggctaattatgatgtagagctactccaccataaagacgcccacgtcgattttctcaagagcggcgatagccacttgggcggcggctccagagagggctcctttaaagagactatcacccttaagtggtgtacccccaggaccaataatattgagctccattattgtactggcgcttacagaatctcacctgtggatgtgaatagtagaccgtccagctgtctcactaactttctcctgaatgggcggtctgtgctcctcgagcagccacggaagtctgggtctaaggtgatcagtcacatgctgagttcccacggcggggaaattttcctccacgtcctgtcatccagtcgctctatcctggaggaccctccgagcatcagtgagggttgtggggggcgtgtcactgattatcggataaccgactttggtgaatttatgagagagaaccggctgactccattcctggaccccaggtacaagattgacggatccctcgaagtgccgttggaacgtgctaaagatcagctggagaagcacactcgctactggcctatgatcatttcccagactacgatcttcaatatgcaggcagtggtgccacttgcatccgtgatcgtcaaggagtccctaaccgaggaagacgtgctgaactgtcagaagaccatctataatctcgtcgatatggaaagaaagaatgatccactgcccatttcaaccgtgggtacgcgaggtaaggggccaaagcgcgatgagcaataccgtatcatgtggaatgagctggaaacgctggtgcgcgcgcacataaataactcagaaaagcaccagagggtactcgagtgtttaatggcctgcagatcaaagcccccagaagaagaggagcggaaaaagcgtggaaggaagcgcgaagacaaggaggataagtccgaaaaggcggtgaaggattatgagcaggagaagtcctggcaggatagtgagaggctgaagggcattctcgagcgaggcaaagaggagttagctgaggccgagataatcaaggactcaccagacagccctgaaccacctaacaagaaacccctggtggaaatggatgagacaccccaggtggaaaaatcaaagggcccagtaagcttgctgtccctttggagtaatagaattaataccgcaaacagtcgcaaacaccaggaatttgccggaaggcttaacagcgttaataacagagctgaactgtatcagcacctgaaagaagaaaacgggatggaaaccaccgagaatggaaaggcatccaggcagtag

SEQ ID NO: 196931 - DNA, 1818 bp, Artificial Sequence
  derived and/or modified sequence
atggccgcactggcagccgtcgggccacccaatcctagagctgaccccgagtgttgctccatcttacacggtttagttgccgccgtagagactttatgtaaaatcactgaataccagcatgaggctcggaccctgctgatggaaaatgctgagagagtcggaaatagaggcaggataatatgcattaccaatgcaaagtctgatagccatgttaggatgctcgaggactgcgtccaggaaacgattcatgaacataataagctggcggcaaactccgatcatctgatgcagatacagaaatgcgagctcgtcctaatccacacctaccctgtgggcgaggattccctggtgtctgaccggagcaagaaagagctaagccctgtgttaacaagtgaagtccactctgtgcgtgctgggcgccacctggccaccaaactgaatatcctcgtgcaacaacattttgatctcgcaagcaccaccattaccaacatcccaatgaaggaagaacaacatgccaataccagcgctaattacgatgtcgagctgttacaccataaggacgcccacgtcgacttcctgaagtctggagatagccatttgggggggggatctcgagaggggagctttaaagaaaccatcacactgaaatggtgtacccccaggactaacaatattgaacttcattattgcaccggtgcatacaggatttcaccagtcgatgtgaactcccggcctagcagctgcctaacaaacttcctgcttaatggtcgctcggtccttctcgaacagccacgcaaatcagggagtaaggtcatctctcacatgctcagtagccacggaggagaaatcttcctgcacgtgctttcgtctagtcggtcaatcctggaagatcccccgagtatctcagagggctgcggcggcagagtcacggactataggattacagactttggtgagttcatgcgtgagaatcgcctgacaccgtttcttgatccacggtacaagatcgacgggagcctggaggttcccctggaacgcgctaaggaccagctggagaaacatacaagatattggccaatgataatctctcaaaccactatctttaacatgcaggccgtggtgccactcgcaagcgtgatagtgaaggagtcgttgactgaggaggatgtgctgaactgccagaagaccatatataatctggtggatatggaacgaaagaacgatccactgcccatctccactgtgggtactcgcggcaaggggcccaagcgcgacgagcagtaccgaattatgtggaatgaattggaaaccctggtgagggcccatattaacaacagcgaaaagcatcagcgcgtgctagagtgcttgatggcatgcaggtccaaaccgccagaagaggaggagcgtaaaaagcggggtcgcaagagggaggataaagaagataaaagtgagaaggcggtgaaggactacgaacaagaaaagtcttggcaggactccgaaagactcaaggggattcttgagcggggcaaggaagagctagcagaggccgagattattaaggacagtccagatagccctgagcctccaaataaaaagccgctcgttgaaatggacgagacaccacaagttgagaaaagtaaggggcccgtgtcactactgtcactctggagcaatcggatcaataccgcaaattccagaaagcatcaggagttcgctggtaggcttaatagtgtgaacaaccgtgccgagttgtaccagcatctcaaggaggaaaatggcatggaaactacagagaatgggaaagcctctcgtcagtag

SEQ ID NO: 196932 - DNA, 2121 bp, Artificial Sequence
  derived and/or modified sequence
atgaagatcttcagcgagagccacaagacagtgtttgtggtggaccactgcccctacatggccgagagctgccggcagcacgtggagtttgacatgctggtgaagaacagaacccagggcatcatccccctggcccccatcagcaagagcctgtggacctgcagcgtggagagctccatggagtactgccgcatcatgtatgacatcttccccttcaagaagctggtgaacttcatcgtgtctgattctggggcccacgtgctgaacagctggacccaggaggaccagaacctgcaggagctgatggccgccctggccgctgtgggcccccccaaccccagggctgaccctgagtgctgcagcatcctgcacggcctggtggccgctgtggagaccctgtgcaagatcacagagtaccagcacgaggcccggaccctgctgatggagaatgctgagcgggtgggcaacagaggccgcatcatctgcatcaccaatgccaagagtgacagccacgtgaggatgctggaggactgtgtgcaggagaccatccacgagcacaacaagctggccgccaacagcgaccacctgatgcagatccagaagtgtgagctggtgctgatccacacctaccctgtgggggaggacagcctggtgtctgacaggagcaagaaggagctgagccctgtgctgaccagcgaggtgcacagcgtgcgggccggccgccacctggccaccaagctgaacatcctggtgcagcagcactttgacctggccagcaccaccatcaccaacatccccatgaaggaggagcagcacgccaacaccagcgccaactatgatgtggagctgctgcaccacaaggatgcccacgtggacttcctgaagagcggggacagccacctgggcggcggcagccgggagggcagcttcaaggagaccatcaccctgaagtggtgcacccccaggaccaacaacatcgagctgcactactgcaccggggcctaccgcatcagccctgtggatgtgaacagccggcccagcagctgcctgaccaacttcctgctgaatggccgctctgtgctgctggagcagcccaggaagagcggcagcaaggtgatcagccacatgctgagcagccacggcggggagatcttcctgcacgtgctgagcagcagccgcagcatcctggaggaccccccatccatcagcgagggctgcggcggccgggtgacagactaccgcatcacagactttggagagttcatgagggagaaccggctgacccccttcctggacccccgctacaagattgatggcagcctggaggtgcccctggagcgggccaaggaccagctggagaagcacacccgctactggcccatgatcatcagccagaccaccatcttcaacatgcaggccgtggtgcccctggcctctgtgattgtgaaggagagcctgacagaagaagatgtgctgaactgccagaagaccatctacaacctggtggacatggagaggaagaatgaccccctgcccatcagcacagtgggcacccggggcaagggccccaagagagatgagcagtaccgcatcatgtggaatgagctggagaccctggtgcgggcccacatcaacaacagcgagaagcaccagagggtgctggagtgcctgatggcctgccgcagcaagcccccagaggaggaggagaggaagaagaggggcaggaagcgggaggacaaggaggacaagtctgagaaggctgtgaaggactatgagcaggagaagtcctggcaggacagcgagcggctgaagggcatcctggagcggggcaaggaggagctggccgaggccgagatcatcaaggacagcccagacagccctgagccccccaacaagaagcccctggtggagatggatgagaccccccaggtggagaagagcaagggccctgtgtccctgctgagcctgtggagcaaccgcatcaacacagccaacagcaggaagcaccaggagtttgctggccgcctgaacagcgtgaacaacagagctgagctgtaccagcacctgaaggaggagaatggcatggagaccacagaaaatggcaaggccagccggcagtag

SEQ ID NO: 196933 - DNA, 1818 bp, Artificial Sequence
  derived and/or modified sequence
atggccgccctggccgctgtgggcccccccaaccccagggctgaccctgagtgctgcagcatcctgcacggcctggtggccgctgtggagaccctgtgcaagatcacagagtaccagcacgaggcccggaccctgctgatggagaatgctgagcgggtgggcaacagaggccgcatcatctgcatcaccaatgccaagagtgacagccacgtgaggatgctggaggactgtgtgcaggagaccatccacgagcacaacaagctggccgccaacagcgaccacctgatgcagatccagaagtgtgagctggtgctgatccacacctaccctgtgggggaggacagcctggtgtctgacaggagcaagaaggagctgagccctgtgctgaccagcgaggtgcacagcgtgcgggccggccgccacctggccaccaagctgaacatcctggtgcagcagcactttgacctggccagcaccaccatcaccaacatccccatgaaggaggagcagcacgccaacaccagcgccaactatgatgtggagctgctgcaccacaaggatgcccacgtggacttcctgaagagcggggacagccacctgggcggcggcagccgggagggcagcttcaaggagaccatcaccctgaagtggtgcacccccaggaccaacaacatcgagctgcactactgcacaggagcctaccgcatcagccctgtggatgtgaacagccggcccagcagctgcctgaccaacttcctgctgaatggccgctctgtgctgctggagcagcccaggaagagcggcagcaaggtgatcagccacatgctgagcagccatggaggagagatcttcctgcacgtgctgagcagcagccgcagcatcctggaggacccccccagcatcagcgagggctgcggcggccgggtgacagactaccgcatcacagactttggagagttcatgagagaaaatcggctgacccccttcctggacccccgctacaagattgatggcagcctggaggtgcccctggagcgggccaaggaccagctggagaagcacacccgctactggcccatgatcatcagccagaccaccatcttcaacatgcaggccgtggtgcccctggccagcgtcatcgtgaaggagagcctgacagaggaggatgtgctgaactgccagaagaccatctacaacctggtggacatggagaggaagaatgaccccctgcccatcagcacagtgggcacccggggcaagggccccaagagagatgagcagtaccgcatcatgtggaatgagctggagaccctggtgcgggcccacatcaacaacagcgagaagcaccagagggtgctggagtgcctgatggcctgccgcagcaagcccccagaggaggaggagaggaagaagaggggcaggaagcgggaggacaaggaggacaagtctgagaaggctgtgaaggactatgagcaggagaagtcctggcaggacagcgagcggctgaagggcatcctggagcggggcaaggaggagctggccgaggccgagatcatcaaggacagcccagacagccctgagccccccaacaagaagcccctggtggagatggatgagaccccccaggtggagaagagcaaaggacctgtgtccctgctgagcctgtggagcaaccgcatcaacacagccaacagcaggaagcaccaggagtttgctggccgcctgaacagcgtgaacaacagagctgagctgtaccagcacctgaaggaggagaatggcatggagaccacagaaaatggcaaggccagccggcagtag

SEQ ID NO: 196934 - DNA, 2121 bp, Artificial Sequence
  derived and/or modified sequence
atgaagatcttcagcgagagccacaagaccgtgttcgtggtggaccactgcccgtatatggccgagagctgtagacaacatgtggagtttgacatgctggtcaaaaatcgcacacagggaatcatccctctggcaccaatcagtaagtcactatggacatgttccgttgaatcaagtatggagtactgtagaatcatgtacgacatctttccttttaagaaactcgtgaattttatcgtgtcagatagtggagcccacgtgctgaattcctggactcaggaggaccagaatctccaagaactgatggctgctcttgccgcagtcggtccgccaaaccctagggccgaccctgaatgctgctctattctgcacggcctggtagcggccgtggagactctttgcaaaatcaccgagtaccagcacgaagcgcgcacgctgctcatggagaatgcagaacgggttggcaatcggggccggatcatctgcattacgaacgctaagagtgactcacacgtccgcatgctcgaggactgcgtccaggagaccatccacgaacataacaaattggccgcgaatagtgaccacctcatgcagattcaaaaatgtgaactggtgcttattcatacctaccctgttggcgaagatagtctggtttccgatcggtcaaaaaaagagctgtctccagttctgacttcagaagttcacagtgttcgcgccggccgccacctggcaaccaaactgaatatcctcgtgcagcagcatttcgacctggcctccaccacaattaccaacatacctatgaaggaggaacagcacgctaatacctctgcgaattatgatgtggagctcctacatcataaagatgcgcacgtcgattttctcaagagcggggacagtcacctggggggtgggtctcgggaaggaagctttaaggagaccatcacattaaagtggtgcacgcctcggactaataacatagaattgcactattgcacgggcgcctaccgcatcagccccgtggacgttaacagcagaccatcctcctgtcttacaaacttcctgctgaatggtaggagcgtgttgctggagcagccgcggaagtctggttctaaggtgatttcacacatgctgtctagccatggaggggaaatttttctccatgtgttgtcaagtagtaggtccatccttgaggatcctcccagtatttctgaaggatgcgggggccgggtcactgactataggatcacggatttcggagaatttatgcgggagaaccggctcacacccttcctagatcctcgctacaaaattgatggatccttagaagtgccgttagaaagagccaaagatcagttggaaaaacacactcggtactggcccatgataatatctcaaaccacaatatttaacatgcaagccgttgtaccattagccagtgtgattgtgaaggaaagcctgactgaggaagatgtgctgaattgtcaaaaaacaatttataatctggtggacatggagcggaaaaacgatcccctacctatatcgactgtcggtacaagaggaaaagggcccaagagggacgagcagtaccggatcatgtggaatgagctggagactctggtccgagctcatattaacaacagtgaaaagcatcagagggtattggagtgtctgatggcctgccgctctaagcccccagaggaggaggagcggaagaagagggggaggaaaagggaggataaagaggataagagcgagaaagccgtcaaggactatgagcaggagaaatcatggcaggattctgagaggcttaagggcatacttgagagaggcaaggaagagcttgctgaagctgaaatcattaaggattctcctgatagtcctgagccccccaacaaaaaaccacttgtggagatggacgagacgcctcaagtggagaaatctaagggccccgtgtcccttctgagcctttggtctaataggatcaatacagctaactcacgaaaacaccaggagttcgcgggaaggctcaatagtgtgaacaatagagccgagctttatcagcacctgaaggaagagaatggcatggagaccacagagaacgggaaggcctccagacagtag

SEQ ID NO: 196935 - DNA, 1818 bp, Artificial Sequence
  derived and/or modified sequence
atggccgccctggccgccgtgggcccccccaacccccgggccgacccggaatgttgctccatcctacacgggctggtagccgcagtcgagaccttatgtaagattacagagtatcaacacgaagcacgaactctgttaatggaaaatgctgagagagttggcaaccgcggacgaattatctgtatcaccaacgctaaaagcgactctcacgtgcgcatgctcgaggactgtgtgcaggagactatccacgagcacaacaagctggcagccaactccgaccatcttatgcagatccagaagtgcgaactggtcctgatccatacctaccccgtgggagaggactctctcgtgtccgacagatctaagaaggagctcagtccagtcctgacgtccgaggtgcacagcgttcgggccggcaggcatctcgcaaccaaactcaatatcttggtgcagcaacacttcgacctcgcgtcgacaaccatcacgaatatccccatgaaggaagaacaacacgcgaacacgagtgcaaattacgatgtggagctgctacatcacaaggatgcacacgtggacttcctgaagtccggggactctcacctggggggtgggtcacgggaggggagcttcaaggaaactattaccctcaaatggtgtacgccacgcactaataatatagaattacattactgcactggcgcctatcgcatctcccccgttgatgtaaattcacggccatcctcctgtctgacaaatttcctcctgaatggacgcagcgttctgttagaacagccaagaaagtccggctcgaaagtcatcagccacatgttgtccagtcacggaggcgagatttttctccacgtgttgtcgagcagccgatcaatcctcgaggacccaccctccatttccgaggggtgcggtgggagggtcacagattataggattaccgatttcggtgagttcatgagagaaaatcgcctgactccgttcctggacccaagatataaaattgacggtagtctggaagtgcccttggaaagagccaaggaccagttggaaaagcatacccgatactggcccatgatcattagccaaaccacaattttcaacatgcaggccgtggtgcccttagctagcgtgatcgtgaaagaatccctgactgaagaagatgtcctcaactgccagaagacaatttacaatttagttgacatggagcggaaaaatgatcctcttcctatctctacagtggggactcgaggtaaagggccaaagcgagacgagcagtaccgaattatgtggaatgagctggaaacgctagttagggcccacatcaacaattccgaaaagcatcagcgggtcctggagtgtcttatggcttgcaggtcaaaaccgcccgaggaagaggaacggaagaaacgcgggcgcaaacgggaggacaaggaggataagtcagagaaggctgtgaaagactatgagcaagaaaaatcgtggcaggattccgaacgcttgaaaggaatcctcgagaggggtaaggaagagctggcagaggcagagatcattaaagacagccccgactcaccagagcctccgaacaaaaagcccttggtggagatggacgaaactcctcaggtcgaaaagtccaaaggacccgtcagcctgctctccttgtggagcaaccgtattaacaccgccaatagccgcaagcaccaggaattcgcgggacgactgaatagcgttaacaacagggctgaactgtaccagcaccttaaagaagagaatggtatggaaacaacagagaacggcaaggcgagcaggcagtag

SEQ ID NO: 196936 - DNA, 2121 bp, Artificial Sequence
  derived and/or modified sequence
atgaagattttttccgaatctcacaaaaccgtatttgttgtcgaccattgtccttacatggccgagtcctgtcgtcagcatgttgaatttgatatgttagtaaagaataggactcagggaatcatacccctagcaccaatctcaaaatccctatggacttgttcagtcgaaagttcaatggaatactgtcggattatgtacgatatctttccatttaaaaaattggtcaacttcattgttagcgattcaggagcccatgtgctgaatagctggactcaggaggatcagaatctgcaggagcttatggctgctctagcagcagttggcccaccaaacccaagggctgatcccgagtgctgtagcatcctgcacggactggtggcggcagtggagaccctctgcaagataaccgagtaccaacatgaggctcgaaccttactgatggaaaatgccgagcgagtgggcaatagaggtaggatcatctgtatcacaaacgctaagagcgactcgcacgtcaggatgcttgaagattgcgtgcaggaaactatccacgagcataacaaactggctgcaaattccgaccacctcatgcagatccagaaatgtgagcttgtgttgatacacacttacccggtgggagaggacagtttggtttcagacaggtctaaaaaagaacttagtcctgttctcacatcggaagtgcactctgttcgtgccggaagacacctggccaccaagctcaacattctggtgcagcaacatttcgacttggcgagcaccacaattaccaacatccccatgaaggaagaacagcacgctaacaccagcgccaactacgatgtggagctgctgcatcataaagacgcacacgtggactttctgaagtctggggattcccatttaggcggtgggtcccgcgagggaagctttaaagaaactatcacactaaaatggtgcaccccaaggactaataatatcgagctccactactgcaccggcgcttacagaattagtcccgttgacgttaattctagaccctccagctgcctgacaaatttcctgttgaacggacgatccgtcctgctggagcagccgagaaagtccggatcaaaagtgatttcccacatgctgagttctcatggcggagaaatttttcttcacgtgctgagctcctcacggtctattctcgaagaccctccctccatcagtgagggctgcggaggtcgcgtgaccgattataggataacagacttcggtgagttcatgcgcgagaatcgactgacaccttttctggacccaaggtataaaatcgacggaagccttgaagttcctctggagcgggctaaggaccaactggagaagcacacaagatactggcccatgataatttctcagacgaccatctttaatatgcaggccgtggttcctctggctagtgttattgtgaaagagtctttaacagaggaggatgtgttaaattgtcagaaaaccatctacaatctggtggacatggaacgcaagaatgaccctctccccatcagcaccgtgggaacccggggtaaaggccctaaacgtgatgaacagtatcggatcatgtggaatgaactggagacactggtccgagctcacattaacaattcggagaaacaccagcgagtactggaatgcctgatggcttgtaggagtaaaccccctgaggaggaagaacggaaaaagcgcggaaggaaacgggaggacaaggaagataaaagcgagaaagccgtaaaggactacgaacaggagaaatcttggcaggatagtgaaagactgaagggtatccttgaaagaggcaaggaggagctcgcagaagcagagatcatcaaagattcaccagactcaccggaacccccaaataagaaaccactggttgagatggatgaaaccccccaggtggagaagtccaagggtcccgtctcgcttctgagcctctggtcgaaccggatcaatactgctaactctcggaagcaccaggagttcgccggaagactgaattctgtgaataatagggctgagctgtaccaacacctgaaagaggaaaacggcatggaaactacggagaacgggaaagcatcccgtcagtag

SEQ ID NO: 196937 - DNA, 1818 bp, Artificial Sequence
  derived and/or modified sequence
atggctgcattggcggcagtggggccaccgaatccacgcgcagatcccgagtgttgcagcatactgcatggcttggtcgccgcagtggaaacactctgtaaaatcactgaatatcagcatgaggctcggacactgctcatggagaacgcagagcgtgtggggaatcgcggacgaataatctgtattacaaacgccaaatccgactctcacgtgcgcatgctggaggattgcgtgcaggaaacgattcatgagcataataaactggccgcaaatagtgatcacttaatgcagattcagaagtgcgagctcgttctgatacatacctatccggtaggcgaggactccctggtgtccgacaggtccaaaaaggaacttagtcctgttctgacatctgaggttcattctgttagggcaggaagacacctcgccactaagttaaatatcttagttcagcagcacttcgaccttgccagtaccactattaccaatatccctatgaaggaagaacagcatgcgaatactagcgcaaactatgacgttgaattactgcaccacaaggacgcccacgtagacttcctcaagagtggtgactcccacttggggggaggatcccgcgaaggctctttcaaggagacaattactctgaagtggtgtacaccacgcactaacaacattgagttgcactattgtacaggcgcttatagaatttctcccgtggacgtgaattcacgcccttctagctgtttaactaattttctgctgaacgggaggtctgtgctcttggaacagcctaggaagagcggtagcaaggtgatctcccacatgttgtcctctcatggaggtgagattttcttacacgtactctccagctctcgatccatccttgaggatcctcccagcataagtgagggatgcggaggacgggtgaccgattaccgcattaccgacttcggcgagtttatgagggaaaatcggttgaccccgttcctcgaccctagatataaaattgatggctctctggaggtgcccctcgagagggctaaagaccagctggagaagcatacccgatattggcccatgattatctctcagactacaatctttaacatgcaagcggttgtccctctagcatcagtgatcgttaaggaaagcctgactgaagaagatgttctgaactgtcagaaaacaatttataacttggtcgacatggaaaggaagaatgatccactgcctattagcacagtaggcacgaggggtaaaggacccaaaagggatgagcagtaccgtataatgtggaacgagctcgagacccttgttagggcgcacataaacaattccgaaaaacatcagcgcgtgctcgaatgtttgatggcatgtcggtctaagcctccagaggaagaagagcggaaaaaaagaggtcggaaaagggaagataaggaggataaaagcgagaaggcagtcaaagactatgagcaggagaagtcatggcaggactcggaacgtctgaagggcatcttggaaaggggcaaggaagagctggcagaagccgagataataaaggattctcccgacagtcctgaacctccaaacaaaaagcctctggtggaaatggatgagacccctcaggttgagaagtcaaaagggccagtcagtcttctgagtctctggagcaatagaatcaacaccgccaacagcaggaaacatcaggagttcgccggacggctgaattccgtgaataatagagccgagctataccagcacctcaaggaggaaaacggcatggaaaccacagaaaacgggaaagcctcaaggcaatag

SEQ ID NO: 196938 - DNA, 1641 bp, Artificial Sequence
  derived and/or modified sequence
aggaagcctgggaaggaccggtgtgctaggagatgatcggggaaagcatagtcccctgtctgtggcaccagacactcccgactgtgcgctgactctccccgcccagccagcagccttttccagagaggctgtggtccatagcctctgttcgttttcactgcaggaccaggcacgaaactaatggcagcattagccgctgttgggcctcctaatcctcgggcagatccagagtgctgcagtattctgcatggccttgttgcagcagtggaaactctctgcaaaattactgaataccaacatgaggctcgtactctactcatggagaatgcagaacgtgttggaaatagaggacgaataatctgtattactaatgcaaaaagtgatagtcatgtgcgaatgcttgaagactgtgtccaggaaacgattcatgaacataacaagcttgctgcaaattcagatcatctcatgcagattcaaaaatgtgagttggtcttgatccacacctacccagttggtgaagacagccttgtatctgatcgttctaaaaaagagttgtccccggttttaaccagtgaagttcatagtgttcgtgcaggacggcatcttgctaccaaattgaatattttagtacagcaacattttgacttggcttcaactactattacaaatattccaatgaaggaagaacagcatgctaacacatctgccaattatgatgtggagctacttcatcacaaagatgcacatgtagatttcctgaaaagtggtgattcgcatctaggtggcggcagtcgagaaggctcgtttaaagaaacaataacattaaagtggtgtacaccaaggacaaataacattgaattacactattgtactggagcttatcggatttcacctgtagatgtaaatagtagaccttcctcctgccttactaattttcttctaaatggtcgttctgttttattggaacaaccacgaaagtcaggttctaaagtcattagtcatatgcttagtagccatggaggagagatttttttgcacgtccttagcagttctcgatccattctagaagatccaccttcaattagtgaaggatgtggaggaagagttacagactaccggattacagattttggtgaatttatgagggaaaacagattaactccttttctagaccccagatataaaatcgatggaagtcttgaggtccctttggaacgagcaaaagatcagttagaaaaacatacccgttactggcctatgatcatttcacaaaccaccatttttaacatgcaagcggtagttccattagccagtgttattgtgaaagaatctctgacagaagaagatgtgttaaactgtcaaaaaacaatatacaacttagttgatatggaaagaaaaaatgatcctctacctatttccacagttggtacaagaggaaagggccctaaaagagatgaacaataccgtatcatgtggaatgaattagaaacccttgtcagagcccatatcaacaactcagagaaacatcaaagagtcttggaatgtctgatggcatgcaggagcaaacccccagaagaggaagaacgaaagaaagaggaagaaagagggaagacaaagaggacaagtcagagaaagcagtga

SEQ ID NO: 196939 - DNA, 2974 bp, Artificial Sequence
  derived and/or modified sequence
gagtttttccaggggaaaccggcctgggtggagagacagagaaggggagaccgggtgggtgggtcgtacgcttagggggccgtggttggtacttcgctgttggggaggctttcaggtcgcccagatcctgcttcccaatgggtgactgggaaaattagcgggtggaaaatctcgaggggtggaggctttttttttcctccttggccccgccctcttcctgttcggcgactgggacgcctggccctacgagggggaagggaggcttggccgggctatcggagagcgctgtgcgcacgcgcgagcccgagtgcgtgtgtgtgtgtgcacgcgcacgcgcgctcctgctcttaggaagcctgggaaggaccggtgtgctaggagatgatcggggaaagcatagtcccctgtctgtggcaccagacactcccgactgtgcgctgactctccccgcccagccagcagccttttccagagaggctgtggtccatagcctctgttcgttttcactgcaggaccaggcacgaaagttaaaacaaaatgaagattttttctgaatctcataaaacagtgtttgttgtggatcactgcccttatatggcagaatcttgcaggcagcatgtcgagtttgatatgctggtgaagaatagaacccaaggaatcattcctttggcccccatatctaaatcattgtggacttgctcagtagaatcttccatggaatattgtagaataatgtatgatatatttcctttcaaaaagctggtgaattttattgtgagtgactctggagcacatgttttaaattcttggactcaagaagaccaaaatttacaggagctaatggcagcattagccgctgttgggcctcctaatcctcgggcagatccagagtgctgcagtattctgcatggccttgttgcagcagtggaaactctctgcaaaattactgaataccaacatgaggctcgtactctactcatggagaatgcagaacgtgttggaaatagaggacgaataatctgtattactaatgcaaaaagtgatagtcatgtgcgaatgcttgaagactgtgtccaggaaacgattcatgaacataacaagcttgctgcaaattcagatcatctcatgcagattcaaaaatgtgagttggtcttgatccacacctacccagttggtgaagacagccttgtatctgatcgttctaaaaaagagttgtccccggttttaaccagtgaagttcatagtgttcgtgcaggacggcatcttgctaccaaattgaatattttagtacagcaacattttgacttggcttcaactactattacaaatattccaatgaaggaagaacagcatgctaacacatctgccaattatgatgtggagctacttcatcacaaagatgcacatgtagatttcctgaaaagtggtgattcgcatctaggtggcggcagtcgagaaggctcgtttaaagaaacaataacattaaagtggtgtacaccaaggacaaataacattgaattacactattgtactggagcttatcggatttcacctgtagatgtaaatagtagaccttcctcctgccttactaattttcttctaaatggtcgttctgttttattggaacaaccacgaaagtcaggttctaaagtcattagtcatatgcttagtagccatggaggagagatttttttgcacgtccttagcagttctcgatccattctagaagatccaccttcaattagtgaaggatgtggaggaagagttacagactaccggattacagattttggtgaatttatgagggaaaacagattaactccttttctagaccccagatataaaatcgatggaagtcttgaggtccctttggaacgagcaaaagatcagttagaaaaacatacccgttactggcctatgatcatttcacaaaccaccatttttaacatgcaagcggtagttccattagccagtgttattgtgaaagaatctctgacagaagaagatgtgttaaactgtcaaaaaacaatatacaacttagttgatatggaaagaaaaaatgatcctctacctatttccacagttggtacaagaggaaagggccctaaaagagatgaacaataccgtatcatgtggaatgaattagaaacccttgtcagagcccatatcaacaactcagagaaacatcaaagagtcttggaatgtctgatggcatgcaggagcaaacccccagaagaggaagaacgaaagaaacgaggaagaaagagggaagacaaagaggacaagtcagagaaagcagtgaaagattatgaacaggaaaagtcttggcaagactcagagagattaaaaggaatcttagagcgtggaaaagaagaattggctgaagctgagattataaaagattcgcctgattccccagaacctccaaacaaaaaaccccttgttgaaatggatgaaactccacaagtggaaaaatcaaaagggccagtgtcgttattatccttgtggagtaatagaatcaatactgccaattccagaaaacatcaggaatttgctggacgtttgaactctgttaataacagagctgaactatatcaacatcttaaagaggaaaatgggatggagacaacagaaaatggaaaagccagccggcagtgaagagtgacttgaagaactaaatttagcatattgcaaaaatattttgtgcggaattcgatataagtacttttacagcaagatggtatagttatgttgcctggactggtttttacatttttaaaatatttcagctgtcatttttgtactaattataaaattggcacataattcaaaaatatacatttgagatgatttgtcctcccaaattatacaagtttattttatggtataaagtgttctctctggaaatgtttttaaaaaaattcttaggcttctctttgcgaaataaaactattaaaatatttgaaatgcaaaa

SEQ ID NO: 196940 - DNA, 2310 bp, Artificial Sequence
  derived and/or modified sequence
aggaagcctgggaaggaccggtgtgctaggagatgatcggggaaagcatagtcccctgtctgtggcaccagacactcccgactgtgcgctgactctccccgcccagccagcagccttttccagagaggctgtggtccatagcctctgttcgttttcactgcaggaccaggcacgaaactaatggcagcattagccgctgttgggcctcctaatcctcgggcagatccagagtgctgcagtattctgcatggccttgttgcagcagtggaaactctctgcaaaattactgaataccaacatgaggctcgtactctactcatggagaatgcagaacgtgttggaaatagaggacgaataatctgtattactaatgcaaaaagtgatagtcatgtgcgaatgcttgaagactgtgtccaggaaacgattcatgaacataacaagcttgctgcaaattcagatcatctcatgcagattcaaaaatgtgagttggtcttgatccacacctacccagttggtgaagacagccttgtatctgatcgttctaaaaaagagttgtccccggttttaaccagtgaagttcatagtgttcgtgcaggacggcatcttgctaccaaattgaatattttagtacagcaacattttgacttggcttcaactactattacaaatattccaatgaaggaagaacagcatgctaacacatctgccaattatgatgtggagctacttcatcacaaagatgcacatgtagatttcctgaaaagtggtgattcgcatctaggtggcggcagtcgagaaggctcgtttaaagaaacaataacattaaagtggtgtacaccaaggacaaataacattgaattacactattgtactggagcttatcggatttcacctgtagatgtaaatagtagaccttcctcctgccttactaattttcttctaaatggtcgttctgttttattggaacaaccacgaaagtcaggttctaaagtcattagtcatatgcttagtagccatggaggagagatttttttgcacgtccttagcagttctcgatccattctagaagatccaccttcaattagtgaaggatgtggaggaagagttacagactaccggattacagattttggtgaatttatgagggaaaacagattaactccttttctagaccccagatataaaatcgatggaagtcttgaggtccctttggaacgagcaaaagatcagttagaaaaacatacccgttactggcctatgatcatttcacaaaccaccatttttaacatgcaagcggtagttccattagccagtgttattgtgaaagaatctctgacagaagaagatgtgttaaactgtcaaaaaacaatatacaacttagttgatatggaaagaaaaaatgatcctctacctatttccacagttggtacaagaggaaagggccctaaaagagatgaacaataccgtatcatgtggaatgaattagaaacccttgtcagagcccatatcaacaactcagagaaacatcaaagagtcttggaatgtctgatggcatgcaggagcaaacccccagaagaggaagaacgaaagaaacgaggaagaaagagggaagacaaagaggacaagtcagagaaagcagtgaaagattatgaacaggaaaagtcttggcaagactcagagagattaaaaggaatcttagagcgtggaaaagaagaattggctgaagctgagattataaaagattcgcctgattccccagaacctccaaacaaaaaaccccttgttgaaatggatgaaactccacaagtggaaaaatcaaaagggccagtgtcgttattatccttgtggagtaatagaatcaatactgccaattccagaaaacatcaggaatttgctggacgtttgaactctgttaataacagagctgaactatatcaacatcttaaagaggaaaatgggatggagacaacagaaaatggaaaagccagccggcagtgaagagtgacttgaagaactaaatttagcatattgcaaaaatattttgtgcggaattcgatataagtacttttacagcaagatggtatagttatgttgcctggactggtttttacatttttaaaatatttcagctgtcatttttgtactaattataaaattggcacataattcaaaaatatacatttgagatgatttgtcctcccaaattatacaagtttattttatggtataaagtgttctctctggaaatgtttttaaaaaaattcttaggcttctctttgcgaaataaaactattaaaatatttgaaatgc

SEQ ID NO: 196941 - protein, 312 aa, Artificial Sequence
  derived and/or modified sequence
MSAFSEAALEKKLSELSNSQQSVQTLSLWLIHHRKHSRPIVTVWERELRKAKPNRKLTFLYLANDVIQNSKRKGPEFTKDFAPVIVEAFKHVSSETDESCKKHLGRVLSIWEERSVYENDVLEQLKQALYGDKKPRKRTYEQIKVDENENCSSLGSPSEPPQTLDLVRALQDLENAASGDAAVHQRIASLPVEVQEVSLLDKITDKESGERLSKMVEDACMLLADYNGRLAAEIDDRKQLTRMLADFLRCQKEALAEKEHKLEEYKRKLARVSLVRKELRSRIQSLPDLSRLPNVTGSHMHLPFAGDIYSED

SEQ ID NO: 196942 - DNA, 939 bp, Artificial Sequence
  derived and/or modified sequence
atgagcgccttcagcgaggccgccctggagaagaagctgagcgagctgagcaacagccagcagagcgtgcagaccctgagcctgtggctgatccaccacagaaagcacagcagacccatcgtgaccgtgtgggagagagagctgagaaaggccaagcccaacagaaagctgaccttcctgtacctggccaacgacgtgatccagaacagcaagagaaagggccccgagttcaccaaggacttcgcccccgtgatcgtggaggccttcaagcacgtgagcagcgagaccgacgagagctgcaagaagcacctgggcagagtgctgagcatctgggaggagagaagcgtgtacgagaacgacgtgctggagcagctgaagcaggccctgtacggcgacaagaagcccagaaagagaacctacgagcagatcaaggtggacgagaacgagaactgcagcagcctgggcagccccagcgagcccccccagaccctggacctggtgagagccctgcaggacctggagaacgccgccagcggcgacgccgccgtgcaccagagaatcgccagcctgcccgtggaggtgcaggaggtgagcctgctggacaagatcaccgacaaggagagcggcgagagactgagcaagatggtggaggacgcctgcatgctgctggccgactacaacggcagactggccgccgagatcgacgacagaaagcagctgaccagaatgctggccgacttcctgagatgccagaaggaggccctggccgagaaggagcacaagctggaggagtacaagagaaagctggccagagtgagcctggtgagaaaggagctgagaagcagaatccagagcctgcccgacctgagcagactgcccaacgtgaccggcagccacatgcacctgcccttcgccggcgacatctacagcgaggactag

SEQ ID NO: 196943 - DNA, 939 bp, Artificial Sequence
  derived and/or modified sequence
atgagcgcgttcagcgaagccgcattggaaaaaaaattgtctgagctttccaattctcaacagagcgtgcagaccctcagcctctggctgatccaccatcggaaacattcccggcctatcgtgacagtatgggaacgtgagctgcgaaaagccaaacctaacagaaaactcacttttctgtatctggcgaatgatgtgatccagaacagcaagcgaaagggaccagaattcaccaaagactttgctcccgtgattgtggaggccttcaaacacgtatcctccgaaaccgatgaatcttgtaagaagcacttggggcgagtactgagcatctgggaagaacggagcgtatatgagaatgatgtgcttgaacaactgaaacaggccctctacggcgataagaagcccagaaagcggacgtacgagcaaataaaggtcgacgagaacgagaactgttcctcccttggaagccctagtgagccgccccagaccctggacttggtgagagccctccaggacctggaaaacgccgcttccggtgatgctgcagtgcatcaacggattgccagtttaccagtggaggtccaagaggtcagccttcttgacaagatcacagacaaggagtccggcgagcgactgagcaaaatggtcgaagatgcctgcatgctgctggcagattataatggacgattggccgctgaaatagacgaccgcaaacaactaacacgcatgctggccgacttcctgcgatgtcagaaagaggccctggctgagaaagagcataagcttgaagagtacaaaagaaaacttgccagagtgtcgctggtccgtaaagaattacgaagccgcatccagtcgttgcccgacctctccagattacccaacgtgacaggttcccatatgcacctgccattcgctggtgatatctacagcgaagactag

SEQ ID NO: 196944 - DNA, 939 bp, Artificial Sequence
  derived and/or modified sequence
atgtcagccttttcagaagccgcacttgaaaaaaaactgtcggaactcagtaactcccagcaaagcgtgcagaccctgtccctgtggctgatccaccacagaaaacatagccgccccatcgtaactgtttgggagagagagctgcgcaaggccaaaccaaataggaagctgactttcttatacctggccaatgacgtaattcagaatagcaagaggaaggggccggagttcacgaaggacttcgccccagtcattgtggaggccttcaagcatgtgagtagtgagaccgatgaatcgtgcaagaagcatctgggacgagtgctcagcatctgggaagagcgcagtgtgtatgagaatgatgtcctcgagcaactaaagcaagcgctgtatggcgacaagaagcctagaaagcgcacgtacgagcaaattaaggtggatgagaacgagaactgttcatctctggggagtcccagcgaaccgccacaaactcttgacctggtaagggccctacaggacctggaaaatgcggccagcggagacgccgctgtccaccagcgcatcgccagccttccggtggaagtacaggaggtgagtttactagacaagattaccgataaggaatccggagagaggctctccaaaatggtggaggacgcgtgcatgctgctggcagattacaacggccgcctggctgccgaaattgatgaccggaaacagcttactcgaatgctggctgacttcctcagatgccagaaagaagctctcgctgaaaaggagcataagctggaggaatataagcggaagcttgccagggtgagtttggtgaggaaagagctcaggtctcgcattcaatccttgcctgacctgagtaggttgcctaacgtgaccgggtctcacatgcacctcccttttgccggggacatctactccgaggactag

SEQ ID NO: 196945 - DNA, 939 bp, Artificial Sequence
  derived and/or modified sequence
atgtctgccttcagcgaggccgccctggagaagaagctgtctgagctgagcaacagccagcagagcgtgcagaccctgagcctgtggctgatccaccacaggaagcacagccggcccatcgtgacagtgtgggagcgggagctgaggaaggccaagcccaacaggaagctgaccttcctgtacctggccaatgatgtgatccagaacagcaagaggaaaggacctgagttcaccaaggactttgcccctgtgattgtggaggccttcaagcacgtgagcagcgagacagatgagagctgcaagaagcacctgggccgggtgctgagcatctgggaggagaggtctgtgtatgaaaatgatgtgctggagcagctgaagcaggccctgtatggagacaagaagcccaggaagaggacctatgagcagatcaaggtggatgaaaatgaaaactgcagcagcctgggcagccccagcgagcccccccagaccctggacctggtgcgggccctgcaggacctggagaatgctgccagcggagatgctgctgtgcaccagagaattgccagcctgcctgtggaggtgcaggaggtgtccctgctggacaagatcacagacaaggagagcggggagcggctgagcaagatggtggaggatgcctgcatgctgctggccgactacaacggccgcctggccgctgagattgatgacaggaagcagctgaccaggatgctggccgacttcctgcgctgccagaaggaggccctggccgagaaggagcacaagctggaggagtacaagaggaagctggcccgggtgtccctggtgaggaaggagctgcggagccgcatccagagcctgcctgacctgagccggctgcccaacgtgacaggcagccacatgcacctgccctttgctggggacatctacagtgaagattag

SEQ ID NO: 196946 - DNA, 939 bp, Artificial Sequence
  derived and/or modified sequence
atgagcgccttcagcgaggccgccctggagaagaagctgagcgagttgtctaactcccagcaaagtgttcagacactaagtctatggctgatacaccaccgaaaacactctcggccaatcgttactgtatgggaacgggagttgaggaaggccaagcccaatcgtaagctgacattcctgtacctggccaatgacgtgattcaaaattctaagaggaagggtcctgagttcaccaaggatttcgcccccgtcattgtagaggcctttaagcacgtctcatccgaaaccgacgaatcatgtaagaaacatcttggtagggtgctctcaatttgggaggagcgttctgtttacgagaacgatgtgctcgaacagctgaagcaagctctgtatggcgacaagaaaccacgcaaacggacctatgaacagattaaggtcgacgaaaacgaaaattgtagctcactggggtcgcccagcgagccaccccagactctggacttggttcgggcccttcaggacctggagaacgccgcttccggagacgcagccgtccatcagaggattgccagcctccctgtagaggtccaggaggtaagcctcctagacaaaattactgataaagagtccggggaaaggttgtccaagatggtggaggacgcctgcatgctattagcagactacaacggcagactcgccgctgagatcgatgatcggaaacagctcacacggatgctcgcggatttcctgcgatgccagaaagaagctttggccgagaaagaacataagctcgaggagtataaacggaaactagcaagggtctccttggtgaggaaggaactgaggtcccggattcaaagtttgcccgatctgagcagacttcctaatgttacagggtctcatatgcacctgcctttcgcaggggacatttacagcgaagactag

SEQ ID NO: 196947 - DNA, 939 bp, Artificial Sequence
  derived and/or modified sequence
atgagcgccttcagcgaggccgccctggagaagaagctgagcgagctcagtaattcccaacaaagtgtgcaaaccttgtccctctggctcattcaccaccgcaagcattccaggcctatcgtcacggtctgggaaagagaattacggaaggcgaagcccaacagaaagctcacctttctgtatctggctaatgacgttattcagaatagtaagagaaaagggcctgagttcacaaaagactttgcccccgtgatcgtggaggcctttaagcacgtcagctcagagactgacgaatcctgcaaaaagcatctcggtcgcgtactgagcatctgggaagaaaggtcagtctacgagaacgacgttttagagcagttaaagcaggcattatatggcgacaaaaagccaaggaagcgcacctacgagcagatcaaagtcgacgaaaacgagaactgctcgtcactcggctccccttcagaacctcctcagacacttgacctggtgcgtgctcttcaagacctcgaaaatgctgcttcaggagatgccgccgtgcaccagagaattgcctcgctgcccgtggaagtgcaagaagtgtctctcctagacaagattaccgataaggaaagcggcgagcggctgtccaagatggttgaagacgcctgtatgcttttggccgattataacggccggctcgccgctgaaatcgatgacaggaaacagctcactcggatgctggccgactttcttcggtgtcaaaaagaagccctcgcagaaaaagagcataagttggaggagtataagcggaaactcgctcgggtaagtctagttaggaaagagctgcggtctcggatccaatctctgccggacctgtctcgcctgcccaacgtcaccggaagccacatgcatctgccatttgctggcgatatctacagtgaggactag

SEQ ID NO: 196948 - DNA, 939 bp, Artificial Sequence
  derived and/or modified sequence
atgtccgccttctcagaagccgctctcgagaaaaaactctccgagttgagcaattcccaacagtcagtacaaaccctaagcctgtggctcatccatcatagaaagcattcgcggcctatagtgaccgtgtgggagcgcgaactgcggaaagccaagcccaaccggaagctgactttcctatacttggccaatgacgtgattcaaaatagcaaaagaaagggcccagagtttacaaaggatttcgctccggtgattgtggaagctttcaaacatgtctcatccgagaccgacgaatcttgcaagaaacatctgggaagggtactgtcaatctgggaggaaaggtccgtttatgaaaatgacgtgcttgagcaattgaaacaggccctgtacggggacaaaaagcccagaaagcgcacctatgagcagatcaaagtggacgaaaacgagaattgttcatcgctggggagcccttcagaaccaccccagactcttgatctggtacgtgccctccaggacctggagaacgccgcttcaggagacgccgctgtgcaccagcgcatagcatccctgcctgtggaggtgcaggaggtgtcgttactggacaaaatcaccgataaagagtcaggggagagactgagtaaaatggtagaggatgcctgcatgctgctggcagattacaacggtcggctggcagcagaaatcgatgatcgaaaacaattaacaaggatgcttgccgacttcttaagatgtcaaaaggaggccttggccgagaaagaacataagcttgaggagtacaagagaaaactggctagagtcagcctggtcaggaaagaattaagaagcaggattcaaagtttgcctgatctttcgcggctgccgaacgtgacggggtcccacatgcacctgccatttgccggagatatatatagtgaggattag

SEQ ID NO: 196949 - DNA, 939 bp, Artificial Sequence
  derived and/or modified sequence
atgagcgcattctccgaagccgcactggagaagaagctgtccgagttgtcgaacagtcagcagtcagtgcagaccctgtccctctggctgattcaccatcgcaagcacagccgcccaatagtgactgtctgggagagggagctgagaaaggccaaacctaatcggaagctgaccttcctgtacctggcaaatgacgttatacagaactccaagagaaaaggcccagaattcacgaaagacttcgctccggtgatagtcgaggcgttcaaacacgtgagctccgagacagatgaaagttgtaaaaaacacctcgggagagtgctttctatttgggaggaaagaagcgtatacgaaaacgacgtcctggagcagttgaagcaggctctgtacggagataagaagcctcgcaagcgcacatatgagcagattaaggtagatgagaacgaaaactgctcttcattaggttcaccctccgaaccccctcagactctcgatctcgtgagggcactacaggacttggaaaacgcagccagtggtgatgcagccgtgcaccagcgtatcgcgtctctcccagttgaggtccaggaggtgagcctgttagacaaaattaccgacaaggagagtggcgaaagactctccaagatggtcgaagatgcgtgtatgctgttggccgattacaatggccgtctggccgctgaaatcgacgaccgcaaacagttgacccgaatgcttgccgatttcttgcggtgccaaaaggaagctctggctgagaaggagcacaaacttgaggagtacaagcggaaactagcccgagtatcacttgtgagaaaagagctgcgcagtcgtatacagtcgctgccggatctaagccgtctccccaatgtgaccgggtcccatatgcacctccccttcgctggggatatctattccgaggattag

SEQ ID NO: 196950 - DNA, 1850 bp, Artificial Sequence
  derived and/or modified sequence
ttgctggtttgcggccggtcttggatgaagcggcggccgtggtgagagcgtggggaagggtggggtgagggggcgaggccgcagctagggcggcgaaactctcctcccctcggccccaccgcgtgggacggcgtgaacgtggtgtcggagggatgtcagccttctctgaggcggcgctggagaagaagctgtcggagttgagcaactcgcagcagagcgtgcagaccttgtccctgtggctcattcaccaccgtaaacactcgcgtcccatcgtcaccgtgtgggagcgggagctgcggaaagccaaaccaaacaggaagcttacttttctctacctagccaatgatgtcatacagaacagcaagaggaaggggccagagtttacaaaagattttgcaccagttatagtggaggcttttaagcatgtttcaagtgaaactgatgaaagttgtaagaagcaccttggaagagtgttatctatttgggaagaaaggtctgtttatgaaaatgatgtattagaacaacttaaacaagctctgtatggtgataagaagcctaggaagcgaacttatgaacagataaaggtggatgaaaatgaaaactgttcctctctgggatctccaagtgaaccaccacagactctagatctcgttagagcattacaagatctggaaaatgcagcctcaggtgatgcagcagttcatcagaggatagcttctttacctgttgaagtccaagaagtatctctattagataaaataacagataaagaatctggagaaaggctttccaaaatggtagaggatgcgtgtatgttgctggcagattacaatggcagattggcggcagaaatagatgatagaaagcaactcactcgaatgttagcagattttcttcgttgtcaaaaggaagcccttgcagagaaagagcataaattggaagagtacaagcgcaagctagccagagtttccctggtgcgcaaagaactcaggtcccggatccagagcctgccagacttatctcgattgcccaatgtcactggcagccacatgcacctgccctttgcgggagacatctacagtgaagattgatggaccagcctctttccaggtcccaggactttgcaagagatggagacagtgcagagagctgtctggagtcacaatctgaacagattctcgggcgctccttctctccttccatcactacagtaagtaaaaggaccatagaggggaaccaggaatctgagaatcagctgtgctcaatagccaacctccctgtccagatgcagctattttggtatctcctatcacatgcactctgaatcagggtttttctataagaaatctttcagaatcagcaaaagtggggatgacccaggcatcttgatttgcaaaatcacaaaactaagttgtcagttatcactgtagatgagcaactcatctttttaaagtatagttactgaactgattctgagaaatctttagagagaaaaaactcaacagtacaaattaactaattgggaaagttagaatgtcctttctgaatttttcattaaaaaaattacattatctgaaataacataaagctactaaactgctttgtattctattaagaaatagctcctaaggatgtagtcttgtttcatagttgttgcactatatcaaaacttaaaatgtaagcccagttcttctctgtatagaaaggaaacattgtgttacttaatgaattatttatacagagcatttgttgccaactgttgttccagccatccacacaggagtctgttctgaggtggcaatagcacatgggaagatgaactttccctgtttgtttacccgttcttcttt

SEQ ID NO: 196951 - DNA, 4438 bp, Artificial Sequence
  derived and/or modified sequence
actgccggccggacgccatcttgctggtttgcggccggtcttggatgaagcggcggccgtggtgagagcgtggggaagggtggggtgagggggcgaggccgcagctagggcggcgaaactctcctcccctcggccccaccgcgtgggacggcgtgaacgtggtgtcggagggatgtcagccttctctgaggcggcgctggagaagaagctgtcggagttgagcaactcgcagcagagcgtgcagaccttgtccctgtggctcattcaccaccgtaaacactcgcgtcccatcgtcaccgtgtgggagcgggagctgcggaaagccaaaccaaacaggaagcttacttttctctacctagccaatgatgtcatacagaacagcaagaggaaggggccagagtttacaaaagattttgcaccagttatagtggaggcttttaagcatgtttcaagtgaaactgatgaaagttgtaagaagcaccttggaagagtgttatctatttgggaagaaaggtctgtttatgaaaatgatgtattagaacaacttaaacaagctctgtatggtgataagaagcctaggaagcgaacttatgaacagataaaggtggatgaaaatgaaaactgttcctctctgggatctccaagtgaaccaccacagactctagatctcgttagagcattacaagatctggaaaatgcagcctcaggtgatgcagcagttcatcagaggatagcttctttacctgttgaagtccaagaagtatctctattagataaaataacagataaagaatctggagaaaggctttccaaaatggtagaggatgcgtgtatgttgctggcagattacaatggcagattggcggcagaaatagatgatagaaagcaactcactcgaatgttagcagattttcttcgttgtcaaaaggaagcccttgcagagaaagagcataaattggaagagtacaagcgcaagctagccagagtttccctggtgcgcaaagaactcaggtcccggatccagagcctgccagacttatctcgattgcccaatgtcactggcagccacatgcacctgccctttgcgggagacatctacagtgaagattgatggaccagcctctttccaggtcccaggactttgcaagagatggagacaggttaggtggatagtcctgtagtgttatttttgtatattgttgagaaagaaacactaacaaaaggaacaacgagtaatttataaaattgtttaaaatgttggtttgtttactattttattggtaaattaacatgacttaatttgaacaaagtgatgatttgtgtgtattaataagctcacaaatagtgattattttcaaaagatctttttgtaaattttttttttgatccaaggccttgtgagaaatctcttgtttgtatttcttcaggtattttcaattgtttttctttattttcttcagcatttaatcactgtatactatgtaattcctgaaggggaagaactaattaggagttgattgagactttattatggtatagttaggacttgattgtagaagggactaaatgttccaacataatctttacccttctccccaaacaaaatatcaattctgtgtctctacatgcctttgattccttagaggtcggtaatttaacataaaacagggatgtcactttgaggggcagatgaaagtctagagaactgttccttaatagcattgtaaaagttccattccaactgccagtgtagattttaaaagtgttaaatagtgactcccttgattaaactgtttgtaattatttgagtagattaataatgaaaatactttggaaataatatacattttgacattctaccaagaggacaactttggttctggaactggtttctatttgtcaaatcagtttccttttaacataattaatccctttaacaaaaagccgtctatgggattaaaagacacgtgaaatgatacttttattattcccttgctcatataactttaaaaataatacttttagctctaatagctcaagaacacaatattcgttaatgttcagtaaagtagcctgagacattttcaatgtttccttaaggtttttgaatgactgtatatttggcagttaagcagtgccacactacagggtagatatggtaaattttatatttgtatatttacagttacaaaacaaatgtacttttaccttttatttctgaccctgtgtgttagagcagttgcatgctctcctgctgttaaaaacacattgttaagctgtggatttgtactcaataatgacttaggataaacatttattttcattcattgctttacatactagacatttttcttctctttgtaagtagattcaaattagatagtcaataaaacatcttgaaaatcccacaagccaattatgtctctctagtctgaatggcttcattgtttctttctcagtattagaaattatagttacaatgaattgcatatgaagaaggcagacatttatttttaatagccaagtagttctgcaaatagttcttttaacaatttgacctctctccaaaacagagacacatataagtagtgctcatccatgcactactaataatacatggcttattccaaagtttttagtcaacttttgggacttggggtgcattttctcacagaaagaatagtagttaggttccctaacactaccgctgatagctcacctgggaactgaatccacctaaccatgaatgtccttcacttgtaacgtggttcacaggttactaatcatagatcctgaccagcatttgtaacactgctctaactaggacacagcatgcagcagccacactcacaccctgggatgtctgtgtacctctgtccctaggtgtaggaaatggaagaaaaagattcagccaagtggggaggtgacagatgcacaattatgaaacctggttgtacatgttatgaaagtatactaagtaagttagtttttattattaatgtgaaagcaaaaacttgtatgttaacttattttcaatatcttgaccttatttatgatctgctaaagtggtgatttatccattcaaaatatatatttttttccatttaaaactaatttataaactatgtactcctgggaagatttgaaatcttttagaagtttgttgaaatattttcaccatttcagacagacttctgacttagatactgattttaatgccagtatctgctctaaatatttatgataaaaatgcattatttttttaaagagcttgatgagatttgtgataagtgatagtactcaaaaacctgaatcccacccctcgaccaatcctccacaaacttcagttgttggttaacgtattaactgaacacagacaatacagtctgatttagaagtcatcttttcagccgtgtgataattaacatggtaagccttagcagcaaacattcttcctaaaaggaagacttcattttctcaagaaatgggattagttgggggtattataataccaaattgtaaatcatgagcgttttctccactgtgcacctgaggcagatcatgcatctttgagtgcagtttggtctgacccctcaagagaaaagcatggtgccgtagggctgctatggtttgaatggatgccatcactcttttctccacatacagtgcagagagctgtctggagtcacaatctgaacagattctcgggcgctccttctctccttccatcactacagtaagtaaaaggaccatagaggggaaccaggaatctgagaatcagctgtgctcaatagccaacctccctgtccagatgcagctattttggtatctcctatcacatgcactctgaatcagggtttttctataagaaatctttcagaatcagcaaaagtggggatgacccaggcatcttgatttgcaaaatcacaaaactaagttgtcagttatcactgtagatgagcaactcatctttttaaagtatagttactgaactgattctgagaaatctttagagagaaaaaactcaacagtacaaattaactaattgggaaagttagaatgtcctttctgaatttttcattaaaaaaattacattatctgaaataacataaagctactaaactgctttgtattctattaagaaatagctcctaaggatgtagtcttgtttcatagttgttgcactatatcaaaacttaaaatgtaagcccagttcttctctgtatagaaaggaaacattgtgttacttaatgaattatttatacagagcatttgttgccaactgttgttccagccatccacacaggagtctgttctgaggtggcaatagcacatgggaagatgaactttccctgtttgtttacccgttcttctttggctgtatctgatgacagtataagatgttcttaataaagttttatgttctttttgaaatgtg

SEQ ID NO: 196952 - protein, 664 aa, Artificial Sequence
  derived and/or modified sequence
MPAVDKLLLEEALQDSPQTRSLLSVFEEDAGTLTDYTNQLLQAMQRVYGAQNEMCLATQQLSKQLLAYEKQNFALGKGDEEVISTLHYFSKVVDELNLLHTELAKQLADTMVLPIIQFREKDLTEVSTLKDLFGLASNEHDLSMAKYSRLPKKKENEKVKTEVGKEVAAARRKQHLSSLQYYCALNALQYRKQMAMMEPMIGFAHGQINFFKKGAEMFSKRMDSFLSSVADMVQSIQVELEAEAEKMRVSQQELLSVDESVYTPDSDVAAPQINRNLIQKAGYLNLRNKTGLVTTTWERLYFFTQGGNLMCQPRGAVAGGLIQDLDNCSVMAVDCEDRRYCFQITTPNGKSGIILQAESRKENEEWICAINNISRQIYLTDNPEAVAIKLNQTALQAVTPITSFGKKQESSCPSQNLKNSEMENENDKIVPKATASLPEAEELIAPGTPIQFDIVLPATEFLDQNRGSRRTNPFGETEDESFPEAEDSLLQQMFIVRFLGSMAVKTDSTTEVIYEAMRQVLAARAIHNIFRMTESHLMVTSQSLRLIDPQTQVSRANFELTSVTQFAAHQENKRLVGFVIRVPESTGEESLSTYIFESNSEGEKICYAINLGKEIIEVQKDPEALAQLMLSIPLTNDGKYVLLNDQPDDDDGNPNEHRGAESEA

SEQ ID NO: 196953 - DNA, 3239 bp, Artificial Sequence
  derived and/or modified sequence
tttccctgccgggcgcgccacacttcctgttgatccggctcggccgggggctgggccggcgggcaggcggcggcggccactggccaggcgtggacgcgcgcggggccgccgcgggcacggagtggccgccgcgtcgcctgagcccagagccggggagtgctctcggccgccgcgtctcctgccctctgtccttccaacccagccctcggctgagccgcgccgcaccatgcccgccgtggacaagctcctgctagaggaggcgttgcaggacagcccccagactcgctctttactgagcgtgtttgaagaagatgctggcaccctcacagactataccaaccagctgctccaggcaatgcagcgcgtctatggagcccagaatgagatgtgcctggccacacaacagctttctaagcaactgctggcatatgaaaaacagaactttgctcttggcaaaggtgatgaagaagtaatttcaacactccactatttttccaaagtggtggatgagcttaatcttctccatacagagctggctaaacagttggcagacacaatggttctacctatcatacaattccgagaaaaggatctcacagaagtaagcactttaaaggatctatttggactcgctagcaatgagcatgacctctcaatggcaaaatacagcaggctgcctaagaaaaaggagaatgagaaggtgaagaccgaagtcggaaaagaggtggccgcggcccggcggaagcagcacctctcctcccttcagtactactgtgccctcaacgcgctgcagtacagaaagcaaatggccatgatggagcccatgataggctttgcccatggacagattaacttttttaagaagggagcagagatgttttccaaacgtatggacagctttttatcctccgttgcagacatggttcaaagcattcaggtagaactggaagccgaggcggaaaagatgcgggtgtcccagcaagaattactttctgttgatgaatctgtttacactccagactctgatgtggccgcaccacagatcaacaggaacctcatccagaaggctggttaccttaatcttagaaacaaaacagggctggtcaccaccacctgggagaggctttatttcttcacccaaggcgggaatctcatgtgtcagcccaggggagccgtggctggaggtttgatccaggacctggacaactgctcagtgatggccgtggattgcgaagaccggcgctactgcttccagatcaccacgcccaatggaaaatcgggaataatcctccaggctgagagcagaaaggaaaatgaagagtggatatgtgcaataaacaacatctccagacagatctacctgaccgacaaccctgaggcagtcgcgatcaagttgaatcagaccgctctgcaagcagtgactcccattacaagttttggaaaaaaacaagaaagctcatgccccagccagaacctgaaaaattcagagatggaaaatgaaaatgacaagattgttcccaaagcaacagccagtctacctgaagcagaggagctgatcgcgcctggaacgccgattcaattcgatattgtgcttcctgctacagaattccttgatcagaacagagggagcaggcgtaccaacccttttggtgaaactgaggatgaatcatttccagaagcagaagattctcttttgcagcagatgtttatagttcggtttttgggatcaatggcagttaaaacagacagcactactgaagtgatttatgaagcgatgagacaagtattggctgctcgggctattcataacatcttccgcatgacagaatcccatctgatggtcaccagtcaatctttgaggttgatagatccacagactcaagtatcaagggccaattttgaacttaccagtgtcacacaatttgctgctcatcaagaaaacaagagactggttggttttgtcatccgtgttcctgaatccactggagaagaatctctgagtacatacatttttgaaagcaactcagaaggcgaaaagatatgttatgctattaatttgggaaaagaaattattgaggttcagaaggatccagaagcactggctcaattaatgctgtccataccactaaccaatgacggaaaatatgtactgttaaacgatcaaccagatgacgatgatggaaatccaaacgaacatagaggcgcagaatccgaagcataactcacttgcgcctgtgggggaagagcaaacaggaaggagagctacctcctaagggttttaacgtctctgacatacaggcacactgacctgatttccgaaggctgacaatcgtttgtggaatgtaatcttgatgccttgatactgagacttgggagggaaactaagaaatggttgacagcgttcccacccatctacaatgttattttaggtgctttgtggtaagtcttttttcttagattgcgctaaaatttcttagattgttcagcgctcagaacaaaagtttgaaaaatgcattgttcatatgaatgtcatctcttttcagtttccagtatcctttttaaaaaatggcaaaagcctagatttacaatttgatgaacactaaatatttcttattaatataatctatttttgtattttacttaatgagctttaagtgcctgtcgttctgaaaattgtgtatttataattcagcttatctcataattggacctaatagcatttctttgtgcagttaggtgatgagcactgctttgaggcccaagcactagtagagatgcgcgatacaggtctagtttcggtaactgttccagacatcaagcaataaaaaaatgaataccacaaaagatgtttgattttacagtggagccttactgaaccagcattcagaagtttaaggtcctcctaggtatgagtatttttagtagtggatcactgtggacagggtgcagctctaccagttcctgtttcttctgagccagaccctcttcagggaagggaccaattaattttaaaactcacttgaagcacagctggtcatggggcttggtataaagttcctatttccaccctgatacttccaattcctggaaccccagcccactcccccatccctcctccctatcaaactagtataatgattttgaatcggtacagtgtgtttaactgtaactaagttcaacagactattattatctttgtaataaattaacctagcaataaaaaatattctgtttctttc

SEQ ID NO: 196954 - DNA, 1995 bp, Artificial Sequence
  derived and/or modified sequence
atgcccgcagtcgataaactgctcctggaggaagccctccaagatagcccccagacccgatctttgctctcagtgttcgaagaggacgctggcacattgaccgattacactaaccagctgctccaggcgatgcagcgggtatatggagcccaaaatgagatgtgtctagcaacgcaacaattaagcaagcagctgttggcatatgagaaacaaaacttcgcactcggtaaaggggatgaagaggttatcagcacccttcactacttttccaaagttgtcgatgagttaaacctgctccatactgagctggccaaacaactggcggacactatggtgcttcccatcattcaatttagagaaaaggacctgaccgaggtttctactttgaaggacctttttggccttgcgtcgaacgaacacgacttatccatggctaagtacagtagactgccaaagaagaaggaaaacgaaaaagtgaagacggaagttgggaaggaggttgccgcagcacgacgaaagcaacatctttcttcccttcagtattactgtgccttaaacgcattgcagtaccgcaaacagatggctatgatggaaccaatgattggtttcgctcacggtcagattaatttttttaagaagggcgccgagatgttcagcaaaaggatggatagtttcctgagctctgtagccgacatggttcaatctattcaggtggaactagaagccgaagcggagaagatgagggtttcccagcaggaacttctgtcagtcgatgagagcgtctatactcctgatagcgatgttgcagccccccaaataaacagaaacctcatccagaaagccggatatctcaatctacgcaacaagaccggactggtgacaacaacttgggagagactgtacttttttacccagggaggaaatttgatgtgtcagcctcgcggggctgtggccggcggtctgatacaggatctggataactgcagtgtaatggccgttgactgtgaagaccgaaggtactgcttccagattaccacccccaatggcaaatcaggaatcattctgcaagcagaatcacgcaaggaaaatgaagagtggatctgtgcgatcaacaatatcagtagacaaatttacctgactgataatcctgaagccgtggctataaaacttaaccaaaccgcactgcaggccgtcacccctattacctcatttgggaagaagcaggagtcatcatgtccaagccaaaacctcaagaattctgagatggagaatgagaatgataagatcgtgcccaaggccactgccagcctacccgaggccgaggagttgatcgccccgggaacgccaattcagttcgatatcgtactgcctgcaaccgaatttctggaccagaatcgcggctcccgaaggaccaatcctttcggagagactgaagatgaatcatttcccgaagcagaggacagccttctgcagcaaatgttcatcgtcagatttcttgggtcaatggcggtgaaaactgatagtactactgaagttatttatgaggccatgcggcaggtactggccgccagagccattcacaatattttccggatgacagaaagccacctgatggtgacatcccagtccctgcgacttattgacccccagacccaggtgagtagggcaaatttcgaattgacctccgtgacgcaattcgcagcacaccaagaaaataaaagattagtgggattcgttatcagagtgccggagtccacgggcgaagaatccctgagcacctacatttttgaatccaattccgagggcgaaaaaatttgctatgccatcaatctcgggaaagaaatcatcgaggtgcagaaagaccctgaggcactagcccagctcatgctgtcaatcccgttaaccaatgatggtaaatatgtgcttttgaacgatcagccagacgacgacgacggtaatccgaatgagcatcgaggcgccgaaagcgaggcatag

SEQ ID NO: 196955 - DNA, 1995 bp, Artificial Sequence
  derived and/or modified sequence
atgcctgctgtggacaagctgctgctggaggaggccctgcaggacagcccccagaccaggagcctgctgtctgtgtttgaggaggatgctggcaccctgacagactacaccaaccagctgctgcaggccatgcagagggtgtatggagcccagaatgagatgtgcctggccacccagcagctgagcaagcagctgctggcctatgagaagcagaactttgccctgggcaaaggagatgaggaggtgatcagcaccctgcactacttcagcaaggtggtggatgagctgaacctgctgcacacagagctggccaagcagctggccgacaccatggtgctgcccatcatccagttccgggagaaggacctgacagaggtgtccaccctgaaggacctgtttggcctggccagcaatgaacatgacctgtccatggccaagtacagccggctgcccaagaagaaggaaaatgagaaggtgaagacagaggtgggcaaggaggtggccgccgcccggaggaagcagcacctgagcagcctgcagtactactgtgccctgaatgccctgcagtacaggaagcagatggccatgatggagcccatgattggatttgcccacggccagatcaacttcttcaagaagggagctgagatgttcagcaagaggatggacagcttcctgagctctgtggccgacatggtgcagagcatccaggtggagctggaggccgaggccgagaagatgagggtgtcccagcaggagctgctgtctgtggatgagagcgtgtacaccccagacagtgatgtggccgccccccagatcaacagaaacctgatccagaaggccggctacctgaacctgaggaacaagacaggcctggtgaccaccacctgggagcggctgtacttcttcacccagggcggcaacctgatgtgccagcccagaggagctgtggccggcggcctcatccaggacctggacaactgcagcgtgatggctgtggactgtgaggaccggcgctactgcttccagatcaccacccccaacgggaagagcggcatcatcctgcaggccgagagcaggaaagaaaatgaggagtggatctgtgccatcaacaacatcagccggcagatctacctgacagacaaccctgaggccgtggccatcaagctgaaccagacagccctgcaggccgtgacccccatcaccagctttgggaagaagcaggagagcagctgccccagccagaacctgaagaacagcgagatggagaatgaaaatgacaagatcgtgcccaaggccacagccagcctgcctgaggccgaggagctgattgcccctggcacccccatccagtttgacatcgtgctgcctgccacagagttcctggaccagaacagaggcagcaggaggaccaacccctttggagaaacagaagatgagagcttccctgaggccgaggacagcctgctgcagcagatgtttattgtgcgcttcctgggctccatggctgtgaagacagacagcaccacagaggtgatctatgaggccatgaggcaggtgctggccgcccgggccatccacaacatcttcaggatgacagagagccacctgatggtgaccagccagagcctgcggctgattgacccccagacccaggtgtcccgggccaactttgagctgacctctgtgacccagtttgctgcccaccaggagaacaagaggctggtgggcttcgtcatccgggtgcctgagagcactggagaggagagcctgagcacctacatctttgagagcaacagcgagggggagaagatctgctacgccatcaacctgggcaaggagatcatcgaggtgcagaaggaccctgaggccctggcccagctgatgctgagcatccccctgaccaatgatggcaagtatgtgctgctgaatgaccagccagatgatgatgatggcaaccccaatgagcacagaggagctgagagcgaggcctag

SEQ ID NO: 196956 - DNA, 1995 bp, Artificial Sequence
  derived and/or modified sequence
atgcccgccgtggacaagctgctgctggaggaggccctgcaggactctccacagacccgcagtctgctgtcagtgttcgaagaagatgccgggactttgaccgactacacgaaccagcttcttcaggctatgcagagggtatacggcgcacagaatgagatgtgcttggcaactcagcagctcagcaagcagcttcttgcttacgagaaacaaaactttgctctcggcaagggtgacgaagaagtaatttctacacttcattatttttcgaaggtggtcgacgaattaaatttgcttcataccgaactcgctaagcagctggccgacaccatggtcctgcctattattcagttccgggagaaggacctaacagaggtaagtacgctaaaagatcttttcggtcttgcgtcaaatgagcacgatctctccatggcaaaatactcccggcttcctaagaaaaaggaaaacgaaaaagtgaagactgaggtagggaaggaagtcgcggcagccagacgcaagcagcatcttagctcactccagtattattgtgctctaaacgcattgcagtaccggaaacagatggcaatgatggagccaatgatcggcttcgcacacgggcagatcaacttctttaagaaaggggccgaaatgttttcaaagagaatggattcattcctttcgtccgtggcagacatggtgcagagcattcaggtggaacttgaagcagaggctgagaagatgcgggtttcacaacaagagttgctgtcggtagacgagtccgtgtatacaccagacagcgatgtggctgcccctcaaatcaacaggaacctcattcaaaaagccgggtacctgaatctcagaaataaaaccggcctagtgacaacaacgtgggagcggttatattttttcacccagggggggaatctaatgtgccagcccaggggggccgtggcagggggcctgatccaagatctggataattgttcagtcatggctgtggattgtgaagatcgaaggtactgtttccagattaccacccccaacggaaaaagcggcatcattctgcaggcagagtctcggaaggaaaacgaagagtggatttgcgccatcaataatatctctcgtcagatctacctcactgataatccggaagccgtggccatcaaactcaaccagacagccttgcaggcagtgactcctatcacttcctttggcaagaagcaggagtcttcctgtccgagtcagaacttgaaaaatagcgagatggagaacgagaacgacaagattgtgcctaaggccacggcaagcctccccgaggccgaagagttgatagcacctggaaccccaattcagttcgatatagtgctgcccgcaactgaattcttggaccagaacaggggatcccgcaggacaaatccctttggagagactgaggatgaatcttttccagaggcagaggatagcttgctgcaacagatgttcatcgtgaggtttctgggtagtatggcagtcaagacagattctaccactgaagtgatttacgaggctatgaggcaggtgctggctgcccgcgccatacacaatattttccgaatgacagagtctcatcttatggttacatcccagtccctgcggttaatcgacccccaaactcaagtcagccgcgctaattttgaacttacctcggtgactcagttcgccgctcatcaggagaataagcgcctcgtaggtttcgtcatcagggtgccggaaagcacaggagaagagagcctgtcaacttacatttttgaatccaacagcgagggcgagaaaatctgctatgcaatcaatctgggcaaggagattatcgaggtgcagaaggatcccgaagccttggcccagctgatgctgtccatccctctaacgaatgacggtaagtacgtactactgaatgaccaacccgacgacgatgacgggaacccaaatgagcatagaggggcagagtcagaagcttag

SEQ ID NO: 196957 - DNA, 1995 bp, Artificial Sequence
  derived and/or modified sequence
atgccagctgtggacaaactgctgttagaggaggctctgcaggacagcccgcagacgcgcagcctcctaagtgtttttgaggaggacgctgggactctgacagattacacaaatcagctgctgcaggccatgcagagagtgtatggtgcacagaacgaaatgtgcctggctacacagcagttaagtaagcaactactggcctacgagaaacagaactttgcactgggtaagggggacgaagaggtcatatcaacattgcactacttttctaaagtcgtggacgaacttaatcttttgcacacagaactggctaaacaacttgccgacaccatggtgttacccatcattcaatttagggagaaagacctcacagaagtctccacattgaaggatctgtttggtctggcgagcaatgagcacgacctctctatggccaaatactcgcgtctgcccaagaagaaggaaaacgaaaaagtgaagaccgaagtggggaaagaggtggcagctgcgagacgaaaacagcacttatcttcgctccagtattactgtgcactcaacgcattgcagtacagaaagcaaatggccatgatggagcccatgatcggctttgctcacggacaaattaattttttcaaaaagggagccgagatgttctcaaagagaatggactccttcctctcctctgtcgcagacatggtccaatcaatccaggtcgagttggaagctgaggccgagaaaatgagggtatcccaacaggaactactgagtgtagatgaatccgtttatacgccagactcagatgtggccgcaccccaaatcaatcgcaaccttatacagaaagcaggttatctgaatctccgtaacaagaccgggctcgttacaactacttgggaacggttgtactttttcacacagggcggaaatctcatgtgccaacctagaggggcagtagctggcggtctgatccaggacctggataattgttctgtgatggctgtggattgtgaggacagaagatattgctttcagattaccaccccaaacggcaagagtgggatcattctgcaagctgaaagtcggaaagaaaatgaagaatggatatgtgctatcaacaacattagcagacagatttatctaacagacaaccccgaggctgtggctatcaaactgaatcagaccgctctgcaagcagttacacccattacgagcttcggcaagaaacaggagtcctcctgcccaagtcagaacctcaagaacagcgaaatggagaacgaaaatgataaaatcgtgccgaaggccacggcatcactgcctgaggcagaggaacttatcgctccagggacacccatccaatttgatatagtgttacctgccaccgagttcctggaccagaaccgaggaagcaggcggactaaccctttcggggaaacagaggacgagagtttccccgaggcagaggattctctcctacagcaaatgttcattgtaagatttcttggaagcatggccgttaagactgatagtaccactgaggtgatctacgaggctatgcggcaggtactcgcagctcgagctatccacaatatctttagaatgactgaaagtcacctgatggttacgtcccaatcgctgcggctcatcgacccccagacgcaggtatcacgagcaaattttgagttgacttctgtgacacagttcgcggcacatcaggagaacaagaggctggtcggatttgtgatcagagtcccggaatctacaggggaggagtcactttctacctacatcttcgaaagcaactccgaaggcgaaaagatctgttatgccattaacctgggcaaagagatcattgaggtgcaaaaagatccagaggctctggcccagcttatgctcagtatccccctgactaacgatgggaagtatgtgctgctcaacgaccagcctgacgacgacgatggaaatcccaacgagcatcgcggagccgagtctgaggcttag

SEQ ID NO: 196958 - DNA, 1995 bp, Artificial Sequence
  derived and/or modified sequence
atgcccgccgtggacaagctgctgctggaggaggccctgcaggacagcccccagaccagaagcctgctgagcgtgttcgaggaggacgccggcaccctgaccgactacaccaaccagctgctgcaggccatgcagagagtgtacggcgcccagaacgagatgtgcctggccacccagcagctgagcaagcagctgctggcctacgagaagcagaacttcgccctgggcaagggcgacgaggaggtgatcagcaccctgcactacttcagcaaggtggtggacgagctgaacctgctgcacaccgagctggccaagcagctggccgacaccatggtgctgcccatcatccagttcagagagaaggacctgaccgaggtgagcaccctgaaggacctgttcggcctggccagcaacgagcacgacctgagcatggccaagtacagcagactgcccaagaagaaggagaacgagaaggtgaagaccgaggtgggcaaggaggtggccgccgccagaagaaagcagcacctgagcagcctgcagtactactgcgccctgaacgccctgcagtacagaaagcagatggccatgatggagcccatgatcggcttcgcccacggccagatcaacttcttcaagaagggcgccgagatgttcagcaagagaatggacagcttcctgagcagcgtggccgacatggtgcagagcatccaggtggagctggaggccgaggccgagaagatgagagtgagccagcaggagctgctgagcgtggacgagagcgtgtacacccccgacagcgacgtggccgccccccagatcaacagaaacctgatccagaaggccggctacctgaacctgagaaacaagaccggcctggtgaccaccacctgggagagactgtacttcttcacccagggcggcaacctgatgtgccagcccagaggcgccgtggccggcggcctgatccaggacctggacaactgcagcgtgatggccgtggactgcgaggacagaagatactgcttccagatcaccacccccaacggcaagagcggcatcatcctgcaggccgagagcagaaaggagaacgaggagtggatctgcgccatcaacaacatcagcagacagatctacctgaccgacaaccccgaggccgtggccatcaagctgaaccagaccgccctgcaggccgtgacccccatcaccagcttcggcaagaagcaggagagcagctgccccagccagaacctgaagaacagcgagatggagaacgagaacgacaagatcgtgcccaaggccaccgccagcctgcccgaggccgaggagctgatcgcccccggcacccccatccagttcgacatcgtgctgcccgccaccgagttcctggaccagaacagaggcagcagaagaaccaaccccttcggcgagaccgaggacgagagcttccccgaggccgaggacagcctgctgcagcagatgttcatcgtgagattcctgggcagcatggccgtgaagaccgacagcaccaccgaggtgatctacgaggccatgagacaggtgctggccgccagagccatccacaacatcttcagaatgaccgagagccacctgatggtgaccagccagagcctgagactgatcgacccccagacccaggtgagcagagccaacttcgagctgaccagcgtgacccagttcgccgcccaccaggagaacaagagactggtgggcttcgtgatcagagtgcccgagagcaccggcgaggagagcctgagcacctacatcttcgagagcaacagcgagggcgagaagatctgctacgccatcaacctgggcaaggagatcatcgaggtgcagaaggaccccgaggccctggcccagctgatgctgagcatccccctgaccaacgacggcaagtacgtgctgctgaacgaccagcccgacgacgacgacggcaaccccaacgagcacagaggcgccgagagcgaggcctag

SEQ ID NO: 196959 - protein, 1059 aa, Artificial Sequence
  derived and/or modified sequence
MAAVAGSGAAAAPSSLLLVVGSEFGSPGLLTYVLEELERGIRSWDVDPGVCNLDEQLKVFVSRHSATFSSIVKGQRSLHHRGDNLETLVLLNPSDKSLYDELRNLLLDPASHKLLVLAGPCLEETGELLLQTGGFSPHHFLQVLKDREIRDILATTPPPVQPPILTITCPTFGDWAQLAPAVPGLQGALRLQLRLNPPAQLPNSEGLCEFLEYVAESLEPPSPFELLEPPTSGGFLRLGRPCCYIFPGGLGDAAFFAVNGFTVLVNGGSNPKSSFWKLVRHLDRVDAVLVTHPGADSLPGLNSLLRRKLAERSEVAAGGGSWDDRLRRLISPNLGVVFFNACEAASRLARGEDEAELALSLLAQLGITPLPLSRGPVPAKPTVLFEKMGVGRLDMYVLHPPSAGAERTLASVCALLVWHPAGPGEKVVRVLFPGCTPPACLLDGLVRLQHLRFLREPVVTPQDLEGPGRAESKESVGSRDSSKREGLLATHPRPGQERPGVARKEPARAEAPRKTEKEAKTPRELKKDPKPSVSRTQPREVRRAASSVPNLKKTNAQAAPKPRKAPSTSHSGFPPVANGPRSPPSLRCGEASPPSAACGSPASQLVATPSLELGPIPAGEEKALELPLAASSIPRPRTPSPESHRSPAEGSERLSLSPLRGGEAGPDASPTVTTPTVTTPSLPAEVGSPHSTEVDESLSVSFEQVLPPSAPTSEAGLSLPLRGPRARRSASPHDVDLCLVSPCEFEHRKAVPMAPAPASPGSSNDSSARSQERAGGLGAEETPPTSVSESLPTLSDSDPVPLAPGAADSDEDTEGFGVPRHDPLPDPLKVPPPLPDPSSICMVDPEMLPPKTARQTENVSRTRKPLARPNSRAAAPKATPVAAAKTKGLAGGDRASRPLSARSEPSEKGGRAPLSRKSSTPKTATRGPSGSASSRPGVSATPPKSPVYLDLAYLPSGSSAHLVDEEFFQRVRALCYVISGQDQRKEEGMRAVLDALLASKQHWDRDLQVTLIPTFDSVAMHTWYAETHARHQALGITVLGSNSMVSMQDDAFPACKVEF

SEQ ID NO: 196960 - DNA, 3180 bp, Artificial Sequence
  derived and/or modified sequence
atggccgcagtagccgggagtggagccgcagccgccccaagcagcctgcttctggtggttgggtcagagtttgggtcacccgggctgctgacatacgtgctggaagagctcgagcgaggaattcggagctgggacgtggatcctggggtttgcaacctggacgaacagctgaaagtatttgtttccagacactccgctacattttcctcaattgtgaagggacaaagatctttgcatcataggggtgataacctggagactctggtgcttttaaacccgagcgacaagagcctgtacgacgagctgaggaatctgctgctggatcccgcgtctcataaacttcttgtcctcgccggcccatgcctggaagagacaggtgagctgcttctgcagaccggtggcttctcacctcaccatttcctacaagtgctgaaggatcgggaaatacgcgatatcctggcaaccactcccccccccgtccagccacctatcctaactatcacgtgcccaacatttggagattgggcccagcttgcgcctgctgtgccaggactccagggcgccctgcgtctgcagctgaggttaaacccacctgcgcagctgccaaattccgagggcctctgcgaattccttgagtacgtggccgagtcactggaaccacccagccctttcgagttgctggaaccacctacctccggcggatttctccgtctagggcgtccatgctgctatattttccctggaggtttgggggacgcagcatttttcgccgtcaatggattcactgtcttagtaaatggcgggtcaaaccctaaatcttctttttggaagttagtgcggcacctcgaccgcgtggacgccgtattggtgacccatccaggagcagacagtctgcctggattgaatagtcttctccgacgcaaacttgcggagcgtagcgaagttgctgccggggggggcagttgggatgaccgacttcggaggctgatatcacccaatctcggggttgtgttctttaatgcctgcgaggcagcctctaggctcgcccgcggcgaagatgaggcggagctggcactgtccctgctcgctcagctgggaattaccccgctccccctgagccggggcccagtgccggctaaacctacagtccttttcgagaagatgggtgtggggcgtctggatatgtacgtcctgcacccaccaagcgccggagcagaaagaaccctcgcctctgtgtgcgcgctgcttgtgtggcaccccgcagggccgggcgagaaggtggtgcgggtgctttttcccggatgtactcctccagcatgcttactagatggactagtacggctgcaacatttgcgatttcttcgcgagcccgtcgtaacaccacaggacctggagggcccagggcgcgccgaaagtaaggagtctgtcggatcccgagactcatcaaagcgcgaaggcctgctcgcaacccaccctagacctggccaggaacgaccaggtgtggcccggaaggagccagccagggctgaggcccctcggaaaaccgagaaggaggcaaaaaccccacgggaactgaagaaggacccaaaaccgtccgtgagccggactcagccgagggaagtgaggagagccgccagctccgttccgaatctgaagaagacaaacgcacaggctgcgcccaaaccccggaaagccccgagcacatcacattcagggtttcctcccgtcgcaaacggcccccggtcccccccgtccctccgctgtggagaggcatctcctcctagcgcagcttgtggcagccctgcaagtcagctggtggccacgccctcccttgaacttgggcccatccctgcaggagaagagaaggccctcgagttgcctcttgcggcttcaagtatcccaagaccccgcaccccttcaccggagtctcacaggtctccagccgagggcagtgaacgtttatcattgagccccctgcgaggaggcgaggcgggcccggacgcctcgccgaccgtgactacccccactgtgaccacgccctccttacccgcagaagtgggaagtccccattcaacagaagtggatgagagtttaagcgtgtcattcgaacaggtactgccaccaagcgcacccacatccgaagcgggcttgtcacttccactgcgaggccctagagccagaaggagtgctagtcctcatgacgtggatctatgcctcgtcagcccatgcgaattcgaacataggaaggcggtgcccatggcccccgcacctgcctccccaggctcttccaatgactccagcgccagaagtcaggagcgcgccggcgggctcggcgcagaagaaacccctcccacttccgttagcgaaagtctacctactctgagtgatagcgacccagtccctctcgctcccggggccgccgattcagacgaagacacagaaggatttggggtgccaaggcacgaccccctgcccgaccccctgaaggtcccccctccactcccagacccctcgtccatctgcatggtggatccagaaatgttgccaccgaagactgcccgacagacggagaatgtgagtcggactagaaagccgctggccagacctaattcgagagccgccgcccctaaagctacccctgtcgccgcggcaaaaacaaagggactggcgggaggggaccgagccagtcgacctctgagcgcacggtcagagccttcagagaaaggcgggcgagctcctctctctaggaagagctctactcctaagaccgcaaccaggggcccctccgggtccgccagctctaggcctggcgtgtctgcaaccccccctaagagtcccgtgtatttagaccttgcttacctgccatctggaagttcagctcacttggtggacgaggagttcttccaacgcgtacgggccttgtgctacgtcatctcaggacaggaccagagaaaggaggaaggcatgagggccgtattagacgctctgctggcttccaagcaacactgggacagagatctgcaggtgactctcatccctacctttgattcggtagcaatgcatacttggtacgctgaaacgcatgcgagacaccaggcactgggcatcacggtgctgggtagtaacagcatggtttctatgcaggatgacgcctttcctgcctgtaaagtggaattttag

SEQ ID NO: 196961 - DNA, 3180 bp, Artificial Sequence
  derived and/or modified sequence
atggctgctgtggccggcagcggggctgctgctgcccccagcagcctgctgctggtggtgggcagcgagtttggcagccctggcctgctgacctacgtgctggaggagctggagcggggcatccgctcctgggatgtggaccccggggtgtgcaacctggatgagcagctgaaggtgtttgtgagccgccacagcgccaccttcagcagcatcgtgaagggccagaggagcctgcaccacagaggagacaacctggagaccctggtgctgctgaaccccagcgacaagagcctgtatgatgagctgaggaacctgctgctggaccctgccagccacaagctgctggtgctggccggcccctgcctggaggagactggagagctgctgctgcagacaggaggcttcagcccccaccacttcctgcaggtgctgaaggaccgggagatccgggacatcctggccaccaccccacctcctgtgcagccccccatcctgaccatcacctgccccaccttcggggactgggcccagctggccccagctgtgcccggcctgcagggcgccctgcggctgcagctgcggctgaaccccccagcccagctgcccaacagcgagggcctgtgtgagttcctggagtatgtggccgagagcctggagccccccagcccctttgagctgctggagccccccaccagcggcggcttcctgcggctgggccggccctgctgctacatcttccctgggggcctgggagatgctgccttctttgctgtgaatggcttcaccgtgctggtgaatggaggcagcaaccccaagagcagcttctggaagctggtgcgccacctggacagagtggatgctgtgctggtgacccaccctggagctgacagcctgcccggcctgaacagcctgctgcggaggaagctggccgagaggtctgaggtggccgccggcggcggctcctgggatgaccggctgcggcggctcatcagccccaacctgggcgtggtgttcttcaatgcctgtgaggccgccagccggctggcccggggggaggatgaagctgagctggccctgagcctgctggcccagctgggcatcacccccctgcccctgagccggggccctgtgcctgccaagcccaccgtgctgtttgagaagatgggcgtgggccgcctggacatgtatgtgctgcacccccccagcgctggagctgagaggaccctggcctctgtgtgtgccctgctggtgtggcaccctgctggccctggagagaaggtggtgcgggtgctcttccctggctgcaccccaccagcctgcctgctggatggcctggtgcggctgcagcacctgcgcttcctgcgggagcctgtggtgaccccccaggacctggagggccctggccgggcagagagcaaggagagcgtgggcagccgggacagcagcaagcgggagggcctgctggccacccacccccggcccggccaggagaggcctggggtggccaggaaggagcccgcccgggcagaggcccccaggaagacagagaaggaggccaagaccccccgggagctgaagaaggaccccaagcccagcgtgtccaggacccagccccgggaggtgcggcgggccgccagctctgtgcccaacctgaagaagaccaatgcccaggccgcccccaagcccaggaaggcccccagcaccagccacagcggcttcccccctgtggccaacggccccaggagcccccccagcctgcgctgtggggaggccagccccccatctgctgcctgtggcagccctgccagccagctggtggccacccccagcctggagctgggccccatcccagctggggaggagaaggccctggagctgcccctggccgccagcagcatcccccggcccaggacccccagccctgagagccacaggagccctgctgagggcagcgagcggctgagcctgagccccctgcggggcggggaggccggcccagatgccagccccaccgtgaccacccccaccgtgaccacccccagcctgcctgctgaggtgggcagcccccacagcacagaggtggatgagagcctgtctgtgtcctttgagcaggtgctgcccccatctgcccccaccagcgaggccggcctgagcctgcccctgcggggcccccgggccaggagaagtgccagcccccatgatgtggacctgtgcctggtgagcccctgtgaatttgagcacaggaaggctgtgcccatggccccagccccagccagccctggcagcagcaatgacagcagcgcccggagccaggagcgggccggcggcctgggcgctgaggagaccccacccacctctgtgtctgagagcctgcccaccctgagtgacagcgaccctgtgcccctggcccctggagctgctgacagtgatgaggacacagagggcttcggcgtgcccaggcatgaccccctgcctgaccccctgaaggtgcccccacccctgcctgaccccagcagcatctgcatggtggaccctgagatgctgccccccaagacagcccggcagacagaaaatgtgtccaggaccaggaagcccctggcccggcccaacagcagagctgctgcccccaaggccacccctgtggccgccgccaagaccaagggcctggccggcggggaccgggccagccggcccctgagcgcccggtctgagcccagcgagaagggcggccgggcccccctgagcaggaagagcagcacccccaagacagccacccggggccccagcggcagcgccagcagcaggcctggggtgtctgccaccccacccaagagccctgtgtacctggacctggcctacctgcccagcggcagcagcgcccacctggtggatgaggagttcttccagagggtgcgggccctgtgctacgtgatcagcggccaggaccagaggaaggaggagggcatgagagctgtgctggatgccctgctggccagcaagcagcactgggaccgggacctgcaggtgaccctcatccccacctttgattctgtggccatgcacacctggtatgcagagacccacgcccggcaccaggccctgggcatcaccgtgctgggcagcaacagcatggtgtccatgcaggatgatgccttccctgcctgcaaggtggagttctag

SEQ ID NO: 196962 - DNA, 3180 bp, Artificial Sequence
  derived and/or modified sequence
atggccgccgtggccggcagcggcgccgccgccgcccccagcagcctcttgctcgtggtcggatccgagtttggatctcccggactcctcacctacgtgctggaagaactggagagagggattagatcctgggatgtcgaccccggtgtgtgcaatttagacgagcagctgaaggtgttcgtgagtaggcatagcgccactttttcttctatcgtgaaggggcagcggagcctgcaccaccgcggcgataacctcgagacacttgtgcttctgaacccaagtgataagtcactttatgacgagctgaggaatttattattggacccagcgtctcacaagctccttgtgttagccggaccttgcctggaagaaactggggaactgctgcttcagaccggggggttttcacctcaccacttcctgcaggtcctgaaggatagggagattcgcgacatcttggcaaccacacctcctcccgtccaacccccaattctgaccatcacgtgcccaaccttcggcgactgggcccagctagctcccgctgtgccaggcctccagggggctttaaggttgcagttgcgtctgaaccccccggcccagcttcccaatagcgaaggactgtgcgagttcctcgagtacgttgctgaatccctggagccgccttcacctttcgaactactggaaccgccaacaagcggaggattcctgcggctgggtagaccatgctgctatatatttcctggaggtctcggtgacgcggcctttttcgccgtgaatgggtttaccgtcctggttaacggcggctctaatccaaaatcctctttctggaagttagtgcgccacctggatcgggtggatgccgtattagtaacacacccaggcgccgattccctcccaggcctcaattctctgttgcggaggaaattggctgagcggtcagaggtggccgccggaggaggctcctgggacgaccgactgagaaggctgataagccctaacttaggggtcgtcttttttaatgcctgtgaagcagcctctaggttggcgaggggggaagacgaggccgagttagccctgtccctactggcacagctcggcatcacgcccctgccactgagccgcggccccgttccggctaaacccactgtcctctttgaaaagatgggggtggggcggcttgacatgtatgtgctgcacccgccgtctgctggcgcagagagaaccctggcttctgtgtgcgctctgctagtgtggcatccagctgggccaggcgaaaaggtcgtgagggtgctcttccccggttgcactccacccgcttgtctcctggacggcctcgttcgtctacagcatctgaggtttttgagagaacccgtggtgacaccgcaggacctagagggcccaggccgcgccgaaagcaaagagtctgttgggtctagagattccagtaagagagaggggctgctcgccacccaccccaggcccggccaagaaagaccaggggtggcgaggaaagagccagctagggctgaggccccacgaaaaacagagaaggaggccaagacaccccgagagctgaagaaagatcccaaaccctccgtgtctagaacccaacctagagaggtgcgccgggccgcttctagcgtgccaaacctcaagaagaccaacgctcaggcggctccgaagccgcgaaaggccccatctacttctcactcaggcttcccgcccgtggccaacggtcctaggtcacccccctccctccgatgcggtgaagcctcccccccctctgccgcgtgcggatcaccagcttctcagctggtggcaactccttcactggagctgggaccaattccagcaggcgaagagaaagctctggagctgcccttagcagcttcgagtatccccaggccgcgaactccctcccctgaatcacaccgttctccagccgaagggtccgagcggctcagcctctccccacttcgaggaggggaagcggggcctgacgcaagtcctactgtgaccacccctaccgtgacaaccccaagcctgcccgccgaggtcgggtcccctcatagtaccgaggtcgacgagagtctgtctgtgagtttcgaacaagtcctgccacccagcgctccaacctctgaggccgggctgagcttgcccctcagaggcccgagggcgcgaagatccgccagtccccatgatgtggacctttgcttggtaagcccgtgtgagttcgaacaccgaaaagccgtgcctatggcccctgccccagcctcccccggttccagtaacgattccagcgctagaagtcaagagagggccggcggattgggggcagaggagactcctcccacaagcgtgagcgagtctctgccaacactgtccgattcagaccccgtcccactcgcccctggtgcggccgatagtgatgaagacaccgagggctttggagttcctagacatgacccgctacccgacccactaaaggttccacctccactccccgacccgagctccatttgtatggtggatccagaaatgctgccacctaagacagcccggcagactgagaatgtgtcgcggacccgcaaaccccttgcccgaccaaacagccgagctgccgccccaaaggcaaccccggttgcggcggccaaaactaagggcttagccggtggggacagggcaagtagacccctctccgctagaagcgaaccctctgagaaaggggggcgggcaccactctcccgtaagagcagtacacctaagacagcgactaggggaccatctggttcagcttcttccaggcctggagtgtcagccactccaccaaagagccctgtgtacctggatcttgcctaccttccatctggcagcagcgcacaccttgtcgatgaggaatttttccagcgggtcagggcgctgtgctacgtcatttcaggacaggatcagaggaaagaagagggcatgagagccgttctcgacgccttactggccagtaaacagcattgggacagagacctgcaggtgaccctgattccaactttcgactccgtcgccatgcacacttggtacgccgagacccatgccaggcaccaggctctaggaatcactgtgctggggtcgaacagtatggtgtcgatgcaggatgatgcattcccggcatgtaaagtcgagttctag

SEQ ID NO: 196963 - DNA, 3180 bp, Artificial Sequence
  derived and/or modified sequence
atggctgcagtggctgggtctggcgcagccgctgccccttcatcattgttgctagttgtcgggtccgaattcggctccccaggcttactcacttacgtcctcgaggagctcgagaggggaatcaggagttgggacgtggatcctggggtgtgtaacttagacgagcagcttaaggtcttcgtgtcacgacacagcgcaaccttctcatcaattgtgaaagggcagaggagcctacaccatcgcggagataacttagagacattggttttgttaaaccctagtgataagtccctgtacgatgagctccgcaatctgctcctggacccagcttcccacaagcttctggtgctggccggaccctgcttggaggaaacgggagagctgctgctgcagacagggggattctcgcctcatcacttcctgcaggtgctcaaagatagggagatccgcgacatcctggctacaactccccctcctgtacagccaccgatcctcacgataacctgtccaacattcggcgattgggctcagctggcgcctgcagtgccaggattgcagggtgctcttcgactgcagctccggctcaaccctcctgctcagctaccaaatagtgaaggcttgtgtgagttcctggagtacgtggcagagtctctggagcccccttctccctttgagctgctcgagccccctacctctggtggcttcctcaggttaggtcgaccttgctgctacatcttcccagggggattgggagatgctgccttcttcgctgttaatgggttcactgtgctggtaaacgggggaagcaacccaaaaagtagcttctggaaattagtcagacaccttgatcgggtcgatgccgtgcttgtcacacatccaggagctgattctttgcccggtctaaattccctgctgagacgcaaactggctgaaagatctgaggtagcagctgggggtgggtcttgggacgaccgattgcgacgattgattagccccaatctgggcgtcgtgtttttcaacgcctgcgaagctgcgtctaggttggctcggggagaagacgaggccgagttggcactcagcctgttagcacagctgggcattactccactccccctgtcgagaggtccagtaccagcaaagcctactgttctatttgaaaaaatgggcgtgggcagactggatatgtacgtgctgcaccccccatccgctggggctgagagaacactagcctccgtatgcgcgctactggtgtggcaccctgcaggacctggagaaaaagtggtgagagtcctgtttcccggatgcactccccctgcctgcctgttggacggactcgtcaggctccaacaccttagatttctgagagaacctgtggtgacgcctcaggatctggaaggcccaggccgagcggagtcaaaggagagcgtcggtagccgcgactcctctaaacgcgaggggcttctggccacacaccccagaccgggtcaagaacgccctggcgtggcgagaaaagagcctgcacgcgctgaggctccccgtaagacagagaaggaagcaaaaacaccccgtgagctcaaaaaagaccccaaacccagcgtaagtaggacacagccacgagaggttaggcgggctgcctccagcgttccaaacctaaagaaaaccaatgcgcaggctgcccctaaacccaggaaggccccatctaccagccattccggatttccacccgtggccaatgggccaaggagccctccctcactgcgatgcggcgaagcgtcaccaccgagcgcggcatgtggctctccagcttcccagctggtcgccaccccttcgttggaattaggtcccattcctgctggcgaggagaaagctctggagctcccactcgccgcttcctcaatccccaggccccgaaccccctcaccagaaagccacaggtcgcccgctgaaggcagtgaaaggcttagtctgtccccattacggggtggcgaagctgggccagacgcaagccccacggtgaccacacctaccgtgaccacaccatcactgcccgctgaggtcggttctccccattctactgaggtcgatgagagcttatctgtatctttcgagcaggtgctaccaccatctgcgcctacctcagaggcagggctctccctgccattgcgaggacctcgtgcacggaggagcgcctctcctcatgacgtcgacctgtgtcttgttagtccgtgtgagtttgaacaccggaaagcagtgcctatggcccctgcgcctgccagccccggtagctcaaatgactctagcgcgagatctcaagaaagggcgggtggactgggagcagaagagacaccacctacgtccgtgtccgaaagtttgccaaccctgtctgatagtgatcctgtgcccctggccccaggcgcagcagatagcgatgaggatactgaaggctttggtgtcccccgacacgatccgctgccagatccgctgaaagtccccccaccccttcctgacccgagctctatatgtatggtggacccagaaatgcttccgcctaaaacagccagacaaaccgaaaacgtgagtagaactaggaaacccctggctcggccaaattcgagggccgctgcgcctaaagccactccggtcgctgcagctaaaactaaaggcttagcgggtggggaccgagctagccgtcccctatccgcacggtccgaacctagtgaaaagggcggtagagctccactgagtcgtaaaagtagcactcccaaaacagccaccaggggcccatctggatccgcctcttcacggcctggggtttctgctacgcccccaaagagccctgtttacctggacctggcatatctcccaagtggctcctctgcgcatctcgtggacgaagaatttttccagcgcgttagggccctgtgctacgtcatctcgggccaggaccaacgcaaagaggaaggcatgcgcgcagtcctggatgcgctgttagcgtctaagcaacactgggaccgcgacctgcaagtgacactgatacccacgtttgacagcgtggccatgcacacctggtatgctgaaacacatgccaggcatcaggccctcggcataactgttctgggatctaattccatggtgtccatgcaggacgatgcttttcctgcttgcaaagttgagttctag

SEQ ID NO: 196964 - DNA, 3286 bp, Artificial Sequence
  derived and/or modified sequence
gaacgccggggcggcccgaagatggcggcggtggctggatctggggctgccgcggctccgagctcactgctcctcgtggtgggcagcgagttcgggagcccggggctcctcacctacgtcctggaggagctcgaaagaggcatccggtcttgggatgtcgatcctggcgtctgcaaccttgatgaacagctcaaggtctttgtgtcccgacactctgccaccttctccagcattgtgaaaggccagcggagcctgcaccaccgtggagacaacctggagaccctggtcctcctgaacccatcagacaagtccctgtatgatgagctccggaaccttctgttggaccctgcctctcacaagctactggtgttggctgggccctgcctggaggagacgggggagctgctgctacagacagggggcttctcgcctcaccacttcctccaggtcctgaaggacagagagatccgggacatcctggccaccacgcccccacctgtgcagccgcccatactcaccatcacctgccccaccttcggtgactgggctcagctggcacccgctgtgcctggccttcagggggcgctccggctccagctgcggctgaaccccccggcgcagctgcccaactctgagggcctgtgcgaattcctggagtacgtggctgagtctctggagccaccgtcccccttcgagctgctggagcccccgacctccgggggcttcctcaggctgggccggccctgctgctacatcttccctggaggcctcggggatgccgccttcttcgccgtcaatggcttcactgtgctggtcaacggtggctcaaaccccaagtccagtttctggaagctggtgcggcacctggaccgcgtggatgccgtgctggtgacccaccctggcgccgacagcctccccggcctcaacagcctgctgcggcgcaaactggcggagcgctccgaggtggctgctggtgggggctcctgggacgacaggctgcgcaggctcatctcccccaacctgggggtcgtgttcttcaacgcctgcgaggccgcgtcgcggctggcgcgcggcgaggatgaggcggagctggcgctgagcctcctggcgcagctgggcatcacgcctctgccactcagccgcggccccgtgccagccaaacccaccgtgctcttcgagaagatgggcgtgggccggctggacatgtatgtgctgcacccgccctccgccggcgccgagcgcacgctggcctctgtgtgcgccctgctggtgtggcaccccgccggccccggcgagaaggtggtgcgcgtgctgttccccggttgcaccccgcccgcctgcctcctggacggcctggtccgcctgcagcacttgaggttcctgcgagagcccgtggtgacgccccaggacctggaggggccggggcgagccgagagcaaagagagcgtgggctcccgggacagctcgaagagagagggcctcctggccacccaccctagacctggccaggagcgccctggggtggcccgcaaggagccagcacgggctgaggccccacgcaagactgagaaagaagccaagaccccccgggagttgaagaaagaccccaaaccgagtgtctcccggacccagccgcgggaggtgcgccgggcagcctcttctgtgcccaacctcaagaagacgaatgcccaggcggcacccaagccccgcaaagcgcccagcacgtcccactctggcttcccgccggtggcaaatggaccccgcagcccgcccagcctccgatgtggagaagccagcccccccagtgcagcctgcggctctccggcctcccagctggtggccacgcccagcctggagctggggccgatcccagccggggaggagaaggcactggagctgcctttggccgccagctcaatcccaaggccacgcacaccctcccctgagtcccaccggagccccgcagagggcagcgagcggctgtcgctgagcccactgcggggcggggaggccgggccagacgcctcacccacagtgaccacacccacggtgaccacgccctcactacccgcagaggtgggctccccgcactcgaccgaggtggacgagtccctgtcggtgtcctttgagcaggtgctgccgccatccgcccccaccagtgaggctgggctgagcctcccgctgcgtggcccccgggcgcggcgctcggcttccccacacgatgtggacctgtgcctggtgtcaccctgtgaatttgagcatcgcaaggcggtgccaatggcaccggcacctgcgtcccccggcagctcgaatgacagcagtgcccggtcacaggaacgggcaggtgggctgggggccgaggagacgccacccacatcggtcagcgagtccctgcccaccctgtctgactcggatcccgtgcccctggcccccggtgcggcagactcagacgaagacacagagggctttggagtccctcgccacgaccctttgcctgaccccctcaaggtccccccaccactgcctgacccatccagcatctgcatggtggaccccgagatgctgccccccaagacagcacggcaaacggagaacgtcagccgcacccggaagcccctggcccgccccaactcacgcgctgccgcccccaaagccactccagtggctgctgccaaaaccaaggggcttgctggtggggaccgtgccagccgaccactcagtgcccggagtgagcccagtgagaagggaggccgggcacccctgtccagaaagtcctcaacccccaagactgccactcgaggcccgtcggggtcagccagcagccggcccggggtgtcagccaccccacccaagtccccggtctacctggacctggcctacctgcccagcgggagcagcgcccacctggtggatgaggagttcttccagcgcgtgcgcgcgctctgctacgtcatcagtggccaggaccagcgcaaggaggaaggcatgcgggccgtcctggacgcgctactggccagcaagcagcattgggaccgtgacctgcaggtgaccctgatccccactttcgactcggtggccatgcatacgtggtacgcagagacgcacgcccggcaccaggcgctgggcatcacggtgttgggcagcaacagcatggtgtccatgcaggatgacgccttcccggcctgcaaggtggagttctagccccatcgccgacacgccccccactcagcccagcccgcctgtccctagattcagccacatcagaaataaactgtgactacacttg

SEQ ID NO: 196965 - DNA, 3180 bp, Artificial Sequence
  derived and/or modified sequence
atggccgccgtggccggcagcggcgccgccgccgcccccagcagcctgctgctggtggtgggcagcgagttcggcagccccggcctgctgacctacgtgctggaggagctggagagaggcatcagaagctgggacgtggaccccggcgtgtgcaacctggacgagcagctgaaggtgttcgtgagcagacacagcgccaccttcagcagcatcgtgaagggccagagaagcctgcaccacagaggcgacaacctggagaccctggtgctgctgaaccccagcgacaagagcctgtacgacgagctgagaaacctgctgctggaccccgccagccacaagctgctggtgctggccggcccctgcctggaggagaccggcgagctgctgctgcagaccggcggcttcagcccccaccacttcctgcaggtgctgaaggacagagagatcagagacatcctggccaccacccccccccccgtgcagccccccatcctgaccatcacctgccccaccttcggcgactgggcccagctggcccccgccgtgcccggcctgcagggcgccctgagactgcagctgagactgaacccccccgcccagctgcccaacagcgagggcctgtgcgagttcctggagtacgtggccgagagcctggagccccccagccccttcgagctgctggagccccccaccagcggcggcttcctgagactgggcagaccctgctgctacatcttccccggcggcctgggcgacgccgccttcttcgccgtgaacggcttcaccgtgctggtgaacggcggcagcaaccccaagagcagcttctggaagctggtgagacacctggacagagtggacgccgtgctggtgacccaccccggcgccgacagcctgcccggcctgaacagcctgctgagaagaaagctggccgagagaagcgaggtggccgccggcggcggcagctgggacgacagactgagaagactgatcagccccaacctgggcgtggtgttcttcaacgcctgcgaggccgccagcagactggccagaggcgaggacgaggccgagctggccctgagcctgctggcccagctgggcatcacccccctgcccctgagcagaggccccgtgcccgccaagcccaccgtgctgttcgagaagatgggcgtgggcagactggacatgtacgtgctgcacccccccagcgccggcgccgagagaaccctggccagcgtgtgcgccctgctggtgtggcaccccgccggccccggcgagaaggtggtgagagtgctgttccccggctgcaccccccccgcctgcctgctggacggcctggtgagactgcagcacctgagattcctgagagagcccgtggtgaccccccaggacctggagggccccggcagagccgagagcaaggagagcgtgggcagcagagacagcagcaagagagagggcctgctggccacccaccccagacccggccaggagagacccggcgtggccagaaaggagcccgccagagccgaggcccccagaaagaccgagaaggaggccaagacccccagagagctgaagaaggaccccaagcccagcgtgagcagaacccagcccagagaggtgagaagagccgccagcagcgtgcccaacctgaagaagaccaacgcccaggccgcccccaagcccagaaaggcccccagcaccagccacagcggcttcccccccgtggccaacggccccagaagcccccccagcctgagatgcggcgaggccagcccccccagcgccgcctgcggcagccccgccagccagctggtggccacccccagcctggagctgggccccatccccgccggcgaggagaaggccctggagctgcccctggccgccagcagcatccccagacccagaacccccagccccgagagccacagaagccccgccgagggcagcgagagactgagcctgagccccctgagaggcggcgaggccggccccgacgccagccccaccgtgaccacccccaccgtgaccacccccagcctgcccgccgaggtgggcagcccccacagcaccgaggtggacgagagcctgagcgtgagcttcgagcaggtgctgccccccagcgcccccaccagcgaggccggcctgagcctgcccctgagaggccccagagccagaagaagcgccagcccccacgacgtggacctgtgcctggtgagcccctgcgagttcgagcacagaaaggccgtgcccatggcccccgcccccgccagccccggcagcagcaacgacagcagcgccagaagccaggagagagccggcggcctgggcgccgaggagaccccccccaccagcgtgagcgagagcctgcccaccctgagcgacagcgaccccgtgcccctggcccccggcgccgccgacagcgacgaggacaccgagggcttcggcgtgcccagacacgaccccctgcccgaccccctgaaggtgcccccccccctgcccgaccccagcagcatctgcatggtggaccccgagatgctgccccccaagaccgccagacagaccgagaacgtgagcagaaccagaaagcccctggccagacccaacagcagagccgccgcccccaaggccacccccgtggccgccgccaagaccaagggcctggccggcggcgacagagccagcagacccctgagcgccagaagcgagcccagcgagaagggcggcagagcccccctgagcagaaagagcagcacccccaagaccgccaccagaggccccagcggcagcgccagcagcagacccggcgtgagcgccaccccccccaagagccccgtgtacctggacctggcctacctgcccagcggcagcagcgcccacctggtggacgaggagttcttccagagagtgagagccctgtgctacgtgatcagcggccaggaccagagaaaggaggagggcatgagagccgtgctggacgccctgctggccagcaagcagcactgggacagagacctgcaggtgaccctgatccccaccttcgacagcgtggccatgcacacctggtacgccgagacccacgccagacaccaggccctgggcatcaccgtgctgggcagcaacagcatggtgagcatgcaggacgacgccttccccgcctgcaaggtggagttctag

SEQ ID NO: 196966 - protein, 193 aa, Artificial Sequence
  derived and/or modified sequence
MTSSCFRSTTRRSLSSQTAQRLVCPQFINGTAKDSILTSRSQVPIILQWNKSSKKFVPHGDIPNMEDVLAVKSFRMQNTLYLSLTRFIGDSRVMRWNSKQFVEIQALPSRGAMTLQPFSFKDNHYLALGSDYTFSQIYQWDKEKQLFKKFKEIYVQAPRSFTAVSTDRRDFFFASSFKGKTKIFEHIIVDLSL

SEQ ID NO: 196967 - protein, 545 aa, Artificial Sequence
  derived and/or modified sequence
MALRRGGCGALGLLLLLLGAACLIPRSAQVRRLARCPATCSCTKESIICVGSSWVPRIVPGDISSLSLVNGTFSEIKDRMFSHLPSLQLLLLNSNSFTIIRDDAFAGLFHLEYLFIEGNKIETISRNAFRGLRDLTHLSLANNHIKALPRDVFSDLDSLIELDLRGNKFECDCKAKWLYLWLKMTNSTVSDVLCIGPPEYQEKKLNDVTSFDYECTTTDFVVHQTLPYQSVSVDTFNSKNDVYVAIAQPSMENCMVLEWDHIEMNFRSYDNITGQSIVGCKAILIDDQVFVVVAQLFGGSHIYKYDESWTKFVKFQDIEVSRISKPNDIELFQIDDETFFVIADSSKAGLSTVYKWNSKGFYSYQSLHEWFRDTDAEFVDIDGKSHLILSSRSQVPIILQWNKSSKKFVPHGDIPNMEDVLAVKSFRMQNTLYLSLTRFIGDSRVMRWNSKQFVEIQALPSRGAMTLQPFSFKDNHYLALGSDYTFSQIYQWDKEKQLFKKFKEIYVQAPRSFTAVSTDRRDFFFASSFKGKTKIFEHIIVDLSL

SEQ ID NO: 196968 - DNA, 582 bp, Artificial Sequence
  derived and/or modified sequence
atgacctcttcgtgtttcaggagcacaactcgccggtcactcagttcccagactgctcaaagattggtctgtccacagtttataaacggcaccgcaaaggacagtatcctgacttctcgctcccaggtgcccatcattctccagtggaacaaatcctccaagaaatttgtcccgcacggcgatatccccaatatggaggatgtgttggcagtgaagtctttcagaatgcaaaatacgctatacctgtcactaacccgattcatcggcgatagtagggtgatgaggtggaacagtaaacagtttgtagagattcaagctttaccctcccgcggcgctatgactctacagcccttctcatttaaggacaatcactaccttgcactcgggtccgattataccttctcccagatataccagtgggacaaagaaaaacagcttttcaaaaaattcaaggaaatctacgttcaggccccgagatcctttacagcagtttcgactgaccgccgagattttttttttgctagctcattcaaaggcaaaaccaagatctttgagcatattatcgtagaccttagcctctag

SEQ ID NO: 196969 - DNA, 1638 bp, Artificial Sequence
  derived and/or modified sequence
atggcgcttagaaggggtggctgcggggcacttggacttctgctgttgctcttaggcgccgcctgtctgatcccccggtccgcccaggttagacgcctagcaagatgtccagcaacgtgtagttgcaccaaggagtctattatttgcgttggttcctcttgggtgcctcgtattgtgcctggagatatttctagcctctccctggttaacggcacattctctgaaatcaaagacagaatgtttagtcacctgccgagcctgcagctgctattgctgaattccaactctttcaccataattcgtgacgatgcattcgctggcctgtttcacctcgagtacctcttcattgagggcaacaaaatcgagaccatcagccgcaatgcctttcgcggactacgagacctgacacaccttagcctggcgaataatcacattaaagccctacctcgggacgtgttcagcgacctggactcattgattgagcttgacttaagagggaataagtttgaatgtgactgcaaagccaagtggctgtatctgtggctgaaaatgacgaattcgacggtgtcagacgttctctgcatcgggcctccggagtatcaggaaaaaaaactcaatgacgtgacaagttttgactacgaatgtaccactaccgatttcgtggttcaccaaacacttccgtaccagagtgtctctgtcgataccttcaattctaagaacgatgtctacgtggctatagcccagcccagtatggaaaactgcatggtgttggagtgggaccatatagagatgaatttccgctcatatgataatattacaggacaaagcattgttggatgtaaagcgattctgattgatgatcaggtgttcgtagtggtcgcccaattgttcggcggctcccacatctacaaatatgatgagtcatggacgaaattcgtgaagtttcaggacattgaggttagtagaatatcaaaacccaacgacatcgaactgttccagatcgacgatgaaactttcttcgtcattgctgacagttccaaggctgggctgagcaccgtttacaagtggaactccaagggattttatagctatcagtcgctgcatgagtggttcagagataccgacgccgaattcgtggacatagacggcaaaagccatttgattttgagctctcgatcccaggtgccgattatcctgcagtggaacaaatcctccaagaaatttgtgccccacggagacattcccaatatggaggacgtgctggccgtcaaaagctttcggatgcagaataccctgtacctctcgttgacaaggttcattggcgatagcagggtcatgagatggaattctaagcagtttgtagaaattcaggccctgccatcccggggcgccatgacactacagcctttttctttcaaagacaatcactacttagccctggggagtgactataccttcagtcagatttaccagtgggataaggagaaacagctcttcaaaaagtttaaggaaatatatgtccaggctcctcggtccttcacagctgtaagcaccgaccgcagggatttttttttcgcaagctcattcaaggggaaaactaaaatattcgagcatatcatagtcgacctgtccctctag

SEQ ID NO: 196970 - DNA, 582 bp, Artificial Sequence
  derived and/or modified sequence
atgaccagcagctgcttccgcagcaccaccaggaggagcctgagcagccagacagcccagaggctggtgtgcccccagttcatcaatggaacagccaaggacagcatcctgaccagccgcagccaggtgcccatcatcctgcagtggaacaagagcagcaagaagtttgtgccccatggagacatccccaacatggaggatgtgctggccgtgaagagcttcaggatgcagaacaccctgtacctgagcctgacccgcttcatcggggacagccgggtgatgcgctggaacagcaagcagtttgtggagatccaggccctgcccagcagaggagccatgaccctgcagcccttctccttcaaggacaaccactacctggccctgggcagtgactacaccttcagccagatctaccagtgggacaaggagaagcagctgttcaagaagttcaaggagatctacgtgcaggcccccaggagcttcaccgctgtgtccacagaccggcgggacttcttctttgccagcagcttcaagggcaagaccaagatctttgagcacatcatcgtggacctgagcctgtag

SEQ ID NO: 196971 - DNA, 1638 bp, Artificial Sequence
  derived and/or modified sequence
atggccctgcggcggggcggctgtggggccctgggcctgctgctgctgctgctgggcgccgcctgcctgatccccaggtctgcccaggtgcggcggctggcccgctgcccagccacctgcagctgcaccaaggagagcatcatctgtgtgggcagctcctgggtgccccgcatcgtgcctggggacatcagcagcctgagcctggtgaatggcaccttcagcgagatcaaggacaggatgttcagccacctgcccagcctgcagctgctgctgctgaacagcaacagcttcaccatcatcagagatgatgcctttgctggcctcttccacctggagtacctgttcatcgagggcaacaagattgagaccatcagcagaaatgccttccggggcctgcgggacctgacccacctgagcctggccaacaaccacatcaaggccctgcccagagatgtgttcagtgacctggacagcctcatcgagctggacctgcggggcaacaagtttgaatgtgactgcaaggccaagtggctgtacctgtggctgaagatgaccaacagcacagtgtctgatgtgctgtgcatcggccccccagagtaccaggagaagaagctgaatgatgtgaccagctttgattatgagtgcaccaccacagactttgtggtgcaccagaccctgccctaccagagcgtgtctgtggacaccttcaacagcaagaatgatgtgtatgtggccatcgcccagcccagcatggagaactgcatggtgctggagtgggaccacatcgagatgaacttccgctcctatgacaacatcaccggccagagcatcgtgggctgcaaggccatcctgattgatgaccaggtgtttgtggtggtggcccagctgtttggaggcagccacatctacaagtatgatgagagctggaccaagtttgtgaagttccaggacatcgaggtgagccgcatcagcaagcccaatgacatcgagctgttccagattgatgatgagaccttctttgtgattgctgacagcagcaaggccggcctgagcacagtgtacaagtggaacagcaagggcttctacagctaccagagcctgcacgagtggttccgggacacagatgctgagtttgtggacattgatggcaagagccacctgatcctgagcagccgcagccaggtgcccatcatcctgcagtggaacaagagcagcaagaagtttgtgccccatggagacatccccaacatggaggatgtgctggccgtgaagagcttcaggatgcagaacaccctgtacctgagcctgacccgcttcatcggggacagccgggtgatgcgctggaacagcaagcagtttgtggagatccaggccctgcccagcagaggagccatgaccctgcagcccttctccttcaaggacaaccactacctggccctgggcagtgactacaccttcagccagatctaccagtgggacaaggagaagcagctgttcaagaagttcaaggagatctacgtgcaggcccccaggagcttcaccgctgtgtccacagaccggcgggacttcttctttgccagcagcttcaagggcaagaccaagatctttgagcacatcatcgtggacctgagcctgtag

SEQ ID NO: 196972 - DNA, 2950 bp, Artificial Sequence
  derived and/or modified sequence
attcacgatcatccgggatgatgcttttgctggactttttcatcttgaatacctgttcattgaagggaacaaaatagaaaccatttcaagaaatgcctttcgtggcctccgtgacctgactcacctttctttggccaataaccacataaaagcactaccaagggatgtcttcagtgatttagactctctgattgaactagatttgaggggtaataaatttgaatgtgactgcaaagccaagtggctatacctgtggttgaagatgacaaattccaccgtttctgatgtgctgtgtattggtccaccagagtatcaggaaaagaagctaaatgacgtgaccagctttgactatgaatgcacaactacagattttgttgttcatcagactttaccctaccagtcggtttcagtggatacgttcaactccaagaacgatgtgtacgtggccatcgcgcagcccagcatggagaactgcatggtgctggagtgggaccacattgaaatgaatttccggagctatgacaacattacaggtcagtccatcgtgggctgtaaggccattctcatcgatgatcaggtctttgtggtggtagcccagctcttcggtggctctcacatttacaaatacgacgagagttggaccaaatttgtcaaattccaagacatagaggtctctcgcatttccaagcccaatgacatcgagctgtttcagatcgacgacgagacgttctttgtcatcgcagacagctcaaaggctggtctgtccacagtttataaatggaacagcaaaggattctattcttaccagccgctcccaggtccccatcatcctccagtggaataaaagctctaagaagtttgtcccccatggtgacatccccaacatggaggacgtactggctgtgaagagcttccgaatgcaaaataccctctacctttcccttacccgcttcatcggggactcccgggtcatgaggtggaacagtaagcagtttgtggagatccaagctcttccatcccggggggccatgaccctgcagcccttttcttttaaagataatcactacctggccctggggagtgactatacattctctcagatataccagtgggataaagagaagcagctattcaaaaagtttaaggagatttacgtgcaggcgcctcgttcattcacagctgtctccaccgacaggagagatttcttttttgcatccagtttcaaagggaaaacaaagatttttgaacatataattgttgacttaagtttgtgaaggtgtggtgggtgaaactaagagaaatgtagcattagctctcacaaaagaggaccaagaaaaatcaacaaacaaatcaaagccaggctcagagctctgaaattaaaaagcactgaaatagttagatgttttcaaacttttagaactcacattttaatcagggattgcatttattggctaactgcatgacatgcccattctaccatttaaaaaaaaatcttaaagcctgtaatttctgagaaaagagtacagcatttactcttatcatctagaaatgtaatatgcttcccccccgctttttgatgaggaagaagacaattggataagatgggacagcacttataatgaaataaaaaaaaactttgagcccctctcattccactttagcaatctttttggtaagaactcttaaagccaaaagtctgctgaaaagatttgctgattattagtttaaaaatcttgtaacactcagcagtgctattttgagtcatcccagtttcctgaaagtaatgcccagtcttcctgaatcctccttaatagcagaaccttggtgattttgttggctcatatgaatgcttgtcatggatatgttaacaatttagtgtttgacattgcttcctctgccacaaagacaatactctggtgacacatgtctagacccagcacaggctgtaggcccaggagtgactcaaaggagtttttccctctttcttacggttcaaaggtgaccctggtggtggccagagcagtaatgcttgtttgatgctcttcatggctcatctgcttctcagaacccacccgttgagtttgtgggtaaccagcaggcaggccaaagactggtgcttttcatttcatcctttagagggatgaaacagttatttccgtctgatgagcattcggtagaatttttgaagtgagattttatgaagtcaaaggggactttacacagatctcgacctgctttgaaacctagaggtggccctttgatttgtgcgtgtccttgccctctggacaacttaatatttcaagtaatcgaataccaacttccctgccagcccacctgccttccgccccgcttgtgtaacagtcctgttttgttgagttgctgctattgcactgccagtgcagcccacaccaaatcacaacccaagatactcagataggaagactccttcctctcccagtactttaccaaaggaacccccgccaggacccacatggggccacgtgttggcagtggaatcagcctgtgcaggctggggatctcaggctgatcagtaggggccagctttggagccagccaagctgaatcccacactccaggtctgtgctcaagagaccagatggtgtatttccaaatgggcctctctggtatgggcaataggcaagctcctggggtctggttatgtggaagattcttagtggatgttccgcctggttagctggttctcttcagagaatataaagtgaatgcctttaggggtagctctgaaagagaaacccaacaacttcattcctagccatgaaagtagcacgatcatattgtactgtattgttattgtaaaatgactatttgccatgtcatgagtaggtagatgttttgccacaaatatgaatgtgtttgttgtttcctgactttaagcaatgaagattgagacaataaatagcactcagag

SEQ ID NO: 196973 - DNA, 6428 bp, Artificial Sequence
  derived and/or modified sequence
gagtgggggtggcggccagcatgctgctcggctgcggctcggcctcccacacccgcggctccctagtcctcgccagcagcggcggcggcagagcagcgagcggcgcccgcgtctgcagcggcgccgggtccgagcgcgcggcgcggcggtgggggtcggggcccgggcggggagcggggaccgggcatggcgctgcggagaggcggctgcggagcgctcgggctgctgctgctgctgctgggcgccgcgtgcctgataccgcggagcgcgcaggtgaggcggctggcgcgctgccccgccacttgcagctgtaccaaggagtctatcatctgcgtgggctcttcctgggtgcccaggatcgtgccgggcgacatcagctccctgagcctggtaaatgggacgttttcagaaatcaaggaccgaatgttttcccatctgccttctctgcagctgctattgctgaattctaactcattcacgatcatccgggatgatgcttttgctggactttttcatcttgaatacctgttcattgaagggaacaaaatagaaaccatttcaagaaatgcctttcgtggcctccgtgacctgactcacctttctttggccaataaccacataaaagcactaccaagggatgtcttcagtgatttagactctctgattgaactagatttgaggggtaataaatttgaatgtgactgcaaagccaagtggctatacctgtggttgaagatgacaaattccaccgtttctgatgtgctgtgtattggtccaccagagtatcaggaaaagaagctaaatgacgtgaccagctttgactatgaatgcacaactacagattttgttgttcatcagactttaccctaccagtcggtttcagtggatacgttcaactccaagaacgatgtgtacgtggccatcgcgcagcccagcatggagaactgcatggtgctggagtgggaccacattgaaatgaatttccggagctatgacaacattacaggtcagtccatcgtgggctgtaaggccattctcatcgatgatcaggtctttgtggtggtagcccagctcttcggtggctctcacatttacaaatacgacgagagttggaccaaatttgtcaaattccaagacatagaggtctctcgcatttccaagcccaatgacatcgagctgtttcagatcgacgacgagacgttctttgtcatcgcagacagctcaaaggctggtctgtccacagtttataaatggaacagcaaaggattctattcttaccagtcactgcacgagtggttcagggacacggatgcggagtttgttgatatcgatggaaaatcgcatctcatcctgtccagccgctcccaggtccccatcatcctccagtggaataaaagctctaagaagtttgtcccccatggtgacatccccaacatggaggacgtactggctgtgaagagcttccgaatgcaaaataccctctacctttcccttacccgcttcatcggggactcccgggtcatgaggtggaacagtaagcagtttgtggagatccaagctcttccatcccggggggccatgaccctgcagcccttttcttttaaagataatcactacctggccctggggagtgactatacattctctcagatataccagtgggataaagagaagcagctattcaaaaagtttaaggagatttacgtgcaggcgcctcgttcattcacagctgtctccaccgacaggagagatttcttttttgcatccagtttcaaagggaaaacaaagatttttgaacatataattgttgacttaagtttgtgaaggtgtggtgggtgaaactaagagaaatgtagcattagctctcacaaaagaggaccaagaaaaatcaacaaacaaatcaaagccaggctcagagctctgaaattaaaaagcactgaaatagttagatgttttcaaacttttagaactcacattttaatcagggattgcatttattggctaactgcatgacatgcccattctaccatttaaaaaaaaatcttaaagcctgtaatttctgagaaaagagtacagcatttactcttatcatctagaaatgtaatatgcttcccccccgctttttgatgaggaagaagacaattggataagatgggacagcacttataatgaaataaaaaaaaactttgagcccctctcattccactttagcaatctttttggtaagaactcttaaagccaaaagtctgctgaaaagatttgctgattattagtttaaaaatcttgtaacactcagcagtgctattttgagtcatcccagtttcctgaaagtaatgcccagtcttcctgaatcctccttaatagcagaaccttggtgattttgttggctcatatgaatgcttgtcatggatatgttaacaatttagtgtttgacattgcttcctctgccacaaagacaatactctggtgacacatgtctagacccagcacaggctgtaggcccaggagtgactcaaaggagtttttccctctttcttacggttcaaaggtgaccctggtggtggccagagcagtaatgcttgtttgatgctcttcatggctcatctgcttctcagaacccacccgttgagtttgtgggtaaccagcaggcaggccaaagactggtgcttttcatttcatcctttagagggatgaaacagttatttccgtctgatgagcattcggtagaatttttgaagtgagattttatgaagtcaaaggggactttacacagatctcgacctgctttgaaacctagaggtggccctttgatttgtgcgtgtccttgccctctggacaacttaatatttcaagtaatcgaataccaacttccctgccagcccacctgccttccgccccgcttgtgtaacagtcctgttttgttgagttgctgctattgcactgccagtgcagcccacaccaaatcacaacccaagatactcagataggaagactccttcctctcccagtactttaccaaaggaacccccgccaggacccacatggggccacgtgttggcagtggaatcagcctgtgcaggctggggatctcaggctgatcagtaggggccagctttggagccagccaagctgaatcccacactccaggtctgtgctcaagagaccagatggtgtatttccaaatgggcctctctggtatgggcaataggcaagctcctggggtctggttatgtggaagattcttagtggatgttccgcctggttagctggttctcttcagagaatataaagtgaatgcctttaggggtagctctgaaagagaaacccaacaacttcattcctagccatgaaagtagcacgatcatattgtactgtattgttattgtaaaatgactatttgccatgtcatgagtaggtagatgttttgccacaaatatgaatgtgtttgttgtttcctgactttaagcaatgaagattgagacaataaatagcactcagagaatgaagcattgatgttacatcagcactcttgggtacattctgggactgtaggctgaggcttctagcctcagaaaccacggattttaatgaacgaactcacccacgcatagtagtgttgttacttgaaacttctgcaaaataccaagcaaacaggagaaaagtggtttgttttcatttttaagtgcaaattacttttcttctgcacttttttttccctcttggtttctttgaacaggctacaaatgcccaggtccccccattggaggctgaaagggaaagagctttgccattcctccagtcctaaagatggcaagctattctttctgttgcatggaaccactcagataaacctgggcagaaaaatgggtacttggcaaactgtaggagatatttagacagtcccagcaactatgccagatcaaagtgatgttcccaattccagccacctgtagagatggcaaggtggcatcttttcacagtgttgctactgcagagaggtatcacattcccagctgcccctctgagggtaaatgagcgactgaccccctgcactcactattctgctcacattgccagattctgggaaaccaggaaacacaggatgctgggcttaggatggggagagctgttgagtccagatggggaattaggaggtgaaagaacgatctaaacaggtgatgggtggggtgtgagaagggggtgacccactcaactgcaatcaggttttccttttttataatgttattttatacaagactaaagcctgtagtctacagagcgcctgtgctgtggaaggagatatttgttctggccaacttactaaaggagcatagatgttcttggcacggggtggtgatatctttgcttcattaatcttactgctccatcccaagaatccctgaagttttaaacaacttctgcaagaagcattcttccagtaataatgtaaaacaaaaaaccaaccaagcaacagcaaaaatgcaaagcagagaaatatgtggaccgtccccagtggagatcagcttgaaggagggggtggatctttcttctactttccctcccatcacccactgggtggtcgtctgctcagcttatttcttctttatgaactttgtggcgaggctcctggactgatccctctgtgcggccatgtggctttaaggcctttccttaaagggggcttgtccccatactccatggggtcgggaatgggtctattatcaagactctaaaaataactcttagacatgaagagcactgtgttattggacagtggatgataaggccaccttacatttagcaaagctttatatttttccaatgcacattagtactcacctcatttgttcataaatagctctgaagtttattgcagggcaggtattattctaatttcagagagaaggaaatagacatgaaaactatatgaattgcctgccatggttatccaatagggactggcaaagcaataactttccctctgatcagcagacattgtattttctttctaagacaccctgctatactctcccagagaaagactttcatttctagcatgattttgaatttggcagcaccttgagataaagtaaaaagtgcaataaaatatgcatagccagaagaaaaatcatactgaatagacaccattcaatcaactggtccatttaacaattaacaaacatgcaattgcatgccccactctttttacattcaaggccccactcttgaaagtggtccagaaattttggatagttttctgttgtactaaggaggatatctagctggtctggttgtttctccccctgcatagctatggggaggatgttgaggttgagacacatctggttcttgtcacattgtccaccagataaacaagaagagatctgtgaaggaaaaattcaaaacctgaatgcacgagtggtgatgaattgctctcggccgtcatcagccttcaggaagcacactggaaatggcagagttgcattttttcttccccatggagtgagagtctgtgtatttttaggaaagaaatcagcatgggatgccagaggtttggcggtcaggagtgctcatgatggaaatttctctggcctggggtataatgaaggtgagatgaagatctgcaggaggggagtctatttgcatgccacctaaagaaaacctcttaagctggcttcctgattcttctgcagaggtatcagcctctccttcgcagctgcggaaggaagttctttaattaggcagcggccaaagattctgttcaacagcttcctggagtggaatacaataatctagttgtatgcaatgatgcaattagaaagtggtccggatttgggtggcaatggaaggggaatggcaaagtggggcagatggctctggaggaaacttgggaaagtaaaaacaaactgaaagaaaaggaaaaaaggatgatgatttcttttgcctcagccaggcaagcagagggtagaatgaccaggaagattaacaacatctcaattattaatgaagagagccaactgtaatgctcattcaaataagaagcatattgtaaagctactgagatcgaaaccaagttattattatccttactgtattccattgcttgtatcaaaatctactttttttctagtaggaaactatgcattccctatcagtccctttgattatcaggaatgtataagaattgtgataaaataggccaatatgctatttggtaccatttgtatgtattttaagtgcataacctaggtaaaataagaatagtttctatgtgtaaagaagcaagttttacagtatgcagactacagtggatgtattttaggctgtatacatatttagctctttttggtaaatagggtatacaaactatatgcctcttaattcaatatattcggtaagcctatgaataaaaagtggttcatgcctaa

SEQ ID NO: 196974 - DNA, 582 bp, Artificial Sequence
  derived and/or modified sequence
atgaccagcagctgcttccggagcaccacccggcggagcctgagctctcagacggctcagcgactggtgtgtcctcagtttataaacggaactgccaaggattctattctgacctcacgttctcaggtccccatcatactgcagtggaacaaatctagcaagaagtttgtccctcatggtgacattcctaacatggaagacgtgttagcagttaagtccttccgaatgcagaatacattgtacctgtctctgaccagattcataggcgactctagggtcatgagatggaactccaagcagttcgtcgaaatccaggctttgcctagccgcggggcaatgaccctgcagcccttttctttcaaggacaaccactacttggccctgggaagtgattatacattttcccagatttaccagtgggataaggaaaagcagcttttcaaaaagttcaaggaaatttatgtacaggctccgagaagctttaccgccgtgtccacggatcgccgagactttttctttgccagttcctttaaggggaaaactaagatcttcgagcatatcatcgtggatttatcattgtag

SEQ ID NO: 196975 - DNA, 1638 bp, Artificial Sequence
  derived and/or modified sequence
atggccctgcggcggggcggctgcggcgccctgggcctgctgctgctactccttggggcagcgtgtctgattccgcgctccgctcaggtgaggcgtctggccaggtgccccgcaacctgctcttgtaccaaggagagtatcatttgtgtcggtagcagctgggtacctaggattgtgcctggagatattagttctctgtcgctggtgaacggtaccttcagcgagattaaagataggatgttcagccatttgcccagtctgcagctcctcttgctgaatagtaactctttcactatcatcagggacgatgcctttgctggcctgtttcacctggagtacttgtttatagagggaaataagattgaaaccatatccagaaacgcttttaggggcctgagggatctgacccacctgtctctcgctaataatcacattaaggccctgccaagggacgtattctcagatttagacagtctgatcgagctggatctgcgtggcaacaaatttgaatgtgattgcaaagctaaatggctgtacctgtggctcaagatgactaactccaccgtgtccgacgtgctttgtattggccccccagaataccaggagaagaaactgaatgatgtgaccagttttgactatgaatgcaccacgacagattttgtagtgcatcagacgttaccctatcaatcagtcagtgtggacactttcaattctaagaatgatgtatacgtggctattgctcaaccatccatggagaattgcatggtgctcgagtgggaccacatagaaatgaattttcgatcatacgacaatatcaccgggcagagcattgtggggtgcaaggccattctgattgatgaccaggtctttgtcgttgtggcccagctttttgggggctctcacatctataagtatgatgaaagttggaccaagtttgtgaagtttcaggatatcgaggtgtcccgcatttccaagccgaatgatattgaactctttcaaatcgatgacgagaccttcttcgtcattgccgatagcagtaaagctgggctctcaactgtgtacaaatggaattccaaggggttctattcctaccaatctctgcacgagtggtttcgggacaccgacgccgaattcgtggacattgatgggaaatcccatctgattctcagcagccggtcccaggtgcctataatactgcagtggaacaagtcatcaaaaaaattcgtgccacacggtgacatcccaaacatggaagatgtgttggccgtcaagagctttagaatgcaaaacacactgtacctctcactgacacggtttattggtgactcgcgggtgatgcgctggaacagcaaacaatttgtagagatccaagcattgccctccaggggagcaatgactctgcagcctttttcgttcaaggacaaccactatctagcgctggggtctgattacacattttcccagatctatcagtgggacaaagagaaacagttattcaaaaaattcaaagagatttatgttcaggccccaaggagctttacagccgtttccacggacaggcgagatttttttttcgcgtcctcatttaaaggaaaaacaaagattttcgagcacatcatcgtggatctcagtctatag

SEQ ID NO: 196976 - DNA, 582 bp, Artificial Sequence
  derived and/or modified sequence
atgacaagctcatgcttccgcagtaccacaagacggtctctgagcagtcagacagcacagaggctggtctgcccgcagttcattaacggaacagcgaaagactctatcctaacatctaggtcccaggtcccaataatcctccagtggaacaaaagctcaaagaaattcgtgccacacggggacattcccaatatggaggacgtactagccgttaagtcctttcgcatgcagaacacactgtacctatcactgacccggttcattggagactctagggtgatgcggtggaactccaaacagtttgtggagattcaggctctcccatctcgaggcgcaatgaccctccagccattctcttttaaagataatcactacttggcactagggtcggattataccttttcccagatttaccagtgggacaaggagaaacaactattcaaaaagttcaaggagatctatgtccaggccccacgcagctttacagcagtgagtacagataggcgcgattttttcttcgccagctcattcaaaggtaaaaccaagatcttcgagcacatcattgtggacctgagcttatag

SEQ ID NO: 196977 - DNA, 1638 bp, Artificial Sequence
  derived and/or modified sequence
atggcgctgcgacgcggtggctgtggggcactggggttactactcctgctgttaggtgcagcgtgccttatacccaggagcgcccaggttaggcgtctggcgaggtgccctgctacctgttcttgtaccaaagagagtattatctgtgtgggttcctcatgggtgccacggattgtgcctggggatatcagtagcctgtcactggtaaacgggactttctcggagattaaggacagaatgttctctcatctgccatcactgcaactcctgctgctgaactccaactccttcaccatcattcgagatgacgcctttgccggattatttcacctcgagtacctgtttatcgaaggaaataaaatcgagacgataagcagaaacgccttcagaggcttgcgagacctcacgcatctgtccctggccaacaaccacattaaggctcttcctcgagacgtatttagcgatttagattccctcatagagttggatcttagaggtaacaaattcgagtgcgactgcaaagccaagtggttatatctgtggctgaaaatgacaaactcaacggtcagcgatgttttgtgtatagggcctcccgagtaccaagaaaaaaagctgaatgacgttacatcgttcgattatgagtgcaccacaacagacttcgtggtccatcagaccctcccgtatcaaagcgtgagcgttgacacattcaattcgaagaatgacgtgtatgtggcaatcgcacagccctcgatggaaaactgcatggtgctcgaatgggaccatatagaaatgaattttcggtcatatgacaacataacagggcagtctattgtcgggtgtaaggccatcttaatagacgatcaggtgttcgttgtggtcgcgcagctgttcggagggagtcacatctacaagtacgatgaatcttggaccaagttcgttaagttccaagatattgaggtgtctcgaatttccaagcccaatgacattgaattgttccagatcgatgacgagaccttcttcgtgatcgcagactcctcaaaagccggactgtctactgtgtacaaatggaacagtaagggtttctattcctaccagagtctgcacgagtggtttagagataccgatgctgagtttgtcgatatagacgggaaaagccatctgatcctctcgagtagatcccaggtgccaattatactgcagtggaacaagtcttctaagaagttcgtaccacacggtgatatcccaaatatggaggacgtgctggccgttaaaagcttccggatgcaaaatactctgtatctgtccctcacacggttcatcggtgactcacgggttatgagatggaacagcaagcaattcgtggaaattcaggccctaccgtcacggggtgccatgacgctacaaccgttcagttttaaggacaatcattatctcgccctcggatctgattatacatttagtcaaatttaccagtgggacaaggaaaaacagctatttaaaaagtttaaggagatctatgtacaggcccctcgtagcttcacggcagttagcaccgatcggagagacttcttcttcgcgagttccttcaaaggcaaaacaaagatctttgagcacataattgtagatctcagcctttag

SEQ ID NO: 196978 - DNA, 582 bp, Artificial Sequence
  derived and/or modified sequence
atgaccagcagctgcttcagaagcaccaccagaagaagcctgagcagccagaccgcccagagactggtgtgcccccagttcatcaacggcaccgccaaggacagcatcctgaccagcagaagccaggtgcccatcatcctgcagtggaacaagagcagcaagaagttcgtgccccacggcgacatccccaacatggaggacgtgctggccgtgaagagcttcagaatgcagaacaccctgtacctgagcctgaccagattcatcggcgacagcagagtgatgagatggaacagcaagcagttcgtggagatccaggccctgcccagcagaggcgccatgaccctgcagcccttcagcttcaaggacaaccactacctggccctgggcagcgactacaccttcagccagatctaccagtgggacaaggagaagcagctgttcaagaagttcaaggagatctacgtgcaggcccccagaagcttcaccgccgtgagcaccgacagaagagacttcttcttcgccagcagcttcaagggcaagaccaagatcttcgagcacatcatcgtggacctgagcctgtag

SEQ ID NO: 196979 - DNA, 1638 bp, Artificial Sequence
  derived and/or modified sequence
atggccctgagaagaggcggctgcggcgccctgggcctgctgctgctgctgctgggcgccgcctgcctgatccccagaagcgcccaggtgagaagactggccagatgccccgccacctgcagctgcaccaaggagagcatcatctgcgtgggcagcagctgggtgcccagaatcgtgcccggcgacatcagcagcctgagcctggtgaacggcaccttcagcgagatcaaggacagaatgttcagccacctgcccagcctgcagctgctgctgctgaacagcaacagcttcaccatcatcagagacgacgccttcgccggcctgttccacctggagtacctgttcatcgagggcaacaagatcgagaccatcagcagaaacgccttcagaggcctgagagacctgacccacctgagcctggccaacaaccacatcaaggccctgcccagagacgtgttcagcgacctggacagcctgatcgagctggacctgagaggcaacaagttcgagtgcgactgcaaggccaagtggctgtacctgtggctgaagatgaccaacagcaccgtgagcgacgtgctgtgcatcggcccccccgagtaccaggagaagaagctgaacgacgtgaccagcttcgactacgagtgcaccaccaccgacttcgtggtgcaccagaccctgccctaccagagcgtgagcgtggacaccttcaacagcaagaacgacgtgtacgtggccatcgcccagcccagcatggagaactgcatggtgctggagtgggaccacatcgagatgaacttcagaagctacgacaacatcaccggccagagcatcgtgggctgcaaggccatcctgatcgacgaccaggtgttcgtggtggtggcccagctgttcggcggcagccacatctacaagtacgacgagagctggaccaagttcgtgaagttccaggacatcgaggtgagcagaatcagcaagcccaacgacatcgagctgttccagatcgacgacgagaccttcttcgtgatcgccgacagcagcaaggccggcctgagcaccgtgtacaagtggaacagcaagggcttctacagctaccagagcctgcacgagtggttcagagacaccgacgccgagttcgtggacatcgacggcaagagccacctgatcctgagcagcagaagccaggtgcccatcatcctgcagtggaacaagagcagcaagaagttcgtgccccacggcgacatccccaacatggaggacgtgctggccgtgaagagcttcagaatgcagaacaccctgtacctgagcctgaccagattcatcggcgacagcagagtgatgagatggaacagcaagcagttcgtggagatccaggccctgcccagcagaggcgccatgaccctgcagcccttcagcttcaaggacaaccactacctggccctgggcagcgactacaccttcagccagatctaccagtgggacaaggagaagcagctgttcaagaagttcaaggagatctacgtgcaggcccccagaagcttcaccgccgtgagcaccgacagaagagacttcttcttcgccagcagcttcaagggcaagaccaagatcttcgagcacatcatcgtggacctgagcctgtag

SEQ ID NO: 196980 - protein, 662 aa, Artificial Sequence
  derived and/or modified sequence
MEEEGLECPNSSSEKRYFPESLDSSDGDEEEVLACEDLELNPFDGLPYSSRYYKLLKEREDLPIWKEKYSFMENLLQNQIVIVSGDAKCGKSAQVPQWCAEYCLSIHYQHGGVICTQVHKQTVVQLALRVADEMDVNIGHEVGYVIPFENCCTNETILRYCTDDMLQREMMSNPFLGSYGVIILDDIHERSIATDVLLGLLKDVLLARPELKLIINSSPHLISKLNSYYGNVPVIEVKNKHPVEVVYLSEAQKDSFESILRLIFEIHHSGEKGDIVVFLACEQVYNPRIRANSLVMQPISQSQAEIRKQILGSSSSGKFFCLYTEEFASKDMTPLKPAEMQEANLTSMVLFMKRIDIAGLGHCDFMNRPAPESLMQALEDLDYLAALDNDGNLSEFGIIMSEFPLDPQLSKSILASCEFDCVDEVLTIAAMVTAPNCFSHVPHGAEEAALTCWKTFLHPEGDHFTLISIYKAYQDTTLNSSSEYCVEKWCRDYFLNCSALRMADVIRAELLEIIKRIELPYAEPAFGSKENTLNIKKALLSGYFMQIARDVDGSGNYLMLTHKQVAQLHPLSGYSITKKMPEWVLFHKFSISENNYIRITSEISPELFMQLVPQYYFSNLPPSESKDILQQVVDHLSPVSTMNKEQQMCETCPETEQRCTLQ

SEQ ID NO: 196981 - protein, 743 aa, Artificial Sequence
  derived and/or modified sequence
MEEEGLECPNSSSEKRYFPESLDSSDGDEEEVLACEDLELNPFDGLPYSSRYYKLLKEREDLPIWKEKYSFMENLLQNQIVIVSGDAKCGKSAQVPQWCAEYCLSIHYQHGGVICTQVHKQTVVQLALRVADEMDVNIGHEVGYVIPFENCCTNETILRYCTDDMLQREMMSNPFLGSYGVIILDDIHERSIATDVLLGLLKDVLLARPELKLIINSSPHLISKLNSYYGNVPVIEVKNKHPVEVVYLSEAQKDSFESILRLIFEIHHSGEKGDIVVFLACEQDIEKVCETVYQGSNLNPDLGELVVVPLYPKEKCSLFKPLDETEKRCQVYQRRVVLTTSSGEFLIWSNSVRFVIDVGVERRKVYNPRIRANSLVMQPISQSQAEIRKQILGSSSSGKFFCLYTEEFASKDMTPLKPAEMQEANLTSMVLFMKRIDIAGLGHCDFMNRPAPESLMQALEDLDYLAALDNDGNLSEFGIIMSEFPLDPQLSKSILASCEFDCVDEVLTIAAMVTAPNCFSHVPHGAEEAALTCWKTFLHPEGDHFTLISIYKAYQDTTLNSSSEYCVEKWCRDYFLNCSALRMADVIRAELLEIIKRIELPYAEPAFGSKENTLNIKKALLSGYFMQIARDVDGSGNYLMLTHKQVAQLHPLSGYSITKKMPEWVLFHKFSISENNYIRITSEISPELFMQLVPQYYFSNLPPSESKDILQQVVDHLSPVSTMNKEQQMCETCPETEQRCTLQ

SEQ ID NO: 196982 - protein, 367 aa, Artificial Sequence
  derived and/or modified sequence
MQPISQSQAEIRKQILGSSSSGKFFCLYTEEFASKDMTPLKPAEMQEANLTSMVLFMKRIDIAGLGHCDFMNRPAPESLMQALEDLDYLAALDNDGNLSEFGIIMSEFPLDPQLSKSILASCEFDCVDEVLTIAAMVTAPNCFSHVPHGAEEAALTCWKTFLHPEGDHFTLISIYKAYQDTTLNSSSEYCVEKWCRDYFLNCSALRMADVIRAELLEIIKRIELPYAEPAFGSKENTLNIKKALLSGYFMQIARDVDGSGNYLMLTHKQVAQLHPLSGYSITKKMPEWVLFHKFSISENNYIRITSEISPELFMQLVPQYYFSNLPPSESKDILQQVVDHLSPVSTMNKEQQMCETCPETEQRCTLQ

SEQ ID NO: 196983 - protein, 112 aa, Artificial Sequence
  derived and/or modified sequence
MEEEGLECPNSSSEKRYFPESLDSSDGDEEEVLACEDLELNPFDGLPYSSRYYKLLKEREDLPIWKEKYSFMENLLQNQIVIVSGDAKCGKSAQVPQWCAEYCLSIHYQHGG

SEQ ID NO: 196984 - DNA, 1989 bp, Artificial Sequence
  derived and/or modified sequence
atggaggaggaaggtttggaatgtccaaatagcagctcggagaagcggtacttccctgagagcctcgactcgtctgacggcgatgaggaggaagttctggcctgcgaagatctcgagctgaacccttttgacggcctgccctatagctcgcgatattataaattactgaaagagcgagaggacctgcccatctggaaagagaaatatagcttcatggaaaatctgcttcaaaaccagattgtgatcgtctcgggggatgccaagtgtgggaaatctgcccaggtcccacagtggtgcgctgagtactgcttaagcatacactaccaacatggcggcgtgatttgcacccaggttcataagcaaacagttgtccagctcgccctcagggtggcggacgaaatggacgtgaatatcggtcatgaggtcggctacgtgatacctttcgaaaattgttgcactaatgaaacgatcctgaggtattgtacagacgatatgttacaacgcgagatgatgtccaatccattcttgggaagctacggcgttatcatactcgacgacatccacgagcgttctattgccaccgacgttctgctgggtctgcttaaggacgtgctactggcaagaccagagttgaaactcattattaactctagcccccatctgatttccaagctcaacagttactacggaaacgtgccagtgatcgaggtgaagaacaaacatcctgtcgaggtggtttacttgagcgaagcccagaaggacagctttgagtccattttgagacttattttcgaaattcaccacagcggggaaaagggggatatcgtagtctttctcgcatgtgagcaggtgtataatccgaggattcgtgccaactcattggtcatgcagccaatcagccagtcacaagctgaaatcagaaaacaaattctaggctcaagcagtagcggtaaatttttctgcctgtatactgaggagttcgcgtcgaaggatatgacaccactgaagccggctgaaatgcaggaggcaaacctcacaagcatggtactgtttatgaaaaggattgatatcgcaggccttggccactgcgattttatgaatcgacctgcccccgaaagcctaatgcaggcccttgaagatctggattacctagctgcactcgacaatgacggcaacctttccgaattcggaataatcatgtcagagttcccactcgaccctcagctgtcaaagtctattctcgcaagttgcgaattcgactgcgtggatgaggttcttacgatagcggccatggttacagcaccaaattgcttttcccacgtgccacatggggccgaggaggctgctctgacatgctggaagactttcctccacccagaaggggaccacttcacacttatcagtatctacaaagcctaccaggatacaacccttaatagcagctccgaatactgtgtggagaagtggtgcagagattattttttaaactgttccgccctgagaatggcggatgtgatacgcgccgagctgttggaaattatcaaacggatcgagctgccttacgcagaacccgcgtttgggtccaaggaaaacacccttaatatcaagaaggcattgctgagcggctactttatgcaaatcgcaagggacgtggacggctccgggaattatctgatgctgacacacaagcaggtcgcccagctgcacccccttagtggctactctattactaaaaaaatgccggaatgggttctgtttcataagttttctatctcggagaataactatatccggattacatctgaaataagtcccgaattgtttatgcagctggtcccacagtattattttagtaatctgcctcctagcgaatcaaaggacatactccagcaggttgtagatcatctcagccctgtgagcaccatgaacaaggaacagcagatgtgtgagacttgccccgagacggaacagagatgcacccttcaatag

SEQ ID NO: 196985 - DNA, 2232 bp, Artificial Sequence
  derived and/or modified sequence
atggaagaagaaggcttagagtgtcccaactcaagtagtgagaagaggtactttccggagagtctcgactcctccgatggggatgaggaggaagtgctggcatgcgaagacctggagctcaacccgttcgacggtcttccttattctagtcggtactataagctcctcaaggagcgggaagatctccctatctggaaggaaaagtatagttttatggaaaatttactgcagaatcagatcgtgatagtttctggcgacgccaaatgtggcaagtctgcacaggttcctcaatggtgtgcagagtattgcctctctattcactaccagcacgggggtgtgatatgtacccaggtacacaaacagaccgtcgtgcaactcgcactacgagttgctgatgagatggatgtcaatatcgggcatgaagtcggttatgtgatccctttcgagaattgttgcacgaacgagactatcctgaggtactgcaccgacgacatgcttcaaagggagatgatgagtaaccctttcctcggctcatatggcgtgatcattctcgacgatatacatgaacggtcaattgccacagacgtcctgctggggctgctgaaggatgtcttactggcccgccctgaactcaaacttataatcaattcctctccacatctcatctcgaaactgaattcctattatgggaatgttcctgtgatcgaggtgaagaataagcacccagttgaagtggtctacctgagcgaggctcagaaggactcttttgagagtattcttaggttaatcttcgagattcaccactctggagaaaagggggacattgtggtattcctggcgtgtgagcaggatatcgaaaaagtatgtgagacagtttaccagggcagcaatctgaaccctgatcttggagagctggtcgtcgtacccctttatcccaaagaaaagtgtagcttgttcaaaccattggacgagactgaaaaacggtgtcaagtatatcagagaagagttgtgctgactacatcttcgggagagttcctcatctggagcaacagcgtccgtttcgttatcgatgtgggcgttgaaaggcgcaaggtctataatcctaggatcagggccaattccctggttatgcagccaattagccaaagtcaagcggagatcaggaaacagatattgggcagctcatcatcagggaagtttttctgtctgtatacagaggaattcgcgtccaaagatatgaccccacttaaacctgccgagatgcaagaagccaacctcacgtccatggtactctttatgaaacgcatcgatatcgcaggcttaggccattgcgatttcatgaatagacctgcgcctgagtcacttatgcaggctctagaagacctggactacctagccgcacttgataacgacggcaacctttccgagttcggaattatcatgtcagagttccctctggatccccaactgagtaaaagtattctggcctcatgtgaatttgactgtgttgatgaagtcttgaccatcgccgctatggtgacagcacccaattgttttagtcatgtgccacatggggcagaagaagccgccttgacgtgctggaaaactttcctacatcctgagggtgaccacttcacgctgatttccatttacaaagcttaccaggacacgacactcaatagcagtagtgaatattgtgttgagaaatggtgtcgcgattacttcttgaattgcagtgctctcagaatggccgatgtgattagagccgagctcctggaaatcattaagagaatcgaactgccgtacgcagaacctgccttcgggtctaaagaaaacaccttgaatattaaaaaggctttgctttcaggctactttatgcagatcgccagggacgtggatgggagcggaaactatctgatgcttacgcataagcaagttgcgcagttgcatccgctttccggttacagcattaccaagaagatgccggaatgggtgctttttcacaaattctcaattagcgaaaacaattacataaggatcacgtcagagatatcccccgaactgttcatgcagctggtccctcagtactacttctccaatctgcctccctcagagagtaaggacatcctgcagcaggtggtagaccacctctccccagtttctaccatgaataaggaacaacagatgtgcgagacttgtccggaaacagagcagcgctgcactctacagtag

SEQ ID NO: 196986 - DNA, 1104 bp, Artificial Sequence
  derived and/or modified sequence
atgcagcccatctcacagtcccaggccgaaatcagaaagcaaatcctaggatcctcctcatctggtaaattcttctgcctctacactgaggaatttgcatccaaggacatgacacccctgaagccagcagagatgcaggaggctaacctgacaagtatggtgctgtttatgaagcgcatcgacattgcgggcctgggacactgtgattttatgaatcggccagctcctgagtcccttatgcaggccctggaggatctggattatctggcagcattggataatgatggaaacctgtcagagtttggtatcatcatgtccgagttcccgctggacccccagctctctaaatctattttggccagctgcgagttcgattgtgtcgacgaggtactgacaatcgccgccatggttacagcgcctaactgcttctcacatgtgccccatggcgccgaggaggctgccctaacgtgttggaagacattcctccacccagagggagaccacttcaccctaatatccatttataaggcatatcaggacaccacacttaattcttcttccgagtattgtgtagaaaaatggtgcagagactactttctgaattgctccgctcttcgcatggctgacgtaattagggccgaattgctcgaaatcattaaaaggattgagctgccatacgccgagcccgcatttggaagtaaggagaatactctcaatataaaaaaggctctgctaagtgggtacttcatgcagattgccagagacgtggacggttcagggaattatctgatgttaactcacaagcaggttgctcagttgcaccctctgtctggctacagcatcacgaaaaagatgccggagtgggtgttgttccataagttcagtatcagtgagaataactacatccgtatcacttccgagatctcgcctgagctgtttatgcagctagtgccccaatattatttctccaacctgccaccatccgagagcaaagatattctgcagcaggtggtcgaccatctgagtcccgtgtctactatgaataaagaacaacaaatgtgtgaaacctgccccgaaacagaacagcgctgtaccctgcagtag

SEQ ID NO: 196987 - DNA, 339 bp, Artificial Sequence
  derived and/or modified sequence
atggaggaagaaggcctggagtgcccaaatagctcaagtgaaaagcgctatttccccgagtccttagattcatcggatggtgacgaagaagaggtgctcgcatgtgaggacttagagctcaatccatttgacgggctcccatattcctcccggtattataagctgctcaaagaacgtgaggatcttccgatatggaaagaaaaatatagttttatggagaatctgttgcagaatcaaatcgttatagtgtctggggacgccaaatgcggaaagagcgctcaggtgcctcagtggtgtgcggagtattgtctgtccatccattatcagcacgggggctag

SEQ ID NO: 196988 - DNA, 1989 bp, Artificial Sequence
  derived and/or modified sequence
atggaggaggagggcctggagtgccccaacagcagcagcgagaagcgctacttccctgagagcctggacagcagtgatggagatgaggaggaggtgctggcctgtgaggacctggagctgaacccctttgatggcctgccctacagcagccgctactacaagctgctgaaggagcgggaggacctgcccatctggaaggagaagtacagcttcatggagaacctgctgcagaaccagatcgtcatcgtgtctggagatgccaagtgtgggaagagcgcccaggtgccccagtggtgtgccgagtactgcctgagcatccactaccagcacggcggcgtcatctgcacccaggtgcacaagcagacagtggtgcagctggccctgcgggtggctgatgagatggatgtgaacatcggccacgaggtgggctacgtgatcccctttgagaactgctgcaccaatgagaccatcctgcgctactgcacagatgacatgctgcagcgggagatgatgagcaaccccttcctgggcagctatggagtcatcatcctggatgacatccacgagaggagcatcgccacagatgtgctgctgggcctgctgaaggatgtgctgctggcccggcctgagctgaagctgatcatcaacagcagcccccacctgatcagcaagctgaacagctactatggaaatgtgcctgtgattgaggtgaagaacaagcaccctgtggaggtggtgtacctgtctgaggcccagaaggacagctttgagagcatcctgcggctcatctttgagatccaccacagcggggagaagggggacatcgtggtgttcctggcctgtgagcaggtgtacaacccccgcatccgggccaacagcctggtgatgcagcccatcagccagagccaggccgagatcaggaagcagatcctgggcagcagcagcagcggcaagttcttctgcctgtacacagaggagtttgccagcaaggacatgacccccctgaagccagctgagatgcaggaggccaacctgacctccatggtgctcttcatgaagagaattgatattgctggcctgggccactgtgacttcatgaacagacctgcccctgagagcctgatgcaggccctggaggacctggactacctggccgccctggacaatgatggcaacctgtctgaatttggcatcatcatgtctgagttccccctggacccccagctgagcaagagcatcctggccagctgtgaatttgactgtgtggatgaggtgctgaccatcgccgccatggtgacagcccccaactgcttcagccacgtgccccatggagctgaggaggccgccctgacctgctggaagaccttcctgcaccctgagggggaccacttcaccctcatcagcatctacaaggcctaccaggacaccaccctgaacagcagcagcgagtactgtgtggagaagtggtgccgggactacttcctgaactgcagcgccctgaggatggctgatgtgatccgggcagagctgctggagatcatcaagagaattgagctgccctatgcagagcccgccttcggcagcaaggagaacaccctgaacatcaagaaggccctgctgagcggctacttcatgcagatcgccagagatgtggatggcagcggcaactacctgatgctgacccacaagcaggtggcccagctgcaccccctgagcggctacagcatcaccaagaagatgcctgagtgggtgctcttccacaagttcagcatcagcgagaacaactacatccgcatcaccagcgagatcagccctgagctgttcatgcagctggtgccccagtactacttcagcaacctgcccccatctgagagcaaggacatcctgcagcaggtggtggaccacctgagccctgtgtccaccatgaacaaggagcagcagatgtgtgagacctgcccagagacagagcagcgctgcaccctgcagtag

SEQ ID NO: 196989 - DNA, 2232 bp, Artificial Sequence
  derived and/or modified sequence
atggaggaggagggcctggagtgccccaacagcagcagcgagaagcgctacttccctgagagcctggacagcagtgatggagatgaggaggaggtgctggcctgtgaggacctggagctgaacccctttgatggcctgccctacagcagccgctactacaagctgctgaaggagcgggaggacctgcccatctggaaggagaagtacagcttcatggagaacctgctgcagaaccagatcgtcatcgtgtctggagatgccaagtgtgggaagagcgcccaggtgccccagtggtgtgccgagtactgcctgagcatccactaccagcacggcggcgtcatctgcacccaggtgcacaagcagacagtggtgcagctggccctgcgggtggctgatgagatggatgtgaacatcggccacgaggtgggctacgtgatcccctttgagaactgctgcaccaatgagaccatcctgcgctactgcacagatgacatgctgcagcgggagatgatgagcaaccccttcctgggcagctatggagtcatcatcctggatgacatccacgagaggagcatcgccacagatgtgctgctgggcctgctgaaggatgtgctgctggcccggcctgagctgaagctgatcatcaacagcagcccccacctgatcagcaagctgaacagctactatggaaatgtgcctgtgattgaggtgaagaacaagcaccctgtggaggtggtgtacctgtctgaggcccagaaggacagctttgagagcatcctgcggctcatctttgagatccaccacagcggggagaagggggacatcgtggtgttcctggcctgtgagcaggacatcgagaaggtgtgtgaaacagtgtaccagggcagcaacctgaacccagacctgggggagctggtggtggtgcccctgtaccccaaggagaagtgcagcctcttcaagcccctggatgaaacagagaagcgctgccaggtgtaccagaggagagtggtgctgaccaccagcagcggggagttcctgatctggagcaacagcgtgcgctttgtgattgatgtgggcgtggagaggaggaaggtgtacaacccccgcatccgggccaacagcctggtgatgcagcccatcagccagagccaggccgagatcaggaagcagatcctgggcagcagcagcagcggcaagttcttctgcctgtacacagaggagtttgccagcaaggacatgacccccctgaagccagctgagatgcaggaggccaacctgacctccatggtgctcttcatgaagagaattgatattgctggcctgggccactgtgacttcatgaacagacctgcccctgagagcctgatgcaggccctggaggacctggactacctggccgccctggacaatgatggcaacctgtctgaatttggcatcatcatgtctgagttccccctggacccccagctgagcaagagcatcctggccagctgtgaatttgactgtgtggatgaggtgctgaccatcgccgccatggtgacagcccccaactgcttcagccacgtgccccacggggctgaggaggccgccctgacctgctggaagaccttcctgcaccctgagggggaccacttcaccctcatcagcatctacaaggcctaccaggacaccaccctgaacagcagcagcgagtactgtgtggagaagtggtgccgggactacttcctgaactgcagcgccctgaggatggctgatgtgatccgggcagagctgctggagatcatcaagagaattgagctgccctatgcagagcccgccttcggcagcaaagaaaacaccctgaacatcaagaaggccctgctgagcggctacttcatgcagatcgccagagatgtggatggcagcggcaactacctgatgctgacccacaagcaggtggcccagctgcaccccctgagcggctacagcatcaccaagaagatgcctgagtgggtgctcttccacaagttcagcatcagcgagaacaactacatccgcatcaccagcgagatcagccctgagctgttcatgcagctggtgccccagtactacttcagcaacctgccccccagcgagagcaaggacatcctgcagcaggtggtggaccacctgagccctgtgtccaccatgaacaaggagcagcagatgtgtgagacctgcccagagacagagcagcgctgcaccctgcagtag

SEQ ID NO: 196990 - DNA, 1104 bp, Artificial Sequence
  derived and/or modified sequence
atgcagcccatcagccagagccaggccgagatcaggaagcagatcctgggcagcagcagcagcggcaagttcttctgcctgtacacagaggagtttgccagcaaggacatgacccccctgaagccagctgagatgcaggaggccaacctgacctccatggtgctcttcatgaagagaattgatattgctggcctgggccactgtgacttcatgaacagacctgcccctgagagcctgatgcaggccctggaggacctggactacctggccgccctggacaatgatggcaacctgtctgaatttggcatcatcatgtctgagttccccctggacccccagctgagcaagagcatcctggccagctgtgaatttgactgtgtggatgaggtgctgaccatcgccgccatggtgacagcccccaactgcttcagccacgtgccccacggggctgaggaggccgccctgacctgctggaagaccttcctgcaccctgagggggaccacttcaccctcatcagcatctacaaggcctaccaggacaccaccctgaacagcagcagcgagtactgtgtggagaagtggtgccgggactacttcctgaactgcagcgccctgaggatggctgatgtgatccgggcagagctgctggagatcatcaagagaattgagctgccctatgcagagcccgccttcggcagcaaagaaaacaccctgaacatcaagaaggccctgctgagcggctacttcatgcagatcgccagagatgtggatggcagcggcaactacctgatgctgacccacaagcaggtggcccagctgcaccccctgagcggctacagcatcaccaagaagatgcctgagtgggtgctcttccacaagttcagcatcagcgagaacaactacatccgcatcaccagcgagatcagccctgagctgttcatgcagctggtgccccagtactacttcagcaacctgccccccagcgagagcaaggacatcctgcagcaggtggtggaccacctgagccctgtgtccaccatgaacaaggagcagcagatgtgtgagacctgcccagagacagagcagcgctgcaccctgcagtag

SEQ ID NO: 196991 - DNA, 339 bp, Artificial Sequence
  derived and/or modified sequence
atggaggaggagggcctggagtgccccaacagcagcagcgagaagcgctacttccctgagagcctggacagcagtgatggagatgaggaggaggtgctggcctgtgaggacctggagctgaacccctttgatggcctgccctacagcagccgctactacaagctgctgaaggagcgggaggacctgcccatctggaaggagaagtacagcttcatggagaacctgctgcagaaccagatcgtcatcgtgtctggagatgccaagtgtgggaagagcgcccaggtgccccagtggtgtgccgagtactgcctgagcatccactaccagcacggcggctag

SEQ ID NO: 196992 - DNA, 1989 bp, Artificial Sequence
  derived and/or modified sequence
atggaggaggagggcctggagtgccccaacagcagcagcgagaagagatacttccctgagagtctcgacagctcagacggggatgaagaagaagtgctcgcatgcgaggatttggaactcaaccccttcgacggactcccctacagctcacggtactataaactcctgaaggagagagaggacctacccatttggaaagaaaagtattcattcatggagaacttgcttcagaatcagatcgtcatcgtgagcggtgacgccaaatgcgggaaaagtgcccaggtgccccaatggtgtgccgaatactgtctctccatccattatcagcatggtggggtgatctgcactcaagtccataaacaaactgtcgtacaacttgctctccgtgtggccgatgagatggatgtgaacatcggacatgaagtgggctacgtaattcctttcgagaactgttgcactaacgaaaccatccttaggtattgcaccgatgacatgctgcagcgggaaatgatgagcaatccatttttgggatcttacggagttattatccttgacgatatacatgagcgaagtatcgcaaccgatgtgctgttagggctgttaaaagacgtgttgctagctcgacccgagctcaagctcatcataaactcaagtccacacctcatctccaagctgaacagctactatggcaatgtgcccgtgatagaagtgaaaaacaaacaccccgttgaggttgtgtacctgtctgaagcacagaaagactcatttgagtctattctccgtcttatctttgagatacaccattcaggcgaaaaaggggacatcgtcgtctttcttgcctgcgagcaggtgtacaatccgcgcatccgagccaatagcttggtgatgcaaccaatttcccaatcccaggcagaaattagaaaacagatattgggctcatctagttccggtaagtttttttgcctgtatactgaagagttcgcctccaaggatatgaccccccttaaacccgctgagatgcaagaggctaacttgacaagcatggtcctcttcatgaagagaatagacatcgctggcctgggtcactgcgacttcatgaatcgacccgcacccgaatccctgatgcaagccttagaggacttagactatctcgcagcactggacaacgacggaaatctgtcagaatttggcatcatcatgtccgaattccctcttgacccgcagctgtctaagtccatcctcgcctcgtgtgaatttgactgtgttgacgaagtgctgactattgctgccatggtgacagccccgaactgcttctcacacgtgcctcatggtgctgaggaggcggctctgacttgttggaaaacgttcctccatccggagggagaccactttacactgatctccatttacaaggcctatcaagataccaccttgaactcttcttccgagtactgcgtggaaaaatggtgccgtgactactttcttaactgctccgcgttaaggatggccgacgtgatccgcgccgaactgctggaaatcataaaacgaatcgaactgccatacgctgaaccggcgttcggctcaaaggaaaatacattaaacattaagaaggccttactgtccgggtatttcatgcagatcgctagagatgttgacggatctggtaattacctgatgttgacccacaaacaggtagcacagctgcacccgctgtctggatattccattacaaagaaaatgcctgagtgggtgctttttcataaattcagcatttccgagaacaattacatccgtataactagcgagatctcaccggaactatttatgcagctcgttcctcagtactacttcagcaacctgcctccaagtgaatctaaggacatcctacagcaggtggtcgaccatctgagcccagtttcaacaatgaacaaggaacaacaaatgtgcgaaacctgcccagagaccgagcaaagatgtactctgcagtag

SEQ ID NO: 196993 - DNA, 2232 bp, Artificial Sequence
  derived and/or modified sequence
atggaggaggagggcctggagtgccccaacagcagcagcgagaagagatatttccctgaaagcctggacagctccgacggggacgaggaggaagtgctggcctgtgaagacctggagctgaacccttttgatggtctgccttattcttcgagatactacaagcttctgaaagagagagaagatctccctatttggaaagagaagtacagttttatggaaaatctcctccagaaccagatcgtcattgtgagcggcgatgctaagtgcggcaaaagtgcccaggtccctcagtggtgcgccgagtactgcctgtcaatccattatcaacacggcggcgttatttgtacacaggttcacaagcagacagtggtgcaacttgctctgagagtcgcagatgagatggatgtgaatattggacacgaggtcgggtacgtgatcccattcgagaactgttgcacgaacgaaaccatcttgaggtattgtaccgacgacatgctgcagagagagatgatgtctaatccatttctgggttcgtatggggtgataattttggatgacattcatgaacgatccattgcgacagatgtgcttttaggactgctcaaagacgtgctgctggcgcggcctgagttaaagctaattatcaacagtagtcctcatctgatctcaaagttaaattcttactatgggaatgtgcctgtcattgaagtgaaaaacaagcacccagtagaggtggtctatctgagcgaggcccaaaaggactcctttgaatcaatccttcggcttatcttcgaaatccatcatagtggcgaaaaaggagacatcgtcgtctttctggcctgcgagcaggatattgaaaaagtttgcgaaactgtgtaccagggcagcaatttaaaccccgacctcggagaattggtggtggtccccctgtacccgaaggagaagtgctccttgtttaagcccctggacgaaaccgaaaaacggtgccaagtttatcagaggcgcgtggttttgaccacctcttctggtgaatttctcatatggtctaattccgtgagatttgtgattgatgttggcgtggaaaggcgcaaagtgtacaacccaaggattagggccaacagcctagtcatgcagcccatttcccagagtcaagcagaaattaggaaacagatactgggtagctccagctccggaaagttcttttgcttgtacaccgaggagtttgcctcaaaggatatgacacccctgaagccggccgagatgcaggaagcaaacttaacaagtatggtgctgttcatgaagaggattgacattgccgggctcgggcactgcgattttatgaacagacctgcccccgagtcattgatgcaggcactggaggacttagactacctcgctgcgctggacaacgacggaaatttgtccgaattcggaattatcatgagcgagttcccactcgatccccaattgtccaaatccatcctggctagttgcgagttcgattgcgtagacgaagtgttgacaattgctgccatggtgacagctcctaattgtttttcccacgttcctcatggtgccgaggaggctgcgctcacatgctggaagacattcctccaccccgagggtgatcacttcacccttatctcaatttacaaggcatatcaggacaccacccttaacagctcatctgaatactgcgtagagaaatggtgtagggactattttctgaattgctccgcactgaggatggcagacgttattcgggctgagctattagaaataatcaagcggattgaactgccttatgcggagccggcttttggaagcaaagagaacaccctgaatattaagaaggctctgttgtccgggtattttatgcaaatagccagggatgtcgatggttctggaaattacctgatgctcacgcataagcaggtggctcaactgcatcctctttctgggtactccatcacaaaaaaaatgcccgaatgggtgctttttcacaaattttccatttccgaaaataattatattcgcataacttctgagatcagtcccgagctgtttatgcaactcgttcctcagtattactttagcaacctgcctcccagtgagtcaaaagacatcctgcagcaggtagttgaccaccttagtccggtctccacaatgaacaaggaacagcaaatgtgtgagacatgccccgaaactgaacagcgctgtacgctgcaatag

SEQ ID NO: 196994 - DNA, 1104 bp, Artificial Sequence
  derived and/or modified sequence
atgcagcccatcagccagagccaggccgagatccggaagcagatcttaggatcttcctcaagcggaaagttcttctgcttgtacactgaggagtttgcaagcaaagatatgactcccctgaagcctgctgaaatgcaggaagctaatctcacgtctatggtattgtttatgaaacggatcgacattgcaggcctggggcactgtgactttatgaaccgtcccgcccctgaatctctaatgcaagccctcgaggatctagactacctggctgctcttgacaatgacggcaatctttcggagtttggaatcattatgtcagagttcccccttgatccgcagctgtccaagagcatactggcctcctgcgagttcgattgcgtcgacgaggttcttactatagcagctatggtgactgctcccaactgtttctcccatgttccacacggagccgaagaagcggctctgacttgctggaagactttcctccatcccgaaggggaccacttcacccttataagtatatacaaggcctaccaggacaccaccttgaactcttcctctgaatattgtgtggagaagtggtgccgggactattttctgaattgcagtgccctgagaatggcagacgtgatccgggcagagctgctcgaaataatcaagagaattgaacttccttacgctgagccggcgtttggttcaaaggaaaataccctgaatatcaagaaggccctgctatctggctactttatgcagattgcccgagacgtggatggatcgggcaactatctgatgctgactcacaaacaggtcgctcagctccatccactcagcggctatagcatcactaaaaagatgcctgagtgggtactgttccataagttttctatatccgagaacaactacatccggatcacttcggagatctcccccgagctgttcatgcagcttgtaccccagtattactttagcaatctcccaccctcggagagcaaggatatccttcagcaggtcgttgaccacttgtctcccgtctctaccatgaataaggagcagcagatgtgcgagacctgtccggaaacagagcagagatgcaccctccagtag

SEQ ID NO: 196995 - DNA, 339 bp, Artificial Sequence
  derived and/or modified sequence
atggaggaggagggcctggagtgccccaacagcagcagcgagaagcgatatttccccgagtcactggacagctctgacggcgatgaggaagaggtcctcgcatgtgaggatttggagttgaatccgtttgatgggctaccctattctagtagatactacaagctccttaaagaacgcgaagatcttcctatttggaaagagaagtattcgttcatggagaaccttcttcagaaccagatcgtcatcgtcagcggcgacgcgaagtgtggaaaatctgcacaagtgccccagtggtgtgccgaatactgtctcagcatccactaccaacacggaggatag

SEQ ID NO: 196996 - DNA, 1989 bp, Artificial Sequence
  derived and/or modified sequence
atggaagaggaggggctagaatgccccaattcctcgagcgagaagcgttactttccagaatcactggacagctctgacggtgacgaggaagaagtactggcctgcgaagacctggaactcaatccttttgacgggctcccatatagcagcagatactacaagctactgaaagagagggaagaccttcctatatggaaggagaagtactctttcatggagaatcttttacagaatcagattgtgattgtgagtggcgatgcaaagtgcggcaaatccgcccaggtgccccaatggtgtgcagagtactgtctctcaatccactaccagcacggcggtgtcatctgcactcaggtgcacaagcagaccgtggttcaattagcactcagggtcgccgatgaaatggatgtcaacattgggcacgaggtggggtatgttatcccttttgagaactgctgtaccaatgagacaattctcaggtattgcacagacgatatgctgcagcgcgaaatgatgtccaatcccttcctgggatcgtacggcgttatcattctggacgacatccacgagaggtctatcgcgactgatgtgctcctgggactgttaaaggacgttctacttgcccgtcccgagcttaagctgattattaattcatctccccatctaataagtaagttgaatagttactacggcaatgttccagtgatcgaggttaagaacaaacatcctgtggaagtagtgtacctgagtgaagctcagaaggactcctttgagtcgatccttcggctgatttttgagatccaccactcaggagagaaaggcgatatcgtggtgttccttgcctgtgagcaggtttacaatcccaggatcagagctaactcattggtcatgcagcctatttcgcagagtcaggccgaaatcagaaaacagattctaggatctagctcatcaggtaagtttttttgtctgtacaccgaagagtttgcaagcaaggatatgacaccgctgaagcccgcagaaatgcaggaggcgaacctgacctcaatggtcctgttcatgaaacggatcgacatcgcaggcctgggccattgtgacttcatgaatcggcctgccccagaatcgctgatgcaggcactggaagacctggattatctagccgcactggataacgacggcaacctgagcgagttcggcatcattatgtccgaatttcctctggatccccagctttccaaaagcattctagcaagctgcgaattcgattgcgtggacgaggtgcttactattgccgcaatggtgactgccccaaactgctttagccatgtgccccacggcgctgaagaagcagccctgacatgttggaagactttcctgcacccagaaggcgatcatttcactttgattagtatatacaaagcctatcaggacaccactctgaactcctcttccgagtattgtgtggagaagtggtgtagagactattttctgaactgctccgcactccgtatggccgacgtgatacgggcagaacttctggaaatcataaagaggatcgaattaccttatgccgaacccgcattcggttccaaggaaaataccttgaacatcaagaaggcactcctctctggctatttcatgcaaatagcccgtgacgtggacggctccggaaattacttgatgctcacccacaagcaagtggcccagctccacccactctctggatactccataaccaaaaaaatgcctgaatgggtgctcttccacaagttctctattagcgaaaataactacatcaggatcacatccgagatctcacccgagttatttatgcagctagtgccacaatactatttctcaaatctccccccaagcgagtccaaagatattctccagcaggtagtcgatcacttgtccccggtcagtactatgaacaaggagcagcagatgtgcgaaacttgcccagagacagagcaacgatgcacgcttcaatag

SEQ ID NO: 196997 - DNA, 2232 bp, Artificial Sequence
  derived and/or modified sequence
atggaggaagaaggtttggagtgccctaatagcagcagtgagaagcggtacttcccagagtccttggattcttcggatggcgacgaagaagaggtgctggcttgcgaggatctcgaactcaacccttttgacggcttaccttacagcagccggtactataagctgctgaaagaaagagaggacctgcctatttggaaggaaaagtactcgtttatggagaacctgctgcagaaccagattgtgatagtgtccggagatgcaaaatgtggcaagtccgcccaagtgccccagtggtgtgctgagtactgcctcagtatccattaccaacacggaggggtaatctgtacacaggtgcacaaacagacagtggtgcagctggcactgagagtggccgacgagatggatgttaatatcggccatgaggttggatacgtcatcccattcgaaaactgctgcacaaacgagacaatcctcagatattgcacagacgatatgctacagcgagagatgatgtctaatccctttttgggaagttatggagtcataatcctggatgacatccacgagcggagcatcgccaccgacgtccttttgggtctgctcaaagatgtactattagctcgcccagaattgaaactgatcatcaattccagtcctcatttaatcagcaaactcaactcatactacgggaatgttccagtgatcgaggtcaaaaataagcaccccgtcgaagtcgtctatctttctgaggctcagaaggattcatttgagtctatcctccgcttgatcttcgagatccatcatagtggagaaaaaggtgatattgtggtctttctcgcttgtgagcaagacatcgagaaggtgtgtgagactgtgtaccaaggctcaaacctcaaccccgatttaggagagttggtcgttgtgccactgtatccaaaggagaaatgtagtctcttcaagcctctagacgaaacggaaaaaagatgccaagtataccagcggagggtggtgcttacaacgtcatctggagagttcctgatctggtcaaattccgtgcggttcgtgatcgacgtgggtgtggaaagacggaaggtctacaatcctcgtatccgtgcgaactctttagtgatgcaaccaatttctcaatcccaggcagagatccgcaaacagatcctgggcagcagtagctctggcaagttcttttgcctgtataccgaagagtttgccagtaaagacatgacccccctgaagccagccgaaatgcaggaagccaatttgacctcaatggtgcttttcatgaagagaattgacatcgcaggactgggccattgcgatttcatgaataggcctgcccctgagtccctgatgcaggcactagaagaccttgactatttagccgctctggacaatgatggaaacctttccgagtttggcattataatgtctgagtttcccctggatcctcaattaagcaagtcaatattagccagctgtgaattcgattgtgtggacgaagttctcaccatcgccgctatggtgaccgcgccaaattgtttctcccacgttccacatggcgcagaagaggccgctcttacgtgctggaagaccttcctccatccagagggggaccactttactctgatctccatctataaagcgtaccaggacaccaccctgaattcttcctcggaatactgtgttgagaaatggtgtcgcgactacttcttaaactgcagcgccttacgtatggctgacgtcattcgtgcggaactgttggagatcattaaacggatcgagctaccctatgctgagcccgctttcggatctaaagagaacactctgaatataaaaaaagctctcctgtccggttacttcatgcagatcgcgcgtgacgtcgacggcagcgggaattatctgatgttaacgcataaacaagtagctcaattacatccgctctctgggtattcgatcactaagaagatgccagaatgggtgctcttccacaaatttagtatcagcgaaaataattacatcagaattacctcagagatatctccggaattgttcatgcaactagtgccacagtactatttctctaatctgccaccttccgaaagcaaggatattctgcaacaagtggtcgaccacctctccccagtctccactatgaataaggagcaacagatgtgcgagacgtgccccgaaaccgagcaacgatgcactctccaatag

SEQ ID NO: 196998 - DNA, 1104 bp, Artificial Sequence
  derived and/or modified sequence
atgcagcccatatctcagagccaagccgagatcagaaagcagatcctcggctctagttcctccggaaaatttttctgcttatatacagaagagttcgcatcgaaggatatgactcctctgaaaccagccgaaatgcaggaggcgaacctgactagtatggtgctcttcatgaagcgcattgatattgctgggttgggccactgcgattttatgaaccgcccagccccagagtcactgatgcaggcacttgaagaccttgactacctggcggctctggacaacgatggtaacctgagcgagtttggaattataatgagcgaattcccgcttgacccccagctaagtaaatctattctggccagttgtgaatttgactgtgtcgacgaagttttgaccatagctgccatggtaactgctcctaactgcttttcgcacgtgccgcatggggctgaggaagccgcactcacctgctggaagactttcctgcaccctgagggtgatcactttaccctaatctcaatttacaaggcttaccaggacacaactcttaactcttcatccgaatattgcgtggaaaaatggtgccgcgactactttctgaactgttcagccttaagaatggctgatgtgattcgcgcagagctccttgaaatcatcaagagaatcgagttaccctacgccgagccagctttcggcagtaaggaaaacactttgaatatcaagaaggctttactcagtggctatttcatgcagattgccagggatgtggatgggtctgggaactacctgatgctcactcataaacaagttgctcagctacaccccctgtccggctactccattactaagaaaatgcctgaatgggtgttatttcacaagttttctatctctgagaacaattacattcgaatcacctcggagatttctccggagctttttatgcagctggttcctcagtactacttcagtaatcttcctccatctgaatccaaggacattcttcaacaagtcgtggaccacttaagtccggtcagtaccatgaacaaagaacagcaaatgtgtgagacttgcccagaaacagagcagcggtgtacacttcaatag

SEQ ID NO: 196999 - DNA, 339 bp, Artificial Sequence
  derived and/or modified sequence
atggaggaagaaggccttgaatgtcccaatagctcctctgaaaagcgttattttcccgagagcctggactcttccgatggggacgaggaggaggtcctagcgtgtgaggacttggaactgaaccccttcgatggcttaccctattccagccggtattacaagcttcttaaggagcgcgaggacctcccgatttggaaagagaaatacagctttatggagaatctgctccagaaccagatcgtcatcgtttcaggggacgcaaaatgcggcaagtccgcacaagttccccagtggtgtgctgagtattgcctctctatccattaccaacatggtgggtag

SEQ ID NO: 197000 - DNA, 1989 bp, Artificial Sequence
  derived and/or modified sequence
atggaggaggagggcctggagtgccccaacagcagcagcgagaagagatacttccccgagagcctggacagcagcgacggcgacgaggaggaggtgctggcctgcgaggacctggagctgaaccccttcgacggcctgccctacagcagcagatactacaagctgctgaaggagagagaggacctgcccatctggaaggagaagtacagcttcatggagaacctgctgcagaaccagatcgtgatcgtgagcggcgacgccaagtgcggcaagagcgcccaggtgccccagtggtgcgccgagtactgcctgagcatccactaccagcacggcggcgtgatctgcacccaggtgcacaagcagaccgtggtgcagctggccctgagagtggccgacgagatggacgtgaacatcggccacgaggtgggctacgtgatccccttcgagaactgctgcaccaacgagaccatcctgagatactgcaccgacgacatgctgcagagagagatgatgagcaaccccttcctgggcagctacggcgtgatcatcctggacgacatccacgagagaagcatcgccaccgacgtgctgctgggcctgctgaaggacgtgctgctggccagacccgagctgaagctgatcatcaacagcagcccccacctgatcagcaagctgaacagctactacggcaacgtgcccgtgatcgaggtgaagaacaagcaccccgtggaggtggtgtacctgagcgaggcccagaaggacagcttcgagagcatcctgagactgatcttcgagatccaccacagcggcgagaagggcgacatcgtggtgttcctggcctgcgagcaggtgtacaaccccagaatcagagccaacagcctggtgatgcagcccatcagccagagccaggccgagatcagaaagcagatcctgggcagcagcagcagcggcaagttcttctgcctgtacaccgaggagttcgccagcaaggacatgacccccctgaagcccgccgagatgcaggaggccaacctgaccagcatggtgctgttcatgaagagaatcgacatcgccggcctgggccactgcgacttcatgaacagacccgcccccgagagcctgatgcaggccctggaggacctggactacctggccgccctggacaacgacggcaacctgagcgagttcggcatcatcatgagcgagttccccctggacccccagctgagcaagagcatcctggccagctgcgagttcgactgcgtggacgaggtgctgaccatcgccgccatggtgaccgcccccaactgcttcagccacgtgccccacggcgccgaggaggccgccctgacctgctggaagaccttcctgcaccccgagggcgaccacttcaccctgatcagcatctacaaggcctaccaggacaccaccctgaacagcagcagcgagtactgcgtggagaagtggtgcagagactacttcctgaactgcagcgccctgagaatggccgacgtgatcagagccgagctgctggagatcatcaagagaatcgagctgccctacgccgagcccgccttcggcagcaaggagaacaccctgaacatcaagaaggccctgctgagcggctacttcatgcagatcgccagagacgtggacggcagcggcaactacctgatgctgacccacaagcaggtggcccagctgcaccccctgagcggctacagcatcaccaagaagatgcccgagtgggtgctgttccacaagttcagcatcagcgagaacaactacatcagaatcaccagcgagatcagccccgagctgttcatgcagctggtgccccagtactacttcagcaacctgccccccagcgagagcaaggacatcctgcagcaggtggtggaccacctgagccccgtgagcaccatgaacaaggagcagcagatgtgcgagacctgccccgagaccgagcagagatgcaccctgcagtag

SEQ ID NO: 197001 - DNA, 2232 bp, Artificial Sequence
  derived and/or modified sequence
atggaggaggagggcctggagtgccccaacagcagcagcgagaagagatacttccccgagagcctggacagcagcgacggcgacgaggaggaggtgctggcctgcgaggacctggagctgaaccccttcgacggcctgccctacagcagcagatactacaagctgctgaaggagagagaggacctgcccatctggaaggagaagtacagcttcatggagaacctgctgcagaaccagatcgtgatcgtgagcggcgacgccaagtgcggcaagagcgcccaggtgccccagtggtgcgccgagtactgcctgagcatccactaccagcacggcggcgtgatctgcacccaggtgcacaagcagaccgtggtgcagctggccctgagagtggccgacgagatggacgtgaacatcggccacgaggtgggctacgtgatccccttcgagaactgctgcaccaacgagaccatcctgagatactgcaccgacgacatgctgcagagagagatgatgagcaaccccttcctgggcagctacggcgtgatcatcctggacgacatccacgagagaagcatcgccaccgacgtgctgctgggcctgctgaaggacgtgctgctggccagacccgagctgaagctgatcatcaacagcagcccccacctgatcagcaagctgaacagctactacggcaacgtgcccgtgatcgaggtgaagaacaagcaccccgtggaggtggtgtacctgagcgaggcccagaaggacagcttcgagagcatcctgagactgatcttcgagatccaccacagcggcgagaagggcgacatcgtggtgttcctggcctgcgagcaggacatcgagaaggtgtgcgagaccgtgtaccagggcagcaacctgaaccccgacctgggcgagctggtggtggtgcccctgtaccccaaggagaagtgcagcctgttcaagcccctggacgagaccgagaagagatgccaggtgtaccagagaagagtggtgctgaccaccagcagcggcgagttcctgatctggagcaacagcgtgagattcgtgatcgacgtgggcgtggagagaagaaaggtgtacaaccccagaatcagagccaacagcctggtgatgcagcccatcagccagagccaggccgagatcagaaagcagatcctgggcagcagcagcagcggcaagttcttctgcctgtacaccgaggagttcgccagcaaggacatgacccccctgaagcccgccgagatgcaggaggccaacctgaccagcatggtgctgttcatgaagagaatcgacatcgccggcctgggccactgcgacttcatgaacagacccgcccccgagagcctgatgcaggccctggaggacctggactacctggccgccctggacaacgacggcaacctgagcgagttcggcatcatcatgagcgagttccccctggacccccagctgagcaagagcatcctggccagctgcgagttcgactgcgtggacgaggtgctgaccatcgccgccatggtgaccgcccccaactgcttcagccacgtgccccacggcgccgaggaggccgccctgacctgctggaagaccttcctgcaccccgagggcgaccacttcaccctgatcagcatctacaaggcctaccaggacaccaccctgaacagcagcagcgagtactgcgtggagaagtggtgcagagactacttcctgaactgcagcgccctgagaatggccgacgtgatcagagccgagctgctggagatcatcaagagaatcgagctgccctacgccgagcccgccttcggcagcaaggagaacaccctgaacatcaagaaggccctgctgagcggctacttcatgcagatcgccagagacgtggacggcagcggcaactacctgatgctgacccacaagcaggtggcccagctgcaccccctgagcggctacagcatcaccaagaagatgcccgagtgggtgctgttccacaagttcagcatcagcgagaacaactacatcagaatcaccagcgagatcagccccgagctgttcatgcagctggtgccccagtactacttcagcaacctgccccccagcgagagcaaggacatcctgcagcaggtggtggaccacctgagccccgtgagcaccatgaacaaggagcagcagatgtgcgagacctgccccgagaccgagcagagatgcaccctgcagtag

SEQ ID NO: 197002 - DNA, 1104 bp, Artificial Sequence
  derived and/or modified sequence
atgcagcccatcagccagagccaggccgagatcagaaagcagatcctgggcagcagcagcagcggcaagttcttctgcctgtacaccgaggagttcgccagcaaggacatgacccccctgaagcccgccgagatgcaggaggccaacctgaccagcatggtgctgttcatgaagagaatcgacatcgccggcctgggccactgcgacttcatgaacagacccgcccccgagagcctgatgcaggccctggaggacctggactacctggccgccctggacaacgacggcaacctgagcgagttcggcatcatcatgagcgagttccccctggacccccagctgagcaagagcatcctggccagctgcgagttcgactgcgtggacgaggtgctgaccatcgccgccatggtgaccgcccccaactgcttcagccacgtgccccacggcgccgaggaggccgccctgacctgctggaagaccttcctgcaccccgagggcgaccacttcaccctgatcagcatctacaaggcctaccaggacaccaccctgaacagcagcagcgagtactgcgtggagaagtggtgcagagactacttcctgaactgcagcgccctgagaatggccgacgtgatcagagccgagctgctggagatcatcaagagaatcgagctgccctacgccgagcccgccttcggcagcaaggagaacaccctgaacatcaagaaggccctgctgagcggctacttcatgcagatcgccagagacgtggacggcagcggcaactacctgatgctgacccacaagcaggtggcccagctgcaccccctgagcggctacagcatcaccaagaagatgcccgagtgggtgctgttccacaagttcagcatcagcgagaacaactacatcagaatcaccagcgagatcagccccgagctgttcatgcagctggtgccccagtactacttcagcaacctgccccccagcgagagcaaggacatcctgcagcaggtggtggaccacctgagccccgtgagcaccatgaacaaggagcagcagatgtgcgagacctgccccgagaccgagcagagatgcaccctgcagtag

SEQ ID NO: 197003 - DNA, 339 bp, Artificial Sequence
  derived and/or modified sequence
atggaggaggagggcctggagtgccccaacagcagcagcgagaagagatacttccccgagagcctggacagcagcgacggcgacgaggaggaggtgctggcctgcgaggacctggagctgaaccccttcgacggcctgccctacagcagcagatactacaagctgctgaaggagagagaggacctgcccatctggaaggagaagtacagcttcatggagaacctgctgcagaaccagatcgtgatcgtgagcggcgacgccaagtgcggcaagagcgcccaggtgccccagtggtgcgccgagtactgcctgagcatccactaccagcacggcggctag

SEQ ID NO: 197004 - DNA, 2827 bp, Artificial Sequence
  derived and/or modified sequence
aggcagagagcacgaggcccagtgcagaatcattttctgaaccagccaggaaataccggaacccaccaaactttaaacaccagcctaaattattcctgttcttttaagcaggcagcagaaatgacagaaacccgttaacagaaaaaaaaaaaataatgcttttcatttgaactcctgtgcattttctttttaacttatatgtgttcctaattttccttactctttttgtttgtttgtttcttagtgtggtttattgacaatcatttacaatgccgaagagtgctgtagtgagccagcacagtgggtaacacagcaacggagaacagatgcaggtttgaggaatttaacttgctaaaaccttgaactgaagtcttagagattggaacatacgggtttgtataaataggcttttaagccctgtttgcaatgggttactgataggagaaacttgcttgtggaatgtcagctgcgtgagctcactgtcagacaagatggaagaagaagggctggagtgtccaaactcttcctctgaaaaacgctattttcctgaatccctggattccagcgatggggatgaggaagaggttttggcctgtgaggatttggaacttaacccctttgatggattgccatattcatcacgttattataaacttctgaaagaaagagaagatcttcctatatggaaagaaaaatactcctttatggagaacctgcttcaaaatcaaatcgtgattgtttcaggagatgctaaatgtggtaagagcgctcaggttcctcagtggtgtgctgaatattgtctttccatccactaccagcacgggggcgtgatatgcacacaggtccacaagcagactgtggtccagctcgccctgcgggtggcggatgaaatggatgttaacattggtcatgaggttggctacgtgatccctttcgagaactgctgtaccaacgaaacaatcctgaggtattgtactgatgatatgctgcaaagagaaatgatgtccaatccttttttgggtagctatggggtcatcatcttagatgatattcatgaaagaagcattgcaactgatgtgttacttggacttcttaaagatgttttactagcaagaccagaactgaagctcataattaactcctcacctcacctgatcagcaaactcaattcttattatggaaacgtgcctgtcatagaagtgaaaaataaacaccctgtggaggttgtgtaccttagtgaggctcaaaaggattcttttgagtctattttacgccttatctttgaaattcaccactcgggtgagaaaggtgacattgtagtctttctggcctgtgaacaagtgtacaacccgagaataagagcaaactcgctcgtcatgcagcccatcagccagagccaggcagagatacgcaagcagattcttggctcatcttcttcaggaaaatttttctgcctgtacactgaagaatttgcctccaaagacatgacgccactgaagccagcagaaatgcaggaagccaacctaacaagcatggtgctttttatgaagaggatagacattgcgggcctaggccactgtgacttcatgaacagaccagcaccagaaagtttgatgcaggcattggaagacttagattatctggcagcactggataatgatggaaatctttctgaatttggaatcatcatgtcagagtttcctcttgatccacaactctcgaagtctatcttagcgtcctgtgaatttgactgtgtagatgaagtgctaacaatcgcagccatggtaacagctccaaattgcttttcacatgtgccacatggagctgaagaggctgccttgacttgttggaagacatttttacatcccgaaggagatcactttaccctcatcagcatttacaaggcttaccaagacacaactctgaattctagcagtgagtactgtgtggaaaagtggtgtcgtgattacttcctcaactgttcagcactcagaatggcagatgttattcgagctgaactcttagaaattatcaagcgaatcgagcttccctatgcagaacctgcttttggctccaaggaaaacactctaaacataaagaaagctcttctgtccggttactttatgcagattgctcgggatgttgatggatcaggtaactacttaatgctgacacataagcaggttgctcagctgcatcccctgtctggttactcaatcaccaagaagatgccagagtgggtcctcttccataaattcagcatttctgagaacaactacatcaggattacctcagaaatctctcctgaactatttatgcagctggtaccacaatactatttcagtaatctgcctcctagtgaaagtaaggacattctacagcaagtagtggatcacctatcccctgtgtcaacaatgaataaggaacagcaaatgtgtgagacgtgccctgaaactgaacagagatgcactctccagtgactccccagcaaacacaaggtgcagcagggtcccaaaggtagctggatggctgaactgctggatatgggagatacatgacgcgaagacggatttcacatccacaggacggtcttgaagaaaataacactgtgtatattattttaaaataaaaaatagaagtttttattgagttctttaaattactactccatgcttttcttcttcttggaaaagtttttaaatcaaccactcataatttgaccaaaattttaaaaaactggtattttgtaaatgtgtcagagacacatgggacagaaccctactttttgtagaggaacttaatctgaataaagtctgagtttttcagt

SEQ ID NO: 197005 - DNA, 3070 bp, Artificial Sequence
  derived and/or modified sequence
aggcagagagcacgaggcccagtgcagaatcattttctgaaccagccaggaaataccggaacccaccaaactttaaacaccagcctaaattattcctgttcttttaagcaggcagcagaaatgacagaaacccgttaacagaaaaaaaaaaaataatgcttttcatttgaactcctgtgcattttctttttaacttatatgtgttcctaattttccttactctttttgtttgtttgtttcttagtgtggtttattgacaatcatttacaatgccgaagagtgctgtagtgagccagcacagtgggtaacacagcaacggagaacagatgcaggtttgaggaatttaacttgctaaaaccttgaactgaagtcttagagattggaacatacgggtttgtataaataggcttttaagccctgtttgcaatgggttactgataggagaaacttgcttgtggaatgtcagctgcgtgagctcactgtcagacaagatggaagaagaagggctggagtgtccaaactcttcctctgaaaaacgctattttcctgaatccctggattccagcgatggggatgaggaagaggttttggcctgtgaggatttggaacttaacccctttgatggattgccatattcatcacgttattataaacttctgaaagaaagagaagatcttcctatatggaaagaaaaatactcctttatggagaacctgcttcaaaatcaaatcgtgattgtttcaggagatgctaaatgtggtaagagcgctcaggttcctcagtggtgtgctgaatattgtctttccatccactaccagcacgggggcgtgatatgcacacaggtccacaagcagactgtggtccagctcgccctgcgggtggcggatgaaatggatgttaacattggtcatgaggttggctacgtgatccctttcgagaactgctgtaccaacgaaacaatcctgaggtattgtactgatgatatgctgcaaagagaaatgatgtccaatccttttttgggtagctatggggtcatcatcttagatgatattcatgaaagaagcattgcaactgatgtgttacttggacttcttaaagatgttttactagcaagaccagaactgaagctcataattaactcctcacctcacctgatcagcaaactcaattcttattatggaaacgtgcctgtcatagaagtgaaaaataaacaccctgtggaggttgtgtaccttagtgaggctcaaaaggattcttttgagtctattttacgccttatctttgaaattcaccactcgggtgagaaaggtgacattgtagtctttctggcctgtgaacaagatattgagaaagtctgtgaaactgtctatcaaggatctaacctaaacccagatcttggagaactggtggttgttcctttgtatccaaaagagaaatgttcattgttcaagccactcgatgaaacagaaaaaagatgccaagtttatcaaagaagagtggtgttaactactagctctggagagtttttgatctggagcaactcagtcagatttgttatcgatgtgggtgtggaaagaagaaaggtgtacaacccgagaataagagcaaactcgctcgtcatgcagcccatcagccagagccaggcagagatacgcaagcagattcttggctcatcttcttcaggaaaatttttctgcctgtacactgaagaatttgcctccaaagacatgacgccactgaagccagcagaaatgcaggaagccaacctaacaagcatggtgctttttatgaagaggatagacattgcgggcctaggccactgtgacttcatgaacagaccagcaccagaaagtttgatgcaggcattggaagacttagattatctggcagcactggataatgatggaaatctttctgaatttggaatcatcatgtcagagtttcctcttgatccacaactctcgaagtctatcttagcgtcctgtgaatttgactgtgtagatgaagtgctaacaatcgcagccatggtaacagctccaaattgcttttcacatgtgccacatggagctgaagaggctgccttgacttgttggaagacatttttacatcccgaaggagatcactttaccctcatcagcatttacaaggcttaccaagacacaactctgaattctagcagtgagtactgtgtggaaaagtggtgtcgtgattacttcctcaactgttcagcactcagaatggcagatgttattcgagctgaactcttagaaattatcaagcgaatcgagcttccctatgcagaacctgcttttggctccaaggaaaacactctaaacataaagaaagctcttctgtccggttactttatgcagattgctcgggatgttgatggatcaggtaactacttaatgctgacacataagcaggttgctcagctgcatcccctgtctggttactcaatcaccaagaagatgccagagtgggtcctcttccataaattcagcatttctgagaacaactacatcaggattacctcagaaatctctcctgaactatttatgcagctggtaccacaatactatttcagtaatctgcctcctagtgaaagtaaggacattctacagcaagtagtggatcacctatcccctgtgtcaacaatgaataaggaacagcaaatgtgtgagacgtgccctgaaactgaacagagatgcactctccagtgactccccagcaaacacaaggtgcagcagggtcccaaaggtagctggatggctgaactgctggatatgggagatacatgacgcgaagacggatttcacatccacaggacggtcttgaagaaaataacactgtgtatattattttaaaataaaaaatagaagtttttattgagttctttaaattactactccatgcttttcttcttcttggaaaagtttttaaatcaaccactcataatttgaccaaaattttaaaaaactggtattttgtaaatgtgtcagagacacatgggacagaaccctactttttgtagaggaacttaatctgaataaagtctgagtttttcagt

SEQ ID NO: 197006 - DNA, 2389 bp, Artificial Sequence
  derived and/or modified sequence
gttctcattattccaattggcaagttttcactcattaggatcaacagccatgctgtttgcttggtaaaaaatctgccccaagtaattcaattatatgtggaaaaaggaagtgcaagcaagggaccgtacctgtgtaccagctgatgtgggaccccctggagcggcctctgcccagcttcctgggagccacttagcagaccaggaaacgagcacagctcacctagttctcagtgacctgtgataccttgctatttttctagatggatctgtcttcctacaaaacccttgagttaattcaatcccattctacaaatggtatggaaaggaaagagacataagctagagacctagagaatggaattgagctgtaaaaactatggcagttgtgggaagtcatcttttttacttagatttttagtgaaatctaacaaaattaaatgggaaaacaatataaattatatttaacttccccaaagacgttttctcatttaggtgcatctttacttatttaaagatacatgtaggcagcaacacagggatttctttccctgtatctgttacgtagtattgcctaaaattttttgtaattcagacatttttttaatagtgatgttgtttgcattgtattttattttcatgggtttttttttctttaggatattgagaaagtctgtgaaactgtctatcaaggatctaacctaaacccagatcttggagaactggtggttgttcctttgtatccaaaagagaaatgttcattgttcaagccactcgatgaaacagaaaaaagatgccaagtttatcaaagaagagtggtgttaactactagctctggagagtttttgatctggagcaactcagtcagatttgttatcgatgtgggtgtggaaagaagaaaggtgtacaacccgagaataagagcaaactcgctcgtcatgcagcccatcagccagagccaggcagagatacgcaagcagattcttggctcatcttcttcaggaaaatttttctgcctgtacactgaagaatttgcctccaaagacatgacgccactgaagccagcagaaatgcaggaagccaacctaacaagcatggtgctttttatgaagaggatagacattgcgggcctaggccactgtgacttcatgaacagaccagcaccagaaagtttgatgcaggcattggaagacttagattatctggcagcactggataatgatggaaatctttctgaatttggaatcatcatgtcagagtttcctcttgatccacaactctcgaagtctatcttagcgtcctgtgaatttgactgtgtagatgaagtgctaacaatcgcagccatggtaacagctccaaattgcttttcacatgtgccacatggagctgaagaggctgccttgacttgttggaagacatttttacatcccgaaggagatcactttaccctcatcagcatttacaaggcttaccaagacacaactctgaattctagcagtgagtactgtgtggaaaagtggtgtcgtgattacttcctcaactgttcagcactcagaatggcagatgttattcgagctgaactcttagaaattatcaagcgaatcgagcttccctatgcagaacctgcttttggctccaaggaaaacactctaaacataaagaaagctcttctgtccggttactttatgcagattgctcgggatgttgatggatcaggtaactacttaatgctgacacataagcaggttgctcagctgcatcccctgtctggttactcaatcaccaagaagatgccagagtgggtcctcttccataaattcagcatttctgagaacaactacatcaggattacctcagaaatctctcctgaactatttatgcagctggtaccacaatactatttcagtaatctgcctcctagtgaaagtaaggacattctacagcaagtagtggatcacctatcccctgtgtcaacaatgaataaggaacagcaaatgtgtgagacgtgccctgaaactgaacagagatgcactctccagtgactccccagcaaacacaaggtgcagcagggtcccaaaggtagctggatggctgaactgctggatatgggagatacatgacgcgaagacggatttcacatccacaggacggtcttgaagaaaataacactgtgtatattattttaaaataaaaaatagaagtttttattgagttctttaaattactactccatgcttttcttcttcttggaaaagtttttaaatcaaccactcataatttgaccaaaattttaaaaaactggtattttgtaaatgtgtcagagacacatgggacagaaccctactttttgtagaggaacttaatctgaataaagtctgagtttttcagtaaa

SEQ ID NO: 197007 - DNA, 803 bp, Artificial Sequence
  derived and/or modified sequence
ggccaggtcaccggctgaggacactgctcctgaagcccggtcaggcggtcgcgccctccctggcggcccccgcggccccgcaggacctgtgccccgacgtcgccgacccgcggtccccgctgtcgccgacccgcggcgtccgtcgggcgagtgggcctgcccgcgggtaaggcgccggccctgggccgccctcccgggaatcgggagccgccgctgcagtgtggtttattgacaatcatttacaatgccgaagagtgctgtagtgagccagcacagtgggtaacacagcaacggagaacagatgcaggtttgaggaatttaacttgctaaaaccttgaactgaagtcttagagattggaacatacgggtttgtataaataggcttttaagccctgtttgcaatgggttactgataggagaaacttgcttgtggaatgtcagctgcgtgagctcactgtcagacaagatggaagaagaagggctggagtgtccaaactcttcctctgaaaaacgctattttcctgaatccctggattccagcgatggggatgaggaagaggttttggcctgtgaggatttggaacttaacccctttgatggattgccatattcatcacgttattataaacttctgaaagaaagagaagatcttcctatatggaaagaaaaatactcctttatggagaacctgcttcaaaatcaaatcgtgattgtttcaggagatgctaaatgtggtaagagcgctcaggttcctcagtggtgtgctgaatattgtctttccatccactaccagcacgggggcg

SEQ ID NO: 197008 - protein, 1392 aa, Artificial Sequence
  derived and/or modified sequence
MVEPGQDLLLAALSESGISPNDLFDIDGGDAGLATPMPTPSVQQSVPLSALELGLETEAAVPVKQEPETVPTPALLNVRQPPSTTTFVLNQINHLPPLGSTIVMTKTPPVTTNRQTITLTKFIQTTASTRPSVSAPTVRNAMTSAPSKDQVQLKDLLKNNSLNELMKLKPPANIAQPVATAATDVSNGTVKKESSNKEGARMWINDMKMRSFSPTMKVPVVKEDDEPEEEDEEEMGHAETYAEYMPIKLKIGLRHPDAVVETSSLSSVTPPDVWYKTSISEETIDNGWLSALQLEAITYAAQQHETFLPNGDRAGFLIGDGAGVGKGRTIAGIIYENYLLSRKRALWFSVSNDLKYDAERDLRDIGAKNILVHSLNKFKYGKISSKHNGSVKKGVIFATYSSLIGESQSGGKYKTRLKQLLHWCGDDFDGVIVFDECHKAKNLCPVGSSKPTKTGLAVLELQNKLPKARVVYASATGASEPRNMAYMNRLGIWGEGTPFREFSDFIQAVERRGVGAMEIVAMDMKLRGMYIARQLSFTGVTFKIEEVLLSQSYVKMYNKAVKLWVIARERFQQAADLIDAEQRMKKSMWGQFWSAHQRFFKYLCIASKVKRVVQLAREEIKNGKCVVIGLQSTGEARTLEALEEGGGELNDFVSTAKGVLQSLIEKHFPAPDRKKLYSLLGIDLTAPSNNSSPRDSPCKENKIKKRKGEEITREAKKARKVGGLTGSSSDDSGSESDASDNEESDYESSKNMSSGDDDDFNPFLDESNEDDENDPWLIRKDHKKNKEKKKKKSIDPDSIQSALLASGLGSKRPSFSSTPVISPAPNSTPANSNTNSNSSLITSQDAVERAQQMKKDLLDKLEKLAEDLPPNTLDELIDELGGPENVAEMTGRKGRVVSNDDGSISYESRSELDVPVEILNITEKQRFMDGDKNIAIISEAASSGISLQADRRAKNQRRRVHMTLELPWSADRAIQQFGRTHRSNQVTAPEYVFLISELAGEQRFASIVAKRLESLGALTHGDRRATESRDLSRFNFDNKYGRNALEIVMKSIVNLDSPMVSPPPDYPGEFFKDVRQGLIGVGLINVEDRSGILTLDKDYNNIGKFLNRILGMEVHQQNALFQYFADTLTAVVQNAKKNGRYDMGILDLGSGDEKVRKSDVKKFLTPGYSTSGHVELYTISVERGMSWEEATKIWAELTGPDDGFYLSLQIRNNKKTAILVKEVNPKKKLFLVYRPNTGKQLKLEIYADLKKKYKKVVSDDALMHWLDQYNSSADTCTHAYWRGNCKKASLGLVCEIGLRCRTYYVLCGSVLSVWTKVEGVLASVSGTNVKMQIVRLRTEDGQRIVGLIIPANCVSPLVNLLSTSDQSQQLAVQQKQLWQQHHPQSITNLSNA

SEQ ID NO: 197009 - protein, 732 aa, Artificial Sequence
  derived and/or modified sequence
MVEPGQDLLLAALSESGISPNDLFDIDGGDAGLATPMPTPSVQQSVPLSALELGLETEAAVPVKQEPETVPTPALLNVRQPPSTTTFVLNQINHLPPLGSTIVMTKTPPVTTNRQTITLTKFIQTTASTRPSVSAPTVRNAMTSAPSKDQVQLKDLLKNNSLNELMKLKPPANIAQPVATAATDVSNGTVKKESSNKEGARMWINDMKMRSFSPTMKVPVVKEDDEPEEEDEEEMGHAETYAEYMPIKLKIGLRHPDAVVETSSLSSVTPPDVWYKTSISEETIDNGWLSALQLEAITYAAQQHETFLPNGDRAGFLIGDGAGVGKGRTIAGIIYENYLLSRKRALWFSVSNDLKYDAERDLRDIGAKNILVHSLNKFKYGKISSKHNGSVKKGVIFATYSSLIGESQSGGKYKTRLKQLLHWCGDDFDGVIVFDECHKAKNLCPVGSSKPTKTGLAVLELQNKLPKARVVYASATGASEPRNMAYMNRLGIWGEGTPFREFSDFIQAVERRGVGAMEIVAMDMKLRGMYIARQLSFTGVTFKIEEVLLSQSYVKMYNKAVKLWVIARERFQQAADLIDAEQRMKKSMWGQFWSAHQRFFKYLCIASKVKRVVQLAREEIKNGKCVVIGLQSTGEARTLEALEEGGGELNDFVSTAKGVLQSLIEKHFPAPDRKKLYSLLGIDLTAPSNNSSPRDSPCKENKIKKRKGEEITREAKKARKMSLMRMMKMVSS

SEQ ID NO: 197010 - DNA, 4179 bp, Artificial Sequence
  derived and/or modified sequence
atggtggagcccggccaggacctgctgctggccgccctgagcgagagcggcatcagccccaacgacctgttcgacatcgacggcggcgacgccggcctggccacccccatgcccacccccagcgtgcagcagagcgtgcccctgagcgccctggagctgggcctggagaccgaggccgccgtgcccgtgaagcaggagcccgagaccgtgcccacccccgccctgctgaacgtgagacagccccccagcaccaccaccttcgtgctgaaccagatcaaccacctgccccccctgggcagcaccatcgtgatgaccaagaccccccccgtgaccaccaacagacagaccatcaccctgaccaagttcatccagaccaccgccagcaccagacccagcgtgagcgcccccaccgtgagaaacgccatgaccagcgcccccagcaaggaccaggtgcagctgaaggacctgctgaagaacaacagcctgaacgagctgatgaagctgaagccccccgccaacatcgcccagcccgtggccaccgccgccaccgacgtgagcaacggcaccgtgaagaaggagagcagcaacaaggagggcgccagaatgtggatcaacgacatgaagatgagaagcttcagccccaccatgaaggtgcccgtggtgaaggaggacgacgagcccgaggaggaggacgaggaggagatgggccacgccgagacctacgccgagtacatgcccatcaagctgaagatcggcctgagacaccccgacgccgtggtggagaccagcagcctgagcagcgtgaccccccccgacgtgtggtacaagaccagcatcagcgaggagaccatcgacaacggctggctgagcgccctgcagctggaggccatcacctacgccgcccagcagcacgagaccttcctgcccaacggcgacagagccggcttcctgatcggcgacggcgccggcgtgggcaagggcagaaccatcgccggcatcatctacgagaactacctgctgagcagaaagagagccctgtggttcagcgtgagcaacgacctgaagtacgacgccgagagagacctgagagacatcggcgccaagaacatcctggtgcacagcctgaacaagttcaagtacggcaagatcagcagcaagcacaacggcagcgtgaagaagggcgtgatcttcgccacctacagcagcctgatcggcgagagccagagcggcggcaagtacaagaccagactgaagcagctgctgcactggtgcggcgacgacttcgacggcgtgatcgtgttcgacgagtgccacaaggccaagaacctgtgccccgtgggcagcagcaagcccaccaagaccggcctggccgtgctggagctgcagaacaagctgcccaaggccagagtggtgtacgccagcgccaccggcgccagcgagcccagaaacatggcctacatgaacagactgggcatctggggcgagggcacccccttcagagagttcagcgacttcatccaggccgtggagagaagaggcgtgggcgccatggagatcgtggccatggacatgaagctgagaggcatgtacatcgccagacagctgagcttcaccggcgtgaccttcaagatcgaggaggtgctgctgagccagagctacgtgaagatgtacaacaaggccgtgaagctgtgggtgatcgccagagagagattccagcaggccgccgacctgatcgacgccgagcagagaatgaagaagagcatgtggggccagttctggagcgcccaccagagattcttcaagtacctgtgcatcgccagcaaggtgaagagagtggtgcagctggccagagaggagatcaagaacggcaagtgcgtggtgatcggcctgcagagcaccggcgaggccagaaccctggaggccctggaggagggcggcggcgagctgaacgacttcgtgagcaccgccaagggcgtgctgcagagcctgatcgagaagcacttccccgcccccgacagaaagaagctgtacagcctgctgggcatcgacctgaccgcccccagcaacaacagcagccccagagacagcccctgcaaggagaacaagatcaagaagagaaagggcgaggagatcaccagagaggccaagaaggccagaaaggtgggcggcctgaccggcagcagcagcgacgacagcggcagcgagagcgacgccagcgacaacgaggagagcgactacgagagcagcaagaacatgagcagcggcgacgacgacgacttcaaccccttcctggacgagagcaacgaggacgacgagaacgacccctggctgatcagaaaggaccacaagaagaacaaggagaagaagaagaagaagagcatcgaccccgacagcatccagagcgccctgctggccagcggcctgggcagcaagagacccagcttcagcagcacccccgtgatcagccccgcccccaacagcacccccgccaacagcaacaccaacagcaacagcagcctgatcaccagccaggacgccgtggagagagcccagcagatgaagaaggacctgctggacaagctggagaagctggccgaggacctgccccccaacaccctggacgagctgatcgacgagctgggcggccccgagaacgtggccgagatgaccggcagaaagggcagagtggtgagcaacgacgacggcagcatcagctacgagagcagaagcgagctggacgtgcccgtggagatcctgaacatcaccgagaagcagagattcatggacggcgacaagaacatcgccatcatcagcgaggccgccagcagcggcatcagcctgcaggccgacagaagagccaagaaccagagaagaagagtgcacatgaccctggagctgccctggagcgccgacagagccatccagcagttcggcagaacccacagaagcaaccaggtgaccgcccccgagtacgtgttcctgatcagcgagctggccggcgagcagagattcgccagcatcgtggccaagagactggagagcctgggcgccctgacccacggcgacagaagagccaccgagagcagagacctgagcagattcaacttcgacaacaagtacggcagaaacgccctggagatcgtgatgaagagcatcgtgaacctggacagccccatggtgagccccccccccgactaccccggcgagttcttcaaggacgtgagacagggcctgatcggcgtgggcctgatcaacgtggaggacagaagcggcatcctgaccctggacaaggactacaacaacatcggcaagttcctgaacagaatcctgggcatggaggtgcaccagcagaacgccctgttccagtacttcgccgacaccctgaccgccgtggtgcagaacgccaagaagaacggcagatacgacatgggcatcctggacctgggcagcggcgacgagaaggtgagaaagagcgacgtgaagaagttcctgacccccggctacagcaccagcggccacgtggagctgtacaccatcagcgtggagagaggcatgagctgggaggaggccaccaagatctgggccgagctgaccggccccgacgacggcttctacctgagcctgcagatcagaaacaacaagaagaccgccatcctggtgaaggaggtgaaccccaagaagaagctgttcctggtgtacagacccaacaccggcaagcagctgaagctggagatctacgccgacctgaagaagaagtacaagaaggtggtgagcgacgacgccctgatgcactggctggaccagtacaacagcagcgccgacacctgcacccacgcctactggagaggcaactgcaagaaggccagcctgggcctggtgtgcgagatcggcctgagatgcagaacctactacgtgctgtgcggcagcgtgctgagcgtgtggaccaaggtggagggcgtgctggccagcgtgagcggcaccaacgtgaagatgcagatcgtgagactgagaaccgaggacggccagagaatcgtgggcctgatcatccccgccaactgcgtgagccccctggtgaacctgctgagcaccagcgaccagagccagcagctggccgtgcagcagaagcagctgtggcagcagcaccacccccagagcatcaccaacctgagcaacgcctag

SEQ ID NO: 197011 - DNA, 2199 bp, Artificial Sequence
  derived and/or modified sequence
atggtggagcccggccaggacctgctgctggccgccctgagcgagagcggcatcagccccaacgacctgttcgacatcgacggcggcgacgccggcctggccacccccatgcccacccccagcgtgcagcagagcgtgcccctgagcgccctggagctgggcctggagaccgaggccgccgtgcccgtgaagcaggagcccgagaccgtgcccacccccgccctgctgaacgtgagacagccccccagcaccaccaccttcgtgctgaaccagatcaaccacctgccccccctgggcagcaccatcgtgatgaccaagaccccccccgtgaccaccaacagacagaccatcaccctgaccaagttcatccagaccaccgccagcaccagacccagcgtgagcgcccccaccgtgagaaacgccatgaccagcgcccccagcaaggaccaggtgcagctgaaggacctgctgaagaacaacagcctgaacgagctgatgaagctgaagccccccgccaacatcgcccagcccgtggccaccgccgccaccgacgtgagcaacggcaccgtgaagaaggagagcagcaacaaggagggcgccagaatgtggatcaacgacatgaagatgagaagcttcagccccaccatgaaggtgcccgtggtgaaggaggacgacgagcccgaggaggaggacgaggaggagatgggccacgccgagacctacgccgagtacatgcccatcaagctgaagatcggcctgagacaccccgacgccgtggtggagaccagcagcctgagcagcgtgaccccccccgacgtgtggtacaagaccagcatcagcgaggagaccatcgacaacggctggctgagcgccctgcagctggaggccatcacctacgccgcccagcagcacgagaccttcctgcccaacggcgacagagccggcttcctgatcggcgacggcgccggcgtgggcaagggcagaaccatcgccggcatcatctacgagaactacctgctgagcagaaagagagccctgtggttcagcgtgagcaacgacctgaagtacgacgccgagagagacctgagagacatcggcgccaagaacatcctggtgcacagcctgaacaagttcaagtacggcaagatcagcagcaagcacaacggcagcgtgaagaagggcgtgatcttcgccacctacagcagcctgatcggcgagagccagagcggcggcaagtacaagaccagactgaagcagctgctgcactggtgcggcgacgacttcgacggcgtgatcgtgttcgacgagtgccacaaggccaagaacctgtgccccgtgggcagcagcaagcccaccaagaccggcctggccgtgctggagctgcagaacaagctgcccaaggccagagtggtgtacgccagcgccaccggcgccagcgagcccagaaacatggcctacatgaacagactgggcatctggggcgagggcacccccttcagagagttcagcgacttcatccaggccgtggagagaagaggcgtgggcgccatggagatcgtggccatggacatgaagctgagaggcatgtacatcgccagacagctgagcttcaccggcgtgaccttcaagatcgaggaggtgctgctgagccagagctacgtgaagatgtacaacaaggccgtgaagctgtgggtgatcgccagagagagattccagcaggccgccgacctgatcgacgccgagcagagaatgaagaagagcatgtggggccagttctggagcgcccaccagagattcttcaagtacctgtgcatcgccagcaaggtgaagagagtggtgcagctggccagagaggagatcaagaacggcaagtgcgtggtgatcggcctgcagagcaccggcgaggccagaaccctggaggccctggaggagggcggcggcgagctgaacgacttcgtgagcaccgccaagggcgtgctgcagagcctgatcgagaagcacttccccgcccccgacagaaagaagctgtacagcctgctgggcatcgacctgaccgcccccagcaacaacagcagccccagagacagcccctgcaaggagaacaagatcaagaagagaaagggcgaggagatcaccagagaggccaagaaggccagaaagatgagcctgatgagaatgatgaagatggtgagcagctag

SEQ ID NO: 197012 - DNA, 4179 bp, Artificial Sequence
  derived and/or modified sequence
atggttgaacctggccaggatcttctgctcgctgccctgagtgagagtggcatcagcccaaacgacctgtttgatatcgatggcggggacgccggcctggcaaccccaatgcctacaccctccgtgcagcagtcagtgcccctatctgcccttgaattgggactggaaaccgaagcagctgtgcctgtgaaacaagagcccgaaaccgtaccgacacctgccctccttaacgtgcgtcagcccccctcaacgacgacctttgtcctgaatcagatcaaccacctacctcctttgggcagcaccatcgtcatgacaaaaacccccccggtgacaaccaatagacagacaattaccctgactaagttcattcaaacaacagcctccacccggccaagtgtaagcgctcccactgttaggaatgcaatgacctccgcgccttcaaaagaccaggtacagctgaaggacttgctcaaaaacaattctctcaacgaacttatgaagcttaaaccaccggccaatatcgcacagcccgtggccactgccgccaccgatgtgtctaacgggaccgtgaagaaggagtccagcaataaggagggcgctcgcatgtggatcaacgacatgaagatgagaagtttctctcccacaatgaaagtgccagtggtaaaggaggacgatgagcctgaggaagaggatgaagaggaaatgggacacgctgagacgtacgccgagtacatgcccatcaagcttaagataggactccgacatcccgatgccgttgtagagacaagcagtctttcgtcagtgaccccgccggacgtctggtacaagacaagtattagcgaagagacaatagacaacggttggctatccgctctccagctagaggcaattacttatgcggctcagcagcacgagaccttcttacctaacggcgaccgcgctggcttcctcattggggatggcgctggcgtggggaaaggacggaccattgctggcataatttatgagaattatctgcttagccgcaagagggcactttggttctccgttagcaacgacctcaaatacgatgccgaacgcgacctgagggacattggggcgaagaatatccttgtgcattctctgaacaagtttaaatacggaaagattagtagtaaacataatggttcggtcaaaaaaggcgtcatctttgcaacctactcttccctgattggcgagagccagtctggtgggaaatacaagacccggttgaaacagctgttacactggtgcggcgatgatttcgacggggtgatcgtgttcgacgaatgccataaagccaagaacctctgtccagtcggcagctcgaagccaaccaagaccggactggctgtgctcgagctacagaacaagttgcccaaggctcgggtcgtgtatgctagtgccaccggcgcatccgagccaaggaatatggcctacatgaaccgcttgggcatttggggggagggaacaccgtttcgggaattctcagatttcatccaggctgtcgaaaggagaggcgtgggggctatggaaattgtggctatggacatgaagttacgtggaatgtacattgctagacaactgtcctttactggtgtaacctttaaaattgaggaagtgctgctgtcccagtcctatgtgaagatgtataacaaagccgtgaaactctgggtcattgccagagagcggtttcagcaggctgctgatctgattgatgctgagcagcgtatgaaaaagagtatgtggggtcagttctggtctgctcaccagcgcttctttaaatatctttgtatcgcatccaaggtgaagagggtagtccagttggctcgggaagagataaaaaatggcaaatgcgtggttattggattgcagagtaccggagaagcccggactctcgaggctctagaagaaggaggcggtgagcttaatgattttgtgtcaactgctaaaggtgtactgcagtctctgatcgagaaacattttcctgcccccgatcggaaaaagctctattccctactcgggattgacttgactgctcccagcaataattcaagcccaagggacagtccatgcaaggagaacaaaataaagaaaagaaaaggagaggagataacacgggaagctaagaaagcgcgcaaggtcggcggtttgacaggctcctcaagcgacgattcaggaagcgagagtgacgccagcgacaacgaggaatctgactatgaatcttcgaagaatatgtcatccggggatgatgacgactttaaccccttcctagacgagagcaatgaggacgatgaaaatgacccttggctgatacgcaaagatcacaagaaaaacaaagagaagaagaaaaaaaagtctattgatccagattccattcaatccgccctgctggcgtcagggttgggtagcaaacgaccctccttcagctccactccggttatctcgccagctcccaattccacaccagccaactcgaatactaattcaaatagtagcttgatcacaagccaggatgccgttgagcgagcgcagcagatgaagaaagatcttctcgacaagctggaaaagctggcagaggatttaccccccaataccctagatgagctgattgatgagctgggcggccccgaaaatgtcgccgaaatgaccggaagaaaaggaagagtggtgtccaatgacgatggcagtataagctatgaatccaggtctgaactggacgtccccgtggaaatcctgaatataactgaaaagcagagatttatggacggtgacaaaaatatagctattatctccgaagctgcaagtagcggaatttctttacaggccgacagaagggcgaaaaaccagaggcgccgcgttcatatgacactagaactgccttggagtgccgatcgggcaattcagcagttcgggaggacccaccgaagtaatcaggtcacagcccccgagtatgtgttcctgattagtgagcttgccggtgagcagcgctttgccagtatcgtggctaagcgcctggaaagtctgggggccttgacccacggggaccgtagagcgactgagtctagagatctctcgcggttcaatttcgacaacaagtatggtaggaatgccctcgagatcgtaatgaaatctattgttaatctggattccccgatggtcagccccccccccgactacccaggggagttctttaaggatgtccggcagggtctgatcggtgtgggtttgattaatgtggaagatagatcagggattctcaccttggacaaagactataataacatcggtaaatttttaaatcggatccttggcatggaggtccaccagcagaacgcactttttcagtactttgcggacacactaactgcagttgtgcaaaacgccaagaagaatggccgctacgatatggggatcctagacctggggagcggagatgaaaaagtgagaaagagcgacgtgaagaagtttctgacacctggctattctacttcagggcatgtggaactttacaccatcagtgtagaacgaggaatgtcctgggaggaggctacaaaaatctgggcagagttaaccggcccagacgacggcttttatctgagtctccagatacggaataataagaagacagccatcctagtcaaagaagttaacccaaagaagaaactgtttcttgtgtacaggcccaatactgggaagcagcttaagttggagatctatgcagatcttaaaaaaaagtataagaaggtagtttccgacgatgccctcatgcattggctggatcaatataactcaagtgctgacacttgcacccacgcttactggaggggcaactgtaagaaggcatccttgggcctggtatgcgagatcggcctgcgctgccgcacctactacgtgttgtgtggttcagttctgagtgtgtggacgaaggtggaaggggtactcgcttctgtctcaggtactaatgtgaaaatgcagatcgtcagactcaggaccgaggatgggcaaaggatcgtgggtttgatcattcccgccaactgcgttagtcctctggtaaatctgctgtccaccagtgatcagtctcagcaacttgcagttcaacagaagcaattgtggcagcagcaccatccacagagcatcacaaacctgtccaatgcctag

SEQ ID NO: 197013 - DNA, 2199 bp, Artificial Sequence
  derived and/or modified sequence
atggtagagcctgggcaagacttgctgttggcagccctgagtgaatctgggattagtccaaatgacctcttcgacatcgacggtggcgacgcaggactggccacgcctatgccaacgccttccgtgcagcagagcgttccactgtcagccctggagctggggttggaaaccgaggccgccgtgccagtgaaacaagaacccgaaactgtacccacacctgcgctgctcaatgtgaggcagcctccgtctacaaccacctttgtgttgaatcagataaaccatctgccccccttaggcagcacaatcgttatgacaaaaacaccaccagtcaccaccaaccgccagaccattaccctgaccaaatttatccagactacagctagtacacgccctagtgtttcggctcctacagtgaggaacgccatgacgtccgctccctcaaaagaccaggtgcaactgaaagacctgctgaagaacaacagccttaatgaactgatgaagctgaagccgcccgctaacattgcacagcctgtggccacagcagccactgacgtctcaaacggaaccgtaaaaaaggagagttctaacaaagaaggcgcacgaatgtggatcaacgatatgaagatgcggagttttagtcccaccatgaaagtgcccgttgtaaaagaggacgacgaacccgaggaagaagacgaggaggaaatgggccacgcggagacgtacgcagaatatatgcccattaagcttaagatcggtctccgccatcccgatgctgtcgttgagacttcctccctctcttcagtgactccgcctgatgtgtggtacaagacttctatctcagaagaaacgattgataacggctggctgtctgctttacagctggaggccattacctacgccgctcagcagcacgaaacctttctgcccaatggcgatcgggccgggtttctgatcggagacggggcaggagtagggaaaggcaggacgattgccggcatcatttacgaaaactacctgttgagccggaagagggctctctggttttctgttagtaacgatttgaaatacgatgcagagcgcgacctgcgggacataggtgccaagaacattctggtccactcattgaataaattcaagtatggaaaaatctcctctaaacacaacggttccgtaaagaagggtgtgatattcgctacttattcttctctgatcggcgagtcacaatcaggtgggaagtataaaaccagattgaaacagctgttgcactggtgcggtgacgactttgatggcgtgatcgtcttcgacgaatgtcataaggccaaaaacctatgcccggttggcagttccaagcccaccaagaccgggttggcggtccttgagctgcaaaataagctgccaaaagcacgggtggtttacgcctctgcaacaggggcttccgagcctcgaaacatggcctatatgaaccggttggggatttggggggaaggcacacctttccgcgaattctcagatttcattcaggcagtggaaaggcggggcgtcggggccatggagatcgtggcgatggatatgaaactgcgggggatgtatattgcccgacagctgtccttcactggggtgacatttaagattgaggaagtgctcttgagccagtcgtacgttaagatgtacaataaggcagtaaagctttgggtaatcgcccgagaacgatttcagcaagctgcagatctgatagatgcagaacaacggatgaaaaagtcaatgtggggacaattttggagcgcccaccagcggttcttcaagtacttatgcatcgcttcgaaggttaagagggtggtccaactggcaagggaagagatcaagaatggaaaatgcgtggtgattggactgcaatctacgggcgaggctcgcacattggaggctctggaggagggcggtggtgaactgaacgacttcgtgtctaccgctaaaggagtgttgcaatctcttattgagaaacactttcccgcccccgacagaaagaaactgtattccctgctcggcattgatctgactgccccgagtaacaactcctcgcctcgagatagcccctgtaaggagaataaaatcaaaaagcgtaagggagaggaaattacaagagaagcaaagaaggctaggaagatgtctttgatgcgtatgatgaagatggtctctagctag

SEQ ID NO: 197014 - DNA, 4179 bp, Artificial Sequence
  derived and/or modified sequence
atggtggagcccggccaggacctgctgctggccgccctgtctgagagcggcatcagccccaatgacctgtttgatattgatggaggagatgctggcctggccacccccatgcccaccccatctgtgcagcagagcgtgcccctgagcgccctggagctgggcctggagacagaagctgctgtgcctgtgaagcaggagcctgagaccgtgcccaccccagccctgctgaatgtgcggcagccccccagcaccaccacctttgtgctgaaccagatcaaccacctgccccccctgggcagcaccatcgtgatgaccaagaccccacctgtgaccaccaaccggcagaccatcaccctgaccaagttcatccagaccacagccagcacccggcccagcgtgtctgcccccaccgtgagaaatgccatgaccagcgcccccagcaaggaccaggtgcagctgaaggacctgctgaagaacaacagcctgaatgagctgatgaagctgaagcccccagccaacatcgcccagcctgtggccacagctgccacagatgtgtccaatggaacagtgaagaaggagagcagcaacaaggagggcgccaggatgtggatcaatgacatgaagatgaggagcttcagccccaccatgaaggtgcctgtggtgaaggaggatgatgagcctgaggaggaggatgaggaggagatgggccacgccgagacctacgccgagtacatgcccatcaagctgaagattggcctgcggcacccagatgctgtggtggagaccagcagcctgagctctgtgaccccaccagatgtgtggtacaagaccagcatcagcgaggagaccatcgacaatggctggctgagcgccctgcagctggaggccatcacctacgccgcccagcagcacgagaccttcctgcccaacggggaccgggccggcttcctgattggagatggagctggggtgggcaagggccgcaccatcgccggcatcatctatgagaactacctgctgagcaggaagagggccctgtggttctctgtgtccaatgacctgaagtatgatgctgagcgggacctgcgggacattggagccaagaacatcctggtgcacagcctgaacaagttcaagtatggcaagatcagcagcaagcacaacggctctgtgaagaagggcgtcatctttgccacctacagcagcctcatcggggagagccagagcggcggcaagtacaagacccggctgaagcagctgctgcactggtgtggagatgactttgatggagtcatcgtgtttgatgagtgccacaaggccaagaacctgtgccctgtgggcagcagcaagcccaccaagacaggcctggccgtgctggagctgcagaacaagctgcccaaggcccgggtggtgtatgccagcgccaccggggccagcgagcccaggaacatggcctacatgaaccggctgggcatctggggcgagggcacccccttccgggagttcagtgacttcatccaggccgtggagaggagaggagtgggcgccatggagatcgtggccatggacatgaagctgcggggcatgtacatcgcccggcagctgtccttcaccggggtgaccttcaagattgaggaggtgctgctgagccagagctatgtgaagatgtacaacaaggctgtgaagctgtgggtgattgcccgggagcgcttccagcaggccgctgacctgattgatgctgagcagaggatgaagaagtccatgtggggccagttctggagcgcccaccagcgcttcttcaagtacctgtgcatcgccagcaaggtgaagagggtggtgcagctggcccgggaggagatcaagaatggaaaatgtgtggtgattggcctgcagagcactggagaggcccggaccctggaggccctggaggagggcggcggggagctgaatgactttgtgtccacagccaagggcgtgctgcagagcctcatcgagaagcacttccctgccccagacaggaagaagctgtacagcctgctgggcatcgacctgacagcccccagcaacaacagcagcccccgggacagcccctgcaaggagaacaagatcaagaagaggaaaggagaggagatcacccgggaggccaagaaggccaggaaggtgggcggcctgaccggcagcagcagtgatgacagcggcagcgagagtgatgccagtgacaatgaggagagtgactatgagagcagcaagaacatgagcagtggagatgatgatgacttcaaccccttcctggatgagagcaatgaagatgatgaaaatgacccctggctgatcaggaaggaccacaagaagaacaaggagaagaagaagaagaagagcattgatcctgacagcatccagagcgccctgctggccagcggcctgggcagcaagaggcccagcttcagcagcacccctgtgatcagccctgcccccaacagcaccccagccaacagcaacaccaacagcaacagcagcctcatcaccagccaggatgctgtggagcgggcccagcagatgaagaaggacctgctggacaagctggagaagctggccgaggacctgccccccaacaccctggatgagctgattgatgagctgggcggcccagaaaatgtggccgagatgacaggcaggaagggccgggtggtgtccaatgatgatggcagcatctcctatgagagccgctctgagctggatgtgcctgtggagatcctgaacatcacagagaagcagcgcttcatggatggagacaagaacatcgccatcatcagcgaggccgccagcagcggcatcagcctgcaggccgacagaagagccaagaaccagaggcggcgggtgcacatgaccctggagctgccctggagcgctgaccgggccatccagcagtttggaagaacccacaggagcaaccaggtgacagccccagaatatgtgttcctgatcagcgagctggccggggagcagagatttgccagcatcgtggccaagaggctggagagcctgggcgccctgacccacggggacagaagagccacagagagccgggacctgagccgcttcaactttgacaacaagtatggaagaaatgccctggagatcgtgatgaagagcatcgtgaacctggacagccccatggtgagccccccaccagactacccaggagagttcttcaaggatgtgcggcagggcctgattggagtgggcctcatcaacgtggaggacaggagcggcatcctgaccctggacaaggactacaacaacatcggcaagttcctgaaccgcatcctgggcatggaggtgcaccagcagaatgccctcttccagtactttgctgacaccctgacagctgtggtgcagaatgccaagaagaatggccgctatgacatgggcatcctggacctgggcagcggagatgagaaggtgaggaagagtgatgtgaagaagttcctgaccccaggctacagcaccagcggccacgtggagctgtacaccatctctgtggagcggggcatgtcctgggaggaggccaccaagatctgggccgagctgaccggcccagatgatggcttctacctgagcctgcagatccggaacaacaagaagacagccatcctggtgaaggaggtgaaccccaagaagaagctgttcctggtgtaccggcccaacacaggcaagcagctgaagctggagatctatgctgacctgaagaagaagtacaagaaggtggtgtctgatgatgccctgatgcactggctggaccagtacaacagcagcgctgacacctgcacccacgcctactggaggggcaactgcaagaaggccagcctgggcctggtgtgtgagatcggcctgcgctgcaggacctactacgtgctgtgtggctctgtgctgtctgtgtggaccaaggtggagggcgtgctggcctctgtgtctggcaccaacgtgaagatgcagatcgtgcggctgaggacagaagatggccagagaattgtgggcctcatcatcccagccaactgtgtgagccccctggtgaacctgctgagcaccagtgaccagagccagcagctggccgtgcagcagaagcagctgtggcagcagcaccacccccagagcatcaccaacctgagcaatgcctag

SEQ ID NO: 197015 - DNA, 2199 bp, Artificial Sequence
  derived and/or modified sequence
atggtggagcccggccaggacctgctgctggccgccctgtctgagagcggcatcagccccaatgacctgtttgatattgatggaggagatgctggcctggccacccccatgcccaccccatctgtgcagcagagcgtgcccctgagcgccctggagctgggcctggagacagaagctgctgtgcctgtgaagcaggagcctgagaccgtgcccaccccagccctgctgaatgtgcggcagccccccagcaccaccacctttgtgctgaaccagatcaaccacctgccccccctgggcagcaccatcgtgatgaccaagaccccacctgtgaccaccaaccggcagaccatcaccctgaccaagttcatccagaccacagccagcacccggcccagcgtgtctgcccccaccgtgagaaatgccatgaccagcgcccccagcaaggaccaggtgcagctgaaggacctgctgaagaacaacagcctgaatgagctgatgaagctgaagcccccagccaacatcgcccagcctgtggccacagctgccacagatgtgtccaatggaacagtgaagaaggagagcagcaacaaggagggcgccaggatgtggatcaatgacatgaagatgaggagcttcagccccaccatgaaggtgcctgtggtgaaggaggatgatgagcctgaggaggaggatgaggaggagatgggccacgccgagacctacgccgagtacatgcccatcaagctgaagattggcctgcggcacccagatgctgtggtggagaccagcagcctgagctctgtgaccccaccagatgtgtggtacaagaccagcatcagcgaggagaccatcgacaatggctggctgagcgccctgcagctggaggccatcacctacgccgcccagcagcacgagaccttcctgcccaacggggaccgggccggcttcctgattggagatggagctggggtgggcaagggccgcaccatcgccggcatcatctatgagaactacctgctgagcaggaagagggccctgtggttctctgtgtccaatgacctgaagtatgatgctgagcgggacctgcgggacattggagccaagaacatcctggtgcacagcctgaacaagttcaagtatggcaagatcagcagcaagcacaacggctctgtgaagaagggcgtcatctttgccacctacagcagcctcatcggggagagccagagcggcggcaagtacaagacccggctgaagcagctgctgcactggtgtggagatgactttgatggagtcatcgtgtttgatgagtgccacaaggccaagaacctgtgccctgtgggcagcagcaagcccaccaagacaggcctggccgtgctggagctgcagaacaagctgcccaaggcccgggtggtgtatgccagcgccaccggggccagcgagcccaggaacatggcctacatgaaccggctgggcatctggggcgagggcacccccttccgggagttcagtgacttcatccaggccgtggagaggagaggagtgggcgccatggagatcgtggccatggacatgaagctgcggggcatgtacatcgcccggcagctgtccttcaccggggtgaccttcaagattgaggaggtgctgctgagccagagctatgtgaagatgtacaacaaggctgtgaagctgtgggtgattgcccgggagcgcttccagcaggccgctgacctgattgatgctgagcagaggatgaagaagtccatgtggggccagttctggagcgcccaccagcgcttcttcaagtacctgtgcatcgccagcaaggtgaagagggtggtgcagctggcccgggaggagatcaagaatggaaaatgtgtggtgattggcctgcagagcactggagaggcccggaccctggaggccctggaggagggcggcggggagctgaatgactttgtgtccacagccaagggcgtgctgcagagcctcatcgagaagcacttccctgccccagacaggaagaagctgtacagcctgctgggcatcgacctgacagcccccagcaacaacagcagcccccgggacagcccctgcaaggagaacaagatcaagaagaggaaaggagaggagatcacccgggaggccaagaaggccaggaagatgagcctgatgaggatgatgaagatggtgagcagctag

SEQ ID NO: 197016 - DNA, 4179 bp, Artificial Sequence
  derived and/or modified sequence
atggtggagcccggccaggacctgctgctggccgccctgagcgagtcgggaatttctccaaatgatctatttgacattgatgggggtgatgctggccttgctactccaatgcccaccccaagtgtccagcagtctgtgcctctgtcagcattagaactgggcctggaaacagaagcagctgtccctgtgaagcaggaacccgaaacagtgcccacacctgccctgttaaacgtgagacagcctccttctaccaccacctttgtgctgaatcagattaatcatttaccaccactgggctcaaccattgtgatgacaaaaacacctccggtaacaacaaaccgacaaaccatcaccctgactaagttcatccagaccacggcatccaccaggccttccgtaagtgctcctacagtgcgtaacgcaatgacctcggctccttcgaaagaccaggtacagctaaaagatctcctaaagaataactctcttaacgaactgatgaaactgaaacctccagccaatatagcccagcctgtggctacagctgccaccgatgtgagcaatggtaccgttaaaaaggaatcatccaacaaggagggtgcccggatgtggataaacgacatgaagatgagatcattttcccccaccatgaaagtgcctgtggtcaaagaagatgacgagcccgaggaggaggacgaggaagaaatgggacacgccgaaacatacgcggaatacatgccaatcaaactaaagatcgggctcagacatcctgatgccgtggtcgagacctcttctctgagctcagtaacaccgccagacgtgtggtataagacatcaatctccgaagagactatcgataacgggtggttatccgccctccagttggaagccatcacctacgccgcccagcaacacgagacgttcctccccaatggggatagagcaggcttcctcatcggtgacggtgctggggtcgggaaagggaggaccatcgctggaattatctacgaaaattacctcctgtcacgcaagagagcactatggttttccgtatcaaatgatttaaagtatgacgcagagcgggacctgcgagacatcggcgccaaaaacattctggttcatagtctcaataagtttaaatatggaaaaatcagctccaagcataatgggagcgttaagaagggagtgattttcgctacctattcttcactgatcggtgagagtcagagtggaggaaagtacaagaccagactgaagcagcttctgcattggtgcggcgatgacttcgatggggtgatcgtgttcgacgagtgccacaaggccaagaatctctgccccgtcggatccagcaaacctacaaagaccgggctcgctgtgctggagctgcagaacaagctgccaaaggcgcgagttgtctacgccagtgctactggcgcctccgaacctagaaatatggcttatatgaatagactgggtatttggggcgaaggcacaccattcagagagtttagcgatttcatccaggcagtggaaaggcggggagtgggggctatggaaattgtggccatggacatgaaactacggggaatgtacatcgcccggcaacttagttttaccggcgttaccttcaaaattgaggaggttctcctcagtcagtcctacgtgaagatgtataacaaagctgttaaactgtgggtgattgcccgcgaaagatttcagcaagcggccgacttgattgacgccgagcagcgtatgaagaagtctatgtgggggcagttctggtccgctcaccagaggtttttcaagtatctgtgcatcgccagcaaggtgaagagagtcgtgcagctggctagagaagagattaagaatggcaagtgcgttgttatcgggctacagtcaacaggagaagctaggactttggaggccctcgaagagggcgggggggaactcaacgattttgtgagcacagctaagggagtgttgcagtcccttatcgaaaagcatttccctgctcccgaccgcaaaaaattgtattctctgctcggcatcgacttgaccgcacccagcaacaatagctcccctagggattcaccctgcaaagagaacaaaatcaagaagagaaagggggaagagatcactagggaggccaagaaggctcgtaaggtgggggggctcactggatcctccagtgatgatagcgggagcgagtcagacgcctccgataacgaggagtccgattacgaaagctccaaaaatatgagctccggtgatgacgatgatttcaacccgttcctggatgagtctaatgaggatgacgagaatgacccttggctgatcagaaaagatcacaagaaaaataaagaaaaaaagaagaagaagtctattgatcccgatagtattcaatcagccttactcgcgagcggcctgggtagcaagcgcccaagcttttcatccacacccgtgatctcacccgcacctaacagtaccccagctaatagcaataccaacagcaattccagcttgattacatcccaggacgccgtggagagagcacaacaaatgaagaaagaccttttagacaagctggagaaacttgctgaagacctgccccctaacacactggatgagctgatcgatgaactcggagggcctgaaaacgtggctgaaatgaccgggcgcaaaggacgtgtcgtgagtaatgatgatggtagtatttcatacgaatccagaagtgagctggacgtccccgttgagatacttaacataaccgagaagcaacgcttcatggatggagataagaatatcgcaataatcagcgaagccgccagcagcggaatcagtctgcaggctgacagacgcgcaaaaaaccaacgaagacgggtgcatatgaccttggagctgccctggtccgccgatcgcgccatccagcagttcggacggacccatcggtccaaccaggtaaccgctcctgagtacgtcttcctaatttcagagttagctggggaacagaggtttgcgagcatcgttgccaagcgactggagtctctcggagccctgacacacggggatagacgcgccactgagagccgcgatcttagtcggttcaacttcgataacaaatacggaagaaacgccctagaaattgttatgaagtccattgttaatctagattcacctatggtttcgcctccccctgactacccgggcgagttctttaaagatgtgcggcagggattaataggagttggactgatcaacgtggaggaccggtcaggcattcttacactggacaaagactacaataatataggtaaattcctcaaccgtatcttaggaatggaggtccatcagcagaacgcactgttccaatacttcgcagacaccctgacggctgtggtccaaaacgctaaaaagaatggccgctatgatatggggatactagatctagggagtggagacgagaaagtgagaaagagtgatgtcaagaagtttttaacacctggatactcaacatcggggcacgtggaactgtacacaatctctgtcgagagaggcatgagctgggaggaagcaactaaaatctgggctgagctcaccggtccggatgatggattttacctcagcctacagattcggaacaataagaagacagccatactggtgaaagaggtcaaccctaagaagaaactttttctcgtgtataggccgaatacagggaaacagctcaaactggagatctacgcagatttgaaaaaaaagtacaaaaaggtcgtgagcgatgacgccctgatgcactggttagaccagtacaatagcagcgcagatacgtgtacccatgcctactggcgggggaattgcaagaaggctagcctggggctagtctgcgaaattggcctgagatgccgcacgtactatgtcctgtgcggtagcgttttgagcgtctggaccaaagttgaaggagtcctggcaagcgtctcaggcacaaacgtaaagatgcaaatcgtacgattaagaacagaagacgggcagcgaattgtcgggttaattatccccgctaattgcgtctcacctctggtaaaccttctgtcaacaagcgatcagtctcagcaactggctgtccagcagaagcagttgtggcagcagcaccatccacagagtatcactaatttgagtaatgcttag

SEQ ID NO: 197017 - DNA, 2199 bp, Artificial Sequence
  derived and/or modified sequence
atggtggagcccggccaggacctgctgctggccgccctgagcgagtccggcatctcccctaacgatttgtttgatattgacggaggggacgccggtcttgccacaccaatgcccacaccatccgtgcagcagtctgtgccactgtctgcattagagttagggcttgagaccgaggccgccgtacctgttaaacaggagccagagacagtgcctacgccggccctcctgaatgttcggcagcccccttctacaaccaccttcgtcctcaatcagattaaccacctgcccccacttgggagcaccatcgtcatgacaaaaaccccccccgtaaccactaaccggcagacaatcacactgacaaaattcattcagacaaccgcatccactagacctagcgtttcagctccgacagttagaaatgcaatgaccagtgcgccctccaaagaccaagtgcaattgaaagacctgttgaaaaataacagtctaaacgagctgatgaagctgaagcccccagccaacatcgctcagcctgtcgccaccgctgcgaccgatgtgtccaatggtaccgtcaagaaggagtcaagtaacaaggaaggggcgagaatgtggatcaacgacatgaaaatgagatccttcagtccaactatgaaggtgcctgtcgttaaagaagacgatgagccagaagaagaagacgaggaggagatggggcacgccgaaacttacgccgagtacatgcccattaaactaaagatcggcctgagacatcccgatgccgtggtggagacgtcgtcactctcgtccgtgactcctcctgatgtctggtacaagacatcaatctccgaggaaacaattgacaacgggtggctgtccgccctgcagctggaagctataacgtacgctgctcagcagcatgaaacatttttacccaatggcgatcgggccggatttctcattggggacggagcaggtgtaggcaagggccgcactattgcagggattatatacgaaaactacctgttatcccgaaagcgcgcgctctggttttcagtatctaatgacttaaaatacgatgctgagagggacctgcgggacatcggcgcaaaaaacattcttgtgcactctttgaacaaattcaaatacggaaagatttctagtaagcacaatgggtctgtgaaaaaaggagtgatatttgcgacgtactcctctctgataggggaatcgcagtctggaggcaaatacaagacaagactcaaacagctgctgcattggtgtggcgacgatttcgacggtgtgatcgtgtttgatgagtgccacaaagctaaaaacctgtgtcccgtgggctcaagtaaaccaaccaagacagggctggcggtgctggaattgcagaacaaactccctaaagctcgagtggtatatgcctcagcaaccggcgcttcagagccgagaaatatggcatacatgaaccggttaggaatttggggggaagggacccctttcagagaattttccgatttcatccaggccgtggaaagaagaggcgtcggagctatggaaattgtggcaatggacatgaagctgcgtggaatgtatatcgcacggcaactgagcttcaccggagtcaccttcaaaattgaggaggtgttactgtcacagagctatgtgaaaatgtacaataaagctgtcaagctatgggtcatcgctcgtgagcgctttcagcaagcagccgacctcatagacgccgaacagagaatgaagaagagcatgtggggccaattctggtccgcacaccagagattcttcaaatacctgtgcatagcctctaaagtgaaacgcgtcgtacagttggcaagggaggaaattaagaatgggaaatgcgtggtcatcgggctgcaatccactggtgaagccaggaccctcgaggctctagaggaaggcgggggagaattgaatgactttgtgagcacagctaaaggggtgctccagagccttatagagaaacactttcccgcccccgaccgaaaaaagctgtactctctcctgggtattgacctgacggcaccttcaaacaattcctctcctcgggactccccgtgcaaagagaataagattaagaagcggaaaggagaggagattactcgtgaagccaagaaagcacggaagatgtccctcatgcgcatgatgaagatggtgtcatcatag

SEQ ID NO: 197018 - DNA, 4178 bp, Artificial Sequence
  derived and/or modified sequence
atggtggagccgggacaggacctgctcctcgccgctctcagcgagagcgggattagtccgaatgacctatttgatattgacgggggtgatgccggactggcaacacctatgcccactccctctgtgcaacagagcgtgcccctatcagctttagagcttggcttggagactgaggctgcagttccagtaaagcaggaacccgaaaccgttccaacacctgccttgcttaatgtacggcagccgccttcaaccacaacatttgttctgaatcagattaatcatctcccccctctggggtcgacaattgtaatgaccaaaactcctccagtaacgactaacagacagacaatcactttaacgaaattcatccaaaccacagcatctacacggcctagcgtttcagcacctaccgtgcgaaacgccatgaccagtgctcctagtaaggaccaggttcagctcaaggatctccttaaaaacaattctttgaacgagctgatgaaactgaaacccccagccaacatcgcccagccggtagccaccgccgcaactgacgtgtctaatgggacggtgaaaaaagaaagcagtaataaagagggcgctcgcatgtggatcaatgatatgaaaatgcgctctttcagtcccaccatgaaggtgccagtagttaaagaggatgacgagcccgaggaggaggacgaagaagaaatgggccacgcggaaacttacgctgaatatatgccaatcaaacttaaaattgggttgagacacccggatgctgtagtggaaacctccagtctctcctcagttacaccgccagacgtttggtacaaaacatcgatcagtgaggaaaccatcgataacggatggcttagtgcccttcagttggaggccattacatacgcagcccagcagcatgagacatttcttccgaacggggacagggccggtttcctcataggagatggagctggcgtgggaaaaggacgcactatcgctggcatcatctacgaaaactatctgctttctcggaaacgcgctctctggttcagtgtttcgaacgaccttaaatacgacgcggagcgcgacttgcgagatataggcgcaaagaacattctggtccactctcttaataaatttaaatatggtaagatttcgtcaaaacacaacgggagcgtcaagaaaggggttattttcgcaacatattccagccttatcggggagtcccaatccgggggaaaatacaagacccgcctgaagcagttattgcactggtgcggggatgatttcgatggcgttattgtgttcgacgagtgccacaaggcaaagaacctctgcccagttggcagttccaagccaacaaagaccggactcgcagtcctagagctccaaaataaacttcccaaggccagagtcgtgtacgccagcgctacaggagcttctgaaccacggaatatggcgtacatgaacaggctgggaatttggggcgagggaacacccttcagggaattctcggattttatacaggccgtagaacggaggggggtgggagcgatggaaattgtggctatggacatgaaattgagagggatgtacattgccagacagctgtcctttacaggtgtcacttttaagatcgaagaggtgctactttcccagtcgtatgtgaaaatgtataataaggccgtcaagttgtgggtcatcgctcgcgagagattccagcaagcagcagatctaattgatgcagaacagcgaatgaaaaagagtatgtggggacagttttggtcagctcatcagaggttttttaagtatctgtgcattgcttctaaagtcaaacgggtggtgcagctagctagggaggaaattaagaatgggaaatgcgttgttatcggcttgcagtcaacaggtgaagctcgcacacttgaggctctcgaggaagggggaggcgaactcaacgattttgtctctaccgctaaaggggttctgcagtccctgatcgaaaaacatttccccgctccggaccgaaagaaactgtatagcctccttggaattgacttaaccgccccatcaaacaattcatccccaagagacagcccttgtaaggagaataagatcaaaaaacgcaagggggaggaaattacgcgagaggccaaaaaggccagaaaagttggaggcctcaccggctccagttccgacgacagtggtagtgagagtgatgcttcggataatgaggaatcagactacgaatcgtcgaagaatatgtcaagcggcgacgatgacgattttaatccattcctcgacgaatcgaacgaagatgacgagaacgacccctggcttatccggaaggatcacaagaagaacaaagaaaagaaaaaaaagaagtcaatcgatcccgatagcattcaaagcgctctgctggcgtcaggcctcggaagcaagagaccgtccttcagcagtactcccgtgatttcccccgctccaaactctacccctgctaattcaaacacgaatagcaactcttctctgattacctcccaggatgctgtcgaacgagcccagcagatgaagaaagacctgctcgacaagctcgagaagctagcagaggacctccccccaaacacccttgacgagctgattgatgaattggggggacctgagaacgttgctgaaatgacagggagaaagggacgtgtcgttagtaacgacgacggttcaataagctacgaatcaaggtccgagctagacgtgccggtagaaatcttaaatatcaccgaaaagcaacggtttatggatggagataaaaacatcgctataatttccgaagctgcgagctcggggattagcttgcaggcagaccgcagggcaaagaatcagcgtcggagagttcacatgacgctggagctgccatggagtgcagatagggctattcagcagtttggaagaactcataggtccaaccaggtgacggcacctgaatacgtgtttctcatcagtgagttggccggtgagcagcgtttcgcctcaattgtcgcaaagcgcttggagagcctgggggcacttacccatggcgatagaagagctaccgagtcgcgagacctcagccggttcaacttcgataacaagtatggccgaaacgccctggagatcgtaatgaaaagtatcgttaatctggacagtcctatggtctccccacctcccgactaccccggagagtttttcaaagatgtccgccagggtctcatcggagtgggcctaataaacgtcgaggacaggagcggcatcctaaccttagacaaggactataacaacatcgggaagttcctcaacagaatcctgggcatggaggttcatcagcagaacgccctgttccagtacttcgctgacacattaacagcagtggtgcagaacgccaagaaaaatggcagatatgacatgggaatcctggacctggggtcaggcgacgaaaaggtgcgcaagtcagacgtgaaaaagttcttaaccccaggctactcgaccagcggccacgtcgaactctatacaataagtgtggagcgcggtatgagctgggaggaagccacgaagatttgggccgagctgaccgggccagacgacggattttacctgagtctccagatccggaacaataaaaaaacagctattctggttaaagaagtgaacccaaagaaaaagctttttcttgtttaccgcccaaatactggcaagcaactaaagctcgaaatatacgcagacctgaagaaaaagtacaaaaaagtggtgagtgatgacgcactgatgcattggctggatcagtataatagctctgccgatacatgcacccacgcatactggaggggcaattgtaaaaaagcaagtttgggtttggtttgcgaaatcggtctgcgctgtcgcacgtactacgtgttgtgcggatctgtgctcagcgtttggaccaaagtggaaggcgtcctcgcatctgtgagcggaacaaacgtcaaaatgcaaattgtgcgcctgcgaacagaggacggtcagagaatcgtgggcttgataatccctgccaactgcgtaagcccgttggtgaatctgctgtctacttccgatcagtctcagcagctagcagtgcaacagaaacagctttggcagcaacatcatccccaaagcattaccaacttatcaaacgccta

SEQ ID NO: 197019 - DNA, 2199 bp, Artificial Sequence
  derived and/or modified sequence
atggtcgagccagggcaggacctcctacttgccgcactgtctgaatcaggcatctccccaaacgacctgtttgacattgatggaggcgatgctggcctggcaacccccatgcctacgccctctgtgcagcagagtgtgcccctgagcgctctggagctgggattggaaaccgaggctgcagtgcctgtcaaacaggagcccgagacagtgcctactcctgccctcctcaacgtgcgacagccaccatccaccactacattcgtgcttaatcagattaaccacctccctcctttgggctcgacgatcgtgatgactaagacgccgcctgtgacaactaaccggcagactattacattgacaaagttcatccagacaacagcttctacccggcctagcgtctcagctccgacagtaaggaacgccatgacctctgcacccagcaaggaccaagttcagctaaaggatctgttgaagaacaatagtttgaacgagcttatgaaattaaaaccccctgccaatatagcgcaacctgtggctacggccgctacagatgtctcaaatggtaccgtgaagaaggaatccagcaacaaagaaggagcccgaatgtggatcaacgatatgaagatgaggtctttttcaccgaccatgaaagttcctgtggttaaggaggacgatgagcctgaggaagaggacgaggaagagatgggacacgcggaaacctatgcggagtatatgccaattaagctcaaaattggtttgcgccacccggacgctgtggtagagacttcctccctctctagtgtgaccccgcctgatgtttggtacaaaacctccatcagtgaggagaccattgacaacggctggctgtcagccctgcagctagaggccataacctatgctgcccaacaacacgagaccttcctgccaaacggagatagagccggattcctcatcggagacggagccggtgtgggcaaaggaagaaccattgccggaattatctatgaaaattacctcctctcgcggaaacgggcactgtggttttccgtgtccaatgacctcaaatacgatgctgagagggacttacgtgatattggtgccaagaacatcctcgtgcactcactcaacaaattcaagtacggcaaaatctcgtctaaacacaacggttctgtgaagaaaggcgttatctttgccacttactcaagcctcattggcgaatcacagagcggagggaagtacaaaacgcgcctcaaacagctgctgcattggtgcggcgatgatttcgatggagtgattgttttcgatgagtgtcataaggctaagaacttgtgcccagtcggatctagcaaacctaccaaaacgggactggctgtactggagctccaaaacaaactcccgaaagctcgcgtggtctatgccagcgccacaggggcatctgagccgaggaacatggcttacatgaaccgtcttggcatatggggagaggggacacccttccgtgagttctctgatttcatccaggctgtcgagcgcagaggagtgggcgcaatggaaatcgtggccatggacatgaagctccgcggtatgtatatcgcccgacagttatcctttactggtgtgacatttaagatcgaagaggtgcttctgtcccagtcatatgtgaagatgtacaacaaggccgtcaaactttgggtgatagctcgtgaacggttccagcaggccgcagacctcatcgatgccgagcagcgcatgaaaaagtccatgtggggccagttctggagcgcgcatcaacgctttttcaaatatttgtgcattgcctctaaggtgaaacgcgtggttcagttagcaagggaggagatcaagaacggaaaatgtgtggtgattggactgcaatcaaccggtgaggcccgtactctagaggccttggaggagggcggaggggaattaaatgatttcgtgtctactgccaagggggtgctgcagtccctcattgagaaacacttccccgctcctgaccgcaagaaattgtacagcttgcttggcatcgatttaaccgctccgagcaacaacagctccccaagagactcaccttgtaaggagaataagataaagaaacgaaagggcgaggagatcacacgcgaagccaagaaagcccgaaagatgtccctgatgcgcatgatgaaaatggtttccagctag

SEQ ID NO: 197020 - DNA, 10978 bp, Artificial Sequence
  derived and/or modified sequence
atggtggagccagggcaagatttactgcttgctgctttgagtgagagtggaattagtccgaatgacctctttgatattgatggtggagatgcagggcttgcaactccaatgcctaccccgtcagttcagcagtcagtgccacttagtgcattagaactaggtttggagaccgaagcagcagttcctgttaaacaagaaccagagactgtacctactccagcactattaaatgtgaggcagcctccatctactacaacatttgtgctgaatcaaataaatcatcttccacccttgggatctacaattgtaatgactaaaacaccacctgtaacaaccaacaggcaaaccatcactttaactaagtttatccagactactgcaagcacacgcccgtcagtctcagcaccaacagtacgaaatgccatgacctctgcaccttcaaaagaccaagttcagcttaaagatctactgaaaaataatagtcttaatgaactgatgaaactaaagccacctgctaatattgctcagccagtagcaacagcagctactgatgtaagcaatggtacagtaaagaaagagtcttctaataaagaaggagctagaatgtggataaacgacatgaagatgaggagtttttccccaaccatgaaggttcctgttgtaaaagaagatgatgaaccagaggaagaagatgaagaagaaatgggtcatgcagaaacctatgcagaatacatgccaataaaattaaaaattggcctacgtcatccagatgctgtagtggaaaccagctctttatccagtgttactcctcctgatgtttggtacaaaacatccatttctgaggaaaccattgataatggctggttatcagcattgcagcttgaggcaattacatatgcagcccagcaacatgaaactttcctacctaatggagatcgtgctggcttcttaataggtgatggtgccggtgtaggaaaaggaaggacgatagcaggaatcatctatgaaaattatttgttgagtagaaaacgagcattgtggtttagtgtttcaaatgacttaaagtatgatgctgaaagagatttaagggatattggagcaaaaaacattttggttcattcgttaaataagtttaaatacggaaaaatttcttccaaacataatgggagtgtgaaaaagggtgttatttttgctacttactcttcacttattggtgaaagccagtctggcggcaagtataaaactaggttaaaacaacttctgcattggtgcggtgatgacttcgatggagtgatagtgtttgatgagtgtcataaagccaaaaacttatgtcctgttggttcttcaaagccaaccaagacaggcttagcagttttagagcttcagaacaaattgccaaaagccagagttgtttatgctagtgcaactggtgcttctgaaccacgcaacatggcctatatgaaccgtcttggcatatggggtgagggtactccatttagagaattcagtgattttattcaagcagtagaacggagaggagttggtgccatggaaatagttgctatggatatgaagcttagaggaatgtacattgctcgacaactgagctttactggagtgaccttcaaaattgaggaagttcttctttctcagagctacgttaaaatgtataacaaagctgtcaagctgtgggtcatcgccagagagcggtttcagcaagctgcagatctgattgatgctgagcaacgaatgaagaagtccatgtggggtcagttctggtctgctcaccagaggttcttcaaatacttatgcatagcatccaaagttaaaagggttgtgcaactagctcgagaggaaatcaagaatggaaaatgtgttgtaattggtctgcagtctacaggagaagctagaacattagaagctttggaagagggcgggggagaattgaatgattttgtttcaactgccaaaggtgtgttgcagtcactcattgaaaaacattttcctgctccagacaggaaaaaactttatagtttactaggaatcgatttgacagctccaagtaacaacagttcgccaagagatagtccttgtaaagaaaataaaataaagaagcggaaaggtgaagaaataactcgagaagccaaaaaagcacgaaaagtaggtggccttactggtagcagttctgacgacagtggaagtgaatctgatgcctctgataatgaagaaagtgactatgagagctctaaaaacatgagttctggagatgatgacgatttcaacccatttttagatgagtctaatgaggatgatgaaaatgatccctggttaattagaaaagaccacaagaaaaacaaagagaaaaaaaagaagaaaagtatagatccagattctattcaaagtgccttattagcatcaggtcttggatcaaaacgacctagtttttcatctacaccagttatctcacctgctcctaacagtacaccagctaacagtaacaccaacagtaacagtagccttataacaagtcaggatgctgtggaaagggctcagcagatgaagaaagacctgcttgataagctagaaaaattagctgaagacctcccccctaataccctggatgaacttatcgatgaacttggtggccctgagaacgttgctgagatgactggccgcaagggacgggttgtgagcaatgatgatggaagcatatcttatgagtcaagatctgaacttgatgtgcctgtggaaatactaaacatcacagaaaaacaacgatttatggatggagataagaatattgctatcatctcagaagctgccagctcgggtatttcattacaagcagataggagagctaaaaatcaaaggcgaagagttcatatgactttagaattaccttggagcgctgatagagcaattcaacagttcggacgtactcatagatcaaaccaagttactgctcctgagtatgtctttctgatatctgaactggcaggagaacaaagatttgcatctattgttgctaaaagacttgagagtttgggggcacttacacatggtgatagaagggcaacagaatctagagatctgagcaggttcaactttgataataagtatggaagaaatgctttagaaattgtcatgaaatccattgtaaacttggattctcctatggtatcaccacctccagactatcctggagaattttttaaagatgttcgacaaggactgataggcgttggcctgataaatgtagaagatcgctcgggaattcttactctcgataaagattataacaacataggaaaattcttaaatagaattttaggcatggaggtgcatcagcagaatgcgttatttcagtattttgcggacacacttactgcagttgttcaaaatgccaaaaaaaatggaagatatgatatgggaatcttagatcttggttctggagatgaaaaagtgcggaaaagtgatgttaaaaagtttctgactccaggatattcaacctctggccacgtagaattatacacaattagtgtagagaggggaatgtcatgggaggaagctaccaagatttgggctgagctgacaggaccagacgatggcttttacttgtcattgcaaataaggaacaacaagaaaactgccatcttagttaaagaagtgaatcctaaaaagaaacttttcttagtttatcgaccaaatactgggaagcagctcaaattagaaatttatgctgatctaaaaaagaaatataagaaggtcgtctcagatgatgccctgatgcactggttagatcagtataattcatctgcagatacttgtactcatgcttattggcgcggcaattgcaaaaaagcaagcttggggctagtttgtgaaataggtcttcgttgccgtacatattatgtattatgtggttcagtgctgagtgtctggacaaaagttgagggtgttctagcatctgtcagtggcacaaacgtgaagatgcagatcgtgcggctaagaacggaagatgggcaacggattgtaggtttgatcattccggcaaattgtgtgtctcctcttgtaaatctcctatcaacttcagaccagtctcaacagcttgcggtccaacagaaacagctatggcaacagcatcaccctcagagcatcaccaacttgagcaacgcatgaagaacagacaggtttcaacatggatggatctgaaatgctgttgaagcatatcatttgcataaaaatcagggacagtttccaaagaattatatatttttttcagttgtgctctctagttagtttttttgggagtaaggacaaacctggaatagatagcaaaactgaaaatcagcagtgctgatggtggtacatatgtctttcctttagcttctcccctgataattcccatctgcttttacttcgggtgagcagagggggatgtgtgtgtgcgtgtgtgtcagtctgtttgtgagtgtgttaaaggctacagaccacagttggtttaaaatgcttggaacttcccaaactggctttactttatgtttatacagtgctcagggttaacgcagtacatccatgccattgctgtgggaggtatccccggatgcatgtgttttgagtctataaatatagaaaatatatattggtttctttttccaacttaataggtttattaaagcatgaaatgaaaggttgcatatcatgcattcaggttattttctaatttttgttctgacagtgcatgtctttggaagcatgctgaaacaagattaacacaggagtcgagtaacagagagaaacatttgttagatgtacagcattggttattgcatttttatagtgtttatacctgggtattgcttcaaaccctgcagacccctccttccccttctccctgccctgggtttctggtcaaggtaatgaatacatacatttttctgtgataaaactcttaaaagttaattttaatgtattaatagtattcctaatgtgtgctgcagaaatggctatgagcctcttaaatttacatttgcaacttaaaggtagttttagaaggaagtacaaattggctttcatcttgcaaacaatcgttttttacttcattatcttaatttgctttgtcactcataaaaaggaaaccatacctgagttgtagacaatgaggaaacacttgaggcttctgctgtgtgttcttttgttattgttgttattgttgttactcagtaacttgaatattgtttaatgtgttgtaagacgtagagtttatctcaagctgttaaaaatggtaatgtacaaatgtgaatagacacttatctatataatatgggtaagttttgtttcgcctataatagatgtttataaaaacaagtgaggggacagttggtctttttatcttttctttctttttctttcttttctttttttctttttttttttttttttttttttttttgcttccacaggttgcactattgaaaaatcgagattgtataaacctggtaaaaagctgcaagatgccaaaatcttgtagatgtcaaataaaaagttattatactaacaagaagtggactcttgtttaggccctcactggtgaccttcagaagtagtctgtgacggggactcagcagaatttgtgtgttgtctcagcattccaggtagccttatagtttggcttaaaacttatccctaaaatgtaagatggcattgagggaaagggtataatgatagtacttctgaatgttttttaagttgaattgtttgtaaacttcttgcagaattgggtgagatgtgtgttaaaactgacaaacctggctgaaagcttagggcgttcatcctcttgtgtctcctttagcctgagtttggttatgtcaagcttaccgtaagttttcttaggatttatttattcttggtgcctaaaagaataaattgaaagtactttctgttctttggcacattttgcccagcggatgcaacttctatcctcagtccagttcatatatctcaggcagtgatccattttgtatcagccagtttcccttgttagggccgctagacccggctggcagccaagagcagcactctccccaccttcagcagaacttctcagctcatgtgtgtgtttttaaaagcagtaggcagcttccatcagcaatggaagtgtcccccactccagtggtggaggtgcagtcgctggacctgaggaagtggggaagcattacaaaccctcctgcagtaagaatggcagagttgggaaggatcttctctcgcaggctgttggcccaactcctcttttctgtgtatgagggcatcttagttttttatggcgttttcaaagcagcatatgaggattcttagcatgcagctaagtgacaacccccatggcctatgatgtaatgtttgctctggactagccatcttgataaataggagtgtatgtatcttaggttctttgtagaacagctatttttttttctcattaaaaaggcctctgaaagccctctcaaaatggacctcacaaaggcaaccagtgtgaatggatgggagctggggtgctgcatgcccaggctggtcatggtgtgtgcagcacccagagagttgcacccaccccttcttcaggtggacatccgacctttacactgtggtcttgcaaaaatcagcgagttagtttggccgccctgtgaagcttcagcattcaaggtcctcttctgttaaaacccaactcgtagccgggcgtggtggctcactcctataatcccagcacttcgggaggccaaggcaggtgcatcacttgaggccaggagttcgagaccagcctggtccacatggcaaaaccccatctgtaccaaaaaatacaaaaaatttgccgctgacttctgtaaaataggtccattcattgcaggatctaaatgccacacctgaattcagaggccttgtttaattaaccccatgtccactttgcctctgcaatgcctttttctttttagcaatatggctctgagcacaaagatttggttggaaatcatgttcgtgttttcagagtttacagcgtcaattgtactgaaaaccacttccagagtctaaagcagctcagatgttatctctgggggaattagtgttcccctcatttagcaacctccataccacaaggtctctgtctgtagttactgggattatccagatacactatcaatgatacaaattcataggagtattaatgcatttctttaaacacaacttgattaagaagcaaatatgttaagcagttttctttttctgctgctaaattacagttagacacttcagtatcttctctttacatgtgtatataaattagtaagaacctgcatccaaagcaatgtagtgtgtgtatgtatctatatatatttattctaactcagcacttcagaagcctttttgagttacaacaatattttagtttgcctcatctgtagaggtaaaatttctatattaccaagctccagaggaatatgatattttacaggcacaattttctggctgtagtccctggggcattcatttgctggcctccatgggatgctgttagaacaattgttagccggcaagagaagaaaggctaccaggacagcatttataattgtagaatgggagccttcttccctctcccctccactttcattttagcatgagataaaaaaatagattggaaatgattgttgcatctcacttcatggaagtaggggcagaagttccctctggatccttttcttgacaagcagtcaagaggaaggtccccatacacatgtacctgtgtgatacttggtagtttctaagaatggtgctacataagcgttgctgttaggctgggatcctattaatgaacgtttgattagttcaggcctcccaatggcaaaggcagacaccgtggagatggacatttactgactccccttctgtgtggcttcggtctccctggctaacaccacacctgtgcgtactgcgctcggcccactttgctgcagaaacgtagcaagcgtttcatgtcagggctacagctgagagcaaaaactgcaaaaaaaaaaaaaaatgtctcattgaatgccagttgtctgatacaaatgcagtgtcttttaagtgacagaaacacacctaaatacctgcaactcaagctcgctagcattttttttttgagtacttgagataaaatccaaaacccaccctctaattttgtgctgtatttatatatatgtacataaatgtatatatagagaaatgttgagttcttctggattctgaatgtaaataattcttgtaaattgggactctgcccacctgtttctcccttttccctcttcccttcagctctatttattcttttcttgactttcccatatggggcatcttatgacttttttttttttttttttttaagaaaagtatggaaaacttttcatttagaaaagtatttgttcctgtattttagaattcagttttgcatctttgctgtagaattcctgttttgtgttaatgttttttactatgtcttattgtgttgtgtgcaatgcattgtactggggggatgcacttgagtgccatttctgatactgtcattgtatgactgctgatgctcgtttatgttgttctttggaagctatagtgagcctgatgttttcacattttaaaaaatgcttcctgagacttctttaagctcctctaacttcttcagtgcatttgggatcaaacttagctcttagatcagcaaacctgacttgcttctacttttgcaatttttcaggccttaccatatttcttatctctgtcttcccacctgataggaaaatcttgcagatttgaaacagtggtttctggcctgctgctgcagcaaattccctatgtttatttaagaagtcgggcctatgcttttaacctacaaatgatgagtaatttacttgcaatgaacacaggtagcctgctgctgtttataacctgttgaggatatttatagcaggcaggaggcaggcctagtgtgttattgacaggtgactttagagaatgtacattggccgggtgcggtggctcacgcctgtaatcccagcactttgggaggccgaggcgggcggatcatgaggtcaggagattgagaccatctcctggctaacacggtgaaaccccgtctctactaaaaatacaaaaaaaaaaaaaacttagccaggcgtggtggcgggtgcctgtagtcccagctactcaggaggctgaggcaggagaatggcatgaacctgggaggcagagcttgcagtgagcccagatcgcgccactgcactccagcctgggcaacagaccgagactccgtctcgaaaaaaaaaaaagagagagaatgtacattaaggaacaattgtcctccaaaagagagccaagcaactgctctggagcctcctaggctgactctgctggagggtgagacaagcagattcccattgcagcactggtccctggggtaccctgaacggctgtgctctccacccttgtatcggtgagtggatcttgtctacatcagccgtaagcctagaagcagagcgggatcgaggcgtttttaataattcgagttgggaagacccggatggttcatcaaaatgatggtgttgagcacccgggaggcagacattgggtatttgttcacaattttgcacctgtaagaaaatgttcctttataactttcaaggattgccgtgagcgtctttggggccttttcattcatgtacaagtttcattcattactattcaacttggtagacttggtgaaaaatgtaaaagcattctgtatttggatcagtcttgggaactaaatttgtcgtgaattggggcctgtcacagattgcctccagtgtgcatcctccacgcagaccctccttgctcagtctccctctggcgcccatggggaagccgtgctgtggttggcagtgcggccatctgggctgccgcaacgtggcagggcaccgtccagcaagactgccccttagtgcagggctaagcaaggaaaagaagaagcccaaaaaggcgggttctttttgatacttgtaattcaggcgtcctccagagtgaaggccactctgcaggcccctggtgagaacctgtctggcttttccactgcgggcccctaaccagtaccctgcccttgtggcccatttgtgcctgggcagatgtttctggccagcagacactgaaggcctttttgctgtgacagtatttatggcactgaagaggataaagaagcttgagccctctttctgactcccactttatggggcagagagagctttttttctacatagcacattgcagtctcaccgctatcagaaaaatatcctgttcatggtttatactgaatttgcaaactactgatatgatttttcaataaccacttgtatcttccatcatccatgagaggtgggaagaggtacactgtatctctgcaataaaactttggccaggttctacctcctctgagcaaaggatacttttctatgtaggtgtagatggttctcctttactaatctgacatggtgcatctggagacaacatctgatgggatccaaagacaacttgaaacaaaggtggatgtcagctcttggtgtgttttcatttggttctcttttttaaatctcccttttgttatcgctcctgttgtagcgtgtccatcagtgtgtgaagggtgcgccctgttccaatgatactgcattgctgcatccagcctttcgtgggagcacggtaccaagcgtccggaattgattatcccaatcatttttgatatgtaactgaaaaatttggtctcatgcaataaaaatgtactggctgcattttagcaaggtttatttactcttgcaagtaaaaacgatcaaccgtgaagcgtaacaaattctgtatttagtttttttttctgttgtggtggtttttgttttgttttttgtttttgtaagattctaaataaattaaatacgagtca

SEQ ID NO: 197021 - DNA, 2196 bp, Artificial Sequence
  derived and/or modified sequence
atggtggagccagggcaagatttactgcttgctgctttgagtgagagtggaattagtccgaatgacctctttgatattgatggtggagatgcagggcttgcaactccaatgcctaccccgtcagttcagcagtcagtgccacttagtgcattagaactaggtttggagaccgaagcagcagttcctgttaaacaagaaccagagactgtacctactccagcactattaaatgtgaggcagcctccatctactacaacatttgtgctgaatcaaataaatcatcttccacccttgggatctacaattgtaatgactaaaacaccacctgtaacaaccaacaggcaaaccatcactttaactaagtttatccagactactgcaagcacacgcccgtcagtctcagcaccaacagtacgaaatgccatgacctctgcaccttcaaaagaccaagttcagcttaaagatctactgaaaaataatagtcttaatgaactgatgaaactaaagccacctgctaatattgctcagccagtagcaacagcagctactgatgtaagcaatggtacagtaaagaaagagtcttctaataaagaaggagctagaatgtggataaacgacatgaagatgaggagtttttccccaaccatgaaggttcctgttgtaaaagaagatgatgaaccagaggaagaagatgaagaagaaatgggtcatgcagaaacctatgcagaatacatgccaataaaattaaaaattggcctacgtcatccagatgctgtagtggaaaccagctctttatccagtgttactcctcctgatgtttggtacaaaacatccatttctgaggaaaccattgataatggctggttatcagcattgcagcttgaggcaattacatatgcagcccagcaacatgaaactttcctacctaatggagatcgtgctggcttcttaataggtgatggtgccggtgtaggaaaaggaaggacgatagcaggaatcatctatgaaaattatttgttgagtagaaaacgagcattgtggtttagtgtttcaaatgacttaaagtatgatgctgaaagagatttaagggatattggagcaaaaaacattttggttcattcgttaaataagtttaaatacggaaaaatttcttccaaacataatgggagtgtgaaaaagggtgttatttttgctacttactcttcacttattggtgaaagccagtctggcggcaagtataaaactaggttaaaacaacttctgcattggtgcggtgatgacttcgatggagtgatagtgtttgatgagtgtcataaagccaaaaacttatgtcctgttggttcttcaaagccaaccaagacaggcttagcagttttagagcttcagaacaaattgccaaaagccagagttgtttatgctagtgcaactggtgcttctgaaccacgcaacatggcctatatgaaccgtcttggcatatggggtgagggtactccatttagagaattcagtgattttattcaagcagtagaacggagaggagttggtgccatggaaatagttgctatggatatgaagcttagaggaatgtacattgctcgacaactgagctttactggagtgaccttcaaaattgaggaagttcttctttctcagagctacgttaaaatgtataacaaagctgtcaagctgtgggtcatcgccagagagcggtttcagcaagctgcagatctgattgatgctgagcaacgaatgaagaagtccatgtggggtcagttctggtctgctcaccagaggttcttcaaatacttatgcatagcatccaaagttaaaagggttgtgcaactagctcgagaggaaatcaagaatggaaaatgtgttgtaattggtctgcagtctacaggagaagctagaacattagaagctttggaagagggcgggggagaattgaatgattttgtttcaactgccaaaggtgtgttgcagtcactcattgaaaaacattttcctgctccagacaggaaaaaactttatagtttactaggaatcgatttgacagctccaagtaacaacagttcgccaagagatagtccttgtaaagaaaataaaataaagaagcggaaaggtgaagaaataactcgagaagccaaaaaagcacgaaaaatgagtctaatgaggatgatgaaaatggtaagttca

SEQ ID NO: 197022 - protein, 304 aa, Artificial Sequence
  derived and/or modified sequence
MLRGSASSTSMEKAKGKEWTSTEKSREEDQQASNQPNSIALPGTSAKRTKEKMSIKGSKVLCPKKKAEHTDNPRPQKKIPIPPLPSKLPPVNLIHRDILRAWCQQLKLSSKGQKLDAYKRLCAFAYPNQKDFPSTAKEAKIRKSLQKKLKVEKGETSLQSSETHPPEVALPPVGEPPALENSTALLEGVNTVVVTTSAPEALLASWARISARARTPEAVESPQEASGVRWCVVHGKSLPADTDGWVHLQFHAGQAWVPEKQEGRVSALFLLPASNFPPPHLEDNMLCPKCVHRNKVLIKSLQWE

SEQ ID NO: 197023 - DNA, 915 bp, Artificial Sequence
  derived and/or modified sequence
atgcttcggggatcagccagcagtacaagtatggagaaagcaaagggaaaggaatggacatccacagaaaaatcccgggaggaggaccagcaggctagtaatcagccaaattcaatcgccctcccgggaacaagcgccaaaagaactaaagaaaagatgagtattaagggctccaaagtgttatgtcctaaaaagaaggccgagcataccgacaatccacggccgcagaagaagatacccataccgcctctcccgtctaagctgccccccgtgaatctgattcatcgggatatcctcagagcctggtgtcagcagctgaagttgtcaagcaagggacagaagctggatgcctacaagaggctctgtgccttcgcttatcccaaccagaaggattttccgagcacggccaaagaagccaaaattcgaaagagtttacagaaaaaacttaaggtcgaaaagggtgagaccagtctgcaaagctccgagactcaccccccagaggttgcccttccacccgtgggggagccccctgcactagaaaactccaccgccctccttgaaggagtgaatactgtcgtcgtcaccacatccgctcctgaggcccttctggcctcatgggcccgcatctcagcacgcgctcgcacaccagaggcggttgaaagtcctcaggaggctagtggcgtgaggtggtgcgtagttcatggtaagtcactgcccgctgacaccgatggctgggttcacctgcagttccacgccggtcaggcctgggtacccgagaaacaagagggaagagtgtcggcccttttcctactgcctgcgagcaatttcccccccccgcacctggaagacaacatgctctgtcccaaatgcgttcaccgaaataaagtgctgataaagtccctgcagtgggagtag

SEQ ID NO: 197024 - DNA, 915 bp, Artificial Sequence
  derived and/or modified sequence
atgctgcggggcagcgccagcagcacctccatggagaaggccaagggcaaggagtggaccagcacagagaagagccgggaggaggaccagcaggccagcaaccagcccaacagcatcgccctgcccggcaccagcgccaagaggaccaaggagaagatgagcatcaagggcagcaaggtgctgtgccccaagaagaaggccgagcacacagacaacccccggccccagaagaagatccccatcccccccctgcccagcaagctgccccctgtgaacctgatccaccgggacatcctgcgggcctggtgccagcagctgaagctgagcagcaagggccagaagctggatgcctacaagaggctgtgtgcctttgcctaccccaaccagaaggacttccccagcacagccaaggaggccaagatcaggaagagcctgcagaagaagctgaaggtggagaagggggagaccagcctgcagagcagcgagacccaccccccagaggtggccctgccccctgtgggggagcccccagccctggagaacagcacagccctgctggagggcgtgaacacagtggtggtgaccaccagcgcccctgaggccctgctggcctcctgggcccgcatcagcgcccgggcccggaccccagaggccgtggagagcccccaggaggccagcggcgtgcgctggtgtgtggtgcacggcaagagcctgcctgctgacacagatggctgggtgcacctgcagttccacgccggccaggcctgggtgcctgagaagcaggagggccgggtgtctgccctcttcctgctgcctgccagcaacttccccccaccccacctggaggacaacatgctgtgccccaagtgtgtgcacaggaacaaggtgctgatcaagagcctgcagtgggagtag

SEQ ID NO: 197025 - DNA, 915 bp, Artificial Sequence
  derived and/or modified sequence
atgctgcggggcagcgccagcagcaccagcatggagaaggccaagggtaaagaatggacatccacggaaaagtcgagagaagaggaccaacaggcctctaaccagccgaatagcatcgcgctcccggggacttccgccaagcggacgaaggagaaaatgtcaataaaagggagcaaggtcctatgccccaaaaagaaggctgaacacacagataacccccgaccccagaagaagatcccaattccccctctcccgtccaaactcccccctgttaacctaatccaccgggatatcctacgcgcatggtgccaacaactgaagctgtctagtaagggtcagaaactggatgcttacaaaagattgtgtgcattcgcttaccctaaccagaaggacttcccaagcactgctaaggaggcaaaaattcgtaaatctttacagaaaaaacttaaggtggaaaaaggcgaaacatcgttgcagtcctctgagacccatccccccgaagtggctctccctccagttggcgaaccacccgctctggagaattccacagccttgctggagggggtgaatacagtggtggtgaccacatcagccccggaggcactactagcatcatgggcacggatctcagctagggcccggactcctgaggcagtagagagccctcaagaggcatctggggttcgttggtgtgtcgtgcatggcaaatctctgccggcagacaccgatggttgggtccacctgcagtttcacgcaggtcaggcctgggtgcccgagaaacaggaggggcgtgtgagcgctctttttttactccccgccagtaattttcccccacctcacttagaggataatatgctgtgcccaaagtgtgttcaccgcaataaagtgctgattaagtccctacaatgggagtag

SEQ ID NO: 197026 - DNA, 915 bp, Artificial Sequence
  derived and/or modified sequence
atgctgcgcggttctgcatccagcacaagcatggagaaggccaaggggaaggaatggacctcaactgaaaaaagtcgggaggaagatcagcaggcttcgaatcagcccaactcaatcgcattacctggtacatctgctaaaaggaccaaagaaaagatgtcaattaaaggctccaaggtcctgtgtcccaagaagaaggccgaacatactgacaatcctcgcccacagaaaaaaattccaatccctcccctgcctagcaagctgccacccgtgaacctcatccaccgagatatcctgagggcctggtgccagcagctgaagttatcttccaagggccaaaagctcgatgcatataaaagattatgtgcatttgcctaccctaatcagaaagattttccctcaacagctaaagaggcaaaaattaggaagtctctgcagaaaaagttaaaggtggagaagggcgagacatctctgcagtcttcagagacacacccccctgaggttgccctgccccctgttggcgagcctccagccttagagaattccactgccttgctggaaggcgtgaatacagtcgtggtcaccacttcagcacctgaggcattgctagcttcatgggcccgaattagtgccagggctcgcacccctgaagctgtggagagtccgcaggaggcctcaggcgtccgatggtgcgtggttcacggcaagtctctgcctgctgatactgacggctgggtacacctccaattccacgcaggtcaggcatgggtgcccgagaagcaggaaggcagagtgagtgccctttttctcctgcccgcaagcaacttcccaccccctcatctggaagataatatgctgtgtcctaagtgcgtgcatagaaacaaggtgctcatcaaatccctccaatgggaatag

SEQ ID NO: 197027 - DNA, 915 bp, Artificial Sequence
  derived and/or modified sequence
atgctgagaggcagcgccagcagcaccagcatggagaaggccaagggcaaggagtggaccagcaccgagaagagcagagaggaggaccagcaggccagcaaccagcccaacagcatcgccctgcccggcaccagcgccaagagaaccaaggagaagatgagcatcaagggcagcaaggtgctgtgccccaagaagaaggccgagcacaccgacaaccccagaccccagaagaagatccccatcccccccctgcccagcaagctgccccccgtgaacctgatccacagagacatcctgagagcctggtgccagcagctgaagctgagcagcaagggccagaagctggacgcctacaagagactgtgcgccttcgcctaccccaaccagaaggacttccccagcaccgccaaggaggccaagatcagaaagagcctgcagaagaagctgaaggtggagaagggcgagaccagcctgcagagcagcgagacccacccccccgaggtggccctgccccccgtgggcgagccccccgccctggagaacagcaccgccctgctggagggcgtgaacaccgtggtggtgaccaccagcgcccccgaggccctgctggccagctgggccagaatcagcgccagagccagaacccccgaggccgtggagagcccccaggaggccagcggcgtgagatggtgcgtggtgcacggcaagagcctgcccgccgacaccgacggctgggtgcacctgcagttccacgccggccaggcctgggtgcccgagaagcaggagggcagagtgagcgccctgttcctgctgcccgccagcaacttcccccccccccacctggaggacaacatgctgtgccccaagtgcgtgcacagaaacaaggtgctgatcaagagcctgcagtgggagtag

SEQ ID NO: 197028 - DNA, 2817 bp, Artificial Sequence
  derived and/or modified sequence
aagtgggaggagactttgcaaatagcaatcttggggcaggggccattttggaagcatgttgcgaggctccgcttcttctacaagtatggagaaggcaaaaggcaaggagtggacctccacagagaagtcgagggaagaggatcagcaggcttctaatcaaccaaattcaattgctttgccaggaacatcagcaaagagaaccaaagaaaaaatgtctatcaaaggcagtaaagtgctctgccctaagaaaaaggcagagcacactgacaaccccagacctcagaagaagataccaatccctccattaccttctaaactgccacctgttaatctgattcaccgggacattctgcgggcctggtgccaacaattgaagctgagctccaaaggccagaaattggatgcatataagcgcctgtgtgcctttgcctacccaaatcaaaaggattttcctagcacagcaaaagaggccaaaatccggaaatcattgcaaaaaaaattaaaggtggaaaagggggaaacgtccctgcaaagttctgagacacatcctcctgaagtggctcttcctcctgtgggggagccgcctgccctggaaaattccactgctctccttgagggagttaatacagttgtggtgacaacttctgccccagaggctttgctggcctcctgggcgagaatttcagccagggcgaggacaccagaggcagtggaatctccacaagaggcctctggtgtcaggtggtgtgtggtccatgggaaaagtctccctgcagacacagatggttgggttcacctgcagtttcatgctggtcaagcctgggttccagaaaagcaagaagggagagtgagtgcactcttcttgcttcctgcctccaattttccacccccgcaccttgaagacaatatgttgtgccccaaatgtgttcacaggaacaaggtcttaataaaaagcctccaatgggaatagaatatcaggaaaaaggccacatctatggtaattaatggcagaaaagctggagagttggattctgcggtgctgctgacaggtgaactctggtcctctgcacctgtttatgggccatgcagactggtggggtggcagatgttagcctaagacccctagcagtgcctgttgctttgtgagtggagatagagactcttacatttaaaaatggaaaaacatttcacaaattaccataaattgtagttaatatgtagaaaaactcattcatactacttttctaaaatagacatgacttcagcagcagcttttttttgttgtattttgagacagtgtctcactgttgcccaggctggagtgcagtggtgcaatctcagttcagtgcaatctccgcctcctgggttcaaatgattctcctgcctcagcctcctgagtagctaggtacaggcacctgccaccacacccagctaattttttgtatttttagtagagatggggtttcaccatgttggccaggttggtctcaaactcctggactcaagtgatcaccctcctcagcctcccaaaatgctgggactatgggcatgagcccctgcgcctgaccttcaacagctcttttaagtgagttcttcagctaagcattgtgatggacttgagtaaaatggtagttggctcttgtgctcaattttctcttcctctgaacactgactactttaggagctgcttcattccaattgcaatttcataaaacgtaaagtattttaaggcaaagaaaggctgttaattccctccctcccccaaacacatgatttttaatattctaaacaatatttttcaaagttctcttaataacctgagatttctatggtttgactccaggatcaaaacacaagggactttgtattatttcacttataattgttttgtatatttctggagtttaaaatgtttaaggttgcttcccgctcataaatacataatatattgaatttaaaatgtgtttattaaccgattctccataaataaaaataagatgtgtatgtaaaataattcatctgttgtatttagagaaccatattcattgcatgcaaattttattgttagtgttcttaactcaagtaggagtaaaccaaaaagtgtgatttttcttttgtatgactcgtttgttctttattagttggtggtatgggttggatcatttgtttttaaaactacttaggtatgattcacatacaaaaagctgcacatatttaatgtatcctattgtgtaattaatttttaatttttttgtgtacttcctaaacttatagtcctgcgagtctgggaacagatctgtttttcacttatcctgatttaatgacagtttccaacattgttttgttattacaagtaggggatctttttttttgcccgtttaatgaagatactaaaaataatgcactggaaggagtggaagagttggaaaatttgtaaccatcataatacaggtgtaataggtttgggaaagaatcctcaaaaatgttaaagcaagggaggaaagtttgttgagaagcaagatgttcttctctcctgcccgcccccgccgttggttgttggtggtcagaattattgtgtaataaataatagacattttttcttatactatgtgtattgttccttttgtttcctttttaaacttctcccctgctttatttggatgggtcaagtttctgttctgtttccttcctttctattaatttggaaatgtccttggctttacgattctgcttgtagatacttcccctgcttctaacacatttcaataaacttaaatttctctatatacaaaataaattaataattggagtctacca

SEQ ID NO: 197029 - DNA, 2019 bp, Artificial Sequence
  derived and/or modified sequence
atggatctgatcctgaataggatggattatctacaggtaggcgtgacctcccagaagactatgaagcttattcctgcgagccgacacagagcgactcaaaaggtggtgattggagatcatgacggtgttgttatgtgcttcggaatgaagaagggcgaggccgcggccgtttttaagaccttgccaggccctaagatcgcaaggctggaattaggcggagtaattaacactcctcaggagaagatcttcattgcggcagcttcggagatcagggggttcactaaacggggcaagcaattcctttcctttgaaactaatctgaccgagagtattaaggctatgcacatctctggatcagatctcttcctgtccgcctcctacatctataatcactactgcgactgtaaggaccagcattattacctgtccggcgacaagattaacgatgtaatctgcctgcccgtggaaagactgtccagaattacccccgtcctggcatgtcaggatagggtgctgcgggtgctgcagggcagcgatgtgatgtacgctgtggaagttccgggccctcccaccgtgttagcactgcacaatgggaacggaggcgattcaggagaggacctgctgttcgggacaagcgatggaaagctagctttgatccagatcacaacttccaagcctgtcaggaagtgggagatccagaatgaaaagaagcgcggtgggattctgtgcattgactcctttgacattgttggagacggcgtcaaggacttactcgtcgggagagatgacggcatggtggaagtctactccttcgacaatgccaatgagccagtgctccgcttcgaccaaatgctctctgagtcagttacttcaatccagggtgggtgcgtgggcaaggatagctacgacgagatcgtcgtgtctacctattccggctgggtgaccggcttgacaaccgaacctatccacaaggaaagtggtccaggagaggaacttaagattaaccaagagatgcaaaataagatctcctcattgcggaatgagctggagcatctgcagtataaggtgcttcaggaaagggagaactatcagcaatccagtcaatcatccaaagccaagagcgcagtcccgagctttgggatcaacgataagtttaccctcaacaaggatgacgcctcctattctctgatactcgaggtacagacggcgattgataatgttctgatccagtccgacgttccaatcgacttgctggatgtggataaaaactcggccgtggtctcattttcaagttgtgactctgaatctaatgataatttcttgctggccacatacagatgccaagcagacactacaagactggagctaaaaattagatctattgaaggccagtatggaaccctccaggcctacgtgactccccggatccaacccaagacttgccaggttcgacagtaccacatcaagcctttaagcttgcatcagaggacccactttatcgaccacgatcggccgatgaacactctgacattaaccggccagttctcattcgcggaagttcactcttgggtcgtgttctgtctgccagaggttcctgagaaacccccagcgggtgaatgcgtgacattttacttccagaatacctttttagacacacagttggagagcacttaccgaaaaggggaaggcgtctttaagtctgacaacatcagcaccatatctattctgaaagacgtcttgtctaaggaagccacaaagcgcaaaatcaatctgaatattagttatgaaataaatgaagtttctgtgaaacacaccttaaaactgatccacccaaaactggagtatcaacttctgctcgccaagaaggttcaactgatcgacgcactcaaagagcttcagattcacgagggaaataccaattttctgatcccagagtaccactgcatcttggaagaggcagaccatcttcaggaagaatataaaaagcagcctgcgcatttagagcgtctttacggatag

SEQ ID NO: 197030 - DNA, 2019 bp, Artificial Sequence
  derived and/or modified sequence
atggacctgatcctgaacaggatggactacctgcaggtgggcgtgaccagccagaagaccatgaagctgatcccagccagccgccaccgggccacccagaaggtggtgattggagaccatgatggagtggtgatgtgcttcggcatgaagaagggggaggccgctgctgtgttcaagaccctgcccggccccaagatcgcccggctggagctgggcggcgtcatcaacaccccccaggagaagatcttcatcgccgccgccagcgagatccggggcttcaccaagaggggcaagcagttcctgagctttgagaccaacctgacagagagcatcaaggccatgcacatcagcggcagtgacctcttcctgagcgccagctacatctacaaccactactgtgactgcaaggaccagcactactacctgagcggggacaagatcaatgatgtgatctgcctgcctgtggagcggctgagccgcatcacccctgtgctggcctgccaggacagagtgctgcgggtgctgcagggcagtgatgtgatgtatgctgtggaggtgcccggccccccaacagtgctggccctgcacaatggaaatggaggagacagcggggaggacctgctgtttggcaccagtgatggcaagctggccctgatccagatcaccaccagcaagcctgtgaggaagtgggagatccagaatgagaagaagagaggaggcatcctgtgcatcgacagctttgatattgtgggagatggagtgaaggacctgctggtgggcagagatgatggcatggtggaggtgtacagctttgacaatgccaatgaacctgtgctgcgctttgaccagatgctgtctgagagcgtgaccagcatccagggcggctgtgtgggcaaggacagctatgatgaaattgtggtgtccacctacagcggctgggtgacaggcctgaccacagagcccatccacaaggagagcggccctggagaggagctgaagatcaaccaggagatgcagaacaagatcagcagcctgagaaatgagctggagcacctgcagtacaaggtgctgcaggagcgggagaactaccagcagagcagccagagcagcaaggccaagtctgctgtgcccagctttggcatcaatgacaagttcaccctgaacaaggatgatgccagctacagcctcatcctggaggtgcagacagccatcgacaacgtgctgatccagagtgatgtgcccatcgacctgctggatgtggacaagaacagcgctgtggtgtccttcagcagctgtgacagcgagagcaatgacaacttcctgctggccacctaccgctgccaggccgacaccacccggctggagctgaagatccgcagcattgagggccagtatggcaccctgcaggcctacgtgaccccccgcatccagcccaagacctgccaggtgcggcagtaccacatcaagcccctgagcctgcaccagaggacccacttcatcgaccatgaccggcccatgaacaccctgaccctgaccggccagttctcctttgctgaggtgcacagctgggtggtgttctgcctgcctgaggtgcctgagaagcccccagctggagaatgtgtgaccttctacttccagaacaccttcctggacacccagctggagagcacctacaggaagggggagggcgtcttcaagagtgacaacatcagcaccatcagcatcctgaaggatgtgctgagcaaggaggccaccaagaggaagatcaacctgaacatctcctatgagatcaatgaggtgtctgtgaagcacaccctgaagctgatccaccccaagctggagtaccagctgctgctggccaagaaggtgcagctgattgatgccctgaaggagctgcagatccacgagggcaacaccaacttcctgatccctgagtaccactgcatcctggaggaggccgaccacctgcaggaggagtacaagaagcagcctgcccacctggagcggctgtatggatag

SEQ ID NO: 197031 - DNA, 2019 bp, Artificial Sequence
  derived and/or modified sequence
atggacctgatcctgaaccggatggactacctgcaggtgggcgtgacatcacagaaaacgatgaaactaattccagcatcccggcacagggccacccagaaggtcgtcattggagatcacgacggtgtggtcatgtgttttggcatgaagaaaggagaagctgctgctgtatttaagaccctgcccggcccaaagatcgcacggctggagctgggcggagtgatcaacacaccacaggagaaaattttcattgcagccgcctctgaaattcgcggttttacaaaacgcggcaaacagtttctaagttttgagactaacctgacagagagcattaaagcaatgcacatcagcgggtcagatcttttcctatctgcgtcatacatctacaatcactattgcgattgtaaggaccaacattattacctgagcggcgacaaaatcaacgatgttatctgtctgccagtcgagcggttgagccggataactcccgtcctcgcctgtcaagacagggtgcttcgagttcttcagggttccgacgtaatgtatgccgtcgaagtgccaggacccccaactgttttggccctgcacaacgggaacgggggggattcgggggaagacctgctgtttgggactagcgacgggaaattagcactgattcagattaccaccagcaaacccgtgaggaagtgggaaattcagaatgagaagaagaggggcggtatcttatgtatagactcttttgatattgtaggagacggcgttaaagatttgttagtgggcagagacgatggcatggttgaggtgtatagctttgataatgccaacgagcctgtgctgcgatttgatcagatgctcagcgagtcagtgacatccattcagggcggctgtgtggggaaagactcttacgatgagattgtcgtcagcacctactccggctgggtgaccggcctcacaacagaaccaattcacaaggaaagtggacctggtgaagagttaaaaattaaccaggagatgcaaaacaaaatatcctctctgcgcaatgagcttgaacacctgcagtataaggttctccaagaacgagaaaactaccagcagtcatcacaatcttctaaggccaaaagtgcggtgccaagcttcggaatcaacgacaagtttacgttgaacaaggacgacgcatcatactcccttattctggaagttcagaccgcaatagacaatgtcctaatccagagtgatgtccccatcgatctactggatgtggataaaaactctgctgtggtgtcatttagctcctgcgatagcgagagcaatgacaattttttgcttgctacctacagatgtcaagctgataccaccaggcttgagctaaagatacgctcaattgaagggcagtacggaacgcttcaggcttacgtgacaccaagaatccaaccaaaaacctgccaagtaagacagtaccatataaaacccctgtccttgcaccagcgaacacactttattgaccacgaccgaccaatgaataccctgacacttaccggacaattttctttcgctgaagtgcactcttgggtcgttttctgcctgccggaggttccagagaagccgccagcgggggaatgtgtgactttttattttcagaatactttcctcgacacgcaactggagagtacttaccgcaaaggtgagggagtgttcaaatctgataacattagcactatcagcatacttaaagatgttttgtctaaggaagcaacaaagagaaaaatcaacctaaatatttcttacgaaattaacgaggtgtcagttaaacacaccctgaaactcatccatcccaagctggagtaccagctgctactggcaaagaaagtgcagctcatcgatgccctcaaggagctgcagattcatgaaggcaataccaatttcctgattccagaataccactgcatactcgaggaggcggatcacctgcaggaagaatataagaaacaacctgcccatttggaaagactctatggctag

SEQ ID NO: 197032 - DNA, 2019 bp, Artificial Sequence
  derived and/or modified sequence
atggacctgatattgaacagaatggattatttacaggtgggagttacaagccagaaaaccatgaagttgatccctgcctctcgccacagagccacacagaaggtggtaatcggggaccatgacggggtagtgatgtgcttcggcatgaagaagggggaggcagctgctgtgtttaaaactctgccgggtcccaaaattgctcgtttggaactgggaggtgttatcaatactccccaggagaaaatctttatcgctgcagccagcgagatacgcggattcaccaagagagggaaacaattcttatcctttgagacaaatctgaccgagtccattaaggccatgcatatctccgggagcgacctgttcttatcagccagctacatatataaccactattgcgattgtaaggatcaacactactacttgtctggagataaaattaatgacgtcatatgtctgcccgtggaaagattgtcccggatcacaccagtgctggcctgtcaagatcgggtgctgcgagttttgcaggggtctgatgttatgtacgcagtggaggtgcccggaccacctacagtattggccttgcacaatgggaacggaggcgattccggcgaggatctgctttttgggacctccgacggtaaactcgcgctcattcaaatcactacctctaaaccagtccgcaaatgggagattcagaacgagaagaaaagaggcggaatcctgtgtattgactccttcgatatagttggcgatggcgtaaaggacctgctggtcggcagagatgacggaatggtcgaggtgtatagcttcgataatgcgaacgaaccggtgttgcggttcgaccaaatgctcagtgagtccgtgacatcaatacagggtggttgcgtgggaaaagattcttacgatgagatcgtagtgagtacctattctggctgggtgaccggcttgaccacagagcccattcataaagagtcaggcccaggagaggaactcaaaataaaccaggaaatgcaaaataagatatccagcctacggaacgagttggagcacttacaatacaaagtactgcaggaaagagaaaactatcagcagagcagtcagtcttctaaagccaaatcagcagtgccctctttcggcatcaacgacaagttcacactcaataaggacgacgcctcttattctctaatcctggaagttcaaaccgctatcgataatgtcctgatccagagtgatgtccctatcgacctgttggacgtagacaagaattcagctgtcgtgtctttttcgagttgcgacagtgagagcaatgataatttcctgctggccacttaccgatgccaagccgataccacacgtctggagctgaagatcaggtcaatagagggtcagtatggcacattacaggcctacgtcaccccgaggattcagcccaagacatgtcaagttcggcagtatcatataaagcccctcagcttacatcaacgaacacacttcatcgaccatgaccggccaatgaacactctaaccctgacgggccagttctcctttgccgaggtacattcgtgggtcgtattttgtctcccagaggtccccgagaagccgccagctggagaatgcgtgaccttttatttccaaaataccttcctggacactcagctcgagtcaacctaccgtaagggcgagggcgtctttaagtccgataacatatcaactatatctatactcaaggatgtgctttccaaagaagccaccaaacgcaaaatcaacttgaacattagctacgagatcaacgaagtgtccgtcaaacatacgttgaagctgatccacccaaagctggagtatcagttactgctggccaaaaaggtgcaactgattgatgctctgaaagaacttcagatccatgaggggaacaccaattttctcattccagagtaccactgtatcctggaggaagctgatcatctgcaagaagaatataagaaacagcctgcacaccttgagcgcttgtatggatag

SEQ ID NO: 197033 - DNA, 2570 bp, Artificial Sequence
  derived and/or modified sequence
aggacctaggcgcggtagctggggctggcttttgaggggcgcgggcagccttctgactgggtcggaggcctgcgggcccgaagcctctgtccctcctgttcttgtccggcgctgcttagcccctccgcgtagtcatcatggatctgattttaaaccgaatggattatctgcaggtgggagtaacatctcagaagactatgaagctaattcctgcctcaagacacagagctacacaaaaggtggttattggagatcatgatggggtagttatgtgctttggcatgaagaaaggagaagcagcagcagtgttcaagactttacccgggccgaagattgcaaggctggaactgggaggggttatcaacacacctcaggagaaaatttttattgctgcagcatctgagattagaggcttcacaaaaagaggaaaacagttcctctcctttgaaacaaacctcactgaaagcattaaagctatgcacatatctggctcagacctctttctcagtgcaagttacatctataaccattattgtgactgcaaagaccaacattattacctttctggggataaaatcaatgatgtgatctgccttccagtggaaagattatctcgtatcacacctgtattggcctgccaggacagagtgctcagagttttacagggatctgatgtgatgtatgcagttgaagttcctggaccccctactgtcttagcactacacaatggaaatggcggtgactctggagaagaccttttgtttgggacatcagacggaaaacttgcgcttatacagattactacatccaaaccagtacgcaagtgggaaattcaaaatgagaaaaagagaggaggtattttgtgtattgacagctttgacattgtgggtgatggggttaaagatttacttgttgggagagatgacggaatggtggaagtgtatagttttgataatgcaaatgaacctgttctacgatttgatcagatgttgtctgaaagcgtcacatctatccagggtggttgtgtaggaaaagacagctatgatgaaatcgtggtgtccacatattcaggctgggttacaggtctgacaacagagcccattcataaggaaagtggaccaggagaagaactaaaaattaatcaggagatgcagaataaaatttcttccttacggaatgagttggaacatttgcagtataaggtattgcaggaaagagagaattatcaacagtcttctcaatcaagcaaagcaaaatcagcagtaccttcctttggtataaatgataaatttacactaaataaagatgatgccagttacagccttatcttagaggtacagactgcaatagataatgtcttaatacagagtgatgttccaatagatttacttgatgtggataaaaattctgctgttgttagctttagcagctgtgattctgagtcaaacgacaacttccttcttgccacttatcggtgccaggcagatactacaaggctggaactcaagattcgctcaattgaaggccagtatggcacactacaagcatatgtgactccaagaattcaacccaaaacctgtcaggtccgccagtaccacatcaaacctctttcactccatcaaagaactcactttattgatcatgacagacccatgaatacactgaccctaacaggccagttcagttttgctgaagttcactcctgggtggttttttgtctgcctgaagttccagaaaaacctccagcaggagaatgtgtgacattttactttcagaacacctttctagatacacaacttgaaagtacctacagaaaaggagagggagtttttaaatctgacaacatttctactatctccatcctaaaagatgtgctttctaaagaagctacaaaaaggaaaattaacctcaacatatcatacgagataaatgaagtatcagtcaaacacactttaaagctaatccacccaaagctggagtaccagttgcttttggctaagaaagtgcagttaattgatgctttaaaagaattacagattcatgagggaaatacgaactttctgataccagaatatcactgtattctagaagaggcagatcacctacaggaagaatacaaaaagcaacctgcacatcttgaaagactctatggttagtggaccattctagaataccttgccatatttcttttcaactggctatttcccaaggatcatgtaagagaagctgggcagaaagataaaaagattacatcagtcatgattcatgaaccagtcatgaatcagttgacaacaaatttattgcacagaatatttctgtattttgtcaagctacttttaatatttaattcttttacttgataaaatgcaagtatattaagaaataagtatactgtgatgaattaatctatatatatgaacaaacctggtataaaatgaatgtaatctatgaacctttagagcttagactgtatttcacacaaataattgtcatgttttgttgctattgtgaattataaaaatgcagcatttaaaatttttaaggcaaaatttaataaaggatatacagta

SEQ ID NO: 197034 - DNA, 2019 bp, Artificial Sequence
  derived and/or modified sequence
atggacctgatcctgaacagaatggactacctgcaggtgggcgtgaccagccagaagaccatgaagctgatccccgccagcagacacagagccacccagaaggtggtgatcggcgaccacgacggcgtggtgatgtgcttcggcatgaagaagggcgaggccgccgccgtgttcaagaccctgcccggccccaagatcgccagactggagctgggcggcgtgatcaacaccccccaggagaagatcttcatcgccgccgccagcgagatcagaggcttcaccaagagaggcaagcagttcctgagcttcgagaccaacctgaccgagagcatcaaggccatgcacatcagcggcagcgacctgttcctgagcgccagctacatctacaaccactactgcgactgcaaggaccagcactactacctgagcggcgacaagatcaacgacgtgatctgcctgcccgtggagagactgagcagaatcacccccgtgctggcctgccaggacagagtgctgagagtgctgcagggcagcgacgtgatgtacgccgtggaggtgcccggcccccccaccgtgctggccctgcacaacggcaacggcggcgacagcggcgaggacctgctgttcggcaccagcgacggcaagctggccctgatccagatcaccaccagcaagcccgtgagaaagtgggagatccagaacgagaagaagagaggcggcatcctgtgcatcgacagcttcgacatcgtgggcgacggcgtgaaggacctgctggtgggcagagacgacggcatggtggaggtgtacagcttcgacaacgccaacgagcccgtgctgagattcgaccagatgctgagcgagagcgtgaccagcatccagggcggctgcgtgggcaaggacagctacgacgagatcgtggtgagcacctacagcggctgggtgaccggcctgaccaccgagcccatccacaaggagagcggccccggcgaggagctgaagatcaaccaggagatgcagaacaagatcagcagcctgagaaacgagctggagcacctgcagtacaaggtgctgcaggagagagagaactaccagcagagcagccagagcagcaaggccaagagcgccgtgcccagcttcggcatcaacgacaagttcaccctgaacaaggacgacgccagctacagcctgatcctggaggtgcagaccgccatcgacaacgtgctgatccagagcgacgtgcccatcgacctgctggacgtggacaagaacagcgccgtggtgagcttcagcagctgcgacagcgagagcaacgacaacttcctgctggccacctacagatgccaggccgacaccaccagactggagctgaagatcagaagcatcgagggccagtacggcaccctgcaggcctacgtgacccccagaatccagcccaagacctgccaggtgagacagtaccacatcaagcccctgagcctgcaccagagaacccacttcatcgaccacgacagacccatgaacaccctgaccctgaccggccagttcagcttcgccgaggtgcacagctgggtggtgttctgcctgcccgaggtgcccgagaagccccccgccggcgagtgcgtgaccttctacttccagaacaccttcctggacacccagctggagagcacctacagaaagggcgagggcgtgttcaagagcgacaacatcagcaccatcagcatcctgaaggacgtgctgagcaaggaggccaccaagagaaagatcaacctgaacatcagctacgagatcaacgaggtgagcgtgaagcacaccctgaagctgatccaccccaagctggagtaccagctgctgctggccaagaaggtgcagctgatcgacgccctgaaggagctgcagatccacgagggcaacaccaacttcctgatccccgagtaccactgcatcctggaggaggccgaccacctgcaggaggagtacaagaagcagcccgcccacctggagagactgtacggctag

SEQ ID NO: 197035 - protein, 708 aa, Artificial Sequence
  derived and/or modified sequence
MRERIWAPPLLLLLPLLLPPPLWGGPPDSPRRELELEPGPLQPFDLLYASGAAAYYSGDYERAVRDLEAALRSHRRLREIRTRCARHCAARHPLPPPPPGEGPGAELPLFRSLLGRARCYRSCETQRLGGPASRHRVSEDVRSDFQRRVPYNYLQRAYIKLNQLEKAVEAAHTFFVANPEHMEMQQNIENYRATAGVEALQLVDREAKPHMESYNAGVKHYEADDFEMAIRHFEQALREYFVEDTECRTLCEGPQRFEEYEYLGYKAGLYEAIADHYMQVLVCQHECVRELATRPGRLSPIENFLPLHYDYLQFAYYRVGEYVKALECAKAYLLCHPDDEDVLDNVDYYESLLDDSIDPASIEAREDLTMFVKRHKLESELIKSAAEGLGFSYTEPNYWIRYGGRQDENRVPSGVNVEGAEVHGFSMGKKLSPKIDRDLREGGPLLYENITFVYNSEQLNGTQRVLLDNVLSEEQCRELHSVASGIMLVGDGYRGKTSPHTPNEKFEGATVLKALKSGYEGRVPLKSARLFYDISEKARRIVESYFMLNSTLYFSYTHMVCRTALSGQQDRRNDLSHPIHADNCLLDPEANECWKEPPAYTFRDYSALLYMNDDFEGGEFIFTEMDAKTVTASIKPKCGRMISFSSGGENPHGVKAVTKGKRCAVALWFTLDPLYRELERIQADEVIAILDQEQQGKHELNINPKDEL

SEQ ID NO: 197036 - DNA, 2127 bp, Artificial Sequence
  derived and/or modified sequence
atgcgtgagcgcatctgggcgccgccgctgttactgctcctgcctttactgttaccccccccactgtggggcggccccccggattcccctcgccgggagctagaacttgagcctggacctttgcagcccttcgatctgctgtacgcatccggcgctgcggcatactactctggggactacgaaagagctgtgagagatctggaagccgctctgagaagtcatcgccgattgagggagatcagaactcggtgtgctcgccattgtgctgctcggcacccactgccccccccaccaccaggcgagggaccaggtgccgagctccctctgtttaggtctctactaggtcgtgctaggtgctatcgaagttgcgagacccagcgcttaggcggtcccgcaagtaggcaccgcgtgagcgaagacgttagatccgacttccaacgccgggtgccgtacaactatctccagagggcatatattaagctgaaccagctggagaaagcggtcgaagctgctcatactttctttgtcgctaatccggagcatatggagatgcaacaaaacatagagaactaccgggctaccgctggtgtggaagctctgcagctggtggatagagaggcgaaaccccacatggaaagctataacgctggagtcaaacactatgaagcagacgattttgaaatggctattcgccacttcgaacaagccctccgggaatacttcgtggaagatacagagtgccgcaccttgtgcgagggcccccagcggtttgaggagtacgagtatttgggttataaggcaggattatacgaagcgatcgctgaccactacatgcaggtgttggtttgtcagcatgaatgtgtccgagagttggcaacccgccctggccgactgagtccaatcgagaacttcttgcctttgcactacgactatctccaatttgcgtactatcgggtgggagagtatgtgaaagccctggaatgcgctaaagcatacctgctgtgtcaccctgacgacgaggatgtcctagacaatgtcgactactacgagtccctgcttgacgacagcatcgatcccgcctccatcgaagctcgggaggatcttaccatgtttgttaaacggcacaaattggaaagcgaattgatcaaaagcgcagcagaagggctaggcttcagctacaccgagcccaactactggatcagatatggggggcgccaagatgaaaatagggtgccaagcggcgttaatgtcgagggggccgaggtgcacgggttttcaatgggaaagaaactatcccctaagatagaccgagacttaagggaaggaggccccctcttatatgagaatattacattcgtgtacaacagcgaacaattgaatggtactcagagagttctgttagacaacgtgctgtctgaggagcagtgccgggaactccattccgttgctagtggcattatgctggttggggacgggtacagggggaaaacatcacctcataccccaaatgagaagtttgagggcgcaacggtgctcaaagccctgaaatccggttacgaaggcagggtaccgctcaagtccgccaggcttttttacgacatcagcgaaaaggccaggagaattgtcgaatcctatttcatgctgaattcaactctctacttttcatacacccacatggtgtgcagaaccgcgctcagcggccagcaggatcgaaggaacgacctctcacatccgattcatgctgataactgcctgctggatccagaggccaacgaatgttggaaagagccacctgcctacacctttagagactactcggcacttctttacatgaacgacgattttgaaggtggagagttcatcttcacggagatggatgcgaagacggtcaccgctagcatcaaacccaaatgcgggcggatgataagcttttcctctgggggcgagaatcctcacggagtaaaggccgtcacaaaaggcaagcgctgcgctgtcgcactttggttcaccctagatccgctgtacagagaactggagcgtattcaggcagacgaggtgatcgccattcttgaccaggaacaacagggcaagcacgagctcaatatcaacccaaaagatgaactgtag

SEQ ID NO: 197037 - DNA, 1584 bp, Artificial Sequence
  derived and/or modified sequence
atggagatgcagcagaacattgaaaactacagggccacagcaggagtagaggctctgcagctggtggaccgcgaagcgaagccccacatggagtcttacaacgcgggagtcaaacattacgaagccgatgacttcgagatggctattaggcactttgagcaggcgcttagagagtacttcgtggaggatacagaatgccgtacactgtgtgaggggccccagcggttcgaggagtacgaatatttgggatataaggccggcctgtacgaagctatcgctgatcattacatgcaggttctggtgtgtcagcacgaatgcgtgagggaactggcaacccgcccgggccggctcagtccaatagagaattttctccccctgcactatgattatctgcagtttgcgtactatcgggtgggcgaatatgtgaaggccctggaatgcgctaaagcctatctgctgtgccacccagatgatgaagacgtgctggataacgttgactactatgaaagtctgctggacgacagcattgaccccgccagcatcgaagcacgagaggatctcactatgttcgtgaagaggcataaacttgaatcagaactaataaagtcagccgctgagggattggggttctcctataccgaacccaattactggatccgctatggaggtcgccaggacgagaatagggtgcccagcggagtgaacgtggaaggggccgaagttcacggctttagtatgggcaaaaagctaagtcccaagatcgatagggatctgagagaagggggcccactgttatatgagaatattacctttgtttataacagtgagcagctcaacggcactcagcgggtgttgctggacaacgtgctgtcagaggagcagtgtagagagttacactctgttgcttctggcattatgctcgtgggtgatggctaccgtggtaagaccagcccccacacgccaaacgaaaaattcgagggggccactgtgctcaaggccctgaaatccggatatgaagggagagtgccacttaaatctgcaagactgttttacgatatctctgagaaggcccgccgcatcgtggagtcttactttatgcttaactccaccctctatttttcctatacccacatggtgtgccgcaccgccttgtctggccaacaggaccgcagaaacgacctgtctcacccaatacacgcagataactgtttactggacccggaagccaacgagtgttggaaagagcctccagcttacacttttcgagattattctgccctgttatacatgaacgacgactttgagggaggggagttcatctttactgaaatggacgcaaaaacagtgactgcttctataaagcctaagtgtggccgaatgattagcttctcaagcggaggcgaaaaccctcatggagtcaaagcggtgaccaaggggaagagatgtgccgtagccttatggttcaccctcgaccccctatatagggaactagaaagaatccaggccgatgaagtgatcgcaatccttgaccaggaacagcagggcaaacacgagttaaacatcaatcccaaagatgaattgtag

SEQ ID NO: 197038 - DNA, 2127 bp, Artificial Sequence
  derived and/or modified sequence
atgagggagcgcatctgggccccacccctgctgctgctgctgcccctgctgctgcccccacccctgtggggcggccccccagacagcccccggcgggagctggagctggagcccggccccctgcagccctttgacctgctgtatgccagcggggctgctgcctactacagcggggactatgaaagagctgtgcgggacctggaggccgccctgcggagccaccggcggctgcgggagatccgcacccgctgtgcccggcactgtgccgcccggcaccccctgcccccacctcctcctggagagggccctggagctgagctgcccctcttccgcagcctgctgggccgggcccgctgctaccgcagctgtgagacccagaggctgggcggccctgccagccgccaccgggtgtctgaagatgtgcggagtgacttccagaggagagtgccctacaactacctgcagagggcctacatcaagctgaaccagctggagaaggctgtggaggccgcccacaccttctttgtggccaaccctgagcacatggagatgcagcagaacatcgagaactaccgggccacagctggggtggaggccctgcagctggtggaccgggaggccaagccccacatggagagctacaatgctggggtgaagcactatgaagcagatgactttgagatggccatccgccactttgagcaggccctgcgggagtactttgtggaggacacagagtgcaggaccctgtgtgagggcccccagagatttgaggagtatgagtacctgggctacaaggccggcctgtatgaggccatcgctgaccactacatgcaggtgctggtgtgccagcatgaatgtgtgcgggagctggccaccaggcctggccgcctgagccccatcgagaacttcctgcccctgcactatgactacctgcagtttgcctactacagagtgggggagtatgtgaaggccctggagtgtgccaaggcctacctgctgtgccacccagatgatgaagatgtgctggacaacgtggactactatgagagcctgctggatgacagcattgatcctgccagcattgaggcccgggaggacctgaccatgtttgtgaagaggcacaagctggagagcgagctgatcaagtctgctgctgagggcctgggcttctcctacacagagcccaactactggatccgctatggaggccggcaggatgagaacagagtgcccagcggcgtgaatgtggagggcgctgaggtgcacggcttctccatgggcaagaagctgagccccaagattgaccgggacctgcgggagggcggccccctgctgtatgagaacatcacctttgtgtacaacagcgagcagctgaatggcacccagagggtgctgctggacaacgtgctgtctgaggagcagtgccgggagctgcacagcgtggccagcggcatcatgctggtgggagatggctaccggggcaagaccagcccccacaccccaaatgagaagtttgagggcgccaccgtgctgaaggccctgaagagcggctatgagggccgggtgcccctgaagagcgcccggctcttctatgacatcagcgagaaggccaggagaattgtggagagctacttcatgctgaacagcaccctgtacttctcctacacccacatggtgtgcaggacagccctgagcggccagcaggacagaagaaatgacctgagccaccccatccatgctgacaactgcctgctggaccctgaggccaatgaatgctggaaggagcccccagcctacaccttccgggactacagcgccctgctgtacatgaatgatgactttgaaggaggagagttcatcttcacagagatggatgccaagacagtgacagccagcatcaagcccaagtgtggccgcatgatctccttcagcagtggaggagagaacccccacggcgtgaaggctgtgaccaagggcaagagatgtgctgtggccctgtggttcaccctggaccccctgtaccgggagctggagcgcatccaggctgatgaggtgattgccatcctggaccaggagcagcagggcaagcatgagctgaacatcaaccccaaggatgagctgtag

SEQ ID NO: 197039 - DNA, 1584 bp, Artificial Sequence
  derived and/or modified sequence
atggagatgcagcagaacatcgagaactaccgggccacagctggggtggaggccctgcagctggtggaccgggaggccaagccccacatggagagctacaatgccggcgtgaagcactatgaagcagatgactttgagatggccatccgccactttgagcaggccctgcgggagtactttgtggaggacacagaatgtaggaccctgtgtgagggcccccagagatttgaggagtatgagtacctgggctacaaggccggcctgtatgaggccatcgctgaccactacatgcaggtgctggtgtgccagcatgaatgtgtgcgggagctggccacccggcccggccgcctgagccccatcgagaacttcctgcccctgcactatgactacctgcagtttgcctactacagagtgggggagtatgtgaaggccctggagtgtgccaaggcctacctgctgtgccacccagatgatgaagatgtgctggacaacgtggactactatgagagcctgctggatgacagcattgatcctgccagcattgaggcccgggaggacctgaccatgtttgtgaagaggcacaagctggagagcgagctgatcaagtctgctgctgagggcctgggcttctcctacacagagcccaactactggatccgctatggaggccggcaggatgaaaatagagtgcccagcggcgtgaatgtggagggcgctgaggtgcacggcttctccatgggcaagaagctgagccccaagattgaccgggacctgcgggagggcggccccctgctgtatgagaacatcacctttgtgtacaacagcgagcagctgaatggcacccagagggtgctgctggacaacgtgctgtctgaggagcagtgccgggagctgcacagcgtggccagcggcatcatgctggtgggagatggctaccggggcaagaccagcccccacaccccaaatgagaagtttgaaggagccaccgtgctgaaggccctgaagagcggctatgagggccgggtgcccctgaagagcgcccggctcttctatgacatcagcgagaaggcccggcgcatcgtggagagctacttcatgctgaacagcaccctgtacttctcctacacccacatggtgtgcaggacagccctgagcggccagcaggacagaagaaatgacctgagccaccccatccacgccgacaactgcctgctggaccctgaggccaatgaatgctggaaggagcccccagcctacaccttccgggactacagcgccctgctgtacatgaatgatgactttgagggcggggagttcatcttcacagagatggatgccaagacagtgacagccagcatcaagcccaagtgtggccgcatgatctccttcagcagtggaggagagaacccccatggagtgaaggctgtgaccaagggcaagagatgtgctgtggccctgtggttcaccctggaccccctgtaccgggagctggagcgcatccaggctgatgaagtcatcgccatcctggaccaggagcagcagggcaagcatgagctgaacatcaaccccaaggatgagctgtag

SEQ ID NO: 197040 - DNA, 3509 bp, Artificial Sequence
  derived and/or modified sequence
cctttaagagcggctggccaggcacggcctccgcctctcagtacgcggagcgccggcggtcacctggggctcgcggagcggccagatcgcggcggagtcggcgcgcttccccgagggaaggtgggagaggggacccggacgcgaggtgccccgaagccctctcgagcgtaaccgtcccgcgcctctctgaggcggaggatgcgggagcgcatctgggcgccgccgctgctgctgctgctgccgctgctactgccgccgccactgtggggcggccccccggacagcccacgccgggagctggagctggagcccgggcctctgcagcccttcgacctgctctacgccagcggcgcggccgcctactacagcggagactacgagcgagcggtgcgcgacttggaagcggcgctgcgcagccaccggcgcctgcgggaaatccgcacgcgctgtgcccgccactgcgcggcgcgccacccgctcccgcccccgccccccggcgagggccccggcgctgagctgccccttttccgctccttgttggggcgggcgcgctgttatcgcagctgtgagacccagcgcctcgggggccccgcatcccgccaccgcgtcagcgaggatgtgcgcagcgacttccagcgcagagtgccctacaactacctgcagcgggcctacatcaagcttaaccagctcgaaaaagcagtggaagcagctcacacatttttcgtggctaaccctgagcacatggaaatgcagcagaacattgagaattacagggcgacagctggtgttgaagcattgcagttggtagacagagaagccaagccacacatggagagttacaatgcaggagttaaacattatgaggctgatgactttgagatggctatcaggcacttcgaacaagccttaagagaatatttcgttgaagatacagaatgccggaccctatgtgaggggcctcagagatttgaagaatatgagtatttagggtataaggctggtctgtatgaagctattgcagatcactacatgcaggtgcttgtttgtcagcatgaatgtgtgagggaacttgccacccgccctggccgcctctctcccatcgagaattttcttcctctgcactatgattacctacagtttgcctactatcgagttggtgagtatgtgaaagccctggagtgtgccaaagcctatcttctatgccatccagatgatgaggatgtcctagacaatgtggattactatgagagtctgctggatgatagcattgacccggcatccattgaggccagagaggatttaacaatgtttgtgaaacgtcataagctggagtctgagctgataaaatcagctgcagaaggtctggggttttcatacactgaaccgaattattggatcagatatggaggacgacaggatgagaatcgggtcccttcaggagtgaacgtagagggagcagaagttcatggattctcaatgggaaaaaagctatcacccaagatagatcgagacctaagagaaggtggtcctctactctatgagaacatcacattcgtctacaactcggagcagctgaacgggactcagcgggttctcctggataacgtcctgtcggaagaacagtgccgggagctccacagcgtggccagtggaatcatgcttgttggtgatggatacagaggaaaaacttcaccccatacacccaatgaaaagtttgaaggtgcaactgtcctgaaagcactcaaatctggttatgaaggtcgagtcccactgaagagcgctcgtctgttttatgacatcagcgaaaaggctcgaaggattgtagaatcttattttatgctgaactcaactctgtatttttcctatacacacatggtctgccgaacagccctgtctggtcagcaggatagaagaaatgacctcagtcatcccatccatgctgacaactgtttgttggatccagaggccaacgaatgctggaaggagcctcctgcttacacatttcgagactatagtgctctcctatatatgaatgatgactttgaaggaggagaattcatattcacagagatggatgctaagactgtgactgcctctataaaaccaaaatgtgggcgcatgatcagcttctcatctggaggagagaaccctcatggggtgaaggcagtcaccaagggaaagaggtgtgctgtggctctgtggttcaccttggacccactttatagagaattggagcgaatacaggctgatgaagtgattgcaattctggatcaagaacagcaagggaagcatgaactgaatatcaaccctaaagatgagctataaaaatgagaaagaatgttctatcaaatatttatttaaattgttaatcttatgagaacctttttatttttgtacagagccatggtataaattaacaggttaatgtcagtcatcagatcttccttctcttcctaaggatgcttgtgttgcctcaatctatcaatctatctttcttgttttgggttgttttctctctctctctctctctctctcttcttagagacatggtctaaccatgttgtctaggatatagggcagtggctattcacagatgtgatgatagcacactggagcctcaaactcttaggctcaggcgatccttcaagcctcccggggagctgggaccacaggcacgtgccaccacacccagctctctttcttggtttttcatcatttcatgtatctatcaaagcccagttcacctcctcccccaaacacacacacacacacacacacacacacacacacacacaattaagttgctgcaaattcaaaagcttagagagaataagcttcttggtggtgaaactacaactctcacgtgtgctccagttctaaaattaacctgtgcctggtctctgaagccctttcttgctctgtgcctttcagccacatccttaggtgctaacggccatgagctccgactctccaaagtgagctccactttgggtctgaggagcccctggcagagtccacgctgcctcaggtatcatgggcgtaatgatcacccaggctccgggagatctcatggatgattactgtatgagacagaggggacttcagtctttccagggccttggtggaatttttggctctggtgttttcgccagacaataaacttacactggaagctttgattcaccctccacagtactccagaaaggactgtcctataagttgtacactttaaaaggtcatgtagaggttgtagtagaatggcttttcaccctggtgactttggaagaaactcttgaatactgcctgcatccgggcaccatggccaggttgcctaggagtggggtccactgatgaaaagaggtgttttgtacttacataagaaaaataaatttctgattgattttaaccgtcatctgcttatattttgggggcccctcctcattgctgctatccagcacacagatttgtgcttgtgtctgatttgtttaataaagggaggcttattttaa

SEQ ID NO: 197041 - DNA, 2963 bp, Artificial Sequence
  derived and/or modified sequence
agaagaccacagaaatgcctccaggaggcaggctgggatccagggtccaaccaatattcttgtgagagtgtgaagccaaggaacacgaaagaggggaacaccttggctaagaatgtattcgtgacagaggagaaggggaggaacaggaagcctccagctagtcgtttggaatctggcaaccatttctgtcagctttctcattcctagattgatgcagattgcttaattccttgagcttaaccagctcgaaaaagcagtggaagcagctcacacatttttcgtggctaaccctgagcacatggaaatgcagcagaacattgagaattacagggcgacagctggtgttgaagcattgcagttggtagacagagaagccaagccacacatggagagttacaatgcaggagttaaacattatgaggctgatgactttgagatggctatcaggcacttcgaacaagccttaagagaatatttcgttgaagatacagaatgccggaccctatgtgaggggcctcagagatttgaagaatatgagtatttagggtataaggctggtctgtatgaagctattgcagatcactacatgcaggtgcttgtttgtcagcatgaatgtgtgagggaacttgccacccgccctggccgcctctctcccatcgagaattttcttcctctgcactatgattacctacagtttgcctactatcgagttggtgagtatgtgaaagccctggagtgtgccaaagcctatcttctatgccatccagatgatgaggatgtcctagacaatgtggattactatgagagtctgctggatgatagcattgacccggcatccattgaggccagagaggatttaacaatgtttgtgaaacgtcataagctggagtctgagctgataaaatcagctgcagaaggtctggggttttcatacactgaaccgaattattggatcagatatggaggacgacaggatgagaatcgggtcccttcaggagtgaacgtagagggagcagaagttcatggattctcaatgggaaaaaagctatcacccaagatagatcgagacctaagagaaggtggtcctctactctatgagaacatcacattcgtctacaactcggagcagctgaacgggactcagcgggttctcctggataacgtcctgtcggaagaacagtgccgggagctccacagcgtggccagtggaatcatgcttgttggtgatggatacagaggaaaaacttcaccccatacacccaatgaaaagtttgaaggtgcaactgtcctgaaagcactcaaatctggttatgaaggtcgagtcccactgaagagcgctcgtctgttttatgacatcagcgaaaaggctcgaaggattgtagaatcttattttatgctgaactcaactctgtatttttcctatacacacatggtctgccgaacagccctgtctggtcagcaggatagaagaaatgacctcagtcatcccatccatgctgacaactgtttgttggatccagaggccaacgaatgctggaaggagcctcctgcttacacatttcgagactatagtgctctcctatatatgaatgatgactttgaaggaggagaattcatattcacagagatggatgctaagactgtgactgcctctataaaaccaaaatgtgggcgcatgatcagcttctcatctggaggagagaaccctcatggggtgaaggcagtcaccaagggaaagaggtgtgctgtggctctgtggttcaccttggacccactttatagagaattggagcgaatacaggctgatgaagtgattgcaattctggatcaagaacagcaagggaagcatgaactgaatatcaaccctaaagatgagctataaaaatgagaaagaatgttctatcaaatatttatttaaattgttaatcttatgagaacctttttatttttgtacagagccatggtataaattaacaggttaatgtcagtcatcagatcttccttctcttcctaaggatgcttgtgttgcctcaatctatcaatctatctttcttgttttgggttgttttctctctctctctctctctctctcttcttagagacatggtctaaccatgttgtctaggatatagggcagtggctattcacagatgtgatgatagcacactggagcctcaaactcttaggctcaggcgatccttcaagcctcccggggagctgggaccacaggcacgtgccaccacacccagctctctttcttggtttttcatcatttcatgtatctatcaaagcccagttcacctcctcccccaaacacacacacacacacacacacacacacacacacacacaattaagttgctgcaaattcaaaagcttagagagaataagcttcttggtggtgaaactacaactctcacgtgtgctccagttctaaaattaacctgtgcctggtctctgaagccctttcttgctctgtgcctttcagccacatccttaggtgctaacggccatgagctccgactctccaaagtgagctccactttgggtctgaggagcccctggcagagtccacgctgcctcaggtatcatgggcgtaatgatcacccaggctccgggagatctcatggatgattactgtatgagacagaggggacttcagtctttccagggccttggtggaatttttggctctggtgttttcgccagacaataaacttacactggaagctttgattcaccctccacagtactccagaaaggactgtcctataagttgtacactttaaaaggtcatgtagaggttgtagtagaatggcttttcaccctggtgactttggaagaaactcttgaatactgcctgcatccgggcaccatggccaggttgcctaggagtggggtccactgatgaaaagaggtgttttgtacttacataagaaaaataaatttctgattgattttaa

SEQ ID NO: 197042 - DNA, 2127 bp, Artificial Sequence
  derived and/or modified sequence
atgcgggagcggatctgggccccccccctgctgctgctgctgcccctcctgctcccccctcccctgtggggcggccctcccgattctcctagacgggagctggaactggaaccaggaccgctgcaacctttcgacttgttatacgctagcggcgctgccgcttattattctggggactatgagcgggccgtccgggacctcgaagccgcgctgagatcccacagacgtctgcgggagatccgaacccggtgtgctcggcactgcgccgcacgccaccctttgccacctcccccacccggcgaaggaccaggagccgaactaccacttttcagatcactgttaggtcgcgcaaggtgttatcggagttgcgagactcagcggctgggaggtcccgcaagccggcaccgggtgtctgaagatgtgcgatcagactttcagcggagagtgccgtataattacctccagagagcttacattaaacttaatcagctcgaaaaagcagtcgaggccgcacatacgttttttgtggcaaatcccgagcatatggaaatgcagcaaaatatcgagaactatagagccacagcgggcgttgaagcgttacagttggttgacagagaagctaagccacatatggaatcctataacgcaggtgtcaagcattacgaggcagatgatttcgagatggccatccgccacttcgagcaggctctcagggagtactttgtagaggacacagagtgtcgcacattgtgtgagggtccccagcgattcgaggagtatgaatatttaggttacaaggcgggcctgtacgaggccatcgctgatcactatatgcaggtgttagtttgccagcatgaatgcgtcagagagttggccacacgaccggggagattatctccgatcgagaatttcctacctctgcactacgactatctccagtttgcctactatagggtgggtgagtatgtgaaggcactcgaatgtgcaaaagcttacctgctgtgccacccagacgatgaagacgtgctcgataatgttgattattacgagagcttgcttgatgactccatagaccctgcttcaatcgaggctagagaagatctgacaatgttcgtgaagagacacaagttagagagtgaactgatcaagagtgccgccgaagggctcggcttctcttacacggagcctaattattggattcgctacggtgggcggcaggatgaaaatcgtgtgccatcaggtgtgaatgtggaaggggccgaggtccatggctttagtatgggaaagaagttgagccccaagattgatcgagacttgcgcgaaggaggcccactgctttacgaaaatattaccttcgtttacaacagtgaacagctgaatggaactcagcgagtgctgctggacaatgttctcagtgaggagcagtgtagggagctgcatagcgtggcctcgggcataatgttggtgggagacggctatcggggaaagacttcccctcataccccaaatgagaaattcgagggagcaacagtgctcaaggctcttaagtccggctatgagggccgggtgccgctgaaaagtgccagactcttctacgacatctccgaaaaggctcggcgcatagttgaatcttacttcatgttaaattccaccttgtacttctcctacacgcatatggtgtgccgcaccgccttgagcggccagcaggacagaaggaacgatctttctcaccctattcacgctgataattgcctcttggaccccgaagccaacgagtgctggaaggagccacctgcctatacattccgggactattcagccctgctgtacatgaatgacgactttgagggcggagagtttattttcacggaaatggatgcgaaaaccgtcacggccagtatcaagccaaaatgtggccggatgatatccttctcttccggaggggagaatccgcacggagtgaaggcagtcacaaagggcaagaggtgtgcagtggcattatggtttacccttgacccactctatagagagctagaaaggatacaggctgacgaggtcatcgccattctggatcaggagcagcaggggaagcatgagctgaatattaaccccaaggacgaactctag

SEQ ID NO: 197043 - DNA, 1584 bp, Artificial Sequence
  derived and/or modified sequence
atggagatgcagcagaacatcgagaactaccgggccaccgccggcgtggaagcactgcaactagtagaccgggaagctaaaccacatatggaaagttacaatgctggcgtgaagcactacgaagcagacgacttcgaaatggccatcagacatttcgagcaggccctccgagagtacttcgtggaggatacagaatgccgcactctctgtgaaggccctcagcgatttgaagagtacgaatatcttggctacaaggcgggtctctacgaggccatcgctgatcactatatgcaggtgctggtatgccaacacgagtgtgtccgggagcttgctacaagacctggcagattgtcccccattgagaatttcctccctctgcactacgattatctccagtttgcctactatagagttggggagtatgtgaaagccctggagtgtgctaaagcatacctactgtgtcatcccgacgacgaagatgtgctggacaatgtggactattatgaaagtctgctggatgatagcatagatcccgctagtattgaggcccgagaggacctaacaatgtttgtcaagagacacaagctggagtccgaattgatcaaatccgccgcggaaggcctcgggttcagctacaccgagccaaattattggataaggtatggcggaagacaagatgagaatagagtgccttcaggagttaacgttgagggggccgaggtgcacgggttttctatggggaagaagctgtccccgaaaatcgatcgggacctacgggaaggaggccctctgctgtatgaaaatataactttcgtctacaactctgaacagttaaatggaacgcagcgggttcttcttgacaatgtcctgtcagaagagcaatgcagagagctgcatagtgtggccagcgggatcatgctggtgggggacgggtaccgggggaagacatctcctcacacaccgaacgaaaaattcgagggcgcgacagtgcttaaggcgctgaagtcaggatacgaaggtcgggtccccctcaagtcagcgcggcttttctacgacattagcgagaaggctaggaggatcgttgagagctactttatgcttaacagtacactatacttcagctatactcacatggtctgtcgcaccgcgttatccggccagcaggatcggcggaatgacctcagtcatccgatccatgctgataattgcttactcgaccccgaggcaaatgaatgttggaaggaaccccctgcgtacacctttcgcgattatagcgccctcctttatatgaatgatgatttcgagggaggagaatttatcttcaccgagatggatgcaaagactgtcacagcctcaattaaacccaagtgcgggaggatgatatccttctcttcggggggcgaaaatccacacggcgtcaaggccgtgacgaaaggcaagagatgcgctgtggcactgtggttcacacttgatcctctctatcgagaattggagaggatccaagccgacgaggtgatcgccattttggaccaggagcaacaagggaaacatgagctgaacataaatcctaaagacgagctgtag

SEQ ID NO: 197044 - DNA, 2127 bp, Artificial Sequence
  derived and/or modified sequence
atgcgtgagcgtatttgggcaccccctctcctgctgctgctgccactgctcttacccccaccactgtggggtggccctcctgattctccgagacgtgaactcgagctcgaaccaggccctctccagccattcgaccttctgtacgcctccggagcggctgcctattactccggcgactatgagagagccgtgcgcgacctcgaagcagccctccgaagccatagacgattgcgggaaatacggacacgttgtgcgcgacactgcgctgcgagacaccctctgcccccacctcctcccggtgaaggccctggtgcggaactcccactgttccgctccctgctgggcagggccagatgctatcgctcctgcgaaacacagaggctaggcggaccagcatcaagacatagggtcagcgaagatgttcgctcagatttccagcgcagggtgccatacaactacttgcagagagcctatataaaattaaatcagctggagaaggccgtggaggccgcacacaccttctttgttgccaaccccgagcatatggagatgcagcagaatattgagaattaccgcgcaacagcaggagtggaggccctgcaacttgtagaccgcgaggcgaaaccacacatggagagttataacgcaggcgtcaaacactacgaagctgacgattttgagatggccattaggcactttgaacaggcattacgggagtatttcgtagaagataccgaatgtcggactctttgtgagggaccccagagatttgaggagtatgaatacctgggatataaggcgggtctgtacgaggccatcgcggatcactacatgcaggtcctggtctgtcagcacgaatgcgtgagagagctagcgacacgccctggcaggctgtcccccattgaaaacttcctaccacttcattacgattatctccagtttgcttattatagggttggagaatacgtgaaggctcttgagtgtgccaaggcatacctgctgtgccaccctgatgacgaagacgtgctagataacgtggactattacgagtcactcctggatgattctattgaccctgccagtatcgaagcccgtgaggatctaacaatgttcgtaaagaggcacaagctcgagtctgaacttatcaagtctgcggctgaagggcttggtttctcatacaccgaacctaattactggatcaggtacggcggaagacaggatgagaacagagtcccttcaggtgtcaatgtcgaaggcgcagaagtccatggattcagcatgggaaagaaactgtctccaaaaattgaccgggacctgcgagagggcggtcccctgctatatgagaatatcacattcgtttataattccgagcagctcaacggcacccagcgggttctgttagacaacgttcttagtgaggaacagtgtagggagttacacagtgtcgcctctggaattatgttggtgggagacggctatagaggcaagacatctccgcacaccccaaacgagaaatttgagggcgctacagtgctgaaagccctcaaatctggctacgaggggagagtgccgttaaagagtgcgaggctgttctatgatatctccgagaaggcgaggagaatcgtcgaaagctactttatgctgaatagcacactatacttttcctacacgcacatggtatgtcgaaccgccctctccggacagcaggacagacggaacgatctgtcccacccaattcacgccgacaactgtttgttggacccagaagctaacgaatgctggaaagaacctccagcctacactttccgtgactacagcgctcttctgtacatgaacgacgactttgagggcggagagtttatattcactgagatggatgcgaagactgtgacagcatccatcaagcctaaatgtggcaggatgatatcattctcttccggtggggagaacccacacggcgtcaaagctgtgaccaaaggcaagcgatgcgcagtcgctctgtggtttacgctcgaccctctctacagagaactggagcggattcaggccgacgaggtgatcgccattcttgatcaggagcagcagggaaaacacgaattgaacatcaatcctaaagacgaactctag

SEQ ID NO: 197045 - DNA, 1584 bp, Artificial Sequence
  derived and/or modified sequence
atggagatgcaacagaatatagagaactatagagcaacagctggcgtcgaagcactccagttggtcgatagagaggccaaaccacacatggagtcatacaatgctggcgtgaagcactacgaggcagatgactttgaaatggcaattcgacatttcgaacaagctctgcgtgaatactttgttgaagatacagaatgccgaactctatgtgagggccctcagagatttgaagagtatgagtatctgggctacaaagctggactgtatgaagcgatagcggatcactacatgcaagtgttggtatgtcagcatgagtgcgtcagggaactggcaacccggcctgggcgtctcagcccgatcgagaacttcctccccctccattatgattacttacagttcgcttattacagggtgggagagtacgtgaaggctctggagtgcgccaaagcctaccttctttgccaccctgatgatgaagacgtcctggataatgtggactactatgagtccttactggacgactctatagatccagcatccatagaggctcgagaagatctgactatgttcgtgaaacggcacaaattagaatcagagctaatcaaatcagccgctgagggactgggcttctcttacacggagccaaactattggatcagatatggaggcagacaggacgagaaccgggttccaagtggcgtgaacgtggagggagctgaggtgcatggctttagcatgggtaaaaagttatctcctaagatcgatcgcgaccttcgggaaggcggacctctcttgtacgagaatatcacattcgtgtacaacagtgagcagctaaatgggacacaaagagtgcttttagataatgtcctttctgaagaacagtgtcgggaactccactctgtggcttctggaatcatgctggtgggcgatgggtacaggggaaagaccagtccacacacgccaaacgagaagttcgagggggctaccgttctgaaggcacttaaatccgggtacgaaggcagagtacccctgaaatccgccagacttttctatgacatcagtgagaaggccagacgtatcgtcgagagctactttatgctgaattccacgttatacttctcatacacgcacatggtgtgtcggacagctttgagcggtcaacaggatagaaggaacgatttatctcaccccatccatgccgacaactgcctcctggacccagaggccaacgaatgctggaaggaaccaccagcatacaccttccgggattatagcgctttgttatacatgaacgatgacttcgagggtggagagttcatctttacagaaatggacgcgaaaacagtgaccgcgagcataaaacctaagtgtggcaggatgataagtttctcctccggaggagaaaatccccacggggtaaaagctgttactaagggaaaacgatgcgccgttgcgttatggttcacgttggaccccttgtaccgcgaactggagagaattcaggccgatgaggtgatcgccatccttgaccaggagcaacaagggaaacatgagctaaatatcaacccaaaggatgagctctag

SEQ ID NO: 197046 - DNA, 2127 bp, Artificial Sequence
  derived and/or modified sequence
atgcgcgagcgtatctgggcaccccccctcctgctcctcctccccctcctcctgcctccacccctatggggagggccaccagatagtcctcgtagggaactggagctggaacccggcccactgcagccatttgatcttctgtatgcctctggggcggccgcatactactccggggactatgagagagctgtaagggatctagaagcagcactgaggagccatagaagattgcgtgagatcagaacccgttgtgctcggcattgtgctgctagacaccccctgccccccccgccccctggcgaaggccctggagcagagctgccattattccgctcattactgggccgcgcaaggtgctacaggtcctgtgagactcagaggttgggaggacccgcgagtagacacagagtgagtgaagacgtcaggagcgattttcagcgcagagtgccatataattacctgcagcgcgcgtatattaagctgaatcaactggaaaaagcggtggaagccgctcatacattttttgtagccaaccccgaacatatggaaatgcaacagaatatagaaaactatagagctacagcaggagtggaagccttgcagctcgtcgacagggaagccaagccgcacatggagagttacaatgcaggtgtaaaacattacgaggcagatgatttcgagatggccattcgacattttgaacaggccctgagagagtactttgtcgaggatactgaatgcaggacactctgcgaaggcccacagaggtttgaggaatatgagtatctggggtacaaggcaggcctgtacgaagcaatcgccgaccactacatgcaggtgcttgtctgccagcacgagtgcgtcagagaactggccacacgccccggaagactgtccccgatcgaaaatttcctgcctctgcactatgattatctccagttcgcctactaccgcgttggtgagtatgttaaggcccttgaatgcgctaaggcttatctgctctgccaccctgacgacgaagacgtgctggataacgtcgactattacgaatcactcttagatgattctatcgaccccgcaagcattgaagccagggaggacctgactatgttcgtcaaaaggcacaaactcgagtccgagctgataaagagtgcggccgaaggacttggtttttcttatacagagcccaactactggattaggtatggtgggcgccaagatgagaaccgggtaccatctggggtgaatgtagagggcgccgaagttcacgggttcagcatgggcaagaaactgtcccctaaaatagaccgcgatctccgcgaaggggggccgctgctttatgagaatattacatttgtctataactccgaacaattgaacggcacccaacgtgtcttgctggataacgtcctgagcgaagaacagtgcagagaactgcatagtgttgctagcggcattatgctcgttggtgacgggtatcgggggaagacctctccccacacgcccaacgagaagttcgaaggtgctacggtgcttaaagccctgaaaagtggatatgaaggccgagttcccctgaaatctgctcggctcttttacgacatcagcgagaaagcgcgacggatcgtggagtcctacttcatgcttaactctaccctctatttttcctatacccatatggtgtgtcgcactgctcttagtggccaacaggaccgccgaaacgatttgtctcaccccatacatgcggacaactgtcttctggatcccgaagccaacgaatgctggaaggagcctcccgcctacacattcagggattactcggccttactctatatgaacgacgatttcgaaggaggggagtttattttcactgagatggatgccaagactgtaacggcctctatcaaaccaaaatgcgggcgcatgatctccttttccagcggaggagagaaccctcacggggtcaaagcagtgaccaagggcaagagatgcgcggtagcactatggttcactttggatcccctgtacagagaactggagcggattcaggccgatgaggtgatcgccatattggaccaagaacagcagggaaagcacgaactgaatatcaacccaaaggacgagctatag

SEQ ID NO: 197047 - DNA, 1584 bp, Artificial Sequence
  derived and/or modified sequence
atggagatgcaacagaatatcgagaattatagggccacagccggggtcgaggctctgcagttggtagatcgcgaggccaaacctcatatggaatcctacaacgcaggggtgaagcactacgaggctgacgactttgagatggctattagacacttcgaacaggctcttagagaatatttcgtggaggatacggagtgcagaactctctgtgagggccctcaacgttttgaggaatatgagtatcttggctacaaggcaggactttacgaagccatagccgatcattatatgcaggtgctcgtgtgtcagcatgaatgcgttcgggaactggccactaggcccggtcggttgagtccaattgaaaacttcctgcctctccattatgattatctgcagttcgcgtattaccgtgtaggagagtatgtcaaagcacttgagtgcgccaaagcctacctgttgtgccacccagatgatgaagacgtactggacaacgttgattattatgagtccctgctagatgatagcattgaccctgcaagcattgaagccagggaagatctgactatgttcgtcaagagacataaattggagtctgagctcattaagtccgctgcggagggattaggcttctcttatacggagccaaattattggatcaggtatgggggacgccaggacgaaaaccgcgtgccatctggcgtcaacgtggaaggagccgaggttcatggcttctctatgggcaagaaactgagcccgaagatagacagagatctgcgggaaggtggtcccctcctgtacgaaaatatcacctttgtgtacaactctgagcagctaaacggaactcaacgggttctgcttgacaacgttttgagcgaggagcagtgtagagaacttcatagtgtggctagcggcatcatgctggtaggcgacggatacagaggcaagaccagtcctcacacccccaatgaaaagttcgaaggtgccactgtgctgaaagcgctcaaatctgggtatgaggggcgggtaccacttaaatccgcaagactgttctatgacattagcgaaaaagcccggcgtatagtggaatcctactttatgctgaactcaacactatacttttcctacacccatatggtgtgccggaccgcgctctcaggtcagcaggacagacgaaatgacctatcacatcctatccacgctgacaactgtctgttagacccggaggctaatgaatgctggaaagagccacccgcgtatactttccgtgattattctgccctgctgtatatgaatgacgattttgagggcggagagttcatctttaccgagatggatgcgaaaacagtgactgcttcgattaagcccaaatgcggccgcatgatatctttcagctcagggggggaaaatccacacggcgtgaaggcggtgactaaggggaagcgttgtgcagtcgctctgtggtttaccctggatccactttaccgggagttggagcgtatacaagccgatgaagtcatagcaattctggaccaggaacagcagggcaagcacgagctgaatatcaatcctaaggacgaactgtag

SEQ ID NO: 197048 - DNA, 2127 bp, Artificial Sequence
  derived and/or modified sequence
atgcgggaacgaatatgggccccacccctgttgcttttgcttcctcttcttctgccacctcctttatggggaggcccccctgattcaccgaggagagaactcgaactggaaccaggtcctctgcaaccttttgatcttctgtatgcatcaggcgctgctgcttactactcaggcgactacgagagagctgtgcgcgacttagaggcagccctccgtagccatcgccgacttcgcgagatccgaacccggtgcgcaagacattgtgccgcaagacaccccctccctcccccaccccctggagaaggtccaggtgccgaactgccactcttcaggtcgctcttaggacgagccagatgctaccggagctgcgagactcagcgattgggagggccagccagcaggcaccgcgtgtcagaagacgtgcgaagtgattttcagcgtagagtgccatataactatctgcaaagagcatacattaagctgaaccaactagagaaggccgtggaagcagctcacacattctttgtcgctaacccagaacatatggagatgcaacagaacatcgagaactatcgcgcaactgcaggcgttgaggccttacagttagttgaccgagaggctaaacctcatatggaatcatataacgccggtgtgaagcactatgaagcagacgacttcgagatggcaatcaggcactttgagcaagcactgagagagtacttcgtggaagacacagaatgtagaaccctgtgtgagggacctcaacgattcgaagagtatgaatacctggggtacaaagcagggctctatgaagccattgctgatcattacatgcaggtccttgtgtgtcagcatgaatgtgtgcgtgagctagctacgagaccaggaaggcttagcccaatagaaaacttcctgccgttgcactacgattatcttcagtttgcctactatagagtgggtgagtatgtaaaggctcttgaatgcgctaaagcctacctcctttgccacccagatgacgaagatgtgcttgataatgtcgattactacgagtccctgctggacgatagcattgacccagccagcatcgaagcaagagaggaccttacgatgttcgtcaaacgccataaactcgagagcgaactcattaagtctgcagctgagggcttaggcttttcttataccgaaccaaactactggattaggtacggtggccgacaagacgagaaccgggttcctagcggggtgaacgtggaaggtgctgaagtgcacgggttttcaatgggcaaaaagctgagtcctaaaatagaccgagacctaagagaggggggcccactgctatatgaaaatattacgttcgtctataactctgagcaactcaacggcactcaacgggttctactagacaatgtgctatccgaggaacaatgtagagaacttcactctgtggcctctggtattatgcttgtgggcgatgggtatcggggaaaaacgtctcctcacacaccaaatgaaaaattcgaaggtgccactgtactgaaagctctgaaatctggctacgagggcagggttcccctcaagtccgccagattattttacgatatctctgagaaagcccgcagaatcgttgaaagctatttcatgttaaactccaccctgtacttctcctatacgcacatggtctgtcgtaccgcactgagcggtcagcaggaccggcgcaacgatctcagccaccctattcacgccgataactgtttactcgaccccgaggccaacgagtgctggaaagaacccccagcatatacattccgagattatagtgctttgctatacatgaacgatgactttgagggtggcgagtttatattcacagagatggacgcaaagaccgtgacagcgagtattaaacccaaatgtggccggatgatctcattcagttcaggcggggagaacccccacggcgtcaaagccgtgacaaagggaaaaagatgtgcagtcgccctgtggtttacactggaccctctctatcgggaactggaaagaattcaggcagatgaagtcattgccatcttagaccaggagcaacaaggcaagcatgagctgaacataaaccctaaagatgagctgtag

SEQ ID NO: 197049 - DNA, 1584 bp, Artificial Sequence
  derived and/or modified sequence
atggagatgcagcagaacatagagaactatcgcgctaccgcgggcgttgaggccctgcagcttgttgatcgagaagccaagccacatatggaaagctataacgcaggagttaaacactacgaagcagatgattttgaaatggcgattagacactttgagcaggcactgagagagtattttgtagaggatactgaatgcaggacattgtgcgagggcccacagcgtttcgaggaatacgagtacctgggttacaaggcggggctgtacgaggccattgctgatcattacatgcaggtgttagtgtgccaacatgaatgcgttcgagaactcgccactaggcccggacgtttaagtcctattgagaactttttgccgctgcactatgactacttgcaattcgcctattatcgggttggtgaatacgtgaaggcgctggaatgtgcaaaggcctacctgctgtgccaccccgacgacgaggacgttttggataacgttgattattacgaatcccttctagacgactcaattgatcccgctagtatcgaggcccgcgaagacctgacaatgttcgtcaagaggcataagttggaatcagagctcatcaagtccgccgcggaaggcttaggtttctcatatactgaacccaattactggattagatacggtgggagacaagatgagaacagagtccccagcggagtcaacgtggagggcgccgaagtgcacggatttagtatgggaaagaagctgtcaccaaaaatcgatcgagatctgagggaaggagggcctcttctgtatgagaacatcaccttcgtgtataacagcgaacaactaaatggaacacagcgcgtactgctggacaacgtcttgagcgaggaacagtgcagagaactacactccgtggcaagcgggattatgctggttggggacggctacagagggaaaacaagtccgcacactccaaatgagaagtttgaaggagccactgttctcaaagcgctgaaatctggctacgagggacgtgtacccctgaaatccgcacgccttttttacgatattagcgaaaaggcacgcagaattgttgagagttactttatgctgaacagcacattatactttagctacacgcacatggtatgtcgcaccgcgttatctggacaacaagaccgacgaaacgatctctcccacccgattcatgccgataactgcttgttagatcccgaagccaacgaatgttggaaggagcccccagcatatacctttagagactatagcgccctgctgtatatgaacgacgattttgagggaggggaattcatatttactgaaatggacgctaagaccgtgaccgctagtattaagccgaagtgtggacggatgataagcttctctagtgggggagagaatcctcacggggtaaaggccgtgacaaaaggcaaacgatgcgcagtggccctgtggttcactctggatccattatatcgagagctggagcggatacaggccgatgaagtcattgcgattttagaccaagagcagcaaggtaagcacgaactaaacatcaaccctaaagacgaactctag

SEQ ID NO: 197050 - DNA, 2127 bp, Artificial Sequence
  derived and/or modified sequence
atgagagagagaatctgggccccccccctgctgctgctgctgcccctgctgctgcccccccccctgtggggcggcccccccgacagccccagaagagagctggagctggagcccggccccctgcagcccttcgacctgctgtacgccagcggcgccgccgcctactacagcggcgactacgagagagccgtgagagacctggaggccgccctgagaagccacagaagactgagagagatcagaaccagatgcgccagacactgcgccgccagacaccccctgcccccccccccccccggcgagggccccggcgccgagctgcccctgttcagaagcctgctgggcagagccagatgctacagaagctgcgagacccagagactgggcggccccgccagcagacacagagtgagcgaggacgtgagaagcgacttccagagaagagtgccctacaactacctgcagagagcctacatcaagctgaaccagctggagaaggccgtggaggccgcccacaccttcttcgtggccaaccccgagcacatggagatgcagcagaacatcgagaactacagagccaccgccggcgtggaggccctgcagctggtggacagagaggccaagccccacatggagagctacaacgccggcgtgaagcactacgaggccgacgacttcgagatggccatcagacacttcgagcaggccctgagagagtacttcgtggaggacaccgagtgcagaaccctgtgcgagggcccccagagattcgaggagtacgagtacctgggctacaaggccggcctgtacgaggccatcgccgaccactacatgcaggtgctggtgtgccagcacgagtgcgtgagagagctggccaccagacccggcagactgagccccatcgagaacttcctgcccctgcactacgactacctgcagttcgcctactacagagtgggcgagtacgtgaaggccctggagtgcgccaaggcctacctgctgtgccaccccgacgacgaggacgtgctggacaacgtggactactacgagagcctgctggacgacagcatcgaccccgccagcatcgaggccagagaggacctgaccatgttcgtgaagagacacaagctggagagcgagctgatcaagagcgccgccgagggcctgggcttcagctacaccgagcccaactactggatcagatacggcggcagacaggacgagaacagagtgcccagcggcgtgaacgtggagggcgccgaggtgcacggcttcagcatgggcaagaagctgagccccaagatcgacagagacctgagagagggcggccccctgctgtacgagaacatcaccttcgtgtacaacagcgagcagctgaacggcacccagagagtgctgctggacaacgtgctgagcgaggagcagtgcagagagctgcacagcgtggccagcggcatcatgctggtgggcgacggctacagaggcaagaccagcccccacacccccaacgagaagttcgagggcgccaccgtgctgaaggccctgaagagcggctacgagggcagagtgcccctgaagagcgccagactgttctacgacatcagcgagaaggccagaagaatcgtggagagctacttcatgctgaacagcaccctgtacttcagctacacccacatggtgtgcagaaccgccctgagcggccagcaggacagaagaaacgacctgagccaccccatccacgccgacaactgcctgctggaccccgaggccaacgagtgctggaaggagccccccgcctacaccttcagagactacagcgccctgctgtacatgaacgacgacttcgagggcggcgagttcatcttcaccgagatggacgccaagaccgtgaccgccagcatcaagcccaagtgcggcagaatgatcagcttcagcagcggcggcgagaacccccacggcgtgaaggccgtgaccaagggcaagagatgcgccgtggccctgtggttcaccctggaccccctgtacagagagctggagagaatccaggccgacgaggtgatcgccatcctggaccaggagcagcagggcaagcacgagctgaacatcaaccccaaggacgagctgtag

SEQ ID NO: 197051 - DNA, 1584 bp, Artificial Sequence
  derived and/or modified sequence
atggagatgcagcagaacatcgagaactacagagccaccgccggcgtggaggccctgcagctggtggacagagaggccaagccccacatggagagctacaacgccggcgtgaagcactacgaggccgacgacttcgagatggccatcagacacttcgagcaggccctgagagagtacttcgtggaggacaccgagtgcagaaccctgtgcgagggcccccagagattcgaggagtacgagtacctgggctacaaggccggcctgtacgaggccatcgccgaccactacatgcaggtgctggtgtgccagcacgagtgcgtgagagagctggccaccagacccggcagactgagccccatcgagaacttcctgcccctgcactacgactacctgcagttcgcctactacagagtgggcgagtacgtgaaggccctggagtgcgccaaggcctacctgctgtgccaccccgacgacgaggacgtgctggacaacgtggactactacgagagcctgctggacgacagcatcgaccccgccagcatcgaggccagagaggacctgaccatgttcgtgaagagacacaagctggagagcgagctgatcaagagcgccgccgagggcctgggcttcagctacaccgagcccaactactggatcagatacggcggcagacaggacgagaacagagtgcccagcggcgtgaacgtggagggcgccgaggtgcacggcttcagcatgggcaagaagctgagccccaagatcgacagagacctgagagagggcggccccctgctgtacgagaacatcaccttcgtgtacaacagcgagcagctgaacggcacccagagagtgctgctggacaacgtgctgagcgaggagcagtgcagagagctgcacagcgtggccagcggcatcatgctggtgggcgacggctacagaggcaagaccagcccccacacccccaacgagaagttcgagggcgccaccgtgctgaaggccctgaagagcggctacgagggcagagtgcccctgaagagcgccagactgttctacgacatcagcgagaaggccagaagaatcgtggagagctacttcatgctgaacagcaccctgtacttcagctacacccacatggtgtgcagaaccgccctgagcggccagcaggacagaagaaacgacctgagccaccccatccacgccgacaactgcctgctggaccccgaggccaacgagtgctggaaggagccccccgcctacaccttcagagactacagcgccctgctgtacatgaacgacgacttcgagggcggcgagttcatcttcaccgagatggacgccaagaccgtgaccgccagcatcaagcccaagtgcggcagaatgatcagcttcagcagcggcggcgagaacccccacggcgtgaaggccgtgaccaagggcaagagatgcgccgtggccctgtggttcaccctggaccccctgtacagagagctggagagaatccaggccgacgaggtgatcgccatcctggaccaggagcagcagggcaagcacgagctgaacatcaaccccaaggacgagctgtag

SEQ ID NO: 197052 - protein, 1268 aa, Artificial Sequence
  derived and/or modified sequence
MDQKILSLAAEKTADKLQEFLQTLREGDLTNLLQNQAVKGKVAGALLRAIFKGSPCSEEAGTLRRRKIYTCCIQLVESGDLQKEIASEIIGLLMLEAHHFPGPLLVELANEFISAVREGSLVNGKSLELLPIILTALATKKENLAYGKGVLSGEECKKQLINTLCSGRWDQQYVIQLTSMFKDVPLTAEEVEFVVEKALSMFSKMNLQEIPPLVYQLLVLSSKGSRKSVLEGIIAFFSALDKQHNEEQSGDELLDVVTVPSGELRHVEGTIILHIVFAIKLDYELGRELVKHLKVGQQGDSNNNLSPFSIALLLSVTRIQRFQDQVLDLLKTSVVKSFKDLQLLQGSKFLQNLVPHRSYVSTMILEVVKNSVHSWDHVTQGLVELGFILMDSYGPKKVLDGKTIETSPSLSRMPNQHACKLGANILLETFKIHEMIRQEILEQVLNRVVTRASSPISHFLDLLSNIVMYAPLVLQSCSSKVTEAFDYLSFLPLQTVQRLLKAVQPLLKVSMSMRDCLILVLRKAMFANQLDARKSAVAGFLLLLKNFKVLGSLSSSQCSQSLSVSQVHVDVHSHYNSVANETFCLEIMDSLRRCLSQQADVRLMLYEGFYDVLRRNSQLANSVMQTLLSQLKQFYEPKPDLLPPLKLEACILTQGDKISLQEPLDYLLCCIQHCLAWYKNTVIPLQQGEEEEEEEEAFYEDLDDILESITNRMIKSELEDFELDKSADFSQSTSIGIKNNICAFLVMGVCEVLIEYNFSISSFSKNRFEDILSLFMCYKKLSDILNEKAGKAKTKMANKTSDSLLSMKFVSSLLTALFRVLLWRYTSIPTSVEESGKKEKGKSISLLCLEGLQKIFSAVQQFYQPKIQQFLRALDVTDKEGEEREDADVSVTQRTAFQIRQFQRSLLNLLSSQEEDFNSKEALLLVTVLTSLSKLLEPSSPQFVQMLSWTSKICKENSREDALFCKSLMNLLFSLHVSYKSPVILLRDLSQDIHGHLGDIDQDVEVEKTNHFAIVNLRTAAPTVCLLVLSQAEKVLEEVDWLITKLKGQVSQETLSEEASSQATLPNQPVEKAIIMQLGTLLTFFHELVQTALPSGSCVDTLLKDLCKMYTTLTALVRYYLQVCQSSGGIPKNMEKLVKLSGSHLTPLCYSFISYVQNKSKSLNYTGEKKEKPAAVATAMARVLRETKPIPNLIFAIEQYEKFLIHLSKKSKVNLMQHMKLSTSRDFKIKGNILDMVLREDGEDENEEGTASEHGGQNKEPAKKKRKK

SEQ ID NO: 197053 - protein, 1095 aa, Artificial Sequence
  derived and/or modified sequence
MDQKILSLAAEKTADKLQEFLQTLREGDLTNLLQNQAVKGKVAGALLRAIFKGSPCSEEAGTLRRRKIYTCCIQLVESGDLQKEIASEIIGLLMLEAHHFPGPLLVELANEFISAVREGSLVNGKSLELLPIILTALATKKENLAYGKGVLSGEECKKQLINTLCSGRWDQQYVIQLTSMFKDVPLTAEEVEFVVEKALSMFSKMNLQEIPPLVYQLLVLSSKGSRKSVLEGIIAFFSALDKQHNEEQSGDELLDVVTVPSGELRHVEGTIILHIVFAIKLDYELGRELVKHLKVGQQGDSNNNLSPFSIALLLSVTRIQRFQDQVLDLLKTSVVKSFKDLQLLQGSKFLQNLVPHRSYVSTMILEVVKNSVHSWDHVTQGLVELGFILMDSYGPKKVLDGKTIETSPSLSRMPNQHACKLGANILLETFKIHEMIRQEILEQVLNRVVTRASSPISHFLDLLSNIVMYAPLVLQSCSSKVTEAFDYLSFLPLQTVQRLLKAVQPLLKVSMSMRDCLILVLRKAMFANQLDARKSAVAGFLLLLKNFKVLGSLSSSQCSQSLSVSQVHVDVHSHYNSVANETFCLEIMDSLRRCLSQQADVRLMLYEGFYDVLRRNSQLANSVMQTLLSQLKQFYEPKPDLLPPLKLEACILTQGDKISLQEPLDYLLCCIQHCLAWYKNTVIPLQQGEEEEEEEEAFYEDLDDILESITNRMIKSELEDFELDKSADFSQSTSIGIKNNICAFLVMGVCEVLIEYNFSISSFSKNRFEDILSLFMCYKKLSDILNEKAGKAKTKMANKTSDSLLSMKFVSSLLTALFRVLLWRYTSIPTSVEESGKKEKGKSISLLCLEGLQKIFSAVQQFYQPKIQQFLRALDVTDKEGEEREDADVSVTQRTAFQIRQFQRSLLNLLSSQEEDFNSKEALLLVTVLTSLSKLLEPSSPQFVQMLSWTSKICKENSREDALFCKSLMNLLFSLHVSYKSPVILLRDLSQDIHGHLGDIDQDVEVEKTNHFAIVNLRTAAPTVCLLVLSQAEKVLEEVDWLITKLKGQVSQETLSVSPGVSELRRNSKKYGKAGEAVWFSSDPPVLFFHFLRTE

SEQ ID NO: 197054 - DNA, 4713 bp, Artificial Sequence
  derived and/or modified sequence
gccgcgggggcggatcttgttgttacgggtaacggaagtgtggcggcgttgggttgagcgggctttttggaagtttgtggcggagttctgtgatatgagcaacaatggaccagaagattttatctctagcagcagaaaaaacagcagacaaactgcaagaatttcttcaaaccctgagagaaggtgatttgactaatctccttcagaatcaagcagtgaaaggaaaagttgctggagcactcctgagagccatcttcaaaggttccccctgctctgaggaagctggaacacttaggagacgtaagatatacacttgttgtatccagttggtggaatcgggggatttgcagaaagaaatagcgtctgagatcataggattactgatgctggaggctcaccattttccaggaccattattggttgaattagccaatgagtttattagtgctgtcagagaaggcagcctagtgaatggaaaatctttggagttactacctatcattctcactgccctggctacgaaaaaggaaaatctggcttatggaaaaggtgtactgagtggggaagaatgtaagaaacagttgattaacaccctgtgttctggcaggtgggatcagcaatatgtaatccaactcacctccatgttcaaggatgtccctctgactgcagaagaggtggaatttgtggtggaaaaagcattgagcatgttctccaagatgaatcttcaagaaataccacctttggtctatcagcttctggttctctcctccaagggaagcagaaagagtgttttggaaggaatcatagccttcttcagtgcactagataagcagcacaatgaggaacagagtggtgacgagctattggatgttgtcactgtgccatcaggtgaacttcgtcatgtggaaggcaccattattctacacattgtgtttgccatcaaattggactatgaactaggcagagaactcgtgaaacacttaaaggtaggacagcaaggagattccaataataacttaagtcccttcagcattgctcttcttctgtctgtaacaagaatacaaagatttcaggaccaggtgcttgatcttttaaagacttcggttgtaaagagctttaaggatcttcaactcctccaaggctcaaaatttcttcagaatctagttcctcatagatcttatgtttcaaccatgatcttggaagtagtgaagaatagcgttcatagctgggaccatgttactcagggcctcgtagaacttggtttcattttgatggattcatatgggccaaagaaggttcttgatggaaaaactattgaaaccagcccaagtctttctagaatgccaaaccagcatgcatgtaagctcggagctaatatcctgttggaaacttttaagatccatgagatgatcagacaagaaattttggagcaggtcctcaacagggttgttaccagagcatcttctcccatcagtcatttcttagacctgctttcaaatatcgtcatgtatgcacccttagttcttcaaagttgttcttctaaagtcacagaagcttttgactatttgtcctttctgccccttcagactgtacaaaggctgcttaaggcagtgcagccccttctcaaagtcagcatgtcaatgagagactgcttgatacttgtccttcggaaagctatgtttgccaaccagcttgatgcccgaaaatctgcagttgctgggtttttgctgctcctgaagaactttaaagttttaggcagcctgtcatcctctcagtgcagtcagtctctcagtgtcagtcaggttcatgtggatgttcacagccattacaattctgtcgccaatgaaactttttgccttgagatcatggatagtttgaggagatgcttaagccagcaagctgatgttcgactcatgctttatgaggggttttatgatgttcttcgaaggaactctcagctggctaattcagtcatgcaaactctgctctcacagttaaaacagttctatgagccaaaacctgatctgctgcctcctctgaaattagaagcttgtattctgacccaaggagataagatctctctacaagaaccactggattatctgctgtgttgtattcagcattgtttggcctggtataagaatacagtcatacccttacagcagggagaggaggaagaggaggaggaagaggcattctacgaagacctagatgatatattggagtccattactaatagaatgattaagagtgagctggaagactttgaactggataaatcagcagatttttctcagagcaccagtattggcataaaaaataatatctgtgcttttcttgtgatgggagtttgtgaggttttaatagaatacaatttctccataagtagtttcagtaagaataggtttgaggacattctgagcttatttatgtgttacaaaaaactctctgacattcttaatgaaaaagcgggtaaagccaaaactaaaatggccaacaagacaagtgatagtcttttgtccatgaaatttgtgtccagtcttctcactgctcttttcagagtcttgctatggagatacacttcaattcctacttcagtggaagagtcgggaaagaaagagaaaggaaagagcatctcactgctgtgcttggagggtttacagaaaatattcagtgctgtgcaacagttctatcagcccaagattcagcagtttctcagagctctggatgtcacagataaggaaggagaagagagagaagatgcagatgtcagtgtcactcagagaacagcattccagatccggcaatttcagaggtccttgttgaatttacttagcagtcaagaggaagattttaatagcaaagaagccctcctgctagtcacggttcttaccagtttgtccaagttactggagccctcctctcctcagtttgtgcagatgttatcctggacatcaaagatttgcaaggaaaacagccgggaggatgccttgttttgcaagagcttgatgaacttgctcttcagcctgcatgtttcgtataagagtcctgtcattctgctgcgtgacttgtcccaggatatccacgggcatctgggagatatagaccaggatgtagaggtggagaaaacaaaccactttgcaatagtgaatttgagaacggctgcccccactgtctgtttacttgttctgagtcaggccgagaaggttctagaagaagtggactggctaatcaccaagcttaagggacaagtgagccaagaaaccttatcagaagaggcctcttctcaggcaaccctaccaaatcagcctgttgagaaagctatcatcatgcaactgggaactctgcttacatttttccacgagctggtgcagacagctctgccatcaggcagctgtgtggacaccttgttaaaggacttgtgcaaaatgtacaccacacttacagcccttgtcagatattatctccaggtgtgtcagagctccggaggaattccaaaaaatatggaaaagctggtgaagctgtctggttctcatctgacccccctgtgttattctttcatttcttacgtacagaataagagtaagagcctgaactatacgggagagaaaaaggagaaacctgctgccgttgccacagccatggccagagttcttcgggaaaccaagccaatccctaacctcatctttgccatagaacagtatgaaaaatttctcatccacctttctaagaagtccaaggtgaacctgatgcagcacatgaagctcagcacctcacgagacttcaagatcaaaggaaacatcctagacatggttcttcgagaggatggtgaagatgaaaatgaagagggcactgcatcagagcatgggggacagaacaaagaaccagccaagaagaaaaggaaaaaataaatgaaatgcctgagttaatgtgaactttggggcttctgcttcatttttacccaacaagcaacaatgccccttgtcctgtagtccacaccgatgttggcatcttggttctgaacccactgaattcaactgcaccttcagttagaaggaatcttcttggcaggtcctgctactgaaaaatggctggccttaggcaagcccttttgcaaaaagcacagctgaaagcctgagtttgggagcctgcaccaccccgatgaagctccacgggagcaaatacagagcctccaggcagtgctatggtccaggctggcttcgtttttccaaggagcctttggtgagttcaattatctggtaaatatccagcgcttcacctgaaagatagtgcaaattggttaggatgccacctcaagaactgtaactgagagctcagaagtgagcaaaggagcttaatgctaaggtcaaaaggagagtgaaaggttgagaacaattgccacgaacggtaatgttacatgttaggagggtctgttttctttttatataagtgtgtcttagatatattttaaatagaaaataagctttctgatttacttgtttggtatttaaagcacagtttgtttttctgtcacctatagagtgcaagaatgcactctatagaataaattatctttaaacatttcttctgtggttgaagtaggggacaggtacaggtagaatatttgaagctctgctgccttcatttctgaaacatcatatcacattcactctggacacagggcaccttataaactgaaattagcctagaata

SEQ ID NO: 197055 - DNA, 3690 bp, Artificial Sequence
  derived and/or modified sequence
gagcgggctttttggaagtttgtggcggagttctgtgatatgagcaacaatggaccagaagattttatctctagcagcagaaaaaacagcagacaaactgcaagaatttcttcaaaccctgagagaaggtgatttgactaatctccttcagaatcaagcagtgaaaggaaaagttgctggagcactcctgagagccatcttcaaaggttccccctgctctgaggaagctggaacacttaggagacgtaagatatacacttgttgtatccagttggtggaatcgggggatttgcagaaagaaatagcgtctgagatcataggattactgatgctggaggctcaccattttccaggaccattattggttgaattagccaatgagtttattagtgctgtcagagaaggcagcctagtgaatggaaaatctttggagttactacctatcattctcactgccctggctacgaaaaaggaaaatctggcttatggaaaaggtgtactgagtggggaagaatgtaagaaacagttgattaacaccctgtgttctggcaggtgggatcagcaatatgtaatccaactcacctccatgttcaaggatgtccctctgactgcagaagaggtggaatttgtggtggaaaaagcattgagcatgttctccaagatgaatcttcaagaaataccacctttggtctatcagcttctggttctctcctccaagggaagcagaaagagtgttttggaaggaatcatagccttcttcagtgcactagataagcagcacaatgaggaacagagtggtgacgagctattggatgttgtcactgtgccatcaggtgaacttcgtcatgtggaaggcaccattattctacacattgtgtttgccatcaaattggactatgaactaggcagagaactcgtgaaacacttaaaggtaggacagcaaggagattccaataataacttaagtcccttcagcattgctcttcttctgtctgtaacaagaatacaaagatttcaggaccaggtgcttgatcttttaaagacttcggttgtaaagagctttaaggatcttcaactcctccaaggctcaaaatttcttcagaatctagttcctcatagatcttatgtttcaaccatgatcttggaagtagtgaagaatagcgttcatagctgggaccatgttactcagggcctcgtagaacttggtttcattttgatggattcatatgggccaaagaaggttcttgatggaaaaactattgaaaccagcccaagtctttctagaatgccaaaccagcatgcatgtaagctcggagctaatatcctgttggaaacttttaagatccatgagatgatcagacaagaaattttggagcaggtcctcaacagggttgttaccagagcatcttctcccatcagtcatttcttagacctgctttcaaatatcgtcatgtatgcacccttagttcttcaaagttgttcttctaaagtcacagaagcttttgactatttgtcctttctgccccttcagactgtacaaaggctgcttaaggcagtgcagccccttctcaaagtcagcatgtcaatgagagactgcttgatacttgtccttcggaaagctatgtttgccaaccagcttgatgcccgaaaatctgcagttgctgggtttttgctgctcctgaagaactttaaagttttaggcagcctgtcatcctctcagtgcagtcagtctctcagtgtcagtcaggttcatgtggatgttcacagccattacaattctgtcgccaatgaaactttttgccttgagatcatggatagtttgaggagatgcttaagccagcaagctgatgttcgactcatgctttatgaggggttttatgatgttcttcgaaggaactctcagctggctaattcagtcatgcaaactctgctctcacagttaaaacagttctatgagccaaaacctgatctgctgcctcctctgaaattagaagcttgtattctgacccaaggagataagatctctctacaagaaccactggattatctgctgtgttgtattcagcattgtttggcctggtataagaatacagtcatacccttacagcagggagaggaggaagaggaggaggaagaggcattctacgaagacctagatgatatattggagtccattactaatagaatgattaagagtgagctggaagactttgaactggataaatcagcagatttttctcagagcaccagtattggcataaaaaataatatctgtgcttttcttgtgatgggagtttgtgaggttttaatagaatacaatttctccataagtagtttcagtaagaataggtttgaggacattctgagcttatttatgtgttacaaaaaactctctgacattcttaatgaaaaagcgggtaaagccaaaactaaaatggccaacaagacaagtgatagtcttttgtccatgaaatttgtgtccagtcttctcactgctcttttcagagtcttgctatggagatacacttcaattcctacttcagtggaagagtcgggaaagaaagagaaaggaaagagcatctcactgctgtgcttggagggtttacagaaaatattcagtgctgtgcaacagttctatcagcccaagattcagcagtttctcagagctctggatgtcacagataaggaaggagaagagagagaagatgcagatgtcagtgtcactcagagaacagcattccagatccggcaatttcagaggtccttgttgaatttacttagcagtcaagaggaagattttaatagcaaagaagccctcctgctagtcacggttcttaccagtttgtccaagttactggagccctcctctcctcagtttgtgcagatgttatcctggacatcaaagatttgcaaggaaaacagccgggaggatgccttgttttgcaagagcttgatgaacttgctcttcagcctgcatgtttcgtataagagtcctgtcattctgctgcgtgacttgtcccaggatatccacgggcatctgggagatatagaccaggatgtagaggtggagaaaacaaaccactttgcaatagtgaatttgagaacggctgcccccactgtctgtttacttgttctgagtcaggccgagaaggttctagaagaagtggactggctaatcaccaagcttaagggacaagtgagccaagaaaccttatcagtatctccaggtgtgtcagagctccggaggaattccaaaaaatatggaaaagctggtgaagctgtctggttctcatctgacccccctgtgttattctttcatttcttacgtacagaataagagtaagagcctgaactatacgggagagaaaaaggagaaacctgctgccgttgccacagccatggccagagttcttcgggaaaccaagccaatccctaacctcatctttgccatagaacagtatgaaaaatttctcatccacctttctaagaagtccaaggtgaacctgatgcagcacatgaagctcagcacctcacgagacttcaagatcaaaggaaacatcctagacatggttcttcgagaggatggtgaagatgaaaatgaagagggcactgcatcagagcatgggggacagaacaaagaaccagccaagaagaaaaggaaaaaataaatgaaatgcctgagttaatgtg

SEQ ID NO: 197056 - DNA, 3807 bp, Artificial Sequence
  derived and/or modified sequence
atggatcagaagatattgagtctcgccgccgaaaagaccgcggacaagctgcaggagttcctgcaaactctgcgcgaaggagacctgaccaacctattgcagaatcaggcagtcaaagggaaggtggctggcgccctgcttcgggctatttttaaaggatctccatgcagcgaggaagccggaacgctccgccggcggaagatctatacgtgttgcatccagttagtggaaagcggagatctgcagaaggaaatcgcgagtgagatcattgggctgctgatgctcgaagcgcaccattttccaggccctttgctcgtggagttggcaaatgagttcatatctgccgtgcgggaggggagcttagtcaacggcaagtccctggagttgttgcccatcatcttaactgccttggccactaaaaaggaaaacttagcatacggtaagggggttctttccggtgaggaatgtaagaagcagctgattaataccctgtgcagcggtaggtgggatcagcagtacgttatccagctgacgagtatgttcaaggatgtgcccctgacggctgaggaggtggagttcgtagtcgaaaaagctctttcgatgttttccaaaatgaatctgcaagagatcccccccttagtgtaccaactgctggtgctttccagtaaagggtccagaaaaagcgtcctggagggcatcatcgcgttcttcagtgccctagataagcaacacaacgaggagcagtctggtgatgagcttttggatgtagtgaccgtaccgtccggagaacttaggcacgtggagggaactattatccttcatattgtgtttgctataaaattagattacgaactcgggcgagaactggtcaaacatctcaaggtgggtcagcagggagacagtaataataacctttccccattctctattgccctgctgttatccgtgacacggatccaacgcttccaggatcaggtcctcgacctcctgaaaacttctgtggtcaagagttttaaagatctgcagctcctgcagggaagcaagttccttcaaaatctggttccacatcgctcttatgttagcactatgattttggaagtggttaagaactcggtgcactcttgggaccacgtgacacagggactggtggaactgggctttatcctcatggacagttacggacccaaaaaggtgctggacggtaagactatcgagacctctccgtccctatctaggatgcctaaccagcacgcatgtaaactcggcgccaatattctactcgagaccttcaagatccatgagatgattagacaagaaatattagagcaagtgctgaaccgtgtggtaactagggcttcctcccctatatcccactttctggacctactgtccaacatcgtcatgtacgctccgctcgtactgcagagctgctcctctaaagtcaccgaagccttcgattatctgagttttcttcccctgcaaaccgtgcagcgcctattaaaggcggtgcagccgctgctaaaggtgagtatgtcaatgagagattgcctaattctcgtgctgaggaaagccatgtttgccaaccagcttgatgcacgaaagtctgccgttgccgggtttttgctgttgctgaagaacttcaaagtcttgggaagcctcagctctagccaatgctcccagtctctgagcgtttcgcaggtgcacgtggacgttcattcacattataactctgtcgctaacgagacattttgtctggagattatggactcactaaggcggtgcctctcacagcaggcagacgtgcgcctgatgttgtatgaggggttttacgatgtgctcaggcgcaattctcaactggccaattcggtgatgcaaacgctgctcagtcaattgaaacagttctacgaacctaaacccgatttactccctcctctcaaactggaggcgtgcatcctgacgcagggagacaagatcagtttgcaggaaccgctggactacttattgtgttgcatacaacactgcctcgcatggtataagaatactgttatcccccttcagcaaggggaggaggaagaagaggaagaagaagctttttatgaagacttagacgacatcctggaatctatcaccaacagaatgattaagagtgagctggaagatttcgagcttgataagtcagctgatttttcgcagtccacctcaatcggcatcaagaacaatatatgtgcattcctcgtcatgggagtgtgcgaggtcctgattgaatataatttttctatctcctctttttctaaaaacagattcgaggacattctgagtctgtttatgtgctacaagaaactgtctgacattctgaacgagaaggccggcaaggcaaagacgaaaatggccaacaagaccagcgatagcctgctctccatgaaatttgtcagctcactgttgaccgctctgtttcgagtgctgctgtggaggtatacttcgatccccacgtcagtggaggagagcggcaaaaaagaaaaaggaaagagtattagcctgctttgcctcgagggtctgcaaaagatcttcagtgcagtgcagcagttctaccagccaaagatccagcagttcctccgcgcgcttgacgttaccgataaggagggggaggagcgtgaggatgctgacgtatccgtgacccagcgcacagccttccaaattcggcaattccagcggtcactgttgaatttgctgagctcacaagaagaggattttaatagcaaagaggcactcttgttggtaacggtcctgactagtctgtccaagttgctcgaacctagcagcccccagttcgtgcagatgctgagctggacttccaagatttgcaaggagaactcacgcgaagacgcactcttctgtaagtcactaatgaatttactgttttctcttcacgtgtcatacaagtccccagtaattttgcttcgagacctgagccaggacatccacgggcaccttggcgacattgaccaggatgtggaggtggagaaaacaaatcacttcgcaattgttaatctgagaaccgccgccccaaccgtatgcctactggtgctctcacaggctgaaaaagttcttgaagaagtcgattggttgatcacgaaactgaagggccaagtgtcccaggaaacccttagtgaggaggcatcttctcaggccacgttgccaaaccagccggtggaaaaggctatcatcatgcagctcggaacgttgctcacctttttccacgagctggtccagaccgcgttaccctcagggtcatgcgtcgacaccctgcttaaagacctgtgtaagatgtacactactctaaccgcgcttgtgcggtactatctccaagtgtgccagtcatccggcggcatccctaagaacatggagaaactggtgaagctatcaggttctcacttgacccctctgtgctattcattcatatcatacgtgcaaaacaagagcaagtctctgaactatacaggggaaaaaaaagaaaaaccggctgccgttgccactgctatggcccgcgttttaagagaaactaaaccaatccccaacctgatattcgctatcgaacagtacgagaaattcctgattcacctcagcaaaaagtccaaggtgaacctcatgcagcatatgaaactgtcaacctctcgcgattttaagataaagggcaacatcctcgatatggtgttaagagaggatggagaagacgaaaacgaggagggtacagcctccgaacacggcgggcaaaacaaggagcctgctaagaagaaacgcaaaaaatag

SEQ ID NO: 197057 - DNA, 3288 bp, Artificial Sequence
  derived and/or modified sequence
atggatcagaaaatactgagtcttgcagctgagaaaacagccgataaactacaggaatttctccaaacactcagggagggcgatctgaccaatctacttcagaaccaagcagtgaaagggaaggtggcgggggccctcctccgcgccattttcaaagggtcaccatgttcagaggaagcagggactttgcggagacgaaaaatttatacttgctgtatccagctggtggaatcgggcgacctgcagaaagaaattgctagcgagataattggcctactcatgctcgaagcacaccacttcccaggcccactgctcgtagaactcgcgaatgaatttatatcagcagtgcgcgagggatccctagttaacggtaaaagtctggaactactgcccatcatcctcactgcattggctactaaaaaggaaaatttggcttacggaaaaggagtgttgtcaggagaagagtgcaagaagcagttgataaacacactctgttcgggtcgatgggaccagcaatatgttatccagttgaccagcatgtttaaagatgttcccttgactgccgaagaggttgagtttgtcgtggagaaagccctgtcaatgttctccaagatgaatcttcaggagattcctccactggtgtatcagcttctggtcctttcaagtaaaggcagcagaaagtccgttcttgagggaattatcgccttcttttccgccctggacaaacaacacaatgaggagcagagtggagatgaactgctggacgtggtaactgtcccttctggagagctccgccatgttgaaggcacaatcatcttacatatagtgttcgccattaagctggactacgagctgggacgagagctggtgaagcacttgaaagtggggcagcagggagactccaataacaacctctccccttttagtatagctctgttgctgtccgttaccaggatccaacggtttcaggaccaggtgctcgatttgttgaagacaagcgtagtgaagagctttaaggacctccaactgctgcagggctctaagttccttcagaatctcgtccctcaccgctcctacgtgtctacgatgatacttgaagtagtcaaaaattctgttcatagttgggaccatgtgactcaaggccttgtcgagttgggatttatcctcatggactcctacggccctaagaaggttctggacggcaagaccatagagacatctcccagcttatctcgcatgcccaatcagcacgcttgtaaactgggggcaaatattttgctggaaaccttcaagattcacgagatgattaggcaggagattctagagcaagtgttgaacagagtggtcacacgtgcctcttcacccattagccactttctagacctgctgagcaatatcgtgatgtacgctccccttgtccttcagtcctgttctagcaaggtgactgaggcattcgattacctctcatttctgcccctacagacggtacagagattgctgaaggctgtgcaaccactcttgaaagtgagcatgtctatgagagactgtctgatcctggtccttcggaaggccatgttcgccaatcagttagacgcacgcaaatctgctgtcgccgggttcctgttgctgctgaaaaactttaaggttttaggttccctcagctcatcccagtgctctcaaagcctcagtgtcagccaggtgcatgttgacgtccattctcattataatagcgtggcaaacgaaacattttgtttggagattatggactctcttagacgctgtctctcccaacaggcagacgtccgcctaatgctgtacgagggattctatgacgtgctgaggcgaaactctcagcttgctaatagcgttatgcaaaccttactctctcagctgaagcaattctacgagccgaaaccagacctccttccacccctgaagttggaggcttgtattctgacgcagggagataagatttcattgcaagagccactcgattacctcttgtgctgtatacagcattgcctggcttggtataagaacactgttattcctcttcagcagggcgaagaggaggaagaagaggaggaagctttctacgaggacctcgatgatatactcgagagtatcaccaaccgaatgatcaagagcgaacttgaagattttgaattggacaaaagtgccgatttttcacaaagtaccagcatcggtatcaagaacaacatctgtgcttttctggttatgggtgtgtgcgaagtgctgatcgagtataacttttcaatatcaagcttctcaaagaatcggtttgaagatattctgtctcttttcatgtgctataaaaagcttagcgatatcctgaacgagaaagcaggcaaggcaaaaactaagatggctaataaaactagtgatagtctgctgagcatgaagtttgtgtcatctctcctgactgccttgtttagagtgctgctgtggcggtacacctctattcctacttccgtcgaagaatccggtaagaaggagaaaggaaaatctatcagtttattgtgcctcgagggacttcagaagatcttttctgctgtgcaacagttttaccagccaaagattcaacagtttctgcgggcgcttgacgtcactgacaaagaaggagaagaacgtgaggatgctgatgtctccgttacccaaaggacggccttccaaatacgacagtttcagcggtccctccttaatttactctctagtcaggaagaggattttaatagtaaggaagcgttactactggttacggttttaacaagtctgagcaagctgctggaaccgagtagccctcagtttgtgcagatgctttcatggacatctaagatctgcaaagagaacagtcgtgaggatgctctcttttgtaagagtcttatgaacctattgttcagccttcacgtcagctataagagccctgtgatcctactccgggacctcagccaagacattcacgggcatctcggcgacatcgatcaggatgtggaagtagagaaaaccaatcacttcgccattgtgaatctgcggactgcggccccaacggtgtgcctgctagtcctttcacaggccgagaaagtactggaggaggttgattggctgatcaccaagttgaaaggacaggttagccaggagacactctcagtaagccctggcgtgagcgaactgcgcaggaacagcaaaaagtatggaaaagctggggaagcagtctggttctcctctgacccgccggtcctgttcttccatttcctcagaaccgaatag

SEQ ID NO: 197058 - DNA, 3807 bp, Artificial Sequence
  derived and/or modified sequence
atggaccagaagatcctgagcctggccgctgagaagacagctgacaagctgcaggagttcctgcagaccctgcgggagggggacctgaccaacctgctgcagaaccaggccgtgaagggcaaggtggccggggccctgctgcgggccatcttcaagggcagcccctgcagcgaggaggccggcaccctgcggcggaggaagatctacacctgctgcatccagctggtggagagcggggacctgcagaaggagatcgccagcgagatcatcggcctgctgatgctggaggcccaccacttccctggccccctgctggtggagctggccaatgagttcatctctgctgtgcgggagggcagcctggtgaatggcaagagcctggagctgctgcccatcatcctgacagccctggccaccaagaaggagaacctggcctacggcaagggcgtgctgagcggggaggagtgcaagaagcagctgatcaacaccctgtgcagcggccgctgggaccagcagtatgtgatccagctgacctccatgttcaaggatgtgcccctgacagctgaggaggtggagtttgtggtggagaaggccctgtccatgttcagcaagatgaacctgcaggagatcccccccctggtgtaccagctgctggtgctgagcagcaagggcagcaggaagtctgtgctggagggcatcatcgccttcttcagcgccctggacaagcagcacaatgaggagcagagcggagatgagctgctggatgtggtgacagtgcccagcggggagctgcggcacgtggagggcaccatcatcctgcacatcgtgtttgccatcaagctggactatgagctgggccgggagctggtgaagcacctgaaggtgggccagcagggcgacagcaacaacaacctgagccccttcagcatcgccctgctgctgtctgtgacccgcatccagcgcttccaggaccaggtgctggacctgctgaagacctctgtggtgaagagcttcaaggacctgcagctgctgcagggcagcaagttcctgcagaacctggtgccccacaggagctatgtgtccaccatgatcctggaggtggtgaagaacagcgtgcacagctgggaccacgtgacccagggcctggtggagctgggcttcatcctgatggacagctatggccccaagaaggtgctggatggcaagaccatcgagaccagccccagcctgagcaggatgcccaaccagcacgcctgcaagctgggcgccaacatcctgctggagaccttcaagatccacgagatgatccggcaggagatcctggagcaggtgctgaacagagtggtgacccgggccagcagccccatcagccacttcctggacctgctgagcaacatcgtgatgtatgcccccctggtgctgcagagctgcagcagcaaggtgacagaggcctttgactacctgtccttcctgcccctgcagacagtgcagaggctgctgaaggctgtgcagcccctgctgaaggtgtccatgtccatgagggactgcctgatcctggtgctgaggaaggccatgtttgccaaccagctggatgccaggaagtctgctgtggccggcttcctgctgctgctgaagaacttcaaggtgctgggcagcctgagcagcagccagtgcagccagagcctgtctgtgtcccaggtgcacgtggatgtgcacagccactacaacagcgtggccaatgagaccttctgcctggagatcatggacagcctgcggcgctgcctgagccagcaggctgatgtgcggctgatgctgtatgagggcttctatgatgtgctgcggaggaacagccagctggccaacagcgtgatgcagaccctgctgagccagctgaagcagttctatgagcccaagccagacctgctgccccccctgaagctggaggcctgcatcctgacccagggcgacaagatcagcctgcaggagcccctggactacctgctgtgctgcatccagcactgcctggcctggtacaagaacacagtcatccccctgcagcagggcgaggaggaggaggaggaggaggaggccttctatgaggacctggatgacatcctggagagcatcaccaacaggatgatcaagtctgagctggaggactttgagctggacaagtctgctgacttcagccagagcaccagcatcggcatcaagaacaacatctgtgccttcctggtgatgggcgtgtgtgaggtgctgattgagtacaacttcagcatcagcagcttcagcaagaacagatttgaggacatcctgagcctcttcatgtgctacaagaagctgagtgacatcctgaatgagaaggccggcaaggccaagaccaagatggccaacaagaccagtgacagcctgctgtccatgaagtttgtgagcagcctgctgacagccctcttccgggtgctgctgtggagatacaccagcatccccacctctgtggaggagagcggcaagaaggagaagggcaagagcatcagcctgctgtgcctggagggcctgcagaagatcttctctgctgtgcagcagttctaccagcccaagatccagcagttcctgcgggccctggatgtgacagacaaggagggggaggagagagaagatgctgatgtgtctgtgacccagaggacagccttccagatccggcagttccagaggagcctgctgaacctgctgagcagccaggaggaggacttcaacagcaaggaggccctgctgctggtgacagtgctgaccagcctgagcaagctgctggagcccagcagcccccagtttgtgcagatgctgtcctggaccagcaagatctgcaaggagaacagccgggaggatgccctcttctgcaagagcctgatgaacctgctcttcagcctgcacgtgtcctacaagagccctgtgatcctgctgcgggacctgagccaggacatccacggccacctgggggacatcgaccaggatgtggaggtggagaagaccaaccactttgccatcgtgaacctgaggacagctgcccccaccgtgtgcctgctggtgctgagccaggccgagaaggtgctggaggaggtggactggctgatcaccaagctgaagggccaggtgtcccaggagaccctgtctgaggaggccagcagccaggccaccctgcccaaccagcctgtggagaaggccatcatcatgcagctgggcaccctgctgaccttcttccacgagctggtgcagacagccctgcccagcggcagctgtgtggacaccctgctgaaggacctgtgcaagatgtacaccaccctgacagccctggtgcgctactacctgcaggtgtgccagagcagcggcggcatccccaagaacatggagaagctggtgaagctgagcggcagccacctgacccccctgtgctacagcttcatctcctatgtgcagaacaagagcaagagcctgaactacaccggggagaagaaggagaagccagctgctgtggccacagccatggcccgggtgctgcgggagaccaagcccatccccaacctgatctttgccatcgagcagtatgagaagttcctgatccacctgagcaagaagagcaaggtgaacctgatgcagcacatgaagctgagcaccagccgggacttcaagatcaagggcaacatcctggacatggtgctgcgggaggatggagaagatgaaaatgaggagggcacagccagcgagcacggcggccagaacaaggagcccgccaagaagaagaggaagaagtag

SEQ ID NO: 197059 - DNA, 3288 bp, Artificial Sequence
  derived and/or modified sequence
atggaccagaagatcctgagcctggccgctgagaagacagctgacaagctgcaggagttcctgcagaccctgcgggagggggacctgaccaacctgctgcagaaccaggccgtgaagggcaaggtggccggggccctgctgcgggccatcttcaagggcagcccctgcagcgaggaggccggcaccctgcggcggaggaagatctacacctgctgcatccagctggtggagagcggggacctgcagaaggagatcgccagcgagatcatcggcctgctgatgctggaggcccaccacttccctggccccctgctggtggagctggccaatgagttcatctctgctgtgcgggagggcagcctggtgaatggcaagagcctggagctgctgcccatcatcctgacagccctggccaccaagaaggagaacctggcctacggcaagggcgtgctgagcggggaggagtgcaagaagcagctgatcaacaccctgtgcagcggccgctgggaccagcagtatgtgatccagctgacctccatgttcaaggatgtgcccctgacagctgaggaggtggagtttgtggtggagaaggccctgtccatgttcagcaagatgaacctgcaggagatcccccccctggtgtaccagctgctggtgctgagcagcaagggcagcaggaagtctgtgctggagggcatcatcgccttcttcagcgccctggacaagcagcacaatgaggagcagagcggagatgagctgctggatgtggtgacagtgcccagcggggagctgcggcacgtggagggcaccatcatcctgcacatcgtgtttgccatcaagctggactatgagctgggccgggagctggtgaagcacctgaaggtgggccagcagggcgacagcaacaacaacctgagccccttcagcatcgccctgctgctgtctgtgacccgcatccagcgcttccaggaccaggtgctggacctgctgaagacctctgtggtgaagagcttcaaggacctgcagctgctgcagggcagcaagttcctgcagaacctggtgccccacaggagctatgtgtccaccatgatcctggaggtggtgaagaacagcgtgcacagctgggaccacgtgacccagggcctggtggagctgggcttcatcctgatggacagctatggccccaagaaggtgctggatggcaagaccatcgagaccagccccagcctgagcaggatgcccaaccagcacgcctgcaagctgggcgccaacatcctgctggagaccttcaagatccacgagatgatccggcaggagatcctggagcaggtgctgaacagagtggtgacccgggccagcagccccatcagccacttcctggacctgctgagcaacatcgtgatgtatgcccccctggtgctgcagagctgcagcagcaaggtgacagaggcctttgactacctgtccttcctgcccctgcagacagtgcagaggctgctgaaggctgtgcagcccctgctgaaggtgtccatgtccatgagggactgcctgatcctggtgctgaggaaggccatgtttgccaaccagctggatgccaggaagtctgctgtggccggcttcctgctgctgctgaagaacttcaaggtgctgggcagcctgagcagcagccagtgcagccagagcctgtctgtgtcccaggtgcacgtggatgtgcacagccactacaacagcgtggccaatgagaccttctgcctggagatcatggacagcctgcggcgctgcctgagccagcaggctgatgtgcggctgatgctgtatgagggcttctatgatgtgctgcggaggaacagccagctggccaacagcgtgatgcagaccctgctgagccagctgaagcagttctatgagcccaagccagacctgctgccccccctgaagctggaggcctgcatcctgacccagggcgacaagatcagcctgcaggagcccctggactacctgctgtgctgcatccagcactgcctggcctggtacaagaacacagtcatccccctgcagcagggcgaggaggaggaggaggaggaggaggccttctatgaggacctggatgacatcctggagagcatcaccaacaggatgatcaagtctgagctggaggactttgagctggacaagtctgctgacttcagccagagcaccagcatcggcatcaagaacaacatctgtgccttcctggtgatgggcgtgtgtgaggtgctgattgagtacaacttcagcatcagcagcttcagcaagaacagatttgaggacatcctgagcctcttcatgtgctacaagaagctgagtgacatcctgaatgagaaggccggcaaggccaagaccaagatggccaacaagaccagtgacagcctgctgtccatgaagtttgtgagcagcctgctgacagccctcttccgggtgctgctgtggagatacaccagcatccccacctctgtggaggagagcggcaagaaggagaagggcaagagcatcagcctgctgtgcctggagggcctgcagaagatcttctctgctgtgcagcagttctaccagcccaagatccagcagttcctgcgggccctggatgtgacagacaaggagggggaggagagagaagatgctgatgtgtctgtgacccagaggacagccttccagatccggcagttccagaggagcctgctgaacctgctgagcagccaggaggaggacttcaacagcaaggaggccctgctgctggtgacagtgctgaccagcctgagcaagctgctggagcccagcagcccccagtttgtgcagatgctgtcctggaccagcaagatctgcaaggagaacagccgggaggatgccctcttctgcaagagcctgatgaacctgctcttcagcctgcacgtgtcctacaagagccctgtgatcctgctgcgggacctgagccaggacatccacggccacctgggggacatcgaccaggatgtggaggtggagaagaccaaccactttgccatcgtgaacctgaggacagctgcccccaccgtgtgcctgctggtgctgagccaggccgagaaggtgctggaggaggtggactggctgatcaccaagctgaagggccaggtgtcccaggagaccctgtctgtgtccccaggagtgtctgagctgcggaggaacagcaagaagtatggcaaggccggggaggccgtgtggttcagcagtgacccccctgtgctcttcttccacttcctgaggacagaatag

SEQ ID NO: 197060 - DNA, 3807 bp, Artificial Sequence
  derived and/or modified sequence
atggaccagaagatcctgagcctggccgccgagaagaccgccgacaagttgcaagaattcctgcagactctgcgggaaggggaccttacaaaccttctgcagaatcaggctgttaagggaaaagtggccggggctctgctccgcgcaattttcaaaggcagtccttgtagcgaggaggctgggacccttcgcagaagaaaaatttacacatgctgtatacagctcgtagagtcaggcgatctccaaaaggagatcgcctcagagataatcggtttactcatgctggaagcccaccattttcccgggcccctgctggttgaactggcaaatgagttcatctcggctgtgagggagggatccctcgtcaacggcaaaagtttggagttgctcccaatcattcttactgctttagcaactaaaaaggagaatctggcctatgggaaaggcgttctgtcaggcgaggagtgtaaaaaacagctgatcaatacactgtgctccggtcggtgggaccagcagtacgtgattcaactcacatcgatgtttaaggatgttccacttactgccgaggaggtagaattcgtcgtggagaaggctctctctatgttcagcaaaatgaacctccaagaaatacctccactagtgtaccagctgctcgtgctatctagcaaaggatctaggaagtctgttcttgagggcattattgccttcttttctgccctggataaacagcacaatgaggaacaatctggagacgaacttttggatgtggtcaccgttcccagcggggaactgaggcacgtggagggaactattattctccacatagtgtttgctattaaattagattacgaactgggcagggaactggtgaagcaccttaaagtagggcagcagggcgacagcaacaacaacttgagcccgttttctatcgctctgctgcttagcgtgactagaatccagaggtttcaggaccaagttctggacctcctgaagacttctgtggtaaagagcttcaaggatctgcagctactccagggatcgaagttccttcagaatcttgtcccacatagatcgtacgtgagcacaatgatactcgaagtcgttaagaactctgtgcacagttgggatcacgtgactcaggggctcgtagaactgggcttcatccttatggactcatacggcccaaagaaagtgcttgacgggaagacaatcgagacatccccaagtctgtcaaggatgcccaatcagcacgcatgtaaacttggtgcgaacatactgctcgagacctttaaaattcatgaaatgatccgccaggagatcctcgaacaggtgctgaaccgcgtggtgacacgtgcctcctctcccatttcacattttctggatctgcttagtaacatagtcatgtacgcccccctcgtgctacaaagttgttcttctaaggtaactgaagctttcgactatctgtctttcctgcctttacagactgtgcagcggctgttgaaagctgtacagcctcttctgaaagtcagcatgtctatgagggactgtctgatacttgtgcttaggaaagcaatgtttgccaatcagctggacgctcgcaagagtgccgtcgccgggttcctactgctgctgaagaactttaaagtcctgggatcgttgtcgtcaagccagtgttctcagtctctgagtgttagtcaggttcatgtggatgttcattcccactacaattctgtggctaacgaaaccttttgtttagagatcatggactccctccgccgctgcctgtctcagcaagctgacgtacggctgatgttatacgaaggcttctacgacgtgctgcgacgaaattcccagctggcaaactccgtgatgcagaccctgctgtcacagctcaaacagttctatgaaccgaagccagacttgttgcccccacttaagctggaagcctgcattctcacacagggtgacaagatctccctacaagaacctctggattacttgctgtgttgcatccaacattgcctggcctggtataagaacaccgtgattcccctgcagcaaggtgaggaggaagaggaggaggaggaagctttctacgaagatctggacgacatactggaatcaattaccaatcggatgataaaaagtgagcttgaagactttgagctggataagtccgcagatttcagtcagtccacttctattgggatcaagaacaatatctgcgccttcctggtgatgggcgtgtgcgaagtcctgatcgagtacaacttctcgatcagcagctttagtaagaatcgcttcgaggacatcctgagcctgttcatgtgttacaagaagcttagcgacattctgaacgaaaaggccgggaaggccaaaactaagatggctaataaaacgagcgactctctgctgagtatgaagtttgtgtccagtttgctgaccgccctgttccgagtcctgctgtggcggtacacatccatccctacaagtgtggaagaaagcggaaagaaggaaaagggcaagtctatctcacttctgtgtctggagggccttcaaaaaattttctctgccgtgcagcaattctatcagccaaagatccagcagtttttgcgtgccctcgacgtcaccgataaggagggcgaggaaagggaggacgctgatgtttcagtaactcagagaacagcattccaaattcggcaatttcaaagatctctgctcaaccttctgtctagccaagaagaggactttaactcaaaagaagccttgctgttagtgacagtcctcaccagtctttcaaagttactggaaccctcatcaccccagttcgtgcaaatgctaagctggaccagcaagatctgcaaagaaaatagccgggaagacgccctgttttgcaaatcgctaatgaacctcctcttctcactgcatgtatcgtacaaatcacccgtaatcttgctgagagatttgtctcaagatattcatgggcatctgggagacatcgatcaagacgtggaagtagagaagacgaaccatttcgccattgtgaaccttagaaccgctgctccaaccgtttgcttgttagtgctgagccaggcagagaaagtgctggaagaggttgactggctgatcacaaaactgaagggacaggtgtcacaggaaactttatctgaggaggcgtcttcccaggcaactctgcccaaccagcctgtagaaaaggctataatcatgcaactgggtaccctcctgactttttttcacgagctggtccagacagccctgccttctggatcgtgtgtggataccttattaaaagacttgtgcaaaatgtatacaaccctgaccgcacttgtaaggtattacctccaggtatgccaatcctcgggtggcatccctaagaatatggaaaagttggtgaaactcagcggatcgcacttaaccccactgtgctactcttttatcagctatgtccaaaacaaaagtaagtcattaaactataccggagagaaaaaggaaaagcccgcggcggtcgcaacagcgatggcccgtgtcctccgggaaacgaagcccataccgaacttgatatttgctatcgagcagtatgaaaagtttttgatccatttaagcaagaagtcaaaagtgaatctgatgcagcatatgaaactgagcacttctagggatttcaagattaaagggaatattttagacatggtactgagagaggatggtgaggacgaaaatgaagaaggcacagcatctgagcacggcggtcagaataaggagcccgccaagaaaaagcgcaagaaatag

SEQ ID NO: 197061 - DNA, 3288 bp, Artificial Sequence
  derived and/or modified sequence
atggaccagaagatcctgagcctggccgccgagaagaccgccgacaagcttcaggaatttctccaaactctgagggaaggcgatttaactaacctactgcagaaccaggccgtgaaagggaaagttgccggcgctctgctccgggctatatttaaagggtcaccttgctccgaggaggctggtacactgaggcgacggaagatatatacctgttgtatccagctggtggagtctggggatcttcagaaggaaatagctagcgagatcataggtctgttgatgctggaggctcaccattttccagggccgctccttgtggagctggcgaatgaattcatctcggctgttagagagggatctctcgtgaacggcaagagcctagagctgctgcccattattttgaccgccctagcaaccaaaaaagagaacctagcatacgggaagggcgtcctcagtggagaagaatgtaagaaacaattaataaacacattgtgcagcgggagatgggatcagcagtatgtgattcagttgacatcgatgtttaaggatgtgccgctcacagcggaggaagttgaattcgttgttgaaaaggcacttagtatgttttccaaaatgaatcttcaggaaattcctccactggtgtatcagcttctcgtgctgtccagtaaaggaagcaggaaaagcgttctggaaggcatcatcgctttcttctctgccctggacaagcaacataacgaggagcagtctggcgatgagctgttagatgtggtcactgtgcccagcggagagctgagacacgtggaaggcactatcatcctgcacatcgtcttcgctattaagctggactacgagctgggaagggagctcgtgaagcatcttaaggtgggccagcaaggcgatagtaacaacaatctcagtcctttctcaatagcactcctcttgtcagtaacgcggatccagcggttccaagatcaggtcctcgacctcctcaagacatcagtggtgaagtcgttcaaagatctgcagctcctgcaaggatctaaattcctgcagaacctcgttcctcatcggagctatgtttctactatgattctggaagtagtcaagaattccgtgcatagttgggatcatgttacccagggactggtagagctgggctttatacttatggactcctacggccctaaaaaggtcctggatggtaaaacgattgaaactagtccttccttgagtaggatgccaaaccaacacgcctgcaagctgggcgctaatatcctgctggaaacgttcaagatccacgaaatgattcgccaagaaatcttagagcaggttttgaatcgagtcgtcacccgtgcttctagtcctatctctcacttcctagatctgctgtcaaacattgtgatgtacgccccactggtgttacagtcttgttccagcaaggtaaccgaagctttcgattacctctccttcctacctctacaaacggtgcagcgcctgctgaaggcagtgcaaccacttctgaaggtttctatgagtatgcgcgactgcctgatccttgttcttcgaaaagcaatgttcgccaaccagttggatgcaagaaagagtgccgtggcggggtttcttctgcttctcaaaaattttaaggtgctggggtcactgagctcaagtcaatgtagccagtctctctcggttagtcaggtgcacgtggacgtgcattctcattataactctgtcgccaatgagactttctgccttgaaatcatggattccctccggcgttgtttatctcagcaagccgatgttcggctgatgctttatgagggtttctatgatgttttgagaaggaactctcagttggcaaattccgttatgcagactctgttgtcccagcttaaacagttctacgaaccaaaaccagacctactgccgcctctcaagctggaggcctgcatcctaactcagggggataaaataagtttacaggaaccactcgactacctgctatgttgcatccagcactgtctggcttggtacaaaaatacagttattccccttcaacagggggaggaggaagaagaggaggaagaggcgttctatgaggacctagacgatatcctggagagtatcaccaacagaatgatcaagagtgagctcgaagattttgagctggataaatcggccgatttttcccagagtacatcaattggaatcaaaaataacatttgcgcgtttctggttatgggggtttgtgaagtcctgattgagtataacttttcaattagctcattttcaaaaaataggttcgaggacattctgagcctcttcatgtgctataaaaaactgtctgatattctcaacgaaaaagctgggaaagccaagacaaaaatggctaacaagacctcggacagcttgctgtcaatgaaattcgtctctagcttgctgaccgccttgtttcgtgtactgctctggagatatacaagcataccaacatccgtagaagaatcgggcaagaaagaaaaaggaaaatcgattagccttctctgtttggaaggacttcagaagattttcagtgcagtgcagcagttttatcagcctaaaatacagcagtttctgcgagcattggatgttactgacaaggaaggcgaggaaagagaagatgctgatgtgtctgttacccaacgcactgcttttcagataaggcagttccagagaagtttgttgaatctcctctcctctcaggaagaagactttaacagcaaagaggcccttctgctagtgactgtcttaacatctctgtcaaaactccttgagccgagcagcccacaattcgtgcagatgcttagttggacctcaaagatttgtaaagagaactcccgagaggatgcattgttctgcaagtctctgatgaacctgctgttcagccttcacgtttcgtacaaatctccagtgatcctgcttagagacctgagccaggatattcatggtcacctcggcgatattgaccaggatgtggaggttgagaaaaccaaccatttcgcgatagtgaaccttaggaccgccgcccctacagtttgtctgcttgtcctgagtcaggccgagaaagttctggaggaagtcgactggctcatcaccaagcttaagggacaggtgtcccaggagaccctcagcgtgtcgcccggtgtgtccgagctaagaagaaactcaaagaagtatggcaaggcaggagaggccgtatggtttagttctgacccgcccgttctattcttccactttcttcggacagagtag

SEQ ID NO: 197062 - DNA, 3807 bp, Artificial Sequence
  derived and/or modified sequence
atggatcaaaagatattatccttggctgcggagaaaacggccgacaagcttcaggaattcctgcaaactctccgggagggggacctgacaaatttactgcagaaccaggccgtgaaggggaaagttgccggtgctctcctgcgcgcaatcttcaagggctccccctgcagtgaggaggcagggactctacgtaggagaaaaatctacacctgttgcatccaactggtcgagtccggggatctccagaaggagattgcaagcgagatcattggcctgctcatgctggaggcacatcacttcccaggtccactactggttgaactggctaacgagttcatcagcgccgtcagagaaggctcgttagtgaatgggaaaagcctagaacttttgcccataattctgacggccctggcaacaaagaaggaaaatttggcgtacggaaagggagttctctctggtgaagagtgtaaaaagcaactcatcaacacactgtgctccggacgatgggaccagcagtatgttatccagctaacatctatgttcaaagatgtacctctgaccgccgaagaagtggagttcgtggtagaaaaagctctttccatgttttcaaagatgaatctgcaggagattcctcctctggtataccagctgctggtgttatcgtcgaagggttcacgcaaaagcgtgctggagggaattatcgcctttttctccgctttagataaacaacataatgaggagcagtccggggatgagcttttggacgtagttacagttccaagcggcgaactacggcacgtggagggcaccattatactccacatcgttttcgcgatcaagctcgactacgaattagggagagagctcgttaagcatctgaaagtgggccagcagggcgacagcaataataacttatcccccttcagcatcgccctcctcctgtcggtaacgaggattcagagattccaggatcaggtacttgatttattaaaaacctctgtagtgaagtcattcaaagatctgcagttactgcaggggtccaaatttctccagaatctggtgccccaccgttcctacgtgagcacaatgattctcgaggttgtaaaaaatagtgtacactcctgggaccatgtgacacagggactagtggagctcggatttatactgatggactcctacggccctaagaaagtcctggacggcaagaccatcgagaccagtccatccctgtcacgcatgcccaaccagcacgcgtgtaagctgggcgctaatatcctgctggaaacatttaagattcacgaaatgatccggcaagagatcctggagcaggtgctgaatagagtcgtcactcgagcatcttctcctatcagccatttcttagatttgctcagcaacattgttatgtatgcgcctctggtcctgcaaagctgcagcagcaaggtcacagaggccttcgactacctttcttttctccctctgcaaaccgtccaaaggctcctgaaggcggtccagccattgctcaaagtatccatgtcaatgcgtgactgcctcatcctagtcttaagaaaggccatgtttgctaatcagctggatgccagaaagtccgccgttgcgggattcctgctacttctgaagaatttcaaggttctcgggagccttagcagctcccagtgctcccagagcctgtccgtgtctcaagtccatgtggacgtgcactctcactacaatagtgtcgctaacgaaaccttttgcctggaaatcatggattctcttagacgctgtctcagccagcaggccgacgtgcggctgatgctgtatgaaggcttttatgatgtgctgcggagaaacagccaactcgctaatagcgtgatgcagactctacttagccagcttaaacagttctacgaacctaaacctgatctcctgcctcctctgaaattggaagcatgcattctcacccagggggacaaaattagcctccaggaacccctcgactacttgctatgctgcattcagcattgtctggcctggtataagaacaccgtgattccactgcagcaaggtgaggaggaggaagaagaggaggaggctttctacgaagatctagacgatatcctggaatcaatcacaaatcgtatgatcaaatccgagctggaagattttgagcttgacaagtcggctgacttcagccagtccacttccataggcatcaaaaataatatttgcgcgttcttagtcatgggggtctgcgaggttcttatagaatacaatttctccatctctagcttcagtaaaaacaggtttgaagacattttaagtctctttatgtgctataaaaaactttccgacatcttgaatgagaaggcgggaaaggccaaaaccaagatggccaacaaaacatcagatagtctgttgtccatgaagttcgtgagctcgttgctgactgcattgttccgcgtcttgctgtggaggtacacttcgatacccactagcgtggaagaaagcggaaaaaaggaaaagggcaagtccatctcattactgtgcctggagggcctccaaaagatattctctgccgtgcagcagttctaccagccgaagatacagcagttcctgagggcccttgacgtcacagacaaggaaggtgaagagcgggaggatgcagatgtgtccgtgacccagcgtaccgcatttcagataaggcagttccaaaggtctctgctgaatctcttgagctcacaagaggaggacttcaattctaaggaggctctgttactcgttacagtacttacgtctctcagcaagttactggaaccctccagccctcagttcgtccagatgttatcatggacatcgaaaatctgtaaggaaaactctcgcgaagatgccctattctgtaagagcctgatgaatctgttgtttagcctccacgtgtcctataaatcccccgttatccttctcagggacctttcacaggacatccacggtcaccttggcgatattgaccaggacgttgaggtggagaaaactaaccactttgccattgtcaatcttcggacagccgcacccaccgtgtgcttacttgttctgtcgcaggcagaaaaggtgttggaagaagtggattggttgattaccaagttgaagggccaggtgtcccaagagaccctgtccgaggaggcttcatcacaagctacccttccgaatcagcccgtggagaaggccattattatgcagctgggcacgttactaaccttttttcatgagctggttcagacggccctgccttccggaagctgcgttgacaccctgctcaaagacctatgcaaaatgtatacaacactcaccgctctggtaagatattacctgcaagtgtgccaaagtagcgggggtatccctaaaaatatggaaaagctggtcaagctgagcgggagtcatctcacaccgttatgttacagctttattagctacgtgcagaacaagtccaagtctctgaattacaccggggaaaaaaaagagaaacctgccgcagttgccaccgccatggcacgggtgttgagagagaccaagccgatacccaacttaatctttgcaatagaacagtacgagaaatttctgatccacctttccaaaaagagtaaagtcaacctcatgcaacatatgaaactgagcacaagtagagactttaagatcaagggtaatattttagatatggtgttaagagaagatggtgaggatgaaaacgaagagggcactgcttctgagcacgggggacagaacaaggagcccgctaaaaaaaagagaaagaagtag

SEQ ID NO: 197063 - DNA, 3288 bp, Artificial Sequence
  derived and/or modified sequence
atggaccagaagatattgagcttagcagccgagaagactgcagataagctccaagaattcttacagacccttagggagggcgacctgaccaacctgctgcaaaaccaggcagtcaagggaaaagtcgctggggcactgttgagagctatctttaaggggtccccctgctctgaggaggctggtacactgaggcggcgaaaaatttacacctgttgcatccagctcgttgaaagcggggacctgcagaaggaaatcgcatccgaaatcattggtctcctaatgttggaagctcatcacttcccaggcccactcctggttgagctggcaaacgagttcatttccgcagttagggagggatccttagtaaatggaaagagcctggaactgcttccgatcatcttaacagctttggctacaaaaaaagagaatctggcatacggaaagggcgtcctctcgggagaggaatgtaaaaagcaactgattaacactctgtgcagcggacgatgggatcaacaatatgtcattcagctaacttccatgtttaaggacgtcccgctgactgccgaggaagtcgaattcgtcgtcgagaaagctctgtccatgttctctaagatgaatctgcaggaaatcccacctctcgtttaccagctcctggtgctgtccagtaaagggtctaggaagagtgtgcttgaagggattatcgcctttttctctgccttagacaaacagcacaacgaagagcagtctggggatgagctgcttgacgttgttacagtaccatctggagaactgcggcacgtcgaaggtaccattatattgcatatcgtgtttgccatcaaattggactacgagttgggtagagagctggtgaagcacttgaaggtgggacagcagggggactcgaataacaacctgagcccttttagcattgcattgctcctcagcgtgactcgcatccagagatttcaggaccaggtactcgacctgctcaagacaagcgtggtaaagtctttcaaggatctgcagttactgcagggttccaaattcctgcagaatctggtgcctcaccggtcctacgtttcaacaatgatcttggaggtggttaaaaacagcgtgcactcctgggaccacgtcacgcagggccttgtagaattggggttcatattaatggattcatacggcccaaaaaaagtcctcgatggtaaaacaattgagacaagtccttccctcagccggatgcctaatcaacatgcgtgtaaacttggcgcaaacattctactcgagacatttaaaatccatgaaatgattcgccaggaaatcctggagcaggtgctgaaccgagttgtgacccgggcatcttccccaatatcacacttccttgatctcctctcaaatatagttatgtacgccccattggttctgcagtcctgtagctccaaagtgacagaagctttcgactacttgtcctttctccctctccagaccgtgcagcgcctcctcaaggccgttcagcccctgcttaaagtatccatgtccatgagggactgcctgatactggttctgcgaaaggccatgttcgctaatcagctggacgccagaaagagcgctgtagccggattccttctcctgttgaagaatttcaaggtcctcggcagcctgtcctccagccagtgcagccagtccttgtctgtgagtcaggttcatgttgacgttcactcacactataacagcgttgccaatgagactttttgcctggaaataatggattctcttcgcagatgcctctcccagcaggctgatgtaaggttgatgttgtacgaaggcttctacgacgttctacgcagaaactcccagctcgcaaattctgtcatgcaaactttattaagccaactaaagcaattttacgagccgaagcctgacttactgccgcctctgaagttggaagcatgtatcctgacgcagggagacaaaatctcactgcaggagcctctggattatctgctttgttgtattcaacattgcctagcttggtataagaacactgtgatccccctccagcaaggcgaggaagaggaagaagaagaagaagccttctacgaggatttggatgacatcctggagagtatcacgaaccgaatgattaagtctgagttggaagactttgaacttgacaagagtgctgacttcagtcagagcacctctattggcattaagaacaatatttgtgcatttttggtaatgggggtctgcgaggtgctgattgagtataacttttctattagctcattcagtaagaaccgctttgaggacatcctcagtctgttcatgtgttataaaaaactgagcgacatactgaacgaaaaggctggtaaggcaaaaacaaaaatggctaataagacctccgattcactgttgtcgatgaaatttgtgagcagcctgttaaccgctctgtttcgcgttctactatggcggtatacgtccatccctacctccgtcgaggagtcggggaagaaggagaagggcaagtccatcagcttactgtgcctggagggactgcagaaaatcttctccgccgtgcagcagttctaccagccgaagatccagcaatttctgcgcgctttggatgtgacggacaaagagggagaggaacgtgaggatgccgatgtgagcgtcacacaaagaaccgcctttcaaatcaggcaatttcagcgatccctgctgaatttactttccagccaggaagaagactttaattctaaggaggcactattgctcgtcactgtgctgacatcactgtccaagttgctggaacccagctcaccacagttcgtgcagatgttgagttggacctctaagatctgtaaagagaactcaagagaggatgccctgttttgcaagagtctgatgaacctcctctttagtcttcatgtgtcctataaatcccctgttatcttattaagagatctctctcaggacatccacggccacctcggggatatagaccaggatgttgaggtcgaaaaaacaaaccatttcgcgatcgttaatctgcgcactgctgcccctaccgtgtgtctactagtcctaagtcaggccgagaaggtcctcgaagaggtggattggcttattactaaactcaaaggacaggtgtcacaagagactctgtcagtgtctcccggtgtgtccgaactgcgcagaaactcgaagaagtatgggaaggctggagaagcagtgtggttcagctccgatccccctgtgctgttcttccacttccttcgtactgaatag

SEQ ID NO: 197064 - DNA, 3807 bp, Artificial Sequence
  derived and/or modified sequence
atggaccagaagatcctgagcctggccgccgagaagaccgccgacaagctgcaggagttcctgcagaccctgagagagggcgacctgaccaacctgctgcagaaccaggccgtgaagggcaaggtggccggcgccctgctgagagccatcttcaagggcagcccctgcagcgaggaggccggcaccctgagaagaagaaagatctacacctgctgcatccagctggtggagagcggcgacctgcagaaggagatcgccagcgagatcatcggcctgctgatgctggaggcccaccacttccccggccccctgctggtggagctggccaacgagttcatcagcgccgtgagagagggcagcctggtgaacggcaagagcctggagctgctgcccatcatcctgaccgccctggccaccaagaaggagaacctggcctacggcaagggcgtgctgagcggcgaggagtgcaagaagcagctgatcaacaccctgtgcagcggcagatgggaccagcagtacgtgatccagctgaccagcatgttcaaggacgtgcccctgaccgccgaggaggtggagttcgtggtggagaaggccctgagcatgttcagcaagatgaacctgcaggagatcccccccctggtgtaccagctgctggtgctgagcagcaagggcagcagaaagagcgtgctggagggcatcatcgccttcttcagcgccctggacaagcagcacaacgaggagcagagcggcgacgagctgctggacgtggtgaccgtgcccagcggcgagctgagacacgtggagggcaccatcatcctgcacatcgtgttcgccatcaagctggactacgagctgggcagagagctggtgaagcacctgaaggtgggccagcagggcgacagcaacaacaacctgagccccttcagcatcgccctgctgctgagcgtgaccagaatccagagattccaggaccaggtgctggacctgctgaagaccagcgtggtgaagagcttcaaggacctgcagctgctgcagggcagcaagttcctgcagaacctggtgccccacagaagctacgtgagcaccatgatcctggaggtggtgaagaacagcgtgcacagctgggaccacgtgacccagggcctggtggagctgggcttcatcctgatggacagctacggccccaagaaggtgctggacggcaagaccatcgagaccagccccagcctgagcagaatgcccaaccagcacgcctgcaagctgggcgccaacatcctgctggagaccttcaagatccacgagatgatcagacaggagatcctggagcaggtgctgaacagagtggtgaccagagccagcagccccatcagccacttcctggacctgctgagcaacatcgtgatgtacgcccccctggtgctgcagagctgcagcagcaaggtgaccgaggccttcgactacctgagcttcctgcccctgcagaccgtgcagagactgctgaaggccgtgcagcccctgctgaaggtgagcatgagcatgagagactgcctgatcctggtgctgagaaaggccatgttcgccaaccagctggacgccagaaagagcgccgtggccggcttcctgctgctgctgaagaacttcaaggtgctgggcagcctgagcagcagccagtgcagccagagcctgagcgtgagccaggtgcacgtggacgtgcacagccactacaacagcgtggccaacgagaccttctgcctggagatcatggacagcctgagaagatgcctgagccagcaggccgacgtgagactgatgctgtacgagggcttctacgacgtgctgagaagaaacagccagctggccaacagcgtgatgcagaccctgctgagccagctgaagcagttctacgagcccaagcccgacctgctgccccccctgaagctggaggcctgcatcctgacccagggcgacaagatcagcctgcaggagcccctggactacctgctgtgctgcatccagcactgcctggcctggtacaagaacaccgtgatccccctgcagcagggcgaggaggaggaggaggaggaggaggccttctacgaggacctggacgacatcctggagagcatcaccaacagaatgatcaagagcgagctggaggacttcgagctggacaagagcgccgacttcagccagagcaccagcatcggcatcaagaacaacatctgcgccttcctggtgatgggcgtgtgcgaggtgctgatcgagtacaacttcagcatcagcagcttcagcaagaacagattcgaggacatcctgagcctgttcatgtgctacaagaagctgagcgacatcctgaacgagaaggccggcaaggccaagaccaagatggccaacaagaccagcgacagcctgctgagcatgaagttcgtgagcagcctgctgaccgccctgttcagagtgctgctgtggagatacaccagcatccccaccagcgtggaggagagcggcaagaaggagaagggcaagagcatcagcctgctgtgcctggagggcctgcagaagatcttcagcgccgtgcagcagttctaccagcccaagatccagcagttcctgagagccctggacgtgaccgacaaggagggcgaggagagagaggacgccgacgtgagcgtgacccagagaaccgccttccagatcagacagttccagagaagcctgctgaacctgctgagcagccaggaggaggacttcaacagcaaggaggccctgctgctggtgaccgtgctgaccagcctgagcaagctgctggagcccagcagcccccagttcgtgcagatgctgagctggaccagcaagatctgcaaggagaacagcagagaggacgccctgttctgcaagagcctgatgaacctgctgttcagcctgcacgtgagctacaagagccccgtgatcctgctgagagacctgagccaggacatccacggccacctgggcgacatcgaccaggacgtggaggtggagaagaccaaccacttcgccatcgtgaacctgagaaccgccgcccccaccgtgtgcctgctggtgctgagccaggccgagaaggtgctggaggaggtggactggctgatcaccaagctgaagggccaggtgagccaggagaccctgagcgaggaggccagcagccaggccaccctgcccaaccagcccgtggagaaggccatcatcatgcagctgggcaccctgctgaccttcttccacgagctggtgcagaccgccctgcccagcggcagctgcgtggacaccctgctgaaggacctgtgcaagatgtacaccaccctgaccgccctggtgagatactacctgcaggtgtgccagagcagcggcggcatccccaagaacatggagaagctggtgaagctgagcggcagccacctgacccccctgtgctacagcttcatcagctacgtgcagaacaagagcaagagcctgaactacaccggcgagaagaaggagaagcccgccgccgtggccaccgccatggccagagtgctgagagagaccaagcccatccccaacctgatcttcgccatcgagcagtacgagaagttcctgatccacctgagcaagaagagcaaggtgaacctgatgcagcacatgaagctgagcaccagcagagacttcaagatcaagggcaacatcctggacatggtgctgagagaggacggcgaggacgagaacgaggagggcaccgccagcgagcacggcggccagaacaaggagcccgccaagaagaagagaaagaagtag

SEQ ID NO: 197065 - DNA, 3288 bp, Artificial Sequence
  derived and/or modified sequence
atggaccagaagatcctgagcctggccgccgagaagaccgccgacaagctgcaggagttcctgcagaccctgagagagggcgacctgaccaacctgctgcagaaccaggccgtgaagggcaaggtggccggcgccctgctgagagccatcttcaagggcagcccctgcagcgaggaggccggcaccctgagaagaagaaagatctacacctgctgcatccagctggtggagagcggcgacctgcagaaggagatcgccagcgagatcatcggcctgctgatgctggaggcccaccacttccccggccccctgctggtggagctggccaacgagttcatcagcgccgtgagagagggcagcctggtgaacggcaagagcctggagctgctgcccatcatcctgaccgccctggccaccaagaaggagaacctggcctacggcaagggcgtgctgagcggcgaggagtgcaagaagcagctgatcaacaccctgtgcagcggcagatgggaccagcagtacgtgatccagctgaccagcatgttcaaggacgtgcccctgaccgccgaggaggtggagttcgtggtggagaaggccctgagcatgttcagcaagatgaacctgcaggagatcccccccctggtgtaccagctgctggtgctgagcagcaagggcagcagaaagagcgtgctggagggcatcatcgccttcttcagcgccctggacaagcagcacaacgaggagcagagcggcgacgagctgctggacgtggtgaccgtgcccagcggcgagctgagacacgtggagggcaccatcatcctgcacatcgtgttcgccatcaagctggactacgagctgggcagagagctggtgaagcacctgaaggtgggccagcagggcgacagcaacaacaacctgagccccttcagcatcgccctgctgctgagcgtgaccagaatccagagattccaggaccaggtgctggacctgctgaagaccagcgtggtgaagagcttcaaggacctgcagctgctgcagggcagcaagttcctgcagaacctggtgccccacagaagctacgtgagcaccatgatcctggaggtggtgaagaacagcgtgcacagctgggaccacgtgacccagggcctggtggagctgggcttcatcctgatggacagctacggccccaagaaggtgctggacggcaagaccatcgagaccagccccagcctgagcagaatgcccaaccagcacgcctgcaagctgggcgccaacatcctgctggagaccttcaagatccacgagatgatcagacaggagatcctggagcaggtgctgaacagagtggtgaccagagccagcagccccatcagccacttcctggacctgctgagcaacatcgtgatgtacgcccccctggtgctgcagagctgcagcagcaaggtgaccgaggccttcgactacctgagcttcctgcccctgcagaccgtgcagagactgctgaaggccgtgcagcccctgctgaaggtgagcatgagcatgagagactgcctgatcctggtgctgagaaaggccatgttcgccaaccagctggacgccagaaagagcgccgtggccggcttcctgctgctgctgaagaacttcaaggtgctgggcagcctgagcagcagccagtgcagccagagcctgagcgtgagccaggtgcacgtggacgtgcacagccactacaacagcgtggccaacgagaccttctgcctggagatcatggacagcctgagaagatgcctgagccagcaggccgacgtgagactgatgctgtacgagggcttctacgacgtgctgagaagaaacagccagctggccaacagcgtgatgcagaccctgctgagccagctgaagcagttctacgagcccaagcccgacctgctgccccccctgaagctggaggcctgcatcctgacccagggcgacaagatcagcctgcaggagcccctggactacctgctgtgctgcatccagcactgcctggcctggtacaagaacaccgtgatccccctgcagcagggcgaggaggaggaggaggaggaggaggccttctacgaggacctggacgacatcctggagagcatcaccaacagaatgatcaagagcgagctggaggacttcgagctggacaagagcgccgacttcagccagagcaccagcatcggcatcaagaacaacatctgcgccttcctggtgatgggcgtgtgcgaggtgctgatcgagtacaacttcagcatcagcagcttcagcaagaacagattcgaggacatcctgagcctgttcatgtgctacaagaagctgagcgacatcctgaacgagaaggccggcaaggccaagaccaagatggccaacaagaccagcgacagcctgctgagcatgaagttcgtgagcagcctgctgaccgccctgttcagagtgctgctgtggagatacaccagcatccccaccagcgtggaggagagcggcaagaaggagaagggcaagagcatcagcctgctgtgcctggagggcctgcagaagatcttcagcgccgtgcagcagttctaccagcccaagatccagcagttcctgagagccctggacgtgaccgacaaggagggcgaggagagagaggacgccgacgtgagcgtgacccagagaaccgccttccagatcagacagttccagagaagcctgctgaacctgctgagcagccaggaggaggacttcaacagcaaggaggccctgctgctggtgaccgtgctgaccagcctgagcaagctgctggagcccagcagcccccagttcgtgcagatgctgagctggaccagcaagatctgcaaggagaacagcagagaggacgccctgttctgcaagagcctgatgaacctgctgttcagcctgcacgtgagctacaagagccccgtgatcctgctgagagacctgagccaggacatccacggccacctgggcgacatcgaccaggacgtggaggtggagaagaccaaccacttcgccatcgtgaacctgagaaccgccgcccccaccgtgtgcctgctggtgctgagccaggccgagaaggtgctggaggaggtggactggctgatcaccaagctgaagggccaggtgagccaggagaccctgagcgtgagccccggcgtgagcgagctgagaagaaacagcaagaagtacggcaaggccggcgaggccgtgtggttcagcagcgacccccccgtgctgttcttccacttcctgagaaccgagtag

SEQ ID NO: 197066 - protein, 421 aa, Artificial Sequence
  derived and/or modified sequence
MWYHRLSHLHSRLQDLLKGGVIYPALPQPNFKSLLPLAVHWHHTASKSLTCAWQQHEDHFELKYANTVMRFDYVWLRDHCRSASCYNSKTHQRSLDTASVDLCIKPKTIRLDETTLFFTWPDGHVTKYDLNWLVKNSYEGQKQKVIQPRILWNAEIYQQAQVPSVDCQSFLETNEGLKKFLQNFLLYGIAFVENVPPTQEHTEKLAERISLIRETIYGRMWYFTSDFSRGDTAYTKLALDRHTDTTYFQEPCGIQVFHCLKHEGTGGRTLLVDGFYAAEQVLQKAPEEFELLSKVPLKHEYIEDVGECHNHMIGIGPVLNIYPWNKELYLIRYNNYDRAVINTVPYDVVHRWYTAHRTLTIELRRPENEFWVKLKPGRVLFIDNWRVLHGRECFTGYRQLCGCYLTRDDVLNTARLLGLQA

SEQ ID NO: 197067 - DNA, 1266 bp, Artificial Sequence
  derived and/or modified sequence
atgtggtaccacagactgagccacctgcacagcagactgcaggacctgctgaagggcggcgtgatctaccccgccctgccccagcccaacttcaagagcctgctgcccctggccgtgcactggcaccacaccgccagcaagagcctgacctgcgcctggcagcagcacgaggaccacttcgagctgaagtacgccaacaccgtgatgagattcgactacgtgtggctgagagaccactgcagaagcgccagctgctacaacagcaagacccaccagagaagcctggacaccgccagcgtggacctgtgcatcaagcccaagaccatcagactggacgagaccaccctgttcttcacctggcccgacggccacgtgaccaagtacgacctgaactggctggtgaagaacagctacgagggccagaagcagaaggtgatccagcccagaatcctgtggaacgccgagatctaccagcaggcccaggtgcccagcgtggactgccagagcttcctggagaccaacgagggcctgaagaagttcctgcagaacttcctgctgtacggcatcgccttcgtggagaacgtgccccccacccaggagcacaccgagaagctggccgagagaatcagcctgatcagagagaccatctacggcagaatgtggtacttcaccagcgacttcagcagaggcgacaccgcctacaccaagctggccctggacagacacaccgacaccacctacttccaggagccctgcggcatccaggtgttccactgcctgaagcacgagggcaccggcggcagaaccctgctggtggacggcttctacgccgccgagcaggtgctgcagaaggcccccgaggagttcgagctgctgagcaaggtgcccctgaagcacgagtacatcgaggacgtgggcgagtgccacaaccacatgatcggcatcggccccgtgctgaacatctacccctggaacaaggagctgtacctgatcagatacaacaactacgacagagccgtgatcaacaccgtgccctacgacgtggtgcacagatggtacaccgcccacagaaccctgaccatcgagctgagaagacccgagaacgagttctgggtgaagctgaagcccggcagagtgctgttcatcgacaactggagagtgctgcacggcagagagtgcttcaccggctacagacagctgtgcggctgctacctgaccagagacgacgtgctgaacaccgccagactgctgggcctgcaggcctag

SEQ ID NO: 197068 - DNA, 1266 bp, Artificial Sequence
  derived and/or modified sequence
atgtggtaccatcgactgagtcacctgcatagtcggttgcaagatctgctgaaaggcggcgttatctaccccgccctgccccagccaaattttaagagcctgctgccgttagccgtacattggcatcatacagcctcaaagtcattgacctgcgcgtggcagcagcatgaggatcactttgagctgaaatacgccaatactgtgatgcgctttgactatgtctggttgcgcgaccactgccgctctgcatcctgttacaactcaaaaactcatcagcgatccctcgacactgcctcagtggatctctgcattaagcccaagacaatccgtctcgatgagaccaccctcttcttcacttggcctgacggccacgtcaccaaatatgatctgaactggctggttaagaactcctacgagggccagaagcaaaaagtgatccagccccggattttgtggaacgcggaaatatatcagcaagcccaagtgccgtccgttgattgccagagctttctagagaccaatgagggcctgaaaaaatttctacagaacttcctgctgtatggcatcgcgtttgtggaaaatgtgccaccaactcaagagcacacagaaaagcttgccgaacgcatctccttgatccgcgagacgatttatggacgaatgtggtattttacaagcgactttagtcggggcgataccgcatacactaaattggctctggatcgccacaccgatactacctatttccaggaaccttgtggaatccaagttttccactgcctcaaacacgagggaacgggcggcaggaccctgctggtggatggattttatgcggcggagcaggtgctgcaaaaagctcctgaggaatttgaactgctgtctaaggtcccgctgaaacatgaatacatagaagacgtaggggaatgccacaatcacatgattgggatcggcccagttcttaacatttatccatggaacaaagaactctacctaattagatacaacaactacgaccgcgctgtcattaacacagtgccatatgatgtagttcaccgctggtatacagcacatcggactctgaccattgagctgagacgaccagagaacgaattctgggtgaaactgaaacccggacgtgtcctcttcatcgacaactggcgtgttctgcatggccgggaatgtttcaccgggtatcgtcagctgtgcggatgctacctgacccgggatgacgtattaaacacagcccgcctgctgggactccaggcgtag

SEQ ID NO: 197069 - DNA, 1266 bp, Artificial Sequence
  derived and/or modified sequence
atgtggtaccaccggctgagccacctgcacagccggctgcaggacctgctgaagggcggcgtcatctacccagccctgccccagcccaacttcaagagcctgctgcccctggccgtgcactggcaccacacagccagcaagagcctgacctgtgcctggcagcagcacgaggaccactttgagctgaagtatgccaacacagtgatgagatttgattatgtgtggctgcgggaccactgccgcagcgccagctgctacaacagcaagacccaccagaggagcctggacacagcctctgtggacctgtgcatcaagcccaagaccatccggctggatgagaccaccctcttcttcacctggccagatggccacgtgaccaagtatgacctgaactggctggtgaagaacagctatgagggccagaagcagaaggtgatccagccccgcatcctgtggaatgctgagatctaccagcaggcccaggtgcccagcgtggactgccagagcttcctggagaccaatgaaggcctgaagaagttcctgcagaacttcctgctgtatggaattgcctttgtggagaatgtgccccccacccaggagcacacagagaagctggccgagcgcatcagcctcatccgggagaccatctacggccgcatgtggtacttcaccagtgacttcagcagaggagacacagcctacaccaagctggccctggacagacacacagacaccacctacttccaggagccctgtggcatccaggtgttccactgcctgaagcatgagggcactggaggccgcaccctgctggtggatggcttctatgctgctgagcaggtgctgcagaaggcccctgaggagtttgagctgctgagcaaggtgcccctgaagcatgagtacattgaagatgtgggggagtgccacaaccacatgattggaattggccctgtgctgaacatctacccctggaacaaggagctgtacctgatccgctacaacaactatgacagagctgtgatcaacacagtgccctatgatgtggtgcaccgctggtacacagcccacaggaccctgaccatcgagctgcggcggccagaaaatgagttctgggtgaagctgaagccaggccgggtgctcttcatcgacaactggagggtgctgcacggccgggagtgcttcaccggctaccggcagctgtgtggctgctacctgaccagagatgatgtgctgaacacagcccggctgctgggcctgcaggcctag

SEQ ID NO: 197070 - DNA, 1266 bp, Artificial Sequence
  derived and/or modified sequence
atgtggtaccaccggctgagccacctgcacagccggctgcaggacctgctgaaaggcggggtgatctatcccgcccttccgcagccaaatttcaagtctcttctccctttagctgtccactggcatcatactgcctccaagagcttgacttgcgcctggcagcaacatgaggatcacttcgagttaaagtatgccaacacggtgatgcgatttgactatgtgtggctcagagatcactgccgcagcgccagctgctataattctaagactcaccagcgatctctggacacagcttctgtagacctctgtattaaaccgaaaaccatccgactggatgaaaccaccctgttcttcacttggccggatgggcatgtgacgaaatacgatcttaattggctcgttaaaaactcctatgaaggccaaaaacaaaaggtaattcagccccgcatactgtggaatgcagagatttatcaacaggctcaggtgccatccgtggactgccagagttttttggagaccaacgagggactcaaaaagttcttgcaaaactttttgttgtacgggatagcttttgttgaaaatgtcccccccacccaggaacacacagagaaactcgccgagcgcatcagtctgattagggagaccatttatggcaggatgtggtatttcacgagcgatttctcccgcggtgacactgcgtacactaagctcgccctagaccggcacaccgatacaacctactttcaagagccatgcggtattcaggtgtttcactgcttaaagcatgaagggaccggcggccggaccttacttgtggatggcttctatgccgccgaacaggttttgcagaaggcccctgaagagttcgaactgttatcgaaggtcccgctgaaacacgagtacattgaggatgtaggggagtgccacaaccacatgataggaattggtcctgtgctgaacatatacccttggaacaaggagttgtatctcatccggtacaataattatgaccgggctgttatcaataccgttccttacgacgtggtccaccggtggtataccgcacatcgaactctcactatcgagctgcgcagaccagaaaacgagttttgggtcaaattgaaacctggacgggtgttgtttatcgacaattggcgcgtgttgcacggtcgagagtgcttcacaggctaccgccagctgtgcggctgctatctcacaagagatgatgtgcttaatacggcgcgcctgttgggcctacaagcctag

SEQ ID NO: 197071 - DNA, 1266 bp, Artificial Sequence
  derived and/or modified sequence
atgtggtatcaccgactctcccacctccacagcaggctgcaggatctgcttaaggggggtgtgatctaccctgcccttcctcaacccaatttcaaaagcctcttaccactggccgttcactggcaccacaccgcttcaaaatcacttacatgtgcctggcagcagcatgaagatcactttgaactgaagtacgcaaacactgtgatgcgctttgattacgtgtggctgcgcgatcactgtcggtcagcttcctgctataacagcaagacgcaccagcgctccctggacaccgccagtgtagatctttgtatcaagccaaaaaccattagactggacgaaactactctattctttacgtggcccgacggacacgtaacaaaatacgacctgaattggctagtgaaaaactcgtacgaagggcaaaaacagaaagtgatccagcctcggattctctggaatgccgagatttaccagcaagcgcaggttccttcagtcgactgccaaagctttttagagactaatgaaggtctgaagaagtttctgcagaacttcctcctgtacggaatcgcattcgtcgaaaacgtaccacccacacaggagcacaccgagaagttagccgagaggattagtctgatcagagagacaatttacggaagaatgtggtattttactagtgacttcagccggggagacacagcctacaccaagctggccctggatcggcatacggataccacctacttccaggagccttgtggcatacaagttttccactgtctgaagcacgagggtacaggcggtaggaccttgctggtcgatgggttctacgctgccgagcaggtactacaaaaagctccggaggaattcgaattgctctcaaaagtccccctgaaacacgaatatattgaagatgtgggggagtgccataatcacatgattggcatcgggccagtgttaaacatctatccatggaacaaggagctataccttatacggtacaacaattatgatagggccgttattaacacagtgccttatgacgtcgtgcatcgctggtacactgcccataggacgctgacaattgaactccgacgaccggagaatgagttctgggttaagctgaaaccaggcagagtgctgttcattgacaattggcgggtgctgcacggcagggagtgtttcaccgggtatcgccagctgtgcggttgctacctgacccgggacgacgtcctgaataccgctcggttgctggggttgcaggcctag

SEQ ID NO: 197072 - DNA, 2832 bp, Artificial Sequence
  derived and/or modified sequence
ccgagcgggctgggggaggggagcgtggggccgacagttttgggggtgaaaaggcaaaaggcgggtgaaaggctgcctcccgagactctccttgcttggaattctgcccactctgcggagttagcagtcacgacctccagcacaggatgtggtaccacagattgtcccacctacacagcaggcttcaggacttgctgaagggaggagtcatatatccggcccttccacagcccaacttcaaaagcttacttcctttagctgtccattggcaccatacagcctccaagtctctgacttgtgcttggcagcaacatgaagatcattttgagctgaaatatgctaataccgtgatgcgctttgattacgtctggcttcgagaccactgccgctcagcatcgtgctacaactctaagactcaccagcgcagcctggatactgccagtgtggatttatgtatcaagccaaagaccattcgtctggatgagaccacactctttttcacttggccagatggtcatgtgactaaatatgatttgaattggctggtgaaaaacagctatgaagggcagaaacaaaaagtcatccagcctagaatactatggaatgctgaaatctaccagcaagcccaagttccatcggtagattgccagagcttcttagaaaccaacgagggactgaagaagtttctgcaaaactttctgctctatggaattgcattcgtagaaaatgtccctcccactcaagagcacacagagaagttggcagaaaggatcagcttaatcagagaaaccatttatgggaggatgtggtatttcacttcagacttctccagaggtgacactgcgtacaccaagctagctctggatcggcacactgacactacctattttcaagagccctgtggcattcaagtgtttcattgtcttaaacatgaaggaactggtggcaggacactgctagtagatggattctatgcagcagaacaggtacttcaaaaggcacctgaggaatttgaactcctcagtaaagtgccattgaagcatgaatatattgaagatgttggagaatgtcacaaccacatgattgggattgggccagtcttaaatatctacccatggaataaagagctgtatttgatcaggtacaacaactatgaccgggctgtcatcaataccgttccttatgatgtcgtccatcgctggtatacagcacaccggactctaacgatagagttgaggagacctgagaatgagttttgggtcaaactaaagcctggcagggtcctatttatagacaactggcgtgtcctacatggcagggaatgcttcactggctaccgccaactgtgtggctgctatttaacaagagatgatgtattaaacactgctcgcctcttggggcttcaggcttaaaattgacagcatctggattatgaatacacctggcaccctggctaccagaatttcatatgggcagaataatattgtgtcaaactctacttcagattgtctccttatcccatcccacaaaacagaatctgtccgtttctctagtaagggagacttgttggagaggcgggactctgagttatctaatgtcagacatctagtggggcagctctcttcctcatgttataacatggatccacttgtttgatttaaaccttttaatataattttggtcagtctccttcagaaatataatctccatattgataggaaagcaataattgccatgaggtaacgatttttttcccaagtagatcagttagaaagaaatgcattctagaaataacaaaaatcctgataaagcaacaatttgcaaaatgtttggtcttaggacaccttaacactcttaaaagttattgaaggccccaaggagttcttgggtgtgggttctatctattgatactaattattttaggtattaagactgagaaatatttaaagctcaagaagaacacagaagcacacatccctcagctatgagagagatgacataaccatatgtcatgtagcctctggaaaagtcctctgtatcctcatgagataacgagagggggaaaaaaagctactactgcctttgtaacttccacttagcctactacagggctatgcacatcttagtttccaaaagtctgcttaatttcaaaagaaaaatgcctaattgaatgtaactcatcttggtgttattatacaaaataatttttaatctgcagacccacgaaaagggtctcagggactcctccaggggtcttcagaccatactttgagaacccatgggctagcgactaccttgagacagtcctttacctaggcctgtggattaaagggtttagctgaaaccctagattcttctctgtagtctaatagaactccaaacattgtaagaattgcttggtagcataagctcagggataaggtgggaattgagttcaaatatagtgttttatcttccacacaaatcatctctataggagttaaattaggaagtcacaacagcgcctgttgaacaaactcatcagtgtggtaatcctatgagggataattgcagaaaggttttagagacttgtgaggttccatatgataattctttacacctccccccccaagagaaagtacacagggctattctgtaatattgttcagggaaatcagcatgatagatgctgtgcctccagagagttctctggagattactacccaaatgtgtattttggcaatttggtggtatttaggatgtaatatgttttcctccatttctgctaattttctctctctctctctcataacatactatacatgctaattgccaagatttgaatgagtcaaa

SEQ ID NO: 197073 - protein, 681 aa, Artificial Sequence
  derived and/or modified sequence
MNASSEGESFAGSVQIPGGTTVLVELTPDIHICGICKQQFNNLDAFVAHKQSGCQLTGTSAAAPSTVQFVSEETVPATQTQTTTRTITSETQTITVSAPEFVFEHGYQTYLPTESNENQTATVISLPAKSRTKKPTTPPAQKRLNCCYPGCQFKTAYGMKDMERHLKIHTGDKPHKCEVCGKCFSRKDKLKTHMRCHTGVKPYKCKTCDYAAADSSSLNKHLRIHSDERPFKCQICPYASRNSSQLTVHLRSHTGDAPFQCWLCSAKFKISSDLKRHMRVHSGEKPFKCEFCNVRCTMKGNLKSHIRIKHSGNNFKCPHCDFLGDSKATLRKHSRVHQSEHPEKCSECSYSCSSKAALRIHERIHCTDRPFKCNYCSFDTKQPSNLSKHMKKFHGDMVKTEALERKDTGRQSSRQVAKLDAKKSFHCDICDASFMREDSLRSHKRQHSEYSESKNSDVTVLQFQIDPSKQPATPLTVGHLQVPLQPSQVPQFSEGRVKIIVGHQVPQANTIVQAAAAAVNIVPPALVAQNPEELPGNSRLQILRQVSLIAPPQSSRCPSEAGAMTQPAVLLTTHEQTDGATLHQTLIPTASGGPQEGSGNQTFITSSGITCTDFEGLNALIQEGTAEVTVVSDGGQNIAVATTAPPVFSSSSQQELPKQTYSIIQGAAHPALLCPADSIPD

SEQ ID NO: 197074 - DNA, 3281 bp, Artificial Sequence
  derived and/or modified sequence
ggcaggggcgcatccctcgccacccgcggtcgcccagcacgccgggacgcgcgtggccatccagctccccgggggcgttggggggctccgcgggcctgggcctcgggattcgcccgccgcttccccggggagccgctgctgcaaagccaggttggggcgccgggcccggccagcgccctctaggcagcggaagtgcagcttgctttacatccgtcctccccgcctcgcagagttgggagaaggcagggtggggggtgtggaaaaataaaaggaaaagtccttgcaccatgtagatcagcgtcccccactttggcatcccggccggccggggacctcccagtctgcggccatgaacgcgagcagcgagggcgagagcttcgcgggctcggtgcaaattccaggtggcacaacggtgctggtggagctgactcccgacatccatatctgcggcatctgcaagcagcagtttaacaacctggatgcctttgtagctcacaagcaaagtggctgccagctgacaggcacatccgcagcagcccccagcacggtccagtttgtatcggaggaaacagtgcctgccacccagactcagaccaccaccagaaccatcacctcggagacccagacaatcacagtttcagctccagaatttgtttttgaacatggctatcaaacttacctgcccacggaaagtaatgaaaaccagacagccactgtcatctctctccctgccaagtcacgcaccaaaaagcccacaacaccacctgctcagaaaaggcttaactgttgctatccaggttgccaattcaagactgcttatggcatgaaggacatggagcggcatttaaaaattcacacgggagacaaaccccataagtgtgaagtctgtggcaagtgctttagccggaaagacaagctgaaaactcacatgcggtgccacacgggcgtgaagccctacaagtgtaagacgtgtgactacgccgctgccgacagcagcagcctcaacaagcacctgaggatccactcggacgagcggcccttcaaatgccagatctgcccctacgccagccgcaactccagccagctcactgtccacctgcgatcccacacgggggacgcccccttccagtgctggctctgtagcgccaagttcaaaatcagctcggacttgaaaaggcacatgcgggtgcactcgggggagaagcctttcaagtgcgagttctgcaatgtccgctgcaccatgaaggggaacctcaagtcgcacatccgtatcaagcacagcgggaataacttcaagtgtcctcattgcgacttcctgggtgacagcaaagccaccctccggaagcacagccgcgtgcaccagtcggagcatcctgagaagtgctcggaatgcagctactcctgctccagcaaggccgccctgcgcatccacgagcgtatccactgcaccgaccgccctttcaagtgcaactactgcagcttcgacaccaaacagcccagcaacctgagcaagcacatgaagaagttccatggggacatggttaagactgaggctctagagaggaaggacaccggcaggcagagcagccggcaggtggccaagctggatgccaagaagagtttccactgcgatatatgcgatgcctccttcatgcgggaggactcgctccgcagccacaagagacagcacagtgagtacagtgagagtaagaactcggacgtgaccgttctccagtttcagatcgaccccagcaagcagcccgccacgcccctcactgtgggacacctccaggtgcccctccagcccagccaagtgccccagttcagcgagggaagagtcaaaatcatcgttgggcatcaggtgccccaggcgaacaccatcgtccaggctgccgccgctgcagtgaacatcgtcccgcctgccttggtggcccagaacccagaggaactcccagggaacagccggctgcagatcctgcgccaggtcagtctgatcgccccccctcagtcctcgcggtgtccgagcgaggcgggcgcaatgacccagccggctgtcctgctgaccacccacgagcagacggacggagccactctgcaccagactctcatccccacggcctcaggtggcccccaggaaggctctggcaatcaaactttcattaccagttcgggtattacttgcactgactttgaaggcctaaacgccttgattcaggaggggacagcagaagtgacagtggtgagcgatggaggccagaacatcgcagtggccaccacagcgccaccggtcttctcctcctcttcccagcaagaactacccaagcagacctactccatcattcaaggggcagcccatccagctttgctctgtcccgccgactccattccagattagtgcttaaaaaaacaaaaggagtgggggaaaggaattgagaaaaagaaatcttaagtagaattctctaaaaggtttgctcttaatgttttctttgttttgttttgtttttgagacggagtctcgctctgtttcccaggctggagtgcagtggcgctatcttggctcactgcaacgtccgcctcccaggttcaagcgattctcatgcctcagccctccgagtagctgggaccacaggtgtacgacatcatgactggctaatttttgtatatttagtagagacggggtttcatcatgttgaactcctgacctcaagtgatctgcccacctcagcctcccaaagtgctgggattacaggtgtgagccaccatgcctggccgtggtttgctcttaatgtttttaaggatggttgtgaatccccctggccccataataaattgtaattttatactgcttactataatttttttaacactgtaacaactttgagaccacctctgaatcgtcgcattataactgttgtagaatcttaaatgttaccaagatgattccaatgaggggttggaattaaatgcattaagtagtgaattcatgtgtttgtttccaacttgattttccaactctaataaaggtttctgtccatcttattacatttgtgtagtaaatggtacttcccagcctctcttttgccccattctggaatactccccagagtttgggggtgttcatgttttatacatgtaagtctgttggcatgaaggaccattttctacataatatgacatggatacttgacccaaaaaaaaatgtttagtgctaatgagcagaaaatgaatggttccataataaattgatatctgattaaaatataaaaaaaaaaaaaaaaaaa

SEQ ID NO: 197075 - DNA, 3264 bp, Artificial Sequence
  derived and/or modified sequence
gggcaggggcgcatccctcgccacccgcggtcgcccagcacgccgggacgcgcgtggccatccagctccccgggggcgttggggggctccgcgggcctgggcctcgggattcgcccgccgcttccccggggagccgctgctgcaaagccaggttggggcgccgggcccggccagcgccctctaggcagcggaagtgcagcttgctttacatccgtcctccccgcctcgcagagttgggagaaggcagggtggggggtgtggaaaaataaaaggaaaagtccttgcaccatgtagatcagcgtcccccactttggcatcccggccggccggggacctcccagtctgcggccatgaacgcgagcagcgagggcgagagcttcgcgggctcggtgcaaattccaggtggcacaacggtgctggtggagctgactcccgacatccatatctgcggcatctgcaagcagcagtttaacaacctggatgcctttgtagctcacaagcaaagtggctgccagctgacaggcacatccgcagcagcccccagcacggtccagtttgtatcggaggaaacagtgcctgccacccagactcagaccaccaccagaaccatcacctcggagacccagacaatcacagtttcagctccagaatttgtttttgaacatggctatcaaacttacctgcccacggaaagtaatgaaaaccagacagccactgtcatctctctccctgccaagtcacgcaccaaaaagcccacaacaccacctgctcagaaaaggcttaactgttgctatccaggttgccaattcaagactgcttatggcatgaaggacatggagcggcatttaaaaattcacacgggagacaaaccccataagtgtgaagtctgtggcaagtgctttagccggaaagacaagctgaaaactcacatgcggtgccacacgggcgtgaagccctacaagtgtaagacgtgtgactacgccgctgccgacagcagcagcctcaacaagcacctgaggatccactcggacgagcggcccttcaaatgccagatctgcccctacgccagccgcaactccagccagctcactgtccacctgcgatcccacacgggggacgcccccttccagtgctggctctgtagcgccaagttcaaaatcagctcggacttgaaaaggcacatgcgggtgcactcgggggagaagcctttcaagtgcgagttctgcaatgtccgctgcaccatgaaggggaacctcaagtcgcacatccgtatcaagcacagcgggaataacttcaagtgtcctcattgcgacttcctgggtgacagcaaagccaccctccggaagcacagccgcgtgcaccagtcggagcatcctgagaagtgctcggaatgcagctactcctgctccagcaaggccgccctgcgcatccacgagcgtatccactgcaccgaccgccctttcaagtgcaactactgcagcttcgacaccaaacagcccagcaacctgagcaagcacatgaagaagttccatggggacatggttaagactgaggctctagagaggaaggacaccggcaggcagagcagccggcaggtggccaagctggatgccaagaagagtttccactgcgatatatgcgatgcctccttcatgcgggaggactcgctccgcagccacaagagacagcacagtgagtacagtgagagtaagaactcggacgtgaccgttctccagtttcagatcgaccccagcaagcagcccgccacgcccctcactgtgggacacctccaggtgcccctccagcccagccaagtgccccagttcagcgagggaagagtcaaaatcatcgttgggcatcaggtgccccaggcgaacaccatcgtccaggctgccgccgctgcagtgaacatcgtcccgcctgccttggtggcccagaacccagaggaactcccagggaacagccggctgcagatcctgcgccaggtcagtctgatcgccccccctcagtcctcgcggtgtccgagcgaggcgggcgcaatgacccagccggctgtcctgctgaccacccacgagcagacggacggagccactctgcaccagactctcatccccacggcctcaggtggcccccaggaaggctctggcaatcaaactttcattaccagttcgggtattacttgcactgactttgaaggcctaaacgccttgattcaggaggggacagcagaagtgacagtggtgagcgatggaggccagaacatcgcagtggccaccacagcgccaccggtcttctcctcctcttcccagcaagaactacccaagcagacctactccatcattcaaggggcagcccatccagctttgctctgtcccgccgactccattccagattagtgcttaaaaaaacaaaaggagtgggggaaaggaattgagaaaaagaaatcttaagtagaattctctaaaaggtttgctcttaatgttttctttgttttgttttgtttttgagacggagtctcgctctgtttcccaggctggagtgcagtggcgctatcttggctcactgcaacgtccgcctcccaggttcaagcgattctcatgcctcagccctccgagtagctgggaccacaggtgtacgacatcatgactggctaatttttgtatatttagtagagacggggtttcatcatgttgaactcctgacctcaagtgatctgcccacctcagcctcccaaagtgctgggattacaggtgtgagccaccatgcctggccgtggtttgctcttaatgtttttaaggatggttgtgaatccccctggccccataataaattgtaattttatactgcttactataatttttttaacactgtaacaactttgagaccacctctgaatcgtcgcattataactgttgtagaatcttaaatgttaccaagatgattccaatgaggggttggaattaaatgcattaagtagtgaattcatgtgtttgtttccaacttgattttccaactctaataaaggtttctgtccatcttattacatttgtgtagtaaatggtacttcccagcctctcttttgccccattctggaatactccccagagtttgggggtgttcatgttttatacatgtaagtctgttggcatgaaggaccattttctacataatatgacatggatacttgacccaaaaaaaaatgtttagtgctaatgagcagaaaatgaatggttccataataaattgatatctgattaaaatata

SEQ ID NO: 197076 - DNA, 2046 bp, Artificial Sequence
  derived and/or modified sequence
atgaacgcatcttccgaaggagagtcatttgccggtagcgtgcaaattccaggcggtactaccgtgctggtggaactgacacccgatatccacatctgtgggatctgcaagcaacagttcaacaacctcgatgcatttgtcgcccataaacagtcagggtgtcagctgactggaacttctgctgcagccccctccactgtccagttcgttagcgaagagaccgttcccgccactcagactcaaactactacccggacaataacgtccgaaacacagacgatcacagtttccgctcccgagtttgtcttcgagcacgggtatcagacttatcttccaaccgagagtaacgagaaccagaccgcgacagttattagcctacctgctaagagccgcacaaagaagcccaccacccctcctgcccagaaaaggctcaattgttgctaccctgggtgccaattcaagacggcctatggcatgaaagatatggagaggcacttgaaaattcatacaggagacaagccacataaatgtgaagtttgcggtaaatgtttttctagaaaagacaaattgaagacccatatgcggtgccatactggagtgaaaccatataagtgtaagacttgtgattacgctgctgcggattctagtagtctgaacaagcatctgcggatacactcagacgagcggccatttaagtgccaaatctgcccttatgcatcacggaactccagtcagctgactgtgcacctacgttcccacactggagatgcccctttccaatgctggttgtgctccgctaaattcaagatctcttctgatctgaaaaggcatatgcgggtgcactccggtgaaaagccattcaagtgtgagttctgcaacgtgcgctgtactatgaaaggcaatcttaagtcacatataagaatcaagcactccgggaataatttcaagtgtcctcactgcgacttcttgggagatagcaaggccacgctccgcaaacacagtcgcgtgcaccagagcgagcatcctgaaaagtgcagtgagtgctcttactcctgctcttccaaagccgccctccgtatacatgaacgaattcactgtactgaccggcccttcaaatgcaactactgctcgtttgataccaagcaaccgagtaacctgtctaaacacatgaagaagttccacggtgacatggtgaaaactgaggctctggaacgcaaagacaccgggaggcagagctctaggcaggtcgccaaattggacgccaagaagtcattccattgcgatatctgtgatgccagctttatgagggaggattccctgcgcagccacaagcggcagcattcagaatactccgagtccaagaattcagacgtgactgtgcttcagtttcagattgaccctagtaagcagcccgcaaccccactaacggtgggacaccttcaggtgcctctgcagcccagtcaggttcctcaattcagtgaaggtcgagtgaaaatcattgtcggacaccaggtgccccaggccaatactatcgtccaggccgccgctgctgccgtcaatattgttccacctgcacttgtagcacagaatccggaggaactgcccggcaatagccggttacaaatcttgaggcaagtatctctcatcgcccctcctcagtcctcccgttgtccctctgaagcaggagcaatgacccagccagctgtgctgttgacgacccacgaacagactgacggcgctacacttcaccagaccttaatccccactgcgtcaggaggcccccaggagggtagcggaaaccagacattcatcacaagcagcggtattacatgcaccgacttcgagggcctgaacgcgctgatccaggaagggacggcagaggtcacggtggtgagcgacggaggacaaaacattgccgttgctacaaccgccccccctgtattctcctcctcttctcagcaggagctgcccaagcaaacttacagtattattcagggcgcagcccatcctgcgctgctttgtcctgccgactcaatcccggactag

SEQ ID NO: 197077 - DNA, 2046 bp, Artificial Sequence
  derived and/or modified sequence
atgaatgccagcagcgagggggagagctttgctggctctgtgcagatccctgggggcaccaccgtgctggtggagctgaccccagacatccacatctgtggcatctgcaagcagcagttcaacaacctggatgcctttgtggcccacaagcagagcggctgccagctgaccggcaccagcgctgctgcccccagcacagtgcagtttgtgtctgaggagaccgtgcctgccacccagacccagaccaccaccaggaccatcaccagcgagacccagaccatcaccgtgtctgcccctgagtttgtgtttgaacatggctaccagacctacctgcccacagagagcaatgaaaaccagacagccaccgtcatcagcctgcctgccaagagcaggaccaagaagcccaccaccccaccagcccagaagaggctgaactgctgctacccaggctgccagttcaagacagcctacggcatgaaggacatggagcggcacctgaagatccacactggagacaagccccacaagtgtgaggtgtgtgggaagtgcttcagcaggaaggacaagctgaagacccacatgcgctgccacactggagtgaagccctacaagtgcaagacctgtgactatgctgctgctgacagcagcagcctgaacaagcacctgcgcatccacagtgatgagcggcccttcaagtgccagatctgcccctatgccagcaggaacagcagccagctgactgtgcacctgcggagccacactggagatgcccccttccagtgctggctgtgcagcgccaagttcaagatcagcagtgacctgaagaggcacatgagggtgcacagcggggagaagcccttcaagtgtgagttctgcaatgtgcgctgcaccatgaagggcaacctgaagagccacatccgcatcaagcacagcggcaacaacttcaagtgcccccactgtgacttcctgggggacagcaaggccaccctgaggaagcacagccgggtgcaccagagcgagcaccctgagaagtgcagtgaatgttcctacagctgcagcagcaaggccgccctgcgcatccacgagcgcatccactgcacagaccggcccttcaagtgcaactactgcagctttgacaccaagcagcccagcaacctgagcaagcacatgaagaagttccacggggacatggtgaagacagaggccctggagaggaaggacaccggccggcagagcagccggcaggtggccaagctggatgccaagaagagcttccactgtgacatctgtgatgccagcttcatgagggaggacagcctgcggagccacaagaggcagcacagcgagtacagcgagagcaagaacagtgatgtgacagtgctgcagttccagattgaccccagcaagcagcctgccacccccctgactgtgggccacctgcaggtgcccctgcagcccagccaggtgccccagttcagcgagggccgggtgaagatcatcgtgggccaccaggtgccccaggccaacaccatcgtgcaggccgctgctgctgctgtgaacatcgtgcccccagccctggtggcccagaaccctgaggagctgcccggcaacagccggctgcagatcctgcggcaggtgtccctgattgccccaccccagagcagccgctgccccagcgaggccggggccatgacccagcctgctgtgctgctgaccacccatgagcagacagatggagccaccctgcaccagaccctcatccccacagccagcggcggcccccaggagggcagcggcaaccagaccttcatcaccagcagcggcatcacctgcacagactttgagggcctgaatgccctgatccaggagggcacagctgaggtgacagtggtgtctgatggcggccagaacattgctgtggccaccacagcccctcctgtgttcagcagcagcagccagcaggagctgcccaagcagacctacagcatcatccagggcgccgcccacccagccctgctgtgcccagctgacagcatcccagactag

SEQ ID NO: 197078 - DNA, 2046 bp, Artificial Sequence
  derived and/or modified sequence
atgaacgccagcagcgagggcgagagcttcgccggcagcgtgcagatacccgggggcacaaccgtactggtggagctcaccccagacattcacatctgcggcatctgcaaacagcagttcaacaatcttgatgccttcgtggcccacaagcagtctggctgccaactgaccggaacctcggccgccgctccctccactgtgcaattcgtgtctgaagaaactgttcctgccacgcaaacccaaactactaccagaacaataacaagcgaaacccagacaattactgtgtctgcaccggagttcgtcttcgagcacgggtaccaaacttacttaccaaccgagtcaaacgagaaccaaaccgccacggtcatttcattaccggcaaaaagtaggaccaagaagcccaccacacctcctgcgcagaagcgcctcaactgctgctatcccggctgtcagttcaaaacagcctacgggatgaaggatatggaacggcatctgaaaatccataccggagacaaacctcacaagtgcgaggtttgcgggaagtgcttctccaggaaagataagctgaaaactcacatgcggtgccacacgggtgtgaagccctataaatgcaagacttgcgactacgctgcagccgattccagtagcctgaataagcacttaaggatccattccgatgaacgcccctttaagtgtcaaatatgcccctatgctagtaggaatagctcccagctgactgtgcatttgaggagtcatacaggagacgccccgttccagtgctggttgtgctcagcaaagttcaagatctcatccgacttgaagcggcatatgagggtgcactcaggagaaaagcccttcaaatgtgaattctgtaacgtgcgctgtaccatgaaaggaaacctgaaatcccacatccggatcaagcatagcggaaacaacttcaagtgcccacactgcgactttctgggtgattccaaggcgacactacgtaagcactcacgcgtgcatcaatctgaacatcctgaaaaatgttctgagtgtagttattcatgtagcagcaaggccgctctacgcatccacgagcggattcactgtactgaccggccatttaagtgtaactactgcagcttcgatacaaagcagccatcaaacttgagcaagcatatgaagaaatttcacggggacatggtcaaaactgaggctttagagcgcaaggatacaggacgacaaagctcgcgtcaggtggctaagctggatgccaaaaagtcattccactgtgatatctgtgatgccagtttcatgcgggaggacagtttgcgatctcataaacgccagcactctgaatattcagaaagcaagaactcagacgtgaccgtgttgcagttccagattgacccatccaaacagcctgctactccactgactgttggtcacctgcaggtccccttacagcccagtcaagttcctcaatttagtgagggcagagttaaaatcatagtgggtcatcaggttcctcaggccaataccattgtgcaggccgctgccgctgccgtgaacattgtgcctccagccctggtggctcagaacccagaagaattacccgggaatagcagactgcagatcctaaggcaggtctcccttattgcccccccacagagctcccgctgcccctcagaggcgggcgcgatgacacagccagccgtactcctaactacccatgaacagaccgatggagccaccctgcaccagacgctgatccccactgcatcagggggcccacaggagggaagcgggaatcaaacatttatcaccagttctggtattacctgcaccgattttgagggtcttaacgctctgatccaggagggaactgctgaagtcaccgtcgtaagtgatggcggccaaaatatcgcagtggcaacaaccgctcccccagtgtttagcagctcgagtcaacaagagcttcccaagcagacctactcaattattcagggagctgctcacccagctctcctctgcccagccgacagcatccctgactag

SEQ ID NO: 197079 - DNA, 2046 bp, Artificial Sequence
  derived and/or modified sequence
atgaatgcctccagcgaaggggagagtttcgctggatccgtccagatccctggtgggaccaccgtgctggttgaactcacacctgacatccatatctgcgggatttgtaagcaacagtttaataatctggacgctttcgtggcccacaagcaaagtggttgccagctgacaggaacaagcgcagctgcgccatctaccgtacaatttgtctcagaggaaaccgtgccggcaacccaaactcagaccaccacccgcaccattacgagcgagacccaaactataactgtttctgccccagagttcgtttttgaacatggctatcaaacttatctgcccaccgagagcaatgagaatcagacagccaccgtgatctccctgcccgctaaaagcaggacaaagaaaccaacaactccacctgcccagaagcggctgaactgttgttacccgggttgtcagttcaagacggcgtacggaatgaaggacatggagagacacctgaagatccacacgggagacaagccacacaaatgcgaggtgtgcggtaagtgtttttcaagaaaagacaaactaaagacacacatgaggtgccatactggggtgaagccttataaatgtaaaacttgcgactatgcagccgctgatagcagcagtctcaacaaacacctgaggattcatagcgatgagagaccctttaaatgccaaatctgcccttacgcgtctaggaatagctcacaattgacggtacacttgcggtctcatacaggggatgcaccgttccagtgctggctgtgcagtgccaagttcaagatctccagcgatctcaaacggcatatgagagttcactccggcgagaagccgtttaaatgtgagttctgcaacgtgcgctgtaccatgaagggaaacttaaaaagtcatatacgcataaagcattccgggaacaatttcaagtgtccacactgcgattttttgggcgattcaaaagcgactctgagaaaacactcaagagtgcaccaatccgagcacccggagaaatgcagtgaatgtagttattcctgtagcagcaaggctgctttaagaattcatgaacggatccactgcactgatcggccattcaaatgtaactattgtagtttcgacaccaagcaaccctctaacctatctaaacacatgaagaaattccacggtgacatggtgaagaccgaggccctggaacgcaaagatactggtaggcagagcagccgccaggtggcaaagctggatgctaagaagtctttccactgcgacatatgcgacgcttcctttatgagagaggactcacttaggtcacataaacgccaacacagcgaatatagtgagtccaagaattcagacgtgacagttttacagttccagattgaccctagcaagcagccagccaccccactgaccgtgggtcacctgcaggtgccgctgcaaccctcgcaggtgccccagtttagtgagggccgtgtgaagattatcgtgggacaccaggttccccaggccaataccatcgtccaagctgcggcagccgcagtaaatattgtaccacctgcacttgtcgcccaaaatccggaggaactgcctggaaacagtcggctgcagattttgcgacaggtaagccttatcgctcccccacagagcagccgctgcccaagcgaagccggtgctatgacccagccagccgtgctcctcactacccatgagcaaacggatggggcaacactgcaccagaccctgattcctaccgcgtccggagggccacaggaaggttcaggcaaccaaacctttatcacttcatccggtatcacctgcacagattttgagggtctgaatgccctcatacaagagggcactgccgaagttaccgttgtgtctgatggcggtcagaatattgcagttgccacaaccgctcctcccgtcttttctagttcatctcagcaagaactacctaagcagacctattcaataatccagggggcagcccaccctgctctgctttgtccagctgactccattccggactag

SEQ ID NO: 197080 - DNA, 2046 bp, Artificial Sequence
  derived and/or modified sequence
atgaacgccagcagcgagggcgagagcttcgccggcagcgtgcagatccccggcggcaccaccgtgctggtggagctgacccccgacatccacatctgcggcatctgcaagcagcagttcaacaacctggacgccttcgtggcccacaagcagagcggctgccagctgaccggcaccagcgccgccgcccccagcaccgtgcagttcgtgagcgaggagaccgtgcccgccacccagacccagaccaccaccagaaccatcaccagcgagacccagaccatcaccgtgagcgcccccgagttcgtgttcgagcacggctaccagacctacctgcccaccgagagcaacgagaaccagaccgccaccgtgatcagcctgcccgccaagagcagaaccaagaagcccaccaccccccccgcccagaagagactgaactgctgctaccccggctgccagttcaagaccgcctacggcatgaaggacatggagagacacctgaagatccacaccggcgacaagccccacaagtgcgaggtgtgcggcaagtgcttcagcagaaaggacaagctgaagacccacatgagatgccacaccggcgtgaagccctacaagtgcaagacctgcgactacgccgccgccgacagcagcagcctgaacaagcacctgagaatccacagcgacgagagacccttcaagtgccagatctgcccctacgccagcagaaacagcagccagctgaccgtgcacctgagaagccacaccggcgacgcccccttccagtgctggctgtgcagcgccaagttcaagatcagcagcgacctgaagagacacatgagagtgcacagcggcgagaagcccttcaagtgcgagttctgcaacgtgagatgcaccatgaagggcaacctgaagagccacatcagaatcaagcacagcggcaacaacttcaagtgcccccactgcgacttcctgggcgacagcaaggccaccctgagaaagcacagcagagtgcaccagagcgagcaccccgagaagtgcagcgagtgcagctacagctgcagcagcaaggccgccctgagaatccacgagagaatccactgcaccgacagacccttcaagtgcaactactgcagcttcgacaccaagcagcccagcaacctgagcaagcacatgaagaagttccacggcgacatggtgaagaccgaggccctggagagaaaggacaccggcagacagagcagcagacaggtggccaagctggacgccaagaagagcttccactgcgacatctgcgacgccagcttcatgagagaggacagcctgagaagccacaagagacagcacagcgagtacagcgagagcaagaacagcgacgtgaccgtgctgcagttccagatcgaccccagcaagcagcccgccacccccctgaccgtgggccacctgcaggtgcccctgcagcccagccaggtgccccagttcagcgagggcagagtgaagatcatcgtgggccaccaggtgccccaggccaacaccatcgtgcaggccgccgccgccgccgtgaacatcgtgccccccgccctggtggcccagaaccccgaggagctgcccggcaacagcagactgcagatcctgagacaggtgagcctgatcgcccccccccagagcagcagatgccccagcgaggccggcgccatgacccagcccgccgtgctgctgaccacccacgagcagaccgacggcgccaccctgcaccagaccctgatccccaccgccagcggcggcccccaggagggcagcggcaaccagaccttcatcaccagcagcggcatcacctgcaccgacttcgagggcctgaacgccctgatccaggagggcaccgccgaggtgaccgtggtgagcgacggcggccagaacatcgccgtggccaccaccgccccccccgtgttcagcagcagcagccagcaggagctgcccaagcagacctacagcatcatccagggcgccgcccaccccgccctgctgtgccccgccgacagcatccccgactag

SEQ ID NO: 197081 - protein, 682 aa, Artificial Sequence
  derived and/or modified sequence
MSTPAVPQDLQLPPSQRAQSAFKEQRRQKLKEHLLRRKTLFAYKQENEMLSSRDQRVVTSEDQVQEGTKVLKLKTKMADKENMKRPAESKNNTVVGKHCIPLKPSNELTNSTVVIDTHKPKDSNQTPHLLLTEDDPQSQHMTLSQAFHLKNNSKKKQMTTEKQKQDANMPKKPVLGSYRGQIVQSKINSFRKPLQVKDESSAATKKLSATIPKATKPQPVNTSSVTVKSNRSSNMTATTKFVSTTSQNTQLVRPPIRSHHSNTRDTVKQGISRTSANVTIRKGPHEKELLQSKTALSSVKTSSSQGIIRNKTLSRSIASEVIARPASLSNDKLMEKSEPVDQRRHTAGKAIVDSRSAQPKETSEERKARLSEWKAGKGRVLKRPPNSVVTQHEPAGQNEKPVGSFWTTMAEEDEQRLFTEKVNNTFSECLNLINEGCPKEDILVTLNDLIKNIPDAKKLVKYWICLALIEPITSPIENIIAIYEKAILAGAQPIEEMRHTIVDILTMKSQEKANLGENMEKSCASKEEVKEVSIEDTGVDVDPEKLEMESKLHRNLLFQDCEKEQDNKTKDPTHDVKTPNTETRTSCLIKYNVSTTPYLQSVKKKVQFDGTNSAFKELKFLTPVRRSRRLQEKTSKLPDMLKDHYPCVSSLEQLTELGRETDAFVCRPNAALCRVYYEADTT

SEQ ID NO: 197082 - DNA, 2049 bp, Artificial Sequence
  derived and/or modified sequence
atgagtacgccagctgtcccccaagaccttcagctcccaccctcacagcgcgcgcagtctgccttcaaagaacagcgacgtcaaaaactcaaagaacacttactgaggcggaagaccctgttcgcctacaagcaggagaacgagatgcttagcagcagagatcaacgagtcgtaacttctgaagaccaagttcaggagggcacaaaagttttgaaactgaagactaagatggccgacaaggagaatatgaaacgacctgcagagagtaagaacaatacagtggttggcaagcattgcattcctcttaagccatccaatgagctgacaaattccacagtggtgatagatacacataagcctaaggatagtaatcagacccctcaccttctgctaacagaggacgacccccaaagccagcacatgactttgagccaggctttccatctgaagaacaactccaagaagaaacagatgactacagagaagcaaaagcaagacgctaacatgcccaaaaagccagtcctgggaagctaccgcggccaaatcgtgcaatccaagatcaactcctttagaaaaccccttcaggtaaaggacgagtcctcagctgcgacaaagaagcttagcgctactattcctaaagccacaaagccacagcctgtcaacacgagctcggtgacagtcaagagtaacaggtcctctaacatgacagctactactaagttcgttagcactacaagtcagaacactcagctcgtgcgccctccgatcagatctcatcactccaacacacgcgacactgtaaagcagggaatcagccgaacttcagccaacgttaccattcggaaggggcctcacgaaaaggagctacttcagtctaagacggctctgtcctctgtgaaaaccagtagtagtcaaggaatcattcgcaacaaaaccttaagccgctcgattgcttctgaggttatcgcgaggccggcctccctgagcaatgataagctaatggagaagagtgagcccgtggatcagaggaggcacactgcgggaaaagcaatagtggatagcaggagcgcgcagcctaaagaaacatcagaagaacgtaaggccagactttctgagtggaaagcaggcaagggacgcgttttgaagcgcccgccaaatagcgtggtcacccagcacgagcccgcaggtcaaaacgagaaaccagtgggaagcttttggaccactatggcggaagaagatgaacagcggttgttcaccgaaaaagtaaataacacattctccgaatgcctcaacctgattaacgaggggtgccctaaggaggacattctggtcaccctcaacgaccttataaagaacattcccgatgcgaagaagctagtgaagtactggatctgtctggccctgattgaacccattacttcgcctattgagaacatcatagcaatctacgagaaggccatcctggccggagctcaacccatagaggagatgcgccacacaattgtcgacatcctgaccatgaaaagccaggaaaaggctaatctaggtgaaaacatggaaaaaagctgtgcgtccaaggaggaggtgaaggaagttagtatagaggataccggcgttgatgttgatccagaaaaattggagatggagtcgaagctccacagaaatctgctttttcaggattgcgagaaggagcaagataataaaaccaaggacccaacccacgatgtgaaaacgccaaacactgagacaaggacctcctgcctgatcaaatataacgtgagcaccacaccatatctccagagtgttaaaaaaaaggtccagtttgatggaaccaattcagccttcaaagagctcaagttcttgacacccgttcgcaggtctcgccgtctgcaggaaaagacttccaagctcccagatatgctgaaggatcactacccttgcgtgtcaagcctcgagcagttaacggagctgggaagggagactgacgcattcgtgtgcagacccaatgctgctctctgcagggtttattacgaagccgacaccacttag

SEQ ID NO: 197083 - DNA, 2049 bp, Artificial Sequence
  derived and/or modified sequence
atgagcaccccagctgtgccccaggacctgcagctgccccccagccagagggcccagagcgccttcaaggagcagaggcggcagaagctgaaggagcacctgctgcggaggaagaccctgtttgcctacaagcaggagaatgagatgctgagcagccgggaccagagggtggtgaccagcgaggaccaggtgcaggagggcaccaaggtgctgaagctgaagaccaagatggctgacaaggagaacatgaagaggcctgctgagagcaagaacaacacagtggtgggcaagcactgcatccccctgaagcccagcaatgagctgaccaacagcacagtggtgattgacacccacaagcccaaggacagcaaccagaccccccacctgctgctgacagaagatgacccccagagccagcacatgaccctgagccaggccttccacctgaagaacaacagcaagaagaagcagatgaccacagagaagcagaagcaggatgccaacatgcccaagaagcctgtgctgggcagctaccggggccagatcgtgcagagcaagatcaacagcttcaggaagcccctgcaggtgaaggatgagagcagcgctgccaccaagaagctgagcgccaccatccccaaggccaccaagccccagcctgtgaacaccagctctgtgacagtgaagagcaacagaagcagcaacatgacagccaccaccaagtttgtgtccaccaccagccagaacacccagctggtgcggccccccatccgcagccaccacagcaacacccgggacacagtgaagcagggcatcagcaggaccagcgccaacgtgaccatcaggaagggcccccatgagaaggagctgctgcagagcaagacagccctgagctctgtgaagaccagcagcagccagggcatcatccggaacaagaccctgagccgcagcatcgccagcgaggtgattgcccggcctgccagcctgagcaatgacaagctgatggagaagtctgagcctgtggaccagaggaggcacacagctgggaaggccatcgtggacagccgcagcgcccagcccaaggagaccagcgaggagaggaaggcccggctgtctgagtggaaggccggcaagggccgggtgctgaagaggcctcccaacagcgtggtgacccagcacgagcctgctggccagaatgagaagcctgtgggcagcttctggaccaccatggccgaggaggatgagcagaggctcttcacagagaaggtgaacaacaccttcagcgagtgcctgaacctgatcaatgaaggctgccccaaggaggacatcctggtgaccctgaatgacctgatcaagaacatcccagatgccaagaagctggtgaagtactggatctgcctggccctgattgagcccatcaccagccccatcgagaacatcatcgccatctatgagaaggccatcctggccggggcccagcccatcgaggagatgaggcacaccatcgtggacatcctgaccatgaagagccaggagaaggccaacctgggggagaacatggagaagagctgtgccagcaaggaggaggtgaaggaggtgtccattgaagatactggagtggatgtggaccctgagaagctggagatggagagcaagctgcacaggaacctgctcttccaggactgtgagaaggagcaggacaacaagaccaaggaccccacccatgatgtgaagacccccaacacagagaccaggaccagctgcctgatcaagtacaacgtgtccaccaccccctacctgcagagcgtgaagaagaaggtgcagtttgatggcaccaacagcgccttcaaggagctgaagttcctgacccctgtgagaagaagccggcggctgcaggagaagaccagcaagctgcctgacatgctgaaggaccactacccctgtgtgagcagcctggagcagctgacagagctgggccgggagacagatgcctttgtgtgccggcccaatgctgccctgtgccgggtgtactatgaagctgacaccacctag

SEQ ID NO: 197084 - DNA, 2049 bp, Artificial Sequence
  derived and/or modified sequence
atgagcacccccgccgtgccccaggacctgcagctgccccccagccagcgcgcacaaagcgctttcaaggaacagcggcggcagaagttgaaggagcatttactgcgacgaaagaccctgttcgcttataaacaggaaaatgagatgttgagctccagggaccagcgcgttgtcacctcagaggatcaagtgcaggaaggcaccaaagtgttgaaactcaagaccaagatggccgacaaggaaaatatgaagcgacctgcggagtccaaaaataatactgtggtgggcaagcactgtattcccctcaaacctagcaatgagcttacaaatagcaccgtagtgattgacacacataagccaaaggacagtaatcagacacctcacctgctcttgacagaggatgaccctcagagccagcatatgacattgagtcaagcgttccacctcaagaataattcaaagaagaagcaaatgactaccgagaaacagaaacaggatgccaatatgcccaagaagccagtgttaggttcttatcgagggcagatcgtacaatccaagataaactcctttagaaagccactgcaggttaaggatgagtctagtgccgctacaaagaagctcagtgccacaatccctaaagctacaaagccccagcctgtgaacacgagctcagtgacagttaaatccaaccgctcctccaacatgacagccacaacaaagtttgtttctaccaccagccagaacacacagttggtgcgcccacctatcaggagccatcatagtaacacaagagatacagtcaaacagggaatcagccgtacatcagccaatgtgacaatacgaaagggaccacatgagaaggagctgttacagagcaagactgcactgtcaagcgtgaagaccagcagctcccaaggtatcattcggaacaaaacgttgtctagaagcattgctagtgaagttattgcccgcccagcctcattgagcaatgacaagctgatggagaaatcggagcccgtggatcagaggaggcatactgcgggtaaagcgattgtggactctcggagcgctcagccaaaggaaacctccgaagaacgcaaggcaagactatcagaatggaaggccggaaagggcagggtactgaagcggccccctaactctgttgtgacccagcacgagccagccggacagaacgagaaacccgtcggcagtttctggacgaccatggccgaagaggacgaacaaagactatttacagagaaggtaaataatacattctccgaatgtctgaatcttatcaacgaaggctgtcctaaggaggacatcctcgttacactaaacgacctcatcaagaatattccagatgctaagaaattagtaaagtactggatctgtctggccctcatcgagccaattaccagtcctatagagaatatcattgcaatttacgagaaggcaattctggctggagcacagcctattgaagagatgaggcataccattgtggatatcttgacaatgaagtcacaggagaaggcaaacctgggagaaaacatggaaaaatcgtgtgcttctaaagaagaggtcaaggaggtatctatcgaagatactggagtagacgtggatcctgaaaaattggaaatggagtcaaaactgcatcgaaatttgctgtttcaggattgcgagaaggagcaggataacaagacaaaggaccctacacacgacgtgaaaactcctaacacagagacaaggacctcttgtcttattaagtacaacgtgtccaccaccccatatctgcaaagcgtgaagaagaaggtgcagttcgacgggacaaactccgccttcaaggagctgaagttcctgacccctgtccgccggtcccggcgactccaagagaaaacttcaaagctgccagatatgctgaaagaccactatccctgcgtgtcatccctagaacagctgacagagctggggagagaaacagatgcatttgtgtgccgaccaaacgccgccttgtgtcgagtgtattatgaggccgatacgacctag

SEQ ID NO: 197085 - DNA, 2049 bp, Artificial Sequence
  derived and/or modified sequence
atgtccacccccgctgtccctcaggatctgcagcttcccccatcacagagagctcagtctgccttcaaggagcagcgcaggcagaagctgaaggaacatctacttagaagaaagactctgtttgcctacaaacaggaaaatgaaatgttgtcatcaagggaccagcgcgtcgttactagcgaagatcaggtgcaggagggcactaaagtcctgaagctgaaaacaaagatggcagataaagaaaatatgaagagaccagccgagtctaaaaacaataccgtcgtgggcaagcactgcatccctctgaagccatctaacgagctcaccaattccaccgtcgttattgatacccataagccaaaagattctaaccaaactccccatttattgttgaccgaagacgatccccagtcccagcatatgactctgtcacaggccttccacttaaaaaacaacagtaaaaagaaacagatgaccactgaaaaacaaaagcaggatgctaacatgccgaagaagccggttctgggaagctatcgtggccaaatcgtccaatccaagattaacagtttccgcaagcccctgcaagtgaaggatgagagttcggcagcaacgaagaaactgtccgcgactatccccaaggccactaagccgcagccagtgaatactagctccgttactgttaagtctaataggtcctccaacatgaccgcaacaacaaaattcgtctccaccacctctcagaacacacagctcgtgcgtccgcctatacgcagccatcacagcaacacccgagatacagtcaagcagggcatctctcgcacttctgccaatgtgaccatccgtaaagggcctcatgagaaagagctgctgcagtcaaagaccgctctgagttctgtaaaaacctcgtctagccagggcataatccgcaataagactctgagtcggagtatcgctagcgaggtgattgccaggcctgccagtctctctaatgataagctgatggaaaaatcagaacctgtcgatcagcgtaggcacacggctggtaaagcaatcgtcgactcccggtctgcccagcccaaagagaccagtgaagagcgaaaggccaggttgtccgagtggaaggctggaaaaggccgagttctcaaaaggccaccaaactctgttgttacacagcatgaacccgctgggcagaatgagaagccagtgggtagcttctggaccacgatggccgaggaagatgaacagcgcctctttactgaaaaggttaacaacaccttctctgaatgtcttaatcttatcaacgagggctgcccaaaggaagatattctagtcaccctcaatgatctcattaaaaatatccccgacgcgaaaaagctggtaaagtattggatctgtcttgcccttatcgaacctattacttcccctatcgagaacattattgccatttatgaaaaggccattctggcaggagctcagcctattgaagagatgaggcacacaattgtggatattctcacaatgaaaagccaggagaaagccaacttaggcgagaacatggagaaaagttgtgcttccaaagaggaggtgaaagaagtgagcatcgaggataccggcgtcgatgtcgaccccgagaaactggaaatggagtccaaactgcatcgcaacctgttgtttcaagattgtgaaaaggaacaggataacaagacaaaagatcccactcacgatgtgaagaccccaaatactgagaccagaacaagttgtctcatcaagtacaatgtgagcacaactccttacttgcagtccgtgaaaaaaaaagttcagtttgatggaacgaatagcgcgttcaaagaactgaagttcctgactccagtgcgcaggtcccggagattacaagaaaagaccagtaaattgccagacatgcttaaggatcattacccttgcgtaagtagtctggaacaacttacggagttgggtcgggaaaccgacgcctttgtgtgtcgtcccaacgcggcactttgtcgggtgtactatgaggccgacacaacctag

SEQ ID NO: 197086 - DNA, 3375 bp, Artificial Sequence
  derived and/or modified sequence
ggagacggcagccgcgccgtctgacggcttagccgcggtgcagactgcggcggcggtggtctgaggaagttctatcttggcgctaaagcggagacgcatcccccgacccgaggctacgatgagcacaccggccgtgccccaggacctgcagctgcccccgagtcagagggcgcagtccgcattcaaagagcaaagaagacaaaaactcaaggaacatctgttgagaagaaaaacgctttttgcatacaagcaggaaaatgagatgttatccagtagagatcagagagttgtgacatctgaggaccaagttcaagaagggactaaagtgctgaaacttaaaacaaaaatggctgataaagaaaacatgaagagacctgcagagagcaaaaataatacagtggtggggaaacattgtattcctttaaaaccttcaaatgaactaaccaattcaactgtagtaattgacacacataaacctaaggatagtaatcaaactccgcatttgttactaactgaagatgatccccaaagtcaacatatgacattaagccaggcatttcaccttaaaaacaatagtaaaaagaaacaaatgactacagaaaaacaaaagcaagatgctaacatgcccaagaaacctgtgcttggatcttatcgtggccagattgttcagtctaagattaattcatttagaaaacctctacaagtcaaagatgagagttctgcagcaacaaagaaactttcagccactatacctaaagccacaaaacctcagcctgtaaacaccagcagtgtaacagtgaaaagtaatagatcctccaatatgactgccactactaaatttgtgagcactacatctcagaacacacaacttgtgcgacctcctattagaagtcatcacagtaatacccgggacactgtgaaacaaggcatcagtagaacttctgccaatgttacaatccggaaagggcctcatgaaaaagaactattacaatcaaaaacagctttatctagtgtcaaaaccagttcttctcaaggtataataagaaataagactctatcaagatccatagcatctgaagttatagccaggcctgcttcattgtctaatgataaactgatggaaaagtcagagcccgttgaccagcgaagacatactgcaggaaaagcaattgttgatagtagatcagctcagcccaaagaaacctcggaagagagaaaagctcgtctgagtgagtggaaagctggcaaaggaagagtgctaaaaaggccccctaattcagtagttactcagcatgagcctgcaggacaaaatgaaaaaccagttgggtctttttggactaccatggcagaagaagatgaacaaagattatttactgaaaaagtaaacaacacattttctgaatgcctgaacttgattaatgagggatgtccaaaagaagatatactggtcacactgaatgacctgattaaaaatattccagatgccaaaaagcttgttaagtattggatatgtcttgcacttattgaaccaatcacaagtcctattgaaaatattattgcaatctatgagaaagccattctggcaggggctcagcctattgaagagatgcgacacacgattgtagatattctaacaatgaagagtcaagaaaaagctaatttaggagaaaatatggagaagtcttgtgcaagcaaggaagaagtcaaagaagtcagtattgaagatacaggtgttgatgtagatccagaaaaactggaaatggagagtaaacttcatagaaatttgctatttcaagattgtgaaaaagagcaagacaacaaaacaaaagatccaacccatgatgttaaaacccccaatacagaaacgaggacaagttgcttaattaaatataatgtgtctactacgccatacttgcaaagtgtgaaaaaaaaggtgcagtttgatggaacaaattccgcatttaaagagctgaagtttttaacaccagtgagacgttctcgacgtcttcaagagaaaacttctaaattgccagatatgttaaaagatcattatccttgtgtgtcttcattggaacagctaacggagttgggaagagaaactgatgcttttgtatgccgccctaatgcagcactgtgccgggtgtactatgaggctgatacaacataagagaaataaagctctgttagggaatggggtttttattatttgtggggtgttttgttttgagtagctttatattgctcttaggtctggagttggccatgtacctatgtatcctaagcattcacggcagtgagctcctttactaacattcatgttatggcaagagttgtcctctacattggaaagctaatcctaccttgtcagtttcaaccaactgagttttttctttaagaaaggtaaattttgtcagctagtttactatgttccttgaatataaacaggttataatactaccctgttcactttactaaatataagtacagtaatgatgcataattagaaaatgaggtattctaggtaaaatgtatgtttgccttgacatgtttttaaaagttatgatgtacctccctgcctttaaacagaatacttttttcttttttttggcctttctcagattagtcaaaaattctatagaatgactcacttcgaatactaagacacaggaggtttagcctgctttcttaccaaattcatgttacccagacttgtgttctcttgcgtcccttggactgcctgttgattgatggaaagtgtctgcactgacacttttcgtcagtagtctgtagtttcgtggcctcttttgattataactggggtcaccaagaaggtttacttaattaaataccgcatttctaagagaagatactttgtgtaagaaaagatgccacatttagtggtttaacttttgtaacttcacttgatagtttttaagcaattagaatggagttagggaaagaacatatcatactgaacaaatgtcattctagtttagatagcatttctaagataactgatactaatacttgttttcttccctataacataaaaaacttcactgttaagtcatgtcccttgaaacatgatagttacatacacagttttctctccacacataaataacaccactaaagttgttttgtaaggttccaaactaatatggcatatatcaactctacagtttcaaataaatgactttttaattgtaaaagattagttgaaaaactgtatgaatgtgaagatcacatgcttagtcatttttatgttcattccactttgtatatcttttctatttattgacttctcatgttctagagagtaggacttttattccgtgtacctgatatatatacaattaaaatatctgtgtaatt

SEQ ID NO: 197087 - DNA, 2049 bp, Artificial Sequence
  derived and/or modified sequence
atgagcacccccgccgtgccccaggacctgcagctgccccccagccagagagcccagagcgccttcaaggagcagagaagacagaagctgaaggagcacctgctgagaagaaagaccctgttcgcctacaagcaggagaacgagatgctgagcagcagagaccagagagtggtgaccagcgaggaccaggtgcaggagggcaccaaggtgctgaagctgaagaccaagatggccgacaaggagaacatgaagagacccgccgagagcaagaacaacaccgtggtgggcaagcactgcatccccctgaagcccagcaacgagctgaccaacagcaccgtggtgatcgacacccacaagcccaaggacagcaaccagaccccccacctgctgctgaccgaggacgacccccagagccagcacatgaccctgagccaggccttccacctgaagaacaacagcaagaagaagcagatgaccaccgagaagcagaagcaggacgccaacatgcccaagaagcccgtgctgggcagctacagaggccagatcgtgcagagcaagatcaacagcttcagaaagcccctgcaggtgaaggacgagagcagcgccgccaccaagaagctgagcgccaccatccccaaggccaccaagccccagcccgtgaacaccagcagcgtgaccgtgaagagcaacagaagcagcaacatgaccgccaccaccaagttcgtgagcaccaccagccagaacacccagctggtgagaccccccatcagaagccaccacagcaacaccagagacaccgtgaagcagggcatcagcagaaccagcgccaacgtgaccatcagaaagggcccccacgagaaggagctgctgcagagcaagaccgccctgagcagcgtgaagaccagcagcagccagggcatcatcagaaacaagaccctgagcagaagcatcgccagcgaggtgatcgccagacccgccagcctgagcaacgacaagctgatggagaagagcgagcccgtggaccagagaagacacaccgccggcaaggccatcgtggacagcagaagcgcccagcccaaggagaccagcgaggagagaaaggccagactgagcgagtggaaggccggcaagggcagagtgctgaagagaccccccaacagcgtggtgacccagcacgagcccgccggccagaacgagaagcccgtgggcagcttctggaccaccatggccgaggaggacgagcagagactgttcaccgagaaggtgaacaacaccttcagcgagtgcctgaacctgatcaacgagggctgccccaaggaggacatcctggtgaccctgaacgacctgatcaagaacatccccgacgccaagaagctggtgaagtactggatctgcctggccctgatcgagcccatcaccagccccatcgagaacatcatcgccatctacgagaaggccatcctggccggcgcccagcccatcgaggagatgagacacaccatcgtggacatcctgaccatgaagagccaggagaaggccaacctgggcgagaacatggagaagagctgcgccagcaaggaggaggtgaaggaggtgagcatcgaggacaccggcgtggacgtggaccccgagaagctggagatggagagcaagctgcacagaaacctgctgttccaggactgcgagaaggagcaggacaacaagaccaaggaccccacccacgacgtgaagacccccaacaccgagaccagaaccagctgcctgatcaagtacaacgtgagcaccaccccctacctgcagagcgtgaagaagaaggtgcagttcgacggcaccaacagcgccttcaaggagctgaagttcctgacccccgtgagaagaagcagaagactgcaggagaagaccagcaagctgcccgacatgctgaaggaccactacccctgcgtgagcagcctggagcagctgaccgagctgggcagagagaccgacgccttcgtgtgcagacccaacgccgccctgtgcagagtgtactacgaggccgacaccacctag

SEQ ID NO: 197088 - protein, 128 aa, Artificial Sequence
  derived and/or modified sequence
MLKKMGEAVARVARKVNETVESGSDTLDLAECKLVSFPIGIYKVLRNVSGQIHLITLANNELKSLTSKFMTTFSQLRDVPVEKLAAMPALRSINLRFNPLNAEVRVIAPPLIKFDMLMSPEGARAPLP

SEQ ID NO: 197089 - DNA, 387 bp, Artificial Sequence
  derived and/or modified sequence
atgctgaagaagatgggcgaggccgtggccagagtggccagaaaggtgaacgagaccgtggagagcggcagcgacaccctggacctggccgagtgcaagctggtgagcttccccatcggcatctacaaggtgctgagaaacgtgagcggccagatccacctgatcaccctggccaacaacgagctgaagagcctgaccagcaagttcatgaccaccttcagccagctgagagacgtgcccgtggagaagctggccgccatgcccgccctgagaagcatcaacctgagattcaaccccctgaacgccgaggtgagagtgatcgccccccccctgatcaagttcgacatgctgatgagccccgagggcgccagagcccccctgccctag

SEQ ID NO: 197090 - DNA, 387 bp, Artificial Sequence
  derived and/or modified sequence
atgttaaagaagatgggtgaggcagtggcaagggtggctagaaaagtgaacgagactgtcgagagtggaagcgacacattagacttagccgagtgcaaactggtctcatttcccattggcatctataaggtgcttcgcaacgtctctggccagatccacctgattacactggctaataatgaattgaaaagtctaactagtaaatttatgactaccttctcacaactgcgtgacgttcccgtcgaaaaactggctgccatgccagccctccggtccattaacctccgcttcaacccactaaacgcggaagtacgagtaattgcgccaccgttaatcaagttcgacatgctgatgagcccagagggggcccgggcacctctcccttag

SEQ ID NO: 197091 - DNA, 387 bp, Artificial Sequence
  derived and/or modified sequence
atgttaaagaagatgggagaggccgtcgcacgggtcgctagaaaagtgaacgaaacagtagaatccggaagtgatacccttgatctcgctgagtgcaaacttgttagttttcccattggtatttacaaagtgctgcgtaacgtttccggccagatccatctgattacactcgcaaacaatgagctgaagtcactcacatctaagtttatgaccactttcagccaactgcgtgatgtgccagttgagaaattagccgctatgcccgctctcaggtctataaatctgcggtttaaccctttgaacgccgaggtaagggttattgcacctccgcttataaagttcgacatgctcatgagtcctgaaggtgctagagcaccgttgccctag

SEQ ID NO: 197092 - DNA, 387 bp, Artificial Sequence
  derived and/or modified sequence
atgctgaagaagatgggagaggccgtggcccgggtggccaggaaggtgaatgaaacagtggagagcggcagtgacaccctggacctggccgagtgcaagctggtgtccttccccatcggcatctacaaggtgctgagaaatgtgtctggccagatccacctgatcaccctggccaacaatgagctgaagagcctgaccagcaagttcatgaccaccttcagccagctgagagatgtgcctgtggagaagctggccgccatgcctgccctgcggagcatcaacctgcgcttcaaccccctgaatgctgaggtgcgggtgattgcccctcctctcatcaagtttgacatgctgatgagccctgagggcgcccgggcccccctgccctag

SEQ ID NO: 197093 - DNA, 2906 bp, Artificial Sequence
  derived and/or modified sequence
tcggaactcgcctggggcgccgccggcggcggagggagcgtgactgcgctgcgcagggcgctaggaggcattgtcgccgctcaggcccttttgtgagaagcagaccagcctgggggctggcggcaggacacctgtgtctgcatgctgaagaagatgggtgaggccgtggccagagtagcaaggaaggtcaacgagacggtggagagcggctctgacactctggacctggccgagtgcaagctggtctcctttcccattggcatctacaaggtcctgcggaatgtctctggccagatccacctcatcaccctggctaacaacgagcttaagtccctcaccagcaagttcatgaccacattcagtcagctccgagatgtgcccgtggagaagctggccgccatgccagccttgcgcagcatcaacctccgcttcaacccactcaacgccgaggtgcgcgtgatcgccccgccgctcatcaagtttgacatgctcatgtctccggaaggcgcaagagcccccctaccttaggccaccctcctcatgcccacccagcaaggggcagaggccacaggcctggaaccctggaagggagggaggcccatgggaggccaagcctgggggctgggggcgggtgggccgagcagcacgtggtgggtggggtgcagctggtctggatagatagcttacagcagtagtgggctctggaatgcccaagggaagaggcaaggtggggcctgcagcctggactcggcactcacagctgctgtgcaaactcaggcagatctcctgccctctctgagccttgtcacttgaaaaaaacaggaccctttccctcctttgggctccctggaggtttttaagcagtacgtgcctccaagttacctccagatcagcaggcacaggtgggcattgccaggtattttctgagcccctgcgggtttgaggccttgtttttagtgctgagagccagttgctgccctgagaagagaagacaacctccatctatttattgcttcctgagaactgacctggatgcggccctctgcagggcccagtcttcagtcctgtggtccctggactggtgggaacctgaactaggagtcctgggagagctgtggtgggaatatgggctggcactgctgcagggcaagaacattcatgtaggagcccgaggaccagcaggctgggaatggggagcaagtcacgtcagctctgtcattccccacagttaacaaattggcggggtgggaagtcctgagtgctccgtccctctagcatcactcctgagctgcgggagaggtggcccagagaacagcagagtcagttacacctgcagctcttgtctaaagtgattagatggccaccctcaccactgtccagtccagcagcagcctggctgccttgtcatggcctcctgggggcagaaggcgatgtggaccacgggatttgtagccagccagctcccaggccaacgcccaaagccctgatgacctggttcttctgaggccctcaacctggcatcttagggtatggtcaggcaacagggtgaccagctgtcctggtttcccaggacatggaactttcaatgctaaaactgggacagtacccagcaagtggggatggttggtcccctaccaggagagggcctggggctcttgcttcccgagaacgcctgtggcttgaagaaccttgactgcttggtcctcaggtatctacctcccaccttctcctcatctgtggagcaagccaactcagtgccccagaccccacctgatctgcatctttgtttgcatctccagagacacctgaggccccagagcttgaggcaaagccaggccgtccaaatcctgtgtgccgtggacgagtggccactttactactcctaaggctaagatgttgagagctcagaccactgctcagagcagtaatccctgctcagaatgctcccagttccctcgtccctgcccaggtctcttgtctcttgggaaggaactgataggtcgggccattgttgggccatcactgagcgctcagtatctcaagagactctgttcattctgctcgtatcccaaggcctggttggtcaaactctgggcaaagggttttcaggatgaggaggtcaagacaggatctccagagctaccgagttcatctgtgggtgttgggggcaagtgggggctgaagtcctgtgcaggctgcgctggccccacctgccttgtgccctggagtggggtttctccttgttgaagaagaggcatccttctctgatgtgcacaaacacaatgtatgaccagagccttgcaactcaaagtgtggtctgtggaccagcagcggcagtgacacctgggagcttgttaggaatgcagagtctaggcctcaccctatacctcccgactcagaccctgcattttagcaagacccccagctgattcctataagcactttagagtttgagaagcaaggacctaggctggggatgtcctccgagcagagggtgaagtttctctcagttctctccctgccacttccagggatctgagcctgtgctcagcctcctccctaacccaccctgggagacacttggcctgttagattgttccagagtctgcatggcactcctgaagaagggagtgtgacctgcagtcaccaggagatgagggttaggtgtgcccagccctccagacccggcctttctggttaacccctgcatgccaagctgcctgctgccccaggtcctcacctcaggcctttgaaggggcagcttctggaagttgttttctcctctgcttggagagtttgcccttgtctgtcttggaaagtgtgggcagccacagatgcccccaaatcagagctcacagtgagtgagcccctaagcttcagtctgcaataaagaatgcattggtttc

SEQ ID NO: 197094 - DNA, 2990 bp, Artificial Sequence
  derived and/or modified sequence
gcttgcacacatggctccggaggctccggttgcccatccgagcccctgccaggctctaacgttcccaactgacaacaccagtaactaaatataggagcagatggtggggacgggctgtcgcagcggctcctttgcagaggtctccggactgcagataaggctcaggcccttttgtgagaagcagaccagcctgggggctggcggcaggacacctgtgtctgcatgctgaagaagatgggtgaggccgtggccagagtagcaaggaaggtcaacgagacggtggagagcggctctgacactctggacctggccgagtgcaagctggtctcctttcccattggcatctacaaggtcctgcggaatgtctctggccagatccacctcatcaccctggctaacaacgagcttaagtccctcaccagcaagttcatgaccacattcagtcagctccgagatgtgcccgtggagaagctggccgccatgccagccttgcgcagcatcaacctccgcttcaacccactcaacgccgaggtgcgcgtgatcgccccgccgctcatcaagtttgacatgctcatgtctccggaaggcgcaagagcccccctaccttaggccaccctcctcatgcccacccagcaaggggcagaggccacaggcctggaaccctggaagggagggaggcccatgggaggccaagcctgggggctgggggcgggtgggccgagcagcacgtggtgggtggggtgcagctggtctggatagatagcttacagcagtagtgggctctggaatgcccaagggaagaggcaaggtggggcctgcagcctggactcggcactcacagctgctgtgcaaactcaggcagatctcctgccctctctgagccttgtcacttgaaaaaaacaggaccctttccctcctttgggctccctggaggtttttaagcagtacgtgcctccaagttacctccagatcagcaggcacaggtgggcattgccaggtattttctgagcccctgcgggtttgaggccttgtttttagtgctgagagccagttgctgccctgagaagagaagacaacctccatctatttattgcttcctgagaactgacctggatgcggccctctgcagggcccagtcttcagtcctgtggtccctggactggtgggaacctgaactaggagtcctgggagagctgtggtgggaatatgggctggcactgctgcagggcaagaacattcatgtaggagcccgaggaccagcaggctgggaatggggagcaagtcacgtcagctctgtcattccccacagttaacaaattggcggggtgggaagtcctgagtgctccgtccctctagcatcactcctgagctgcgggagaggtggcccagagaacagcagagtcagttacacctgcagctcttgtctaaagtgattagatggccaccctcaccactgtccagtccagcagcagcctggctgccttgtcatggcctcctgggggcagaaggcgatgtggaccacgggatttgtagccagccagctcccaggccaacgcccaaagccctgatgacctggttcttctgaggccctcaacctggcatcttagggtatggtcaggcaacagggtgaccagctgtcctggtttcccaggacatggaactttcaatgctaaaactgggacagtacccagcaagtggggatggttggtcccctaccaggagagggcctggggctcttgcttcccgagaacgcctgtggcttgaagaaccttgactgcttggtcctcaggtatctacctcccaccttctcctcatctgtggagcaagccaactcagtgccccagaccccacctgatctgcatctttgtttgcatctccagagacacctgaggccccagagcttgaggcaaagccaggccgtccaaatcctgtgtgccgtggacgagtggccactttactactcctaaggctaagatgttgagagctcagaccactgctcagagcagtaatccctgctcagaatgctcccagttccctcgtccctgcccaggtctcttgtctcttgggaaggaactgataggtcgggccattgttgggccatcactgagcgctcagtatctcaagagactctgttcattctgctcgtatcccaaggcctggttggtcaaactctgggcaaagggttttcaggatgaggaggtcaagacaggatctccagagctaccgagttcatctgtgggtgttgggggcaagtgggggctgaagtcctgtgcaggctgcgctggccccacctgccttgtgccctggagtggggtttctccttgttgaagaagaggcatccttctctgatgtgcacaaacacaatgtatgaccagagccttgcaactcaaagtgtggtctgtggaccagcagcggcagtgacacctgggagcttgttaggaatgcagagtctaggcctcaccctatacctcccgactcagaccctgcattttagcaagacccccagctgattcctataagcactttagagtttgagaagcaaggacctaggctggggatgtcctccgagcagagggtgaagtttctctcagttctctccctgccacttccagggatctgagcctgtgctcagcctcctccctaacccaccctgggagacacttggcctgttagattgttccagagtctgcatggcactcctgaagaagggagtgtgacctgcagtcaccaggagatgagggttaggtgtgcccagccctccagacccggcctttctggttaacccctgcatgccaagctgcctgctgccccaggtcctcacctcaggcctttgaaggggcagcttctggaagttgttttctcctctgcttggagagtttgcccttgtctgtcttggaaagtgtgggcagccacagatgcccccaaatcagagctcacagtgagtgagcccctaagcttcagtctgcaataaagaatgcattggtttcatc

SEQ ID NO: 197095 - DNA, 387 bp, Artificial Sequence
  derived and/or modified sequence
atgctgaagaagatgggcgaggccgtggcccgggtggcccggaaggtaaacgaaacagtagagagcggaagtgacaccttggatctggccgaatgtaagctcgtcagttttcccataggtatctataaggtgttaaggaatgtgagcggccaaattcatctaattacccttgccaacaatgaattgaagtccctaacttcaaaattcatgacaactttcagccaacttcgggatgtgcctgttgaaaaactcgccgccatgcctgccctgagaagtatcaatttgagatttaatccactgaacgcagaggtgagggtgattgcgccacctcttattaagtttgatatgctaatgtcacctgaaggagcgcgggcccctctcccatag

SEQ ID NO: 197096 - DNA, 387 bp, Artificial Sequence
  derived and/or modified sequence
atgctgaagaagatgggcgaggccgtggcccgggtggcccggaaggtcaatgagacggttgaatccgggtccgacactctggatttggctgagtgtaagctcgtcagcttccccataggcatttacaaagtccttagaaacgtttccgggcagatccacctgattaccctcgccaataacgagctgaagtcactgacgtctaaatttatgacaaccttttcgcaactgagggatgtcccggtagaaaagcttgccgcaatgcccgcacttcgctcaattaacttgaggtttaaccccttgaacgccgaggtgagagttattgccccccccctgatcaagttcgatatgctcatgagtcccgagggtgctcgagctcccttaccctag

SEQ ID NO: 197097 - DNA, 387 bp, Artificial Sequence
  derived and/or modified sequence
atgctgaaaaaaatgggtgaggccgtcgcacgcgtggctagaaaagtaaacgagactgtggagtctggctccgacactcttgatctggccgagtgcaagctcgtgagcttcccgatcgggatctacaaagtgctgcgaaacgttagcgggcagatacacctgattacgcttgctaataatgaattgaagagcctcacgtctaagttcatgaccaccttctcccagctgcgagacgtgcccgtcgaaaagctggcagccatgcctgctctgcgctctatcaacctccggttcaacccactcaacgcggaagtgcgcgtcattgcacccccactcattaaatttgacatgctcatgagtcctgaaggggcacgggcaccccttccttag

SEQ ID NO: 197098 - DNA, 387 bp, Artificial Sequence
  derived and/or modified sequence
atgctcaaaaaaatgggcgaagctgtggcccgagtcgccagaaaggtgaatgagaccgtggaatcgggaagtgataccctcgatttggctgagtgcaaactcgtgtccttccccataggcatctacaaagtgctccgaaacgtctccgggcaaattcacctcattactttagcaaataatgagctgaagtccctgactagcaaattcatgacgacattcagtcagcttcgagacgtgcctgtggagaaattagccgctatgccggcactcaggagcataaatctcaggtttaacccgctgaatgcagaggtcagggtgatcgccccaccactgatcaagtttgatatgcttatgtcccctgaaggtgctcgggctcccctcccatag

SEQ ID NO: 197099 - protein, 796 aa, Artificial Sequence
  derived and/or modified sequence
MPTTQQSPQDEQEKLLDEAIQAVKVQSFQMKRCLDKNKLMDALKHASNMLGELRTSMLSPKSYYELYMAISDELHYLEVYLTDEFAKGRKVADLYELVQYAGNIIPRLYLLITVGVVYVKSFPQSRKDILKDLVEMCRGVQHPLRGLFLRNYLLQCTRNILPDEGEPTDEETTGDISDSMDFVLLNFAEMNKLWVRMQHQGHSRDREKRERERQELRILVGTNLVRLSQLEGVNVERYKQIVLTGILEQVVNCRDALAQEYLMECIIQVFPDEFHLQTLNPFLRACAELHQNVNVKNIIIALIDRLALFAHREDGPGIPADIKLFDIFSQQVATVIQSRQDMPSEDVVSLQVSLINLAMKCYPDRVDYVDKVLETTVEIFNKLNLEHIATSSAVSKELTRLLKIPVDTYNNILTVLKLKHFHPLFEYFDYESRKSMSCYVLSNVLDYNTEIVSQDQVDSIMNLVSTLIQDQPDQPVEDPDPEDFADEQSLVGRFIHLLRSEDPDQQYLILNTARKHFGAGGNQRIRFTLPPLVFAAYQLAFRYKENSKVDDKWEKKCQKIFSFAHQTISALIKAELAELPLRLFLQGALAAGEIGFENHETVAYEFMSQAFSLYEDEISDSKAQLAAITLIIGTFERMKCFSEENHEPLRTQCALAASKLLKKPDQGRAVSTCAHLFWSGRNTDKNGEELHGGKRVMECLKKALKIANQCMDPSLQVQLFIEILNRYIYFYEKENDAVTIQVLNQLIQKIREDLPNLESSEETEQINKHFHNTLEHLRLRRESPESEGPIYEGLIL

SEQ ID NO: 197100 - protein, 662 aa, Artificial Sequence
  derived and/or modified sequence
MCRGVQHPLRGLFLRNYLLQCTRNILPDEGEPTDEETTGDISDSMDFVLLNFAEMNKLWVRMQHQGHSRDREKRERERQELRILVGTNLVRLSQLEGVNVERYKQIVLTGILEQVVNCRDALAQEYLMECIIQVFPDEFHLQTLNPFLRACAELHQNVNVKNIIIALIDRLALFAHREDGPGIPADIKLFDIFSQQVATVIQSRQDMPSEDVVSLQVSLINLAMKCYPDRVDYVDKVLETTVEIFNKLNLEHIATSSAVSKELTRLLKIPVDTYNNILTVLKLKHFHPLFEYFDYESRKSMSCYVLSNVLDYNTEIVSQDQVDSIMNLVSTLIQDQPDQPVEDPDPEDFADEQSLVGRFIHLLRSEDPDQQYLILNTARKHFGAGGNQRIRFTLPPLVFAAYQLAFRYKENSKVDDKWEKKCQKIFSFAHQTISALIKAELAELPLRLFLQGALAAGEIGFENHETVAYEFMSQAFSLYEDEISDSKAQLAAITLIIGTFERMKCFSEENHEPLRTQCALAASKLLKKPDQGRAVSTCAHLFWSGRNTDKNGEELHGGKRVMECLKKALKIANQCMDPSLQVQLFIEILNRYIYFYEKENDAIVTIQVLNQLIQKIREDLPNLESSEETEQINKHFHNTLEHLRLRRESPESEGPIYEGLIL

SEQ ID NO: 197101 - DNA, 2391 bp, Artificial Sequence
  derived and/or modified sequence
atgcccaccacccagcagagcccccaggacgagcaggagaagctgctggacgaggccatccaggccgtgaaggtgcagagcttccagatgaagagatgcctggacaagaacaagctgatggacgccctgaagcacgccagcaacatgctgggcgagctgagaaccagcatgctgagccccaagagctactacgagctgtacatggccatcagcgacgagctgcactacctggaggtgtacctgaccgacgagttcgccaagggcagaaaggtggccgacctgtacgagctggtgcagtacgccggcaacatcatccccagactgtacctgctgatcaccgtgggcgtggtgtacgtgaagagcttcccccagagcagaaaggacatcctgaaggacctggtggagatgtgcagaggcgtgcagcaccccctgagaggcctgttcctgagaaactacctgctgcagtgcaccagaaacatcctgcccgacgagggcgagcccaccgacgaggagaccaccggcgacatcagcgacagcatggacttcgtgctgctgaacttcgccgagatgaacaagctgtgggtgagaatgcagcaccagggccacagcagagacagagagaagagagagagagagagacaggagctgagaatcctggtgggcaccaacctggtgagactgagccagctggagggcgtgaacgtggagagatacaagcagatcgtgctgaccggcatcctggagcaggtggtgaactgcagagacgccctggcccaggagtacctgatggagtgcatcatccaggtgttccccgacgagttccacctgcagaccctgaaccccttcctgagagcctgcgccgagctgcaccagaacgtgaacgtgaagaacatcatcatcgccctgatcgacagactggccctgttcgcccacagagaggacggccccggcatccccgccgacatcaagctgttcgacatcttcagccagcaggtggccaccgtgatccagagcagacaggacatgcccagcgaggacgtggtgagcctgcaggtgagcctgatcaacctggccatgaagtgctaccccgacagagtggactacgtggacaaggtgctggagaccaccgtggagatcttcaacaagctgaacctggagcacatcgccaccagcagcgccgtgagcaaggagctgaccagactgctgaagatccccgtggacacctacaacaacatcctgaccgtgctgaagctgaagcacttccaccccctgttcgagtacttcgactacgagagcagaaagagcatgagctgctacgtgctgagcaacgtgctggactacaacaccgagatcgtgagccaggaccaggtggacagcatcatgaacctggtgagcaccctgatccaggaccagcccgaccagcccgtggaggaccccgaccccgaggacttcgccgacgagcagagcctggtgggcagattcatccacctgctgagaagcgaggaccccgaccagcagtacctgatcctgaacaccgccagaaagcacttcggcgccggcggcaaccagagaatcagattcaccctgccccccctggtgttcgccgcctaccagctggccttcagatacaaggagaacagcaaggtggacgacaagtgggagaagaagtgccagaagatcttcagcttcgcccaccagaccatcagcgccctgatcaaggccgagctggccgagctgcccctgagactgttcctgcagggcgccctggccgccggcgagatcggcttcgagaaccacgagaccgtggcctacgagttcatgagccaggccttcagcctgtacgaggacgagatcagcgacagcaaggcccagctggccgccatcaccctgatcatcggcaccttcgagagaatgaagtgcttcagcgaggagaaccacgagcccctgagaacccagtgcgccctggccgccagcaagctgctgaagaagcccgaccagggcagagccgtgagcacctgcgcccacctgttctggagcggcagaaacaccgacaagaacggcgaggagctgcacggcggcaagagagtgatggagtgcctgaagaaggccctgaagatcgccaaccagtgcatggaccccagcctgcaggtgcagctgttcatcgagatcctgaacagatacatctacttctacgagaaggagaacgacgccgtgaccatccaggtgctgaaccagctgatccagaagatcagagaggacctgcccaacctggagagcagcgaggagaccgagcagatcaacaagcacttccacaacaccctggagcacctgagactgagaagagagagccccgagagcgagggccccatctacgagggcctgatcctgtag

SEQ ID NO: 197102 - DNA, 1989 bp, Artificial Sequence
  derived and/or modified sequence
atgtgcagaggcgtgcagcaccccctgagaggcctgttcctgagaaactacctgctgcagtgcaccagaaacatcctgcccgacgagggcgagcccaccgacgaggagaccaccggcgacatcagcgacagcatggacttcgtgctgctgaacttcgccgagatgaacaagctgtgggtgagaatgcagcaccagggccacagcagagacagagagaagagagagagagagagacaggagctgagaatcctggtgggcaccaacctggtgagactgagccagctggagggcgtgaacgtggagagatacaagcagatcgtgctgaccggcatcctggagcaggtggtgaactgcagagacgccctggcccaggagtacctgatggagtgcatcatccaggtgttccccgacgagttccacctgcagaccctgaaccccttcctgagagcctgcgccgagctgcaccagaacgtgaacgtgaagaacatcatcatcgccctgatcgacagactggccctgttcgcccacagagaggacggccccggcatccccgccgacatcaagctgttcgacatcttcagccagcaggtggccaccgtgatccagagcagacaggacatgcccagcgaggacgtggtgagcctgcaggtgagcctgatcaacctggccatgaagtgctaccccgacagagtggactacgtggacaaggtgctggagaccaccgtggagatcttcaacaagctgaacctggagcacatcgccaccagcagcgccgtgagcaaggagctgaccagactgctgaagatccccgtggacacctacaacaacatcctgaccgtgctgaagctgaagcacttccaccccctgttcgagtacttcgactacgagagcagaaagagcatgagctgctacgtgctgagcaacgtgctggactacaacaccgagatcgtgagccaggaccaggtggacagcatcatgaacctggtgagcaccctgatccaggaccagcccgaccagcccgtggaggaccccgaccccgaggacttcgccgacgagcagagcctggtgggcagattcatccacctgctgagaagcgaggaccccgaccagcagtacctgatcctgaacaccgccagaaagcacttcggcgccggcggcaaccagagaatcagattcaccctgccccccctggtgttcgccgcctaccagctggccttcagatacaaggagaacagcaaggtggacgacaagtgggagaagaagtgccagaagatcttcagcttcgcccaccagaccatcagcgccctgatcaaggccgagctggccgagctgcccctgagactgttcctgcagggcgccctggccgccggcgagatcggcttcgagaaccacgagaccgtggcctacgagttcatgagccaggccttcagcctgtacgaggacgagatcagcgacagcaaggcccagctggccgccatcaccctgatcatcggcaccttcgagagaatgaagtgcttcagcgaggagaaccacgagcccctgagaacccagtgcgccctggccgccagcaagctgctgaagaagcccgaccagggcagagccgtgagcacctgcgcccacctgttctggagcggcagaaacaccgacaagaacggcgaggagctgcacggcggcaagagagtgatggagtgcctgaagaaggccctgaagatcgccaaccagtgcatggaccccagcctgcaggtgcagctgttcatcgagatcctgaacagatacatctacttctacgagaaggagaacgacgccatcgtgaccatccaggtgctgaaccagctgatccagaagatcagagaggacctgcccaacctggagagcagcgaggagaccgagcagatcaacaagcacttccacaacaccctggagcacctgagactgagaagagagagccccgagagcgagggccccatctacgagggcctgatcctgtag

SEQ ID NO: 197103 - DNA, 2391 bp, Artificial Sequence
  derived and/or modified sequence
atgccaacgacacaacagtcaccccaagatgaacaagagaagctcctcgacgaagctatccaggccgtcaaggttcaatcgttccagatgaaaaggtgcctggataaaaacaagctaatggacgctctgaagcatgccagcaacatgcttggagagctcagaaccagtatgctgtcccctaagtcatattatgaattgtatatggcaattagtgacgagctacattacttggaggtgtacctcaccgatgaatttgctaagggccgcaaggtagcagatctctacgagctggtgcaatatgcaggcaacattattcctcgcctgtacctgttgataacagttggcgtagtgtacgtcaagagttttccccagtcccgaaaagacattctcaaagatttagtggagatgtgccggggtgtgcagcaccccctgcggggcctttttcttcgcaactatctgctgcagtgtacccgaaatatcctgcccgatgagggagagcctactgacgaggagaccaccggcgacatctccgactccatggatttcgtccttctcaattttgccgagatgaacaagctctgggtgcgaatgcaacaccagggacactcccgagatcgcgaaaaacgcgaacgcgaaagacaggagctgagaatcctcgtgggcaccaacttagtgagactatcacagctagagggcgtgaatgtggagaggtacaaacaaattgtgcttacaggaattctcgagcaggtggtgaattgccgggatgccctagcccaggaataccttatggaatgtatcatccaggtgtttccagatgaattccaccttcagactctgaacccatttcttcgagcctgcgccgagctgcaccaaaacgttaacgtaaagaacatcattatcgctttgattgatcgtcttgccctgttcgcccaccgcgaagacggccccgggatccccgccgatatcaagctcttcgatatcttcagccagcaggtggctacagtgattcagtcaagacaggatatgcccagcgaggacgtcgtgtcactccaagtgagcctgataaacctcgcaatgaagtgctatcccgacagggttgactatgtggacaaagttctcgaaacgaccgtcgagatctttaataagctgaaccttgagcatattgccaccagtagtgccgtgagtaaagagctgacccgactacttaaaattccggtggacacttacaacaatatcctaacagtactgaagttgaaacactttcatccactatttgaatattttgattacgaatcccgcaaaagcatgtcctgctatgtcctgagtaacgtgcttgattacaatactgagatcgtttcccaagatcaggtggattccataatgaacctagttagtacactgatccaggaccaaccagaccagcccgtggaggacccagatccagaggacttcgccgacgaacaaagcctagtaggccgcttcatacatctgctgcgcagtgaagaccccgaccaacagtacctgatcctcaacacggccaggaagcatttcggagcgggagggaaccagaggatcagattcacattaccacccctcgtcttcgcagcatatcagcttgcattccgctacaaggaaaactcaaaggtggatgacaagtgggagaaaaagtgccaaaagattttcagtttcgcccatcagaccatatcagcactgattaaggcggaattggcagaactgccccttcgcttgtttttgcagggcgccctcgcagccggagagattggctttgaaaaccacgagacagttgcgtatgaatttatgagccaggcttttagcctgtatgaagacgaaatttcagattccaaggcacagctggccgctattacattgatcattgggacctttgagagaatgaaatgcttctcagaggagaaccacgagccactccgcacccagtgtgcactggcagccagtaaattgttgaaaaagcctgatcagggacgtgctgtttccacctgcgcgcaccttttctggtccggacggaacactgacaagaatggcgaggagctccacgggggaaaacgcgttatggaatgcctgaaaaaggctctgaaaatagctaaccagtgcatggacccctctctccaggtgcaattgttcatcgaaatactcaaccgatacatctacttctatgaaaaggagaacgatgctgtgaccattcaggtactgaaccagctgattcagaagatccgggaagacctgcctaatttagaaagctctgaagagacggagcagatcaacaagcatttccataacacactcgaacacctccgattgcgccgggaatctcccgaatctgagggacctatctacgaagggttaattctgtag

SEQ ID NO: 197104 - DNA, 1989 bp, Artificial Sequence
  derived and/or modified sequence
atgtgtaggggagtgcagcatccgctccggggcctgtttcttcggaattatctcttacaatgcactcggaatatcctgcccgacgagggggagccgaccgacgaagagacgactggggatatttccgactctatggactttgtcctgctgaattttgctgaaatgaacaaactttgggtgagaatgcagcaccagggtcacagtcgtgatagagagaagagggaacgcgagcgacaggaactgaggattctcgtgggcacgaacctcgtgcgcctgagtcagctggagggggtgaatgtggagagatacaagcagatagtgctcaccggcattctcgagcaagtggtaaactgccgtgacgccttggcgcaggaatatctcatggaatgcattatccaagtattccctgatgaattccacctgcaaaccctgaatccattcctacgcgcctgcgcggaactccaccagaatgtgaacgtgaaaaatattatcatcgcacttattgaccgtctggctcttttcgcccatcgcgaagacgggccgggcatacctgccgacatcaaactgttcgacatctttagtcagcaggtagcaaccgtcatccagagccgccaggacatgccttcagaggacgttgtgagtctccaggtgtccctgattaaccttgcgatgaaatgctatcctgatagagtggattacgtggataaggtgctagaaacaacagtcgagatttttaacaaattaaacctagagcacatcgctacctcctcagccgtttccaaggagctaacgcgtctgctgaagatccctgtagatacatataacaatatcttgaccgtattgaagttaaagcatttccaccccctcttcgagtattttgattacgagagtcgaaaaagtatgtcctgttatgtgctgtcaaacgtgctggattataataccgagattgtttcccaggatcaagtggactcaattatgaacttagtcagcacactgattcaggaccagcccgaccagcccgtagaagacccagatcccgaagattttgcagacgagcaatctttagtcggtcggtttattcatctcctaagaagcgaggatcccgatcagcaatatctgatccttaataccgctaggaagcatttcggggccggcggtaaccagagaatacggtttacactgcccccactggtgtttgcagcttatcagctggcattcaggtacaaggagaattcaaaggtggacgataagtgggaaaagaagtgtcagaaaattttctcttttgcccatcaaactattagcgccctcataaaggccgagctcgccgaactgccacttagacttttcctccagggcgcactagcggctggcgagatcggttttgagaatcacgaaacggtggcttatgagttcatgagtcaggcgttttctctgtatgaagacgaaatctcggatagtaaggcgcaactggccgcgatcactctgattattggaaccttcgagcggatgaagtgcttttctgaagaaaatcacgagcctttaaggacacagtgcgccctggcggccagcaaactgctgaagaagcctgaccagggcagggcggtgagtacgtgtgctcacctgttttggagcggacgaaacactgataagaatggggaggaattacatggtgggaagcgagtgatggaatgcttgaagaaggccctcaagattgctaatcaatgcatggacccttctctccaggtgcagctttttatcgagattctgaatcggtacatttatttctatgaaaaggagaacgacgccatcgtcactatccaggtgttaaaccagctgatacagaagatcagagaggacctccccaacctagagtcaagtgaggagaccgagcagatcaataagcactttcacaatacactcgagcacctccgcttacgccgcgagtcacccgagtccgagggcccaatctacgaagggttaatactgtag

SEQ ID NO: 197105 - DNA, 2391 bp, Artificial Sequence
  derived and/or modified sequence
atgcccaccacccagcagagcccccaggatgagcaggagaagctgctggatgaggccatccaggccgtgaaggtgcagagcttccagatgaagcgctgcctggacaagaacaagctgatggatgccctgaagcacgccagcaacatgctgggggagctgcggacctccatgctgagccccaagagctactatgagctgtacatggccatcagtgatgagctgcactacctggaggtgtacctgacagatgaatttgccaagggcaggaaggtggccgacctgtatgagctggtgcagtatgccggcaacatcatcccccggctgtacctgctgatcaccgtgggcgtggtgtatgtgaagagcttcccccagagcaggaaggacatcctgaaggacctggtggagatgtgccggggcgtgcagcaccccctgcggggcctcttcctgaggaactacctgctgcagtgcaccaggaacatcctgcctgatgaaggagagcccacagatgaggagaccactggagacatcagtgacagcatggactttgtgctgctgaactttgctgagatgaacaagctgtgggtgaggatgcagcaccagggccacagccgggaccgggagaagcgggagcgggagcggcaggagctgcgcatcctggtgggcaccaacctggtgcggctgagccagctggagggcgtgaatgtggagcgctacaagcagatcgtgctgaccggcatcctggagcaggtggtgaactgcagagatgccctggcccaggagtacctgatggagtgcatcatccaggtgtttcctgatgagttccacctgcagaccctgaaccccttcctgcgggcctgtgccgagctgcaccagaatgtgaatgtgaagaacatcatcatcgccctgattgaccggctggccctgtttgcccacagagaagatggccctggcatcccagctgacatcaagctgtttgacatcttcagccagcaggtggccaccgtcatccagagccggcaggacatgcccagtgaagatgtggtgtccctgcaggtgtccctcatcaacctggccatgaagtgctacccagacagagtggactatgtggacaaggtgctggagaccaccgtggagatcttcaacaagctgaacctggagcacatcgccaccagcagcgctgtgtccaaggagctgacccggctgctgaagatccctgtggacacctacaacaacatcctgactgtgctgaagctgaagcacttccaccccctgtttgagtactttgattatgagagcaggaagtccatgagctgctacgtgctgagcaatgtgctggactacaacacagaaattgtgtcccaggaccaggtggacagcatcatgaacctggtgtccaccctcatccaggaccagcctgaccagcctgtggaggaccctgaccctgaggactttgctgatgagcagagcctggtgggccgcttcatccacctgctgcggagtgaagatcctgaccagcagtacctgatcctgaacacagccaggaagcactttggagctgggggcaaccagaggatccgcttcaccctgccccccctggtgtttgctgcctaccagctggccttccgctacaaggagaacagcaaggtggatgacaagtgggagaagaagtgccagaagatcttctcctttgcccaccagaccatcagcgccctgatcaaggccgagctggccgagctgcccctgcggctcttcctgcagggcgccctggccgccggggagatcggctttgaaaatcatgaaacagtggcctatgagttcatgagccaggccttcagcctgtatgaagatgagatcagtgacagcaaggcccagctggccgccatcaccctcatcatcggcacctttgagaggatgaagtgcttcagcgaggagaaccacgagcccctgcggacccagtgtgccctggccgccagcaagctgctgaagaagccagaccagggccgggctgtgtccacctgtgcccacctgttctggagcggcaggaacacagacaagaatggagaggagctgcatggaggcaagagggtgatggagtgcctgaagaaggccctgaagatcgccaaccagtgcatggaccccagcctgcaggtgcagctgttcatcgagatcctgaaccgctacatctacttctatgagaaggaaaatgatgctgtgaccatccaggtgctgaaccagctgatccagaagatccgggaggacctgcccaacctggagagcagcgaggagacagagcagatcaacaagcacttccacaacaccctggagcacctgcggctgcggcgggagagccctgagagcgagggccccatctatgagggcctcatcctgtag

SEQ ID NO: 197106 - DNA, 1989 bp, Artificial Sequence
  derived and/or modified sequence
atgtgccggggcgtgcagcaccccctgcggggcctcttcctgaggaactacctgctgcagtgcaccaggaacatcctgcctgatgaaggagagcccacagatgaggagaccaccggggacatcagtgacagcatggactttgtgctgctgaactttgctgagatgaacaagctgtgggtgaggatgcagcaccagggccacagccgggaccgggagaagcgggagcgggagcggcaggagctgcgcatcctggtgggcaccaacctggtgcggctgagccagctggagggcgtgaatgtggagcgctacaagcagatcgtgctgaccggcatcctggagcaggtggtgaactgcagagatgccctggcccaggagtacctgatggagtgcatcatccaggtgtttcctgatgagttccacctgcagaccctgaaccccttcctgcgggcctgtgccgagctgcaccagaatgtgaatgtgaagaacatcatcatcgccctgattgaccggctggccctgtttgcccaccgggaggatggccctggcatcccagctgacatcaagctgtttgacatcttcagccagcaggtggccaccgtcatccagagccggcaggacatgcccagtgaagatgtggtgtccctgcaggtgtccctcatcaacctggccatgaagtgctacccagacagagtggactatgtggacaaggtgctggagaccaccgtggagatcttcaacaagctgaacctggagcacatcgccaccagcagcgctgtgtccaaggagctgacccggctgctgaagatccctgtggacacctacaacaacatcctgactgtgctgaagctgaagcacttccaccccctgtttgagtactttgattatgagagcaggaagtccatgagctgctacgtgctgagcaatgtgctggactacaacacagagatcgtgtcccaggaccaggtggacagcatcatgaacctggtgtccaccctcatccaggaccagcctgaccagcctgtggaggaccctgaccctgaagattttgctgatgagcagagcctggtgggccgcttcatccacctgctgcggtctgaggaccctgaccagcagtacctgatcctgaacacagccaggaagcactttggagctgggggcaaccagaggatccgcttcaccctgccccccctggtgtttgctgcctaccagctggccttccgctacaaggagaacagcaaggtggatgacaagtgggagaagaagtgccagaagatcttctcctttgcccaccagaccatcagcgccctgatcaaggccgagctggccgagctgcccctgcggctcttcctgcagggcgccctggccgccggggagattggatttgagaaccacgagaccgtggcctatgagttcatgagccaggccttcagcctgtatgaagatgagatcagtgacagcaaggcccagctggccgccatcaccctcatcatcggcacctttgagaggatgaagtgcttctctgaagaaaatcatgagcccctgcggacccagtgtgccctggccgccagcaagctgctgaagaagccagaccagggccgggctgtgtccacctgtgcccacctgttctggagcggcaggaacacagacaagaatggagaggagctgcacggcggcaagagggtgatggagtgcctgaagaaggccctgaagatcgccaaccagtgcatggaccccagcctgcaggtgcagctgttcatcgagatcctgaaccgctacatctacttctatgagaaggaaaatgatgccatcgtgaccatccaggtgctgaaccagctgatccagaagatccgggaggacctgcccaacctggagagcagcgaggagacagagcagatcaacaagcacttccacaacaccctggagcacctgcggctgcggcgggagagccctgagagcgagggccccatctatgagggcctcatcctgtag

SEQ ID NO: 197107 - DNA, 2391 bp, Artificial Sequence
  derived and/or modified sequence
atgcccaccacccagcagagcccccaggacgagcaggagaagctgttggacgaagcgattcaagctgtcaaagttcaatctttccaaatgaagcgctgccttgataagaataagctcatggatgcactcaagcacgcctctaatatgctgggtgagctgagaacttctatgctgtccccaaagagttattacgaactgtacatggcgatcagcgacgagcttcactacctagaagtatacctgaccgatgaattcgctaaagggcgcaaagtggcagacttgtacgaacttgttcagtacgctggaaatatcattccgcggctgtaccttctgatcacagtgggagtggtctatgtgaaatcattcccacagagcaggaaggacatcttgaaagaccttgtagagatgtgtaggggcgtacagcatccactccggggattattcctgcggaattacctcctccagtgtactagaaacattctacccgatgaaggcgagccaacagacgaggagaccacaggagatatcagcgactcaatggattttgtccttctgaatttcgctgaaatgaataaactgtgggtcagaatgcagcaccagggccattctagagacagggaaaagcgggaaagggagcgccaggagctgcgcatactggtagggacaaacttagtgcgcttgagccagctggaaggcgtgaacgtggaaagatataagcagatcgtcttaaccggaatcctcgagcaggttgtaaactgtcgtgacgcgttagctcaggagtatctaatggagtgcatcatacaggtgttcccagatgagttccacctgcaaaccttgaatcccttcttacgggcttgcgctgagcttcatcagaacgtaaatgtgaagaacataatcatcgctctgatagacaggctagccctatttgcccatcgggaggacggccccgggattccagccgacatcaaattgttcgatatcttctcccaacaggtcgccaccgtcatacagtctaggcaggatatgccgtctgaggatgttgtgagcttgcaggtatctctcatcaatctggcaatgaagtgttaccccgatcgagtggactatgttgataaagttctcgagaccactgtggagatctttaataagctgaaccttgaacacatcgccacttcctccgcagtctccaaggagctgacaaggttacttaaaattccagtcgacacctataataatattctcaccgtcctcaaactgaaacattttcacccattgtttgagtatttcgactatgagtcccggaagtccatgtcttgctatgtgctgagtaacgtgctggattataatacagagattgtatcccaggaccaggtggattctataatgaacttggtgtccacgctgatccaagaccaaccagatcagcccgtggaggacccagaccccgaagattttgccgatgagcagtctttagtgggaaggttcatccatttgctcagatcagaagacccagaccaacagtatctgatcctgaatactgctcgtaagcattttggggcagggggcaaccaaagaatcagattcactttgccacccttggtttttgccgcatatcaactcgcattccgctacaaagagaacagtaaagttgatgataagtgggagaaaaagtgccagaaaattttttcctttgctcaccagacaattagcgccttaatcaaagcggaacttgctgagttgcccttgcggctattcctgcaaggagccctcgccgcgggcgagatagggttcgaaaatcatgagaccgtagcatatgagttcatgtcccaggctttttccctgtatgaggacgagatcagcgattccaaggctcagctagccgccattaccctgatcattggtacctttgaaagaatgaagtgcttcagcgaagagaaccatgagcccctgcggacccagtgtgctctggccgcctccaagcttttgaagaaaccagaccaaggtagagccgtgtcaacatgcgcgcatctgttctggagtggccggaatacggacaaaaatggggaggaactgcatgggggtaaaagagtgatggaatgtttgaaaaaggccctaaagatcgccaatcagtgtatggacccctccttacaggtgcaactttttattgagattctgaatagatatatctacttttacgagaaggagaatgacgcagtcacgatacaggtgttaaaccagctcattcagaaaatcagggaggacctccccaacctggagtccagcgaggaaaccgagcaaatcaacaaacacttccataacaccctcgagcacctaagactgcgccgggagtcgcccgagagcgagggacccatatacgaaggccttatcctctag

SEQ ID NO: 197108 - DNA, 1989 bp, Artificial Sequence
  derived and/or modified sequence
atgtgccggggcgtgcagcaccccctgcggggcctgttcctgcggaactatctactccagtgcacaaggaatattctccctgatgagggtgagcccactgacgaagagacaacgggtgacataagtgattcaatggatttcgtcttgctaaatttcgctgagatgaacaagttatgggtgagaatgcagcaccagggacactcaagagatagagagaagcgcgaacgcgagaggcaggaactgcggattctcgtaggaaccaatctcgttcgtctgtcgcaattggaaggagtgaatgtggaacggtacaagcagatcgtgttgacaggcattctggaacaagtcgtgaactgtagggatgctctggcgcaagagtaccttatggaatgtattatacaggtattccctgacgagtttcacttgcaaacattgaacccttttctgcgggcctgcgctgagctccatcaaaacgtgaacgtgaaaaacattatcatcgcactcattgaccggctcgccctttttgcccatcgggaggacggtcccggcattcctgctgacatcaagctgtttgatattttctcccaacaggtggctaccgttatacagtccagacaggatatgccttccgaggatgtagtgtccctccaggttagtctaattaatttggcgatgaagtgttatcccgatcgggtcgattatgtggataaggttctggagaccacagttgagatcttcaataaactgaacctcgagcatatcgcaactagctctgctgtgagtaaggaactgacaaggttgctcaaaatcccagttgacacatacaataacattctgacggtattaaaactgaaacactttcaccctctcttcgaatacttcgattatgagagcagaaagtccatgtcgtgctatgtgctgtctaacgtgttagactacaatacggaaattgtgtctcaggaccaggtagactccatcatgaacttagtatcaacattgatccaggatcagcccgaccaacctgtcgaggatccagaccctgaggattttgccgatgagcagtccctggtggggcggtttattcatctcctgagaagcgaggaccctgaccaacagtacctgatcttaaacaccgcgcggaagcactttggagccggcgggaaccagaggataagatttactctgccacctctggtgttcgctgcttatcagctggccttcaggtataaagagaattctaaagtggacgacaagtgggaaaagaagtgtcagaagattttctctttcgcccaccagaccatctccgccctaattaaggccgaactggctgaactaccactccggctcttcctccagggcgcactagccgctggcgaaatcggtttcgagaatcacgagacagttgcctatgagtttatgtctcaagcctttagtttatatgaagatgaaatctctgattccaaggcacaactggcagccattactctgatcatcggcacatttgaaaggatgaagtgtttttcagaggaaaaccatgagccgctacgcacacaatgcgcactggcggcctccaaacttcttaaaaagcccgaccagggacgtgccgtttctacgtgtgcacacctgttttggtctggccgcaataccgacaagaatggggaggaactacacggtgggaagcgggttatggagtgcctgaagaaagccctgaagattgctaaccagtgcatggatccaagccttcaggtccagctcttcatcgagattctgaacaggtacatttatttctacgagaaggaaaacgatgcaattgtgacaattcaggtgctgaaccagttaatccaaaaaatccgcgaggacctgcccaatcttgagagtagtgaggagactgagcagataaacaaacatttccataacaccctcgagcatctgcgactccgacgggagtcacccgaaagcgaggggccgatctatgaggggctgatcctatag

SEQ ID NO: 197109 - DNA, 2391 bp, Artificial Sequence
  derived and/or modified sequence
atgcccactacccagcagagtccccaggacgaacaggaaaagctcctcgacgaagctatccaagctgtgaaggtccagtcgttccaaatgaaacggtgcctggacaagaataaactgatggatgcactgaagcacgcctctaatatgcttggtgagcttaggacttccatgctcagccccaaatcctactatgaattatacatggcgatttccgacgaacttcactatttggaagtgtacctgaccgacgagttcgcaaaaggaagaaaggtcgccgatctctatgagttggtacagtatgccggaaacatcattccgaggctgtacctcctcattacagtgggggtggtgtacgtgaaatcttttccacagtctagaaaggatatccttaaggacctggtagagatgtgcagaggagtgcaacaccctctccgaggactttttctcagaaactatctgctgcagtgtactcggaatattctaccagacgagggcgaaccaactgatgaagaaactactggcgacatatctgatagtatggacttcgtcctcctgaatttcgctgaaatgaataagttgtgggtgcggatgcagcaccagggccattctcgggaccgcgaaaaaagagagagagagcggcaggagcttcggatcttggtcgggactaacctggtaagactctcacagcttgaaggggttaacgtcgagaggtataaacagattgtgttgaccggaatcctggagcaggtagttaattgcagggacgcactggcccaggaatacttgatggaatgtattatccaggtgttccctgatgagttccatctgcagactctgaacccctttctccgcgcatgcgctgaattacatcagaatgtaaatgttaagaatattataatcgcccttatcgacaggttagccctcttcgcccatagggaggatggacctggaattccagccgacattaaacttttcgacatcttttctcagcaggtcgccacggttatccaatccagacaggatatgccgagtgaggatgtggtaagtcttcaggtgagtctcataaatttagcaatgaagtgttatcctgaccgggtggactacgtggataaggtgctggaaaccaccgtagagattttcaataagctcaatctggagcacatcgccacttcctctgctgtttccaaagaattaacacgcttgctcaaaatccccgtcgatacatataataatatactgacagtgcttaagctcaaacactttcaccctctgttcgaatatttcgactatgaatctaggaaatccatgtcgtgttacgtgctctctaacgtgctggactataacacagaaatcgtaagccaggaccaggtggactccatcatgaatttggttagcacattgatccaagaccagcctgatcagccggtggaggacccagatccagaggatttcgccgacgagcaaagccttgtcggcaggttcattcacctcttgagatccgaggatcctgatcagcaataccttatcctcaacacggccagaaagcatttcggcgctgggggaaaccaaaggatcagatttacgctgcctccactcgtgtttgccgcttaccagttagccttccgatataaagagaattccaaggttgatgacaagtgggagaagaagtgccaaaaaatctttagtttcgcacaccagacaatcagtgccctgatcaaggcagaacttgcggagttgcctctacggctcttcctgcagggtgccctcgctgccggagaaattgggttcgaaaatcatgagaccgtggcctacgagttcatgtcgcaagcattctcgctgtatgaagacgaaatatcagatagtaaggcccagctggcagcaatcaccctgataataggaactttcgaaaggatgaaatgcttctctgaagaaaaccacgagcctctcaggacccagtgcgctctggccgcaagcaagctgttgaagaaacccgatcaggggagggctgtgagcacttgtgcccacctcttttggtctggcagaaataccgataagaacggtgaagaactgcacggaggcaagcgggtgatggagtgcctaaagaaagcactgaagatcgccaaccaatgcatggatccatccctgcaggtgcagctgtttatcgagattctcaacaggtacatttatttttacgagaaggagaatgatgctgtgaccatacaagtgctcaaccaactgatccagaaaatccgggaagacctccccaatttggaatcatctgaggaaacagaacaaatcaataagcatttccacaacaccctggaacacttacgactcagacgtgaatccccagagagcgaaggtccaatatatgaaggactcattctgtag

SEQ ID NO: 197110 - DNA, 1989 bp, Artificial Sequence
  derived and/or modified sequence
atgtgcaggggcgtgcagcatcccctaaggggcctgttcctgcgcaattacctccttcaatgtactcgcaacatccttcccgatgagggtgaacctactgacgaagaaactacgggcgatatcagcgacagtatggacttcgtcttgctgaatttcgctgaaatgaacaaactgtgggtccgtatgcagcaccaggggcattcgcgggaccgcgagaagagagaaagagagagacaggagctcaggatccttgtgggcacaaacctggtgcggttgtcacagcttgagggagttaacgtggagcggtacaagcaaatagttctcacaggcattctggaacaagtggtgaattgcagggatgcactcgcccaggaataccttatggaatgtatcatccaggtatttcctgatgaattccatttgcaaacattgaacccattccttcgggcttgtgcagagctgcaccagaacgtcaacgtgaagaatattattatagctctgatcgacagactcgcactctttgcccaccgtgaggatggccctggtatccccgcagatataaaactctttgatattttcagccaacaagtggctaccgtgattcagtcaagacaggatatgccttccgaagatgttgtttcacttcaggtctcgctgattaacttagctatgaaatgctacccagacagggtggattacgtggataaagtactggagaccaccgtcgagatatttaacaagctgaacctggaacacatcgctacttcaagcgcggtctccaaagagcttacacgactacttaagattcctgttgatacatataacaacattctgacagtgctaaaactaaagcatttccatcctttattcgaatacttcgactacgaaagtcgcaagagcatgtcctgttatgtgctttcaaatgttctggactataacactgaaatcgtctcccaggaccaggtggactccattatgaacctcgtttcaaccctcattcaggaccaacccgatcaacccgtcgaagaccccgatccagaggactttgccgatgagcagagcttagttggcagattcatacacttattgcgatccgaagacccggaccagcagtacctgatccttaacacggcccgtaagcacttcggagccggtgggaatcagagaatccgttttacccttcccccactcgtatttgccgcttaccagctggcgtttcggtataaggaaaatagtaaggtagacgataagtgggagaagaagtgccaaaagatcttttctttcgcccaccagactatcagtgccctcatcaaggccgagcttgctgagctgccccttcggctttttctgcagggtgcgctggccgctggggaaattgggttcgaaaaccacgaaaccgtggcgtatgaattcatgagccaagccttctcactgtacgaggatgaaatcagcgattcaaaagcgcagttggccgctatcactttgattatcggaaccttcgagcgtatgaaatgcttctcagaggagaaccacgaacccttacggactcagtgtgcattagccgcaagtaagcttctgaaaaagccagaccagggtcgggcagtatctacgtgcgcacatctcttttggtcaggcaggaatacagacaagaatggtgaggagttacacggcggaaaaagggtgatggaatgcctaaaaaaggcccttaaaatcgcaaatcagtgcatggatcccagcctacaagttcagctgtttattgaaattctaaacagatacatctacttctatgagaaggagaacgacgccatagtgactatccaagtcttgaaccagctgatccagaagatccgtgaggatctcccaaacctggaatcctctgaagagacagagcaaatcaataagcactttcacaatacattagaacatcttagactgagacgcgagagtcctgagtccgagggaccgatttacgaaggactgattctatag

SEQ ID NO: 197111 - DNA, 4943 bp, Artificial Sequence
  derived and/or modified sequence
gaccgcgggaggctacgcgcggggcgggtgctgcttgctgcaggctctggggagtcgccatgcctacaacacagcagtcccctcaggatgagcaggaaaagctcttggatgaagccatacaggctgtgaaggtccagtcattccaaatgaagagatgcctggacaaaaacaagcttatggatgctctaaaacatgcttctaatatgcttggtgaactccggacttctatgttatcaccaaagagttactatgaactttatatggccatttctgatgaactgcactacttggaggtctacctgacagatgagtttgctaaaggaaggaaagtggcagatctctacgaacttgtacagtatgctggaaacattatcccaaggctttaccttttgatcacagttggagttgtatatgtcaagtcatttcctcagtccaggaaggatattttgaaagatttggtagaaatgtgccgtggtgtgcaacatcccttgaggggtctgtttcttcgaaattaccttcttcagtgtaccagaaatatcttacctgatgaaggagagccaacagatgaagaaacaactggtgacatcagtgattccatggattttgtactgctcaactttgcagaaatgaacaagctctgggtgcgaatgcagcatcagggacatagccgagatagagaaaaaagagaacgagaaagacaagaactgagaattttagtgggaacaaatttggtgcgcctcagtcagttggaaggtgtaaatgtggaacgttacaaacagattgttttgactggcatattggagcaagttgtaaactgtagggatgctttggctcaagaatatctcatggagtgtattattcaggttttccctgatgaatttcacctccagactttgaatccttttcttcgggcctgtgctgagttacaccagaatgtaaatgtgaagaacataatcattgctttaattgatagattagctttatttgctcaccgtgaagatggacctggaatcccagcggatattaaactttttgatatattttcacagcaggtggctacagtgatacagtctagacaagacatgccttcagaggatgttgtatctttacaagtctctctgattaatcttgccatgaaatgttaccctgatcgtgtggactatgttgataaagttctagaaacaacagtggagatattcaataagctcaaccttgaacatattgctaccagtagtgcagtttcaaaggaactcaccagacttttgaaaataccagttgacacttacaacaatattttaacagtcttgaaattaaaacattttcacccactctttgagtactttgactacgagtccagaaagagcatgagttgttatgtgcttagtaatgttctggattataacacagaaattgtctctcaagaccaggtggattccataatgaatttggtatccacgttgattcaagatcagccagatcaacctgtagaagaccctgatccagaagattttgctgatgagcagagccttgtgggccgcttcattcatctgctgcgctctgaggaccctgaccagcagtacttgattttgaacacagcacgaaaacattttggagctggtggaaatcagcggattcgcttcacactgccacctttggtatttgcagcttaccagctggcttttcgatataaagagaattctaaagtggatgacaaatgggaaaagaaatgccagaagattttttcatttgcccaccagactatcagtgctttgatcaaagcagagctggcagaattgcccttaagactttttcttcaaggagcactagctgctggggaaattggttttgaaaatcatgagacagtcgcatatgaattcatgtcccaggcattttctctgtatgaagatgaaatcagcgattccaaagcacagctagctgccatcaccttgatcattggcacttttgaaaggatgaagtgcttcagtgaagagaatcacgaacctctgaggactcagtgtgcccttgctgcatccaaacttctaaagaaacctgatcagggccgagctgtgagcacctgtgcacatctcttctggtctggcagaaacacggacaaaaatggggaggagcttcacggaggcaagagggtaatggagtgcctaaaaaaagctctaaaaatagcaaatcagtgcatggacccctctctacaagtgcagctttttatagaaattctgaacagatatatctatttttatgaaaaggaaaatgatgcggtaacaattcaggttttaaaccagcttatccaaaagattcgagaagacctcccgaatcttgaatccagtgaagaaacagagcagattaacaaacattttcataacacactggagcatttgcgcttgcggcgggaatcaccagaatccgaggggccaatttatgaaggtctcatcctttaaaaaggaaatagctcaccatactcctttccatgtacatccagtgagggttttattacgctaggtttcccttccatagattgtgcctttcagaaatgctgaggtaggtttcccatttcttacctgtgatgtgttttacccagcacctccggacactcaccttcaggaccttaataaaattattcacttggtaagtgttcaagtctttctgatcaccccaagtagcatgactgatctgcaatttaaaattcctgtgatctgtaaaaaaaaaaaaaaaaaaaaacacaaaacccacaagcacttatcttggctactaatgaagctctccttttttttgtttgtttgtttgcttcattgttgattgtgtattttcttcattcctggggagtactaacccaaaagcgtctgtctcttgttttctagtccagtttgagattaatttagaagaaaggaatactgtatgtgaaattcatcttgggctttcccctaaattgcaagataaggccatgtgtaagattttccctaaaactagaatatattaatgcatgtttgagaattttaaagcaccatggtcaaaaccagaagctatattttgcatatttggactcagccatccattaagaacccatgttgtcctctggacatatttatcaatataattgggttttaaatagtataaaagaaaacttgtgatctatataatttatgtatcaccttcattgtaaatttagcaggaaatgcatcacaattatgatttttttttttgcaccagtgaaacaataaagatgctattaacaattttggagctttttttcccctttcatactatctttaattgataaaaagtactagtagtatggctatagagtttaatagtcattctcatatattcacagagctcacttaactctagttttaagcacttgttgaacaaggcagcatctactcttttagtcatttataccccttttctttcctcaactttaccctgcttttcccaaggcatgatgaattcacataaaccccccaaaggctcaccaccgatactagttacctactatataataaaccatcccaaaacttactgtcttaaaacagcaaacatttatctcacaggtctctggatcaggaatttgggagcagcttagctggtggttctggcaaagagtgtggtgtaaggttgcaaacaagatactggttggggctgcagtcatctgatgctttgactggggctgacttttctgctcactgacctggctgttaggcagaggccccagttcctcttcttgagggcagaggccccagttcctctccttgagggcagaggcctaagttcctttccttgagggcagaggccccagttcctctccttgacggcccttccatagagtgtcctcacagcatggtggctggctttcccctgagtatgaaagcaagaaggaaaccacagtgcctttcagtggcctccctgtggaagtgacatgctcatttttgccttattctgtaagtggggagtcactaagtctagcctatattcaagggtaaggagaattaagctccacctcttaaagggaaaatttatagacattttcaaatgactacatcacttaacccctcaccatctgccctcccattgctagcacttgatgactagcccttgctgggctttacatgaacagatgtttcccaaagttataaaattagtaccactaaaatgtatcaaatgttaagccattctgtggtatgtcatagtccagcaaaccctttctgttctttgtaggtgttagtttaccccgtataaacctgattatggcttgacatgtccatattatttacatgttttgtgaaatacaactggaatagtagaaaagacatgagtcaagaacacttgagttggagagcttggtttgcaagtaaggtaatgtcagtacagtgtgtaaattatctcttattttctgggttgaggtaaacccaattttaaaaataataaaccaacaaaagtaaataaaagtgaaacaaaagcactgctagtatccttaacttacagattttttttgttgaacaaaaactgggtaccagatatagttaggcactgaatctaaaggtgaagaagatcatagcctctagcttcaagaacgttagtctgctgtgaagacagacctgtagttacagaagatggtaagggtttgtgcaggagagcagtgaagaagagctttgagggattggggatggggaagttctgcagagggttgtatgaattctcatggaacatcaagtccaatagtttatttagccttctgaggccagtgctttggcctgcagtcccaggctcctcagacccatgggctgaagcaagttatactcttggctgcctgtagtgaaatagatatttagaaattgacttagcatttaaaaccctttatagcaatttgacagagtaattttatgtctattggatgtaataaatatttggctttgtgctttgtgtgtctgcta

SEQ ID NO: 197112 - DNA, 2698 bp, Artificial Sequence
  derived and/or modified sequence
acgcgcggggcgggtgctgcttgctgcaggctctggggagtcgccatgcctacaacacagcagtcccctcaggatgagcaggaaaagctcttggatgaagccatacaggctgtgaaggtccagtcattccaaatgaagagatgcctggacaaaaacaagcttatggatgctctaaaacatgcttctaatatgcttggtgaactccggacttctatgttatcaccaaagagttactatgaactttatatggccatttctgatgaactgcactacttggaggtctacctgacagatgagtttgctaaaggaaggaaagtggcagatctctacgaacttgtacagtatgctggaaacattatcccaaggctttaccttttgatcacagttggagttgtatatgtcaagtcatttcctcagtccaggaaggatattttgaaagatttggtagaaatgtgccgtggtgtgcaacatcccttgaggggtctgtttcttcgaaattaccttcttcagtgtaccagaaatatcttacctgatgaaggagagccaacagatgaagaaacaactggtgacatcagtgattccatggattttgtactgctcaactttgcagaaatgaacaagctctgggtgcgaatgcagcatcagggacatagccgagatagagaaaaaagagaacgagaaagacaagaactgagaattttagtgggaacaaatttggtgcgcctcagtcagttggaaggtgtaaatgtggaacgttacaaacagattgttttgactggcatattggagcaagttgtaaactgtagggatgctttggctcaagaatatctcatggagtgtattattcaggttttccctgatgaatttcacctccagactttgaatccttttcttcgggcctgtgctgagttacaccagaatgtaaatgtgaagaacataatcattgctttaattgatagattagctttatttgctcaccgtgaagatggacctggaatcccagcggatattaaactttttgatatattttcacagcaggtggctacagtgatacagtctagacaagacatgccttcagaggatgttgtatctttacaagtctctctgattaatcttgccatgaaatgttaccctgatcgtgtggactatgttgataaagttctagaaacaacagtggagatattcaataagctcaaccttgaacatattgctaccagtagtgcagtttcaaaggaactcaccagacttttgaaaataccagttgacacttacaacaatattttaacagtcttgaaattaaaacattttcacccactctttgagtactttgactacgagtccagaaagagcatgagttgttatgtgcttagtaatgttctggattataacacagaaattgtctctcaagaccaggtggattccataatgaatttggtatccacgttgattcaagatcagccagatcaacctgtagaagaccctgatccagaagattttgctgatgagcagagccttgtgggccgcttcattcatctgctgcgctctgaggaccctgaccagcagtacttgattttgaacacagcacgaaaacattttggagctggtggaaatcagcggattcgcttcacactgccacctttggtatttgcagcttaccagctggcttttcgatataaagagaattctaaagtggatgacaaatgggaaaagaaatgccagaagattttttcatttgcccaccagactatcagtgctttgatcaaagcagagctggcagaattgcccttaagactttttcttcaaggagcactagctgctggggaaattggttttgaaaatcatgagacagtcgcatatgaattcatgtcccaggcattttctctgtatgaagatgaaatcagcgattccaaagcacagctagctgccatcaccttgatcattggcacttttgaaaggatgaagtgcttcagtgaagagaatcacgaacctctgaggactcagtgtgcccttgctgcatccaaacttctaaagaaacctgatcagggccgagctgtgagcacctgtgcacatctcttctggtctggcagaaacacggacaaaaatggggaggagcttcacggaggcaagagggtaatggagtgcctaaaaaaagctctaaaaatagcaaatcagtgcatggacccctctctacaagtgcagctttttatagaaattctgaacagatatatctatttttatgaaaaggaaaatgatgcgatagtaacaattcaggttttaaaccagcttatccaaaagattcgagaagacctcccgaatcttgaatccagtgaagaaacagagcagattaacaaacattttcataacacactggagcatttgcgcttgcggcgggaatcaccagaatccgaggggccaatttatgaaggtctcatcctttaaaaaggaaatagctcaccatactcctttccatgtacatccagtgagggttttattacgctaggtttcccttccatagattgtgcctttcagaaatgctgaggtaggtttcccatttcttacctgtgatgtgttttacccagcacctccggacactcaccttcaggaccttaataaaattattcacttggtaagtgttcaagtctttctgatcaccccaagtagcatgactgatctgcaatttaaaattcctgtgatctgt

SEQ ID NO: 197113 - protein, 208 aa, Artificial Sequence
  derived and/or modified sequence
MAKIHTIHANGSLPKPILWHKMHNYFTLVKNEINPSLSADVPKVEVLERELAWLKEHLSQLESPVVFCHNDLLCKNIIYDSIKGHVRFIDYEYAGYNYQAFDIGNHFNEFAGVNEVDYCLYPARETQLQWLHYYLQAQKGMAVTPREVQRLYVQVNKFALASHFFWALWALIQNQYSTIDFDFLRYAVIRFNQYFKVKPQASALEMPK

SEQ ID NO: 197114 - protein, 386 aa, Artificial Sequence
  derived and/or modified sequence
MAVPPSAPQPRASFHLRRHTPCPQCSWGMEEKAAASASCREPPGPPRAAAVAYFGISVDPDDILPGALRLIQELRPHWKPEQVRTKRFTDGITNKLVACYVEEDMQDCVLVRVYGERTELLVDRENEVRNFQLLRAHSCAPKLYCTFQNGLCYEYMQGVALEPEHIREPRLFRLIALEMAKIHTIHANGSLPKPILWHKMHNYFTLVKNEINPSLSADVPKVEVLERELAWLKEHLSQLESPVVFCHNDLLCKNIIYDSIKGHVRFIDYEYAGYNYQAFDIGNHFNEFAGVNEVDYCLYPARETQLQWLHYYLQAQKGMAVTPREVQRLYVQVNKFALASHFFWALWALIQNQYSTIDFDFLRYAVIRFNQYFKVKPQASALEMPK

SEQ ID NO: 197115 - protein, 252 aa, Artificial Sequence
  derived and/or modified sequence
RRLGGGTAEGKTGRGLGGPSWDTGPRAMGSLSRPSFSDRLIALEMAKIHTIHANGSLPKPILWHKMHNYFTLVKNEINPSLSADVPKVEVLERELAWLKEHLSQLESPVVFCHNDLLCKNIIYDSIKGHVRFIDYEYAGYNYQAFDIGNHFNEFAGVNEVDYCLYPARETQLQWLHYYLQAQKGMAVTPREVQRLYVQVNKFALASHFFWALWALIQNQYSTIDFDFLRYAVIRFNQYFKVKPQASALEMPK

SEQ ID NO: 197116 - DNA, 1161 bp, Artificial Sequence
  derived and/or modified sequence
atggccgtaccccctagtgccccccaaccccgagctagctttcatttgcgaaggcacacaccatgcccccagtgctcatggggaatggaagaaaaagctgccgcttctgcctcctgtcgagaacccccaggacccccccgggcggccgcagtcgcctactttggcattagcgttgacccagatgatatcctgcccggcgccctgcgccttattcaagaactgaggccccattggaaacccgaacaggtgcggaccaagcggtttactgacgggatcaccaacaagctggttgcttgttacgtagaggaggatatgcaagactgtgtgctcgttagggtatatggcgaacgaacggagctgcttgtggatcgtgagaacgaagtcagaaacttccaactcttgcgggcacacagctgtgcgcctaaactgtactgcacctttcagaacggcctgtgctacgagtatatgcagggtgtggcccttgagcctgagcacattcgcgaaccaagactgtttcggctcattgcactcgaaatggccaaaatccacaccatacacgcaaacggctctttacctaagcccattctgtggcacaaaatgcacaactacttcacacttgtgaagaacgaaatcaacccatccctgtcagctgacgtgcctaaggttgaggtactggaacgggagttagcctggctgaaagaacatctgtcccaactggagtcacccgttgtcttttgtcacaacgacttactgtgtaagaacatcatctatgattccatcaaaggtcacgtgagattcatcgactatgaatatgccggctacaactatcaagcttttgacattgggaaccattttaacgaatttgccggcgtgaatgaagtcgactattgcctttatcccgccagggaaacccagctgcaatggcttcactattacctacaggcccagaagggtatggctgtcactccgcgggaagtgcagcgcttgtacgttcaggtgaataaattcgccttagccagtcactttttctgggccctgtgggcactgattcagaatcagtacagcacaatcgatttcgacttccttagatatgcggtgatccgattcaaccagtacttcaaagtcaaaccccaggcgtccgcactggaaatgccaaaatag

SEQ ID NO: 197117 - DNA, 759 bp, Artificial Sequence
  derived and/or modified sequence
cgccggttgggtgggggaaccgctgaagggaaaacggggcggggattagggggtccatcttgggatactgggccgagagcaatgggatcactcagtagaccttctttttccgatcggcttattgcactggaaatggctaagatacacaccattcatgcgaacggctctctgccaaagccaatattatggcataaaatgcacaactactttaccttggtgaaaaacgaaatcaatccttcgcttagcgctgatgtgccaaaagtggaagttcttgaacgagagcttgcatggctgaaggagcacctttcacagctcgaatctccggttgttttctgccacaatgaccttctgtgcaaaaacattatctatgattcaataaaggggcacgtgcgatttatcgactatgagtacgcggggtataattaccaggctttcgatattggcaatcattttaatgaatttgccggagtgaacgaggtggattattgcctgtatcctgccagggagacccagttgcaatggctgcactactacctacaagcgcagaaaggtatggctgtgactcctcgcgaggtgcagagactctatgtgcaggttaacaaatttgccctggccagccatttcttctgggcactatgggccttgatccagaaccagtactccacaattgactttgattttctcagatacgccgtcatacgcttcaatcagtactttaaagtgaagccacaggcaagtgctctcgagatgcctaagtag

SEQ ID NO: 197118 - DNA, 1161 bp, Artificial Sequence
  derived and/or modified sequence
atggctgtgccccccagcgccccccagccccgggccagcttccacctgcggcggcacaccccctgcccccagtgctcctggggcatggaggagaaggccgccgccagcgccagctgccgggagcccccaggcccccccagggctgctgctgtggcctacttcggcatctctgtggaccctgatgacatcctgcccggggccctgcggctcatccaggagctgcggccccactggaagccagagcaggtgaggaccaagcgcttcacagatggcatcaccaacaagctggtggcctgctacgtggaggaggacatgcaggactgtgtgctggtgcgggtgtatggagagaggacagagctgctggtggacagagaaaatgaggtgaggaacttccagctgctgcgggcccacagctgtgcccccaagctgtactgcaccttccagaatggcctgtgctatgagtacatgcagggcgtggccctggagcctgagcacatccgggagcccaggctcttccggctgattgccctggagatggccaagatccacaccatccacgccaacggcagcctgcccaagcccatcctgtggcacaagatgcacaactacttcaccctggtgaagaatgagatcaaccccagcctgtctgcagatgtgcccaaggtggaggtgctggagcgggagctggcctggctgaaggagcacctgagccagctggagagccctgtggtgttctgccacaatgacctgctgtgcaagaacatcatctatgacagcatcaagggccacgtgcgcttcattgattatgaatatgccggctacaactaccaggcctttgatattggcaaccacttcaatgaatttgctggggtgaatgaggtggactactgcctgtacccagcccgggagacccagctgcagtggctgcactactacctgcaggcccagaagggcatggctgtgaccccccgggaggtgcagaggctgtatgtgcaggtgaacaagtttgccctggccagccacttcttctgggccctgtgggccctgatccagaaccagtacagcaccatcgactttgacttcctgcgctatgctgtgatccgcttcaaccagtacttcaaggtgaagccccaggccagcgccctggagatgcccaagtag

SEQ ID NO: 197119 - DNA, 759 bp, Artificial Sequence
  derived and/or modified sequence
agaaggctgggcggcggcacagctgagggcaagacaggccggggcctgggcggccccagctgggacaccggcccccgggccatgggcagcctgagccggcccagcttcagtgaccggctgattgccctggagatggccaagatccacaccatccacgccaacggcagcctgcccaagcccatcctgtggcacaagatgcacaactacttcaccctggtgaagaatgagatcaaccccagcctgtctgcagatgtgcccaaggtggaggtgctggagcgggagctggcctggctgaaggagcacctgagccagctggagagccctgtggtgttctgccacaatgacctgctgtgcaagaacatcatctatgacagcatcaagggccacgtgcgcttcattgattatgaatatgccggctacaactaccaggcctttgatattggcaaccacttcaatgaatttgctggggtgaatgaggtggactactgcctgtacccagcccgggagacccagctgcagtggctgcactactacctgcaggcccagaagggcatggctgtgaccccccgggaggtgcagaggctgtatgtgcaggtgaacaagtttgccctggccagccacttcttctgggccctgtgggccctgatccagaaccagtacagcaccatcgactttgacttcctgcgctatgctgtgatccgcttcaaccagtacttcaaggtgaagccccaggccagcgccctggagatgcccaagtag

SEQ ID NO: 197120 - DNA, 1161 bp, Artificial Sequence
  derived and/or modified sequence
atggccgtgccccccagcgccccccagccccgggccagcttccacttgcgccgacacacaccctgtccgcagtgtagttggggtatggaggaaaaggctgcagctagcgcctcctgtcgcgagccgccgggaccccccagggcagcggccgtcgcttattttggtatctctgtggacccagacgatattttgcccggtgctttacggctcatccaggaattaagaccccattggaaaccagagcaagttaggaccaagcgtttcacagatgggatcactaataaactggttgcctgctacgttgaggaagacatgcaggattgcgtgctagtgagggtttatggagaaaggactgaactgcttgtcgacagggagaatgaagtccgcaatttccaattgctgagggcgcattcctgcgcacccaaactttactgcacattccagaacgggttatgttacgaatacatgcagggtgtggctctggaacctgaacatatcagggagccaagactgttcaggctaattgcactcgagatggcgaaaatccatactatacacgctaatggcagtctgcctaagccgatcctctggcacaaaatgcacaactactttacactcgttaagaacgagataaatcctagcctatccgcagatgtcccgaaggtggaagttctcgagagagagttagcatggttgaaggagcacctgagtcagctcgaatcccccgttgtcttctgccataatgacctgttgtgcaaaaacatcatatatgactctattaagggccatgtacgatttatcgattacgaatacgctggatataactatcaggcttttgatattggaaatcattttaacgaattcgccggagtaaacgaagtagactactgtctgtaccccgcaagggaaactcagttacagtggctgcactactatctgcaggcccagaagggtatggccgtgacccctcgtgaggtacagagactctatgtacaggttaacaagtttgcactcgctagccactttttctgggcgctgtgggccctaatccaaaaccaatattctactatcgactttgattttttgagatacgcagtgattaggtttaaccagtactttaaggtgaagccccaggccagtgcacttgaaatgcctaaatag

SEQ ID NO: 197121 - DNA, 759 bp, Artificial Sequence
  derived and/or modified sequence
cggcggctgggcggcggcaccgccgagggcaagaccggccggggcctcggcggtccgagctgggataccggacctagggctatgggctctctgagccggccatcgttcagcgaccggctcatcgcgctggaaatggctaagattcatacaattcacgcgaatggtagcctgcctaagcctatcttatggcataaaatgcacaactatttcacgctcgtgaagaacgagattaatccatctctatcagctgatgttccgaaggtggaggtgttagaaagagaactggcttggctgaaggagcatttaagccaactcgagagccccgtcgtcttctgccacaatgacctcctctgtaagaacatcatatacgacagcattaaaggacatgtgaggtttattgactacgaatatgcgggatataactaccaagccttcgacattggaaaccacttcaacgagttcgctggagtgaatgaagtggactactgcctgtaccctgcaagggaaactcagctgcaatggctgcattattatctgcaagcacagaaaggtatggccgtgacaccccgtgaggtacagaggctttatgtccaggtgaataaatttgccctcgccagtcacttcttttgggctctgtgggccctcatacagaatcagtactctactatagattttgatttcttacgctatgcagtgatccgattcaatcagtatttcaaggtaaagcctcaggcctctgctttagagatgcccaaatag

SEQ ID NO: 197122 - DNA, 1161 bp, Artificial Sequence
  derived and/or modified sequence
atggccgttcccccttctgccccacagccacgtgccagcttccacctgcgacggcacactccctgtccacaatgctcctggggaatggaggagaaggccgctgcttctgctagctgccgggaacctcctggcccaccacgcgcagctgccgtcgcttactttggcatttcagtggatcctgacgacatacttccaggcgctctccgcttgattcaggagctgagacctcactggaagcccgagcaggtcaggacgaagcgcttcactgacggaataaccaacaagcttgttgcctgctatgttgaggaggacatgcaagattgtgtcttggtgcgtgtgtacggagagcggaccgagcttctggtcgatcgggagaacgaggttaggaacttccaattactcagagcacacagctgtgcccctaaactttactgcaccttccaaaacggtctctgttatgaatacatgcagggcgtagccttagagccagagcacatcagagagcccaggcttttccgccttatcgccttggagatggcaaagattcacacaatacacgcaaatggaagtctgcccaaaccaattctgtggcacaagatgcacaattactttactctcgtcaagaatgagattaatccatcactgagtgctgatgtgccaaaggttgaggtcctcgaaagagagctcgcctggctgaaagaacatctcagccagcttgagagcccagtagtgttttgtcacaatgatttactgtgtaagaacattatatacgacagcattaagggtcacgtccggtttatcgattatgagtacgcaggttacaattaccaggctttcgatatcggaaaccacttcaacgagtttgcaggggttaatgaggtcgattactgtctttatcccgctagggagactcaactgcagtggctgcactattacttgcaggcgcaaaaaggcatggcagtgaccccacgggaagtccagcgtctttacgtgcaagttaacaagttcgctctggcctctcactttttctgggcactgtgggctctgatacaaaaccagtatagtaccatagatttcgactttctgcgctacgccgtgatacgatttaaccagtatttcaaggtgaagccccaagctagcgctctcgagatgccgaagtag

SEQ ID NO: 197123 - DNA, 759 bp, Artificial Sequence
  derived and/or modified sequence
cggagactgggcggagggaccgctgagggtaaaaccggtagggggctcggtggaccgagctgggacacaggacccagagcaatgggaagtctgtctcgacccagtttcagtgatcggctcatcgccctggagatggctaaaatccacaccatccatgccaatggctccctgcccaagcctattctgtggcacaagatgcataactacttcaccctcgtcaaaaatgagatcaaccccagcttgagtgccgatgtgcctaaagtcgaggtgctggaaagagagctcgcttggctcaaagaacatctttcccagctggaatcaccggtagtattttgtcacaacgatctgctgtgcaagaacataatctatgactccatcaaaggacatgtaaggtttatcgattacgagtatgccggttataactaccaggcgttcgacatcggtaaccacttcaacgagtttgcgggagtaaacgaggtggactactgtctgtaccccgcacgggagacacaactgcagtggttgcattactatttgcaggcccagaaaggcatggctgttacgccacgagaagtgcagcgcttgtacgtccaagtgaacaagtttgctctggcatcacatttcttttgggctctgtgggctctgattcagaaccagtatagcacaatcgatttcgatttcttaagatatgctgtgattcggtttaaccagtactttaaggtgaagcctcaagccagtgccttggagatgccgaagtag

SEQ ID NO: 197124 - DNA, 1161 bp, Artificial Sequence
  derived and/or modified sequence
atggccgtgccccccagcgccccccagcccagagccagcttccacctgagaagacacaccccctgcccccagtgcagctggggcatggaggagaaggccgccgccagcgccagctgcagagagccccccggcccccccagagccgccgccgtggcctacttcggcatcagcgtggaccccgacgacatcctgcccggcgccctgagactgatccaggagctgagaccccactggaagcccgagcaggtgagaaccaagagattcaccgacggcatcaccaacaagctggtggcctgctacgtggaggaggacatgcaggactgcgtgctggtgagagtgtacggcgagagaaccgagctgctggtggacagagagaacgaggtgagaaacttccagctgctgagagcccacagctgcgcccccaagctgtactgcaccttccagaacggcctgtgctacgagtacatgcagggcgtggccctggagcccgagcacatcagagagcccagactgttcagactgatcgccctggagatggccaagatccacaccatccacgccaacggcagcctgcccaagcccatcctgtggcacaagatgcacaactacttcaccctggtgaagaacgagatcaaccccagcctgagcgccgacgtgcccaaggtggaggtgctggagagagagctggcctggctgaaggagcacctgagccagctggagagccccgtggtgttctgccacaacgacctgctgtgcaagaacatcatctacgacagcatcaagggccacgtgagattcatcgactacgagtacgccggctacaactaccaggccttcgacatcggcaaccacttcaacgagttcgccggcgtgaacgaggtggactactgcctgtaccccgccagagagacccagctgcagtggctgcactactacctgcaggcccagaagggcatggccgtgacccccagagaggtgcagagactgtacgtgcaggtgaacaagttcgccctggccagccacttcttctgggccctgtgggccctgatccagaaccagtacagcaccatcgacttcgacttcctgagatacgccgtgatcagattcaaccagtacttcaaggtgaagccccaggccagcgccctggagatgcccaagtag

SEQ ID NO: 197125 - DNA, 759 bp, Artificial Sequence
  derived and/or modified sequence
agaagactgggcggcggcaccgccgagggcaagaccggcagaggcctgggcggccccagctgggacaccggccccagagccatgggcagcctgagcagacccagcttcagcgacagactgatcgccctggagatggccaagatccacaccatccacgccaacggcagcctgcccaagcccatcctgtggcacaagatgcacaactacttcaccctggtgaagaacgagatcaaccccagcctgagcgccgacgtgcccaaggtggaggtgctggagagagagctggcctggctgaaggagcacctgagccagctggagagccccgtggtgttctgccacaacgacctgctgtgcaagaacatcatctacgacagcatcaagggccacgtgagattcatcgactacgagtacgccggctacaactaccaggccttcgacatcggcaaccacttcaacgagttcgccggcgtgaacgaggtggactactgcctgtaccccgccagagagacccagctgcagtggctgcactactacctgcaggcccagaagggcatggccgtgacccccagagaggtgcagagactgtacgtgcaggtgaacaagttcgccctggccagccacttcttctgggccctgtgggccctgatccagaaccagtacagcaccatcgacttcgacttcctgagatacgccgtgatcagattcaaccagtacttcaaggtgaagccccaggccagcgccctggagatgcccaagtag

SEQ ID NO: 197126 - DNA, 1431 bp, Artificial Sequence
  derived and/or modified sequence
attctcctctcttctgctgagaccttccttctgcaggacctgtgctcctaagggacttgcaatcatcccatccttggccctctggttaatcgccttagaaatggcaaagattcatactatccacgccaacggcagcctgcccaagcccatcctctggcacaagatgcacaattatttcacgcttgtgaagaacgagatcaaccccagcctttctgcagatgtccctaaggtagaggtgttggaacgggagctggcctggctgaaggagcatctgtcccagctggagtcccctgtggtgttttgtcacaatgacctgctctgcaagaatatcatctatgacagcatcaaaggtcacgtgcggttcattgactatgaatatgctggctacaactaccaagcttttgacattggcaaccatttcaatgagtttgcaggcgtgaatgaggtggattactgcctgtacccggcgcgggagacccagctgcagtggctgcactactacctgcaggcacaaaaggggatggccgtgacccccagggaggtgcaaaggctctacgtgcaagtcaacaagtttgccctggcgtctcacttcttctgggctctctgggccctcatccagaaccagtactccaccatcgactttgatttcctcaggtacgcagtgatccgattcaaccagtacttcaaggtgaagcctcaagcgtcagccttggagatgccaaagtgaccagccaccccatccctcccctacccatctgtctggccagacctgttctccagagctcaattctgcactctgggatccacacccttggacagggtgggagaggggacacatgggtgtccagggagaaggctctgtccctgccgccagaccccagtggttgccactgaagacctcattctcctgtctggaggggctgataggacccccttccgggggtccccttcaccccaccaggcttgggaggaagtgcctgcagccaggtcctgaaccataaccacccctgggaaacacatcattcccagcctcaggccctgctggaattggggctgccttatatgtgtgtttaccccttcctggcctggggaaggaggcggggagggctcctttctacctccagtgccctgagcctccagtccgtctccccctgcatgccccatgtgggaggtgctgagctccaaaccagcatcacaccaactctgacacatggatgtacctatcttggtgatgggtgggggccaagaattgagcatgacatcttccccagcagccacctcctctgagatccctcaccttctccaaaccagatccaatcaaacctcagcccgaggaaacatgctccccaacgtgctctcctgtgcttctgttttgtccccctgctggggggacaggagagggagtggtgaggccctgggcctccagagcct

SEQ ID NO: 197127 - DNA, 2434 bp, Artificial Sequence
  derived and/or modified sequence
cggcgggccgcgagccggcgatcgaagcgggcagctcgcgcctgagtcatggacttcccctggcccctcctctaccactcccactccctcgccggacccccccgccggggctagcgtctgccgcggctccgagggggtggggctgctgggaatggctgtgcccccttcggcccctcagccgcgcgcgtcctttcacctgaggaggcacacgccttgcccgcagtgctcatggggcatggaggagaaggcggcggccagcgccagctgccgggagccgccgggccccccgagggccgccgccgtcgcgtacttcggcatttccgtggacccggacgacatccttcccggggccctgcgcctcatccaggagctgcggccgcattggaaacccgagcaagttcggaccaagcgcttcacggatggcatcaccaacaagctggtggcctgctatgtggaggaggacatgcaggactgcgtgctggtccgggtgtatggggagcggacggagctgctggtggaccgggagaatgaggtcagaaacttccagctgctgcgagcacacagctgtgcccccaaactctactgcaccttccagaatgggctgtgctatgagtacatgcagggtgtggccctggagcctgagcacatccgtgagccccggcttttcaggttaatcgccttagaaatggcaaagattcatactatccacgccaacggcagcctgcccaagcccatcctctggcacaagatgcacaattatttcacgcttgtgaagaacgagatcaaccccagcctttctgcagatgtccctaaggtagaggtgttggaacgggagctggcctggctgaaggagcatctgtcccagctggagtcccctgtggtgttttgtcacaatgacctgctctgcaagaatatcatctatgacagcatcaaaggtcacgtgcggttcattgactatgaatatgctggctacaactaccaagcttttgacattggcaaccatttcaatgagtttgcaggcgtgaatgaggtggattactgcctgtacccggcgcgggagacccagctgcagtggctgcactactacctgcaggcacaaaaggggatggccgtgacccccagggaggtgcaaaggctctacgtgcaagtcaacaagtttgccctggcgtctcacttcttctgggctctctgggccctcatccagaaccagtactccaccatcgactttgatttcctcaggtacgcagtgatccgattcaaccagtacttcaaggtgaagcctcaagcgtcagccttggagatgccaaagtgaccagccaccccatccctcccctacccatctgtctggccagacctgttctccagagctcaattctgcactctgggatccacacccttggacagggtgggagaggggacacatgggtgtccagggagaaggctctgtccctgccgccagaccccagtggttgccactgaagacctcattctcctgtctggaggggctgataggacccccttccgggggtccccttcaccccaccaggcttgggaggaagtgcctgcagccaggtcctgaaccataaccacccctgggaaacacatcattcccagcctcaggccctgctggaattggggctgccttatatgtgtgtttaccccttcctggcctggggaaggaggcggggagggctcctttctacctccagtgccctgagcctccagtccgtctccccctgcatgccccatgtgggaggtgctgagctccaaaccagcatcacaccaactctgacacatggatgtacctatcttggtgatgggtgggggccaagaattgagcatgacatcttccccagcagccacctcctctgagatccctcaccttctccaaaccagatccaatcaaacctcagcccgaggaaacatgctccccaacgtgctctcctgtgcttctgttttgtccccctgctggggggacaggagagggagtggtgaggccctgggcctccagagcctggctctgctttgtgctgtggcttagccggaggggacgtggccaagggtgaggtggccaaaaccagaaccagcagtctcctgccttgttccctccctggccctcaggccctccttccagggatgtctctccagctctactttatgtcctgaagctgacccgaggtcttcctatctggaatgactagagggagccaagaggatggggtgggggccagggccccccagggcctatcgtgggagagcctgggcaggatcccatcagaaaggtgctgactaaactggttgcccggacactcaacagcctccacctccctttctaccctcacagctcctggggccttcctggctctggcccagaaagtgattcatttgtaaattatcatggttttctttctgcattaaaatgctcatttccgga

SEQ ID NO: 197128 - DNA, 1880 bp, Artificial Sequence
  derived and/or modified sequence
agacggttggggggtgggacagcggaagggaagactggaagaggactgggagggcccagctgggacacagggcctcgggcgatggggtctttatcaaggccctccttctctgaccggttaatcgccttagaaatggcaaagattcatactatccacgccaacggcagcctgcccaagcccatcctctggcacaagatgcacaattatttcacgcttgtgaagaacgagatcaaccccagcctttctgcagatgtccctaaggtagaggtgttggaacgggagctggcctggctgaaggagcatctgtcccagctggagtcccctgtggtgttttgtcacaatgacctgctctgcaagaatatcatctatgacagcatcaaaggtcacgtgcggttcattgactatgaatatgctggctacaactaccaagcttttgacattggcaaccatttcaatgagtttgcaggcgtgaatgaggtggattactgcctgtacccggcgcgggagacccagctgcagtggctgcactactacctgcaggcacaaaaggggatggccgtgacccccagggaggtgcaaaggctctacgtgcaagtcaacaagtttgccctggcgtctcacttcttctgggctctctgggccctcatccagaaccagtactccaccatcgactttgatttcctcaggtacgcagtgatccgattcaaccagtacttcaaggtgaagcctcaagcgtcagccttggagatgccaaagtgaccagccaccccatccctcccctacccatctgtctggccagacctgttctccagagctcaattctgcactctgggatccacacccttggacagggtgggagaggggacacatgggtgtccagggagaaggctctgtccctgccgccagaccccagtggttgccactgaagacctcattctcctgtctggaggggctgataggacccccttccgggggtccccttcaccccaccaggcttgggaggaagtgcctgcagccaggtcctgaaccataaccacccctgggaaacacatcattcccagcctcaggccctgctggaattggggctgccttatatgtgtgtttaccccttcctggcctggggaaggaggcggggagggctcctttctacctccagtgccctgagcctccagtccgtctccccctgcatgccccatgtgggaggtgctgagctccaaaccagcatcacaccaactctgacacatggatgtacctatcttggtgatgggtgggggccaagaattgagcatgacatcttccccagcagccacctcctctgagatccctcaccttctccaaaccagatccaatcaaacctcagcccgaggaaacatgctccccaacgtgctctcctgtgcttctgttttgtccccctgctggggggacaggagagggagtggtgaggccctgggcctccagagcctggctctgctttgtgctgtggcttagccggaggggacgtggccaagggtgaggtggccaaaaccagaaccagcagtctcctgccttgttccctccctggccctcaggccctccttccagggatgtctctccagctctactttatgtcctgaagctgacccgaggtcttcctatctggaatgactagagggagccaagaggatggggtgggggccagggccccccagggcctatcgtgggagagcctgggcaggatcccatcagaaaggtgctgactaaactggttgcccggacactcaacagcctccacctccctttctaccctcacagctcctggggccttcctggctctggcccagaaagtgattcatttgtaaattatcatggttttctttctgcattaaaatgctcatttccgg

SEQ ID NO: 197129 - protein, 406 aa, Artificial Sequence
  derived and/or modified sequence
MASPRTRKVLKEVRVQDENNVCFECGAFNPQWVSVTYGIWICLECSGRHRGLGVHLSFVRSVTMDKWKDIELEKMKAGGNAKFREFLESQEDYDPCWSLQEKYNSRAAALFRDKVVALAEGREWSLESSPAQNWTPPQPRTLPSMVHRVSGQPQSVTASSDKAFEDWLNDDLGSYQGAQGNRYVGFGNTPPPQKKEDDFLNNAMSSLYSGWSSFTTGASRFASAAKEGATKFGSQASQKASELGHSLNENVLKPAQEKVKEGKIFDDVSSGVSQLASKVQGVGSKGWRDVTTFFSGKAEGPLDSPSEGHSYQNSGLDHFQNSNIDQSFWETFGSAEPTKTRKSPSSDSWTCADTSTERRSSDSWEVWGSASTNRNSNSDGGEGGEGTKKAVPPAVPTDDGWDNQNW

SEQ ID NO: 197130 - protein, 122 aa, Artificial Sequence
  derived and/or modified sequence
MASPRTRKVLKEVRVQDENNVCFECGAFNPQWVSVTYGIWICLECSGRHRGLGVHLSFVRSVTMDKWKDIELEKMKAGGNAKFREFLESQEDYDPCWSLQEKYNSRAAALFRDKVVALAEGR

SEQ ID NO: 197131 - DNA, 1221 bp, Artificial Sequence
  derived and/or modified sequence
atggcatctcccagaacgcggaaggtgttgaaagaagtgagggtacaggatgaaaataacgtgtgcttcgagtgcggagctttcaacccccagtgggtaagcgtaacctacggtatttggatttgcctggagtgcagtggaaggcaccggggtctaggcgtgcatctcagctttgtgaggtccgtgacgatggataaatggaaagatatagaattggagaaaatgaaggccggcggcaatgcgaagtttagagagttcctggaatcccaggaagattatgacccttgttggtctttgcaggagaagtacaattctagagcagctgctttattccgtgataaggtggtggctcttgcagagggcagggaatggagtctcgaatctagtcctgcacaaaactggactcccccgcaaccccggactctacctagcatggtgcatagggtctcaggccagccacagtccgtgacagccagcagcgataaagcgttcgaggattggctaaacgatgatcttggctcgtatcaaggggcacagggaaaccgctacgttgggttcgggaacacaccgcctccgcagaaaaaggaagatgactttctgaacaatgccatgtcatctctttatagcggatggagttcctttactacaggggcttctagattcgcctctgccgccaaggagggagctacgaaatttggctcccaggcatcacagaaggcctcggaacttgggcactcactgaacgagaatgttctgaagccggcgcaggaaaaagtgaaagagggaaaaatctttgatgacgtttcatcaggcgtttcccagctggcttccaaggtgcagggagtaggctctaaaggatggcgtgatgtcactacttttttctcaggtaaggccgagggcccccttgactctccttcagaggggcattcatatcagaactcaggactggatcactttcagaatagcaacattgaccagagcttctgggagacttttggcagtgctgaaccaactaaaacaagaaagtccccaagtagtgacagctggacgtgcgctgacacttcgacggagcgccgcagctctgactcctgggaagtttgggggtcggctagtaccaatcgcaattccaatagtgatgggggagagggcggtgaagggaccaaaaaggcagttccccccgcggtgcctacagatgacggatgggacaaccagaattggtag

SEQ ID NO: 197132 - DNA, 3278 bp, Artificial Sequence
  derived and/or modified sequence
gtgagaccttgcaaagcgcaacgtagccggaagctggtggcggctggtgggcgaccgggcgcatcctcattgcagtgcggcggccctacctcggccctggcctgaccccggcggccctgcccgcccctccctccagcatcatggccagcccaagaaccaggaaggttcttaaagaagtcagggtgcaggatgagaacaacgtttgttttgagtgtggcgcgttcaatcctcagtgggtcagtgtgacctacggcatctggatctgcctggagtgctcggggagacaccgcgggcttggggttcacctcagctttgtgcgctctgttactatggacaagtggaaggacattgagcttgagaagatgaaagctggtgggaatgctaagttccgagagttcctggagtctcaggaggattacgatccttgctggtccttgcaggagaagtacaacagcagagccgcggccctctttagggataaggtggtcgctctggccgaaggcagagagtggtctctggagtcatcacctgcccagaactggaccccacctcagcccaggacgctgccgtccatggtgcaccgagtctctggccagccgcagagtgtgaccgcctcctcggacaaggcttttgaagactggctgaatgatgacctcggctcctatcaaggggcccaggggaatcgctacgtggggtttgggaacacgccaccgcctcagaagaaagaagatgacttcctcaacaacgccatgtcctccctgtactcgggctggagcagcttcaccactggagccagccggtttgcctcggcagccaaggagggcgctacaaagtttggatcccaagcgagtcagaaggcgtccgagctgggccacagcctgaacgagaacgtcctcaagcctgcgcaggagaaggtgaaggagggaaagatttttgatgatgtctccagtggggtctctcagttggcgtccaaggtccagggagtcggtagtaagggatggcgggacgtcaccacctttttttcggggaaagcagagggccccttggacagcccctcggagggccacagttatcagaacagcggtctggaccacttccaaaacagcaacatagaccagagcttctgggagacctttggaagtgctgagcccaccaagacccgcaagtccccgagcagcgacagctggacgtgcgcggacacctccaccgagaggaggagctcggacagctgggaggtgtggggctcggcctccaccaacaggaacagcaacagcgacggcggggagggcggggagggcaccaagaaggcagtgccgccggccgtgcccactgatgatggctgggacaaccagaactggtagggcccactgcgcccccgtccccagcgcccccgggcgacttcgtgtttgcactctgccctcgtcgttcctcctccttccatttgacccaagaatcagcaactgcagtgtgaggacagcgtctcgggaggcaggaccctagggagacccgggtgtgcgccgcctgcgcgtggggagtcttcggtgcgtgggggcggcttgctgtccagcctgtgtgggggccgtcccgtcccacactcccctgggcattcttggactcaaggccggggctctgcgtggcttgctgggaggtgggctgcagcacagaggcctgtgactgcgttccagcggccagttcactacgcagtatctctggggcctgggaccagccacgtgccgagctgtcagcgacgtgaggtgtcccttctcgttgagatatttaactttggttttgctctagttctttctttttgaagagagtgactggagtggtaaagatggaaatgctggaaatgatactggcgctcacgctgccatccgaccaccctcggctcccgagtccacgcctgcctgggcctgtgctgtcagacccgcgtcggtcgtaaccctctgtggctcccctgcatcagcaccgtcccaccaccaagttcaccaggttcaccagacacggcctccacaatagccacacccacacctgagctgttctcagtgctggaacttgaccatcctggaacaccctggaagaaaaaggagcgcagggtgggccctcggccctgatgcaggagggtgcgatagcggacgtggccaggcaggaggggccgggttcaggagctgagcaggggatgcctgtgcgtggtgcctgggtctagggaagctccagccccaggatggggctgccctgcacaccggtgcccgccacatgccaaccctcacctccccgaggactggatgatgtgctgccacgtgtgactcgtctcccttgtctgccctgtgtgaccctcagtcttggccagccatgcatgcgcccgaagctcgtgcagtttgtacgtgaggtgctctcctccctgccaccatgctcatcactctggccttggccatgctccctggtcaccccacttcccggtcgccgtctgcagcactcctggagcagcctgggcccttcagcccctgtgctcgtcccaccctagggactcagccacttgcagaacaggatgggaccgagatttcagcgagccctcctggcgcccggtcctccctgtgggcaccagccctcttggtagctggtgtggagggccggtgtccttggctgccacggagggatttgatcaccgaagcagccacctgctgtagttggacctgaggtcagaggcggggcatcagaggctcaaggtgctgagaagccaccgggaaagcagccagcacaaagggcccaggaagccagcccccgagagctgagcgtgggggtctttgagtgtctttctccaagctgagacgtgggcggccgcgtggtatctcccgagggctgcttggaccctggtgggctgagtgctccgaggaggggtggactccaccttggacagtgggatgtggtgttccacatgtgcctgtttccacgccagcaccttgacttggcagcatggagccaaggtctgtccccgcccaggagggtgccttcctcgggggtagggggacggcccactctgccccagggagtcccttttgatgggaagtgcagtcagcagcgtggaggtgtctgggccaccttcagaaggtggatgtggtggccgagaccccgtccacggagggtgatggcctttcccttctgcaggtgcgggcaggtgggcctgggaccggtgctggggcctctccttgctgtgtgtgagggcccaggtggaaggcgcggacctgacagcattccaataaagcatacgggaacatgca

SEQ ID NO: 197133 - DNA, 1221 bp, Artificial Sequence
  derived and/or modified sequence
atggccagccccaggaccaggaaggtgctgaaggaggtgcgggtgcaggatgagaacaacgtgtgctttgaatgtggggccttcaacccccagtgggtgtctgtgacctacggcatctggatctgcctggagtgcagcggccgccaccggggcctgggcgtgcacctgagctttgtgcgctctgtgaccatggacaagtggaaggacatcgagctggagaagatgaaggccggcggcaatgccaagttccgggagttcctggagagccaggaggactatgacccctgctggagcctgcaggagaagtacaacagcagagctgctgccctcttccgggacaaggtggtggccctggccgagggccgggagtggagcctggagagcagccctgcccagaactggaccccaccccagcccaggaccctgcccagcatggtgcaccgggtgtctggccagccccagagcgtgacagccagcagtgacaaggcctttgaggactggctgaatgatgacctgggcagctaccagggcgcccagggcaacagatatgtgggcttcggcaacaccccaccaccccagaagaaggaggatgacttcctgaacaatgccatgagcagcctgtacagcggctggagcagcttcaccaccggggccagcagatttgccagcgctgccaaggagggcgccaccaagtttggcagccaggccagccagaaggccagcgagctgggccacagcctgaatgaaaatgtgctgaagccagcccaggagaaggtgaaggagggcaagatctttgatgatgtgagcagcggcgtgtcccagctggccagcaaggtgcagggcgtgggcagcaagggctggagagatgtgaccaccttcttcagcggcaaggccgagggccccctggacagccccagcgagggccacagctaccagaacagcggcctggaccacttccagaacagcaacatcgaccagagcttctgggagaccttcggcagcgctgagcccaccaagaccaggaagagccccagcagtgacagctggacctgtgccgacaccagcacagagcggcgcagcagtgacagctgggaggtgtggggcagcgccagcaccaacagaaacagcaacagtgatggaggagagggcggggagggcaccaagaaggctgtgcccccagctgtgcccacagatgatggctgggacaaccagaactggtag

SEQ ID NO: 197134 - DNA, 1221 bp, Artificial Sequence
  derived and/or modified sequence
atggccagcccccggacccggaaggtgctgaaggaggtgcgggtgcaggacgaaaacaacgtttgcttcgaatgcggcgcgtttaacccacagtgggtctccgtgacctatggcatatggatttgtctggagtgcagcgggaggcacagggggcttggcgtgcatttgtctttcgtccgtagcgtcaccatggacaagtggaaagacatcgaactggagaagatgaaagccggcggtaatgccaagttcagggaatttctggaaagtcaagaagactacgatccatgttggagcctgcaagaaaaatacaattcccgggcagctgcgttgttcagagacaaggttgttgctttagccgagggcagagaatggtccctggagtcatctcccgcacagaactggactcctccccagccgaggacacttcccagcatggttcatagagtgtcaggccagccccaaagcgtcaccgcatcttccgacaaggccttcgaggactggcttaacgatgatctgggatcctatcagggggcccagggaaaccggtatgtcgggtttggtaacactcccccacctcagaagaaagaagacgattttcttaataacgcgatgtcaagtttgtactcagggtggtccagtttcaccaccggggcatctaggtttgcctcagctgccaaggaaggcgcaaccaagtttgggagccaagctagccagaaagcatctgaactgggccacagtctgaatgagaacgtgttgaaacctgcgcaagagaaggtgaaggagggaaaaatattcgatgatgtctcaagcggggtcagccagttagcgagcaaagtccaaggggtcgggtctaaggggtggcgggatgtaaccacttttttctccggtaaggcagaggggcccctggacagcccaagtgaaggacactcataccaaaactctggcctcgatcattttcagaattcaaacatcgaccagagcttctgggagacgtttgggagtgcagagccaaccaagactagaaaatctcctagctcagactcttggacttgcgcagatacttcaactgaacggcgcagctccgattcatgggaggtgtggggatctgcctctactaaccggaatagcaattccgatggtggcgaaggaggggaaggcaccaaaaaggccgtgcctccggccgtccctactgacgatggatgggacaatcaaaattggtag

SEQ ID NO: 197135 - DNA, 1221 bp, Artificial Sequence
  derived and/or modified sequence
atggcctcgcctcgtaccaggaaggttcttaaggaagtgcgtgttcaagatgagaataacgtctgtttcgagtgcggagctttcaaccctcagtgggtttctgtaacctatgggatctggatatgcctcgagtgttcaggccgacatagaggtctgggagttcacctgagctttgtgcgaagcgtcaccatggacaaatggaaggatatcgaactggaaaaaatgaaagctggaggcaacgccaagttcagggagtttcttgagtctcaggaggattatgatccatgctggagtctccaagagaaatataattcacgtgcagcagccttgttcagagacaaggttgttgcccttgccgagggacgggaatggtctttagaaagtagccctgctcagaactggactcctccacagcctagaactttgcctagcatggtacaccgagtctccgggcagccccagtcagtgacagcaagtagtgacaaggcattcgaggattggctgaacgatgacctgggaagttaccagggcgctcaggggaaccgctacgtggggtttggcaacacacctcccccacagaaaaaggaagatgatttcctgaataacgccatgagttcactgtacagcggctggtcttcctttacaacgggagcttctagattcgccagcgcggcaaaggagggagctactaaatttggctcacaagcttcacagaaagcctcagagttggggcatagcctgaacgagaatgtgctgaaacctgcgcaggaaaaagtcaaggaaggaaaaatcttcgatgacgtctcatccggggttagccagcttgctagtaaggtacagggagtggggagtaaagggtggagggacgtgactacgttcttttctggcaaggctgagggcccacttgactcccccagtgaagggcattcttaccaaaatagtggattggatcactttcagaatagtaacattgaccagtccttctgggaaaccttcggcagtgccgaaccaaccaagacacggaagagtccatcttcagatagctggacatgtgcagacacaagcacagaacgcaggtctagtgatagctgggaggtctggggttcagcttccaccaatagaaatagcaactcagatggtggggaaggcggagagggaaccaagaaggctgttccgcctgcagtgcctacagacgatggatgggacaatcagaattggtag

SEQ ID NO: 197136 - DNA, 1221 bp, Artificial Sequence
  derived and/or modified sequence
atggccagccccagaaccagaaaggtgctgaaggaggtgagagtgcaggacgagaacaacgtgtgcttcgagtgcggcgccttcaacccccagtgggtgagcgtgacctacggcatctggatctgcctggagtgcagcggcagacacagaggcctgggcgtgcacctgagcttcgtgagaagcgtgaccatggacaagtggaaggacatcgagctggagaagatgaaggccggcggcaacgccaagttcagagagttcctggagagccaggaggactacgacccctgctggagcctgcaggagaagtacaacagcagagccgccgccctgttcagagacaaggtggtggccctggccgagggcagagagtggagcctggagagcagccccgcccagaactggacccccccccagcccagaaccctgcccagcatggtgcacagagtgagcggccagccccagagcgtgaccgccagcagcgacaaggccttcgaggactggctgaacgacgacctgggcagctaccagggcgcccagggcaacagatacgtgggcttcggcaacaccccccccccccagaagaaggaggacgacttcctgaacaacgccatgagcagcctgtacagcggctggagcagcttcaccaccggcgccagcagattcgccagcgccgccaaggagggcgccaccaagttcggcagccaggccagccagaaggccagcgagctgggccacagcctgaacgagaacgtgctgaagcccgcccaggagaaggtgaaggagggcaagatcttcgacgacgtgagcagcggcgtgagccagctggccagcaaggtgcagggcgtgggcagcaagggctggagagacgtgaccaccttcttcagcggcaaggccgagggccccctggacagccccagcgagggccacagctaccagaacagcggcctggaccacttccagaacagcaacatcgaccagagcttctgggagaccttcggcagcgccgagcccaccaagaccagaaagagccccagcagcgacagctggacctgcgccgacaccagcaccgagagaagaagcagcgacagctgggaggtgtggggcagcgccagcaccaacagaaacagcaacagcgacggcggcgagggcggcgagggcaccaagaaggccgtgccccccgccgtgcccaccgacgacggctgggacaaccagaactggtag

SEQ ID NO: 197137 - protein, 390 aa, Artificial Sequence
  derived and/or modified sequence
MVTRAGAGTAVAGAVVVALLSAALALYGPPLDAVLERAFSLRKAHSIKDMENTLQLVRNIIPPLSSTKHKGQDGRIGVVGGCQEYTGAPYFAAISALKVGADLSHVFCASAAAPVIKAYSPELIVHPVLDSPNAVHEVEKWLPRLHALVVGPGLGRDDALLRNVQGILEVSKARDIPVVIDADGLWLVAQQPALIHGYRKAVLTPNHVEFSRLYDAVLRGPMDSDDSHGSVLRLSQALGNVTVVQKGERDILSNGQQVLVCSQEGSSRRCGGQGDLLSGSLGVLVHWALLAGPQKTNGGISDLKLTIWGPEIETGVKTRAQGSCGPRTTTPTSPHLLLSPSPQVQPSPGGRVWRLLSHQAVQPPSLPEARSLHHHLRHDRRGGGRLQQAL

SEQ ID NO: 197138 - DNA, 1173 bp, Artificial Sequence
  derived and/or modified sequence
atggtgaccagagccggcgccggcaccgccgtggccggcgccgtggtggtggccctgctgagcgccgccctggccctgtacggcccccccctggacgccgtgctggagagagccttcagcctgagaaaggcccacagcatcaaggacatggagaacaccctgcagctggtgagaaacatcatcccccccctgagcagcaccaagcacaagggccaggacggcagaatcggcgtggtgggcggctgccaggagtacaccggcgccccctacttcgccgccatcagcgccctgaaggtgggcgccgacctgagccacgtgttctgcgccagcgccgccgcccccgtgatcaaggcctacagccccgagctgatcgtgcaccccgtgctggacagccccaacgccgtgcacgaggtggagaagtggctgcccagactgcacgccctggtggtgggccccggcctgggcagagacgacgccctgctgagaaacgtgcagggcatcctggaggtgagcaaggccagagacatccccgtggtgatcgacgccgacggcctgtggctggtggcccagcagcccgccctgatccacggctacagaaaggccgtgctgacccccaaccacgtggagttcagcagactgtacgacgccgtgctgagaggccccatggacagcgacgacagccacggcagcgtgctgagactgagccaggccctgggcaacgtgaccgtggtgcagaagggcgagagagacatcctgagcaacggccagcaggtgctggtgtgcagccaggagggcagcagcagaagatgcggcggccagggcgacctgctgagcggcagcctgggcgtgctggtgcactgggccctgctggccggcccccagaagaccaacggcggcatcagcgacctgaagctgaccatctggggccccgagatcgagaccggcgtgaagaccagagcccagggcagctgcggccccagaaccaccacccccaccagcccccacctgctgctgagccccagcccccaggtgcagcccagccccggcggcagagtgtggagactgctgagccaccaggccgtgcagccccccagcctgcccgaggccagaagcctgcaccaccacctgagacacgacagaagaggcggcggcagactgcagcaggccctgtag

SEQ ID NO: 197139 - DNA, 1173 bp, Artificial Sequence
  derived and/or modified sequence
atggtcacacgggcgggcgctgggaccgccgtcgccggagcagtggtagtggccctgctgtccgccgcccttgctctttacggacccccattggacgccgtactcgagcgcgctttcagcctgcgaaaggcccacagcataaaagatatggagaataccctgcagctggtgaggaatatcattcccccattgagtagcaccaagcataaaggacaggatggccgtataggggtggtcggcggatgtcaggaatatactggggctccttattttgcagcgatctccgctctgaaggtgggggctgacttgagccatgtgttctgtgcttcagccgcagcaccggttattaaggcctacagtcccgaactgatcgttcatcctgtcctcgatagcccaaatgcagtccacgaagtagagaagtggctgccacgcctccacgccctggttgtgggccccggcctaggcagggacgacgctttactgagaaacgtgcagggcatcctggaggtctccaaagcacgagacatccctgtcgttatcgacgcagacggcctgtggctggtagcacagcagcccgctttaatccacggatatcggaaagccgtgctgacccctaaccacgtcgaattttcccgcctgtatgatgcagtgctccgaggccccatggattctgacgactctcacgggagcgtgctgcggttgtctcaggccctggggaatgtcacagtggttcagaagggcgaacgggacattctgtccaatgggcagcaggtgcttgtgtgcagccaagagggctcaagcagaaggtgtggtgggcagggtgacctgctgagcggctcattgggagtgctagtccactgggccttgctcgccgggccacagaaaacaaacggcggcataagcgacttgaagttgacgatctgggggcctgagatcgagacgggcgttaagactcgagctcagggctcttgtggtcctaggacaacgacacccaccagcccacacctgctgctttccccttcaccccaggtgcagcccagtcctgggggcagagtgtggcgtcttctgagccaccaggcggtgcagccgccttccctcccagaggctaggtcgttgcaccatcacctacggcacgatcgcaggggtggaggccggttgcagcaagccctgtag

SEQ ID NO: 197140 - DNA, 1173 bp, Artificial Sequence
  derived and/or modified sequence
atggtgaccagggctggagctggaacagctgtggccggggctgtggtggtggccctgctgtctgctgccctggccctgtatggcccccccctggatgctgtgctggagcgggccttcagcctgaggaaggcccacagcatcaaggacatggagaacaccctgcagctggtgaggaacatcatcccccccctgagcagcaccaagcacaagggccaggacggccgcatcggcgtggtgggcggctgccaggagtacaccggggccccctactttgctgccatcagcgccctgaaggtgggcgctgacctgagccacgtgttctgtgccagcgctgctgcccctgtgatcaaggcctacagccctgagctgattgtgcaccctgtgctggacagccccaatgctgtgcatgaggtggagaagtggctgccccggctgcacgccctggtggtgggccctggcctgggcagagatgatgccctgctgagaaatgtgcagggcatcctggaggtgtccaaggcccgggacatccctgtggtgattgatgctgatggcctgtggctggtggcccagcagcctgccctgatccacggctacaggaaggctgtgctgacccccaaccacgtggagttcagccggctgtatgatgctgtgctgcggggccccatggacagtgatgacagccacggctctgtgctgcggctgagccaggccctgggcaatgtgacagtggtgcagaagggggagcgggacatcctgagcaatggccagcaggtgctggtgtgcagccaggagggcagcagccgccgctgtggcggccagggcgacctgctgagcggcagcctgggcgtgctggtgcactgggccctgctggccggcccccagaagaccaatggaggcatcagtgacctgaagctgaccatctggggccctgagattgagaccggggtgaagacccgggcccagggcagctgtggccccaggaccaccacccccaccagcccccacctgctgctgagccccagcccccaggtgcagcccagccctgggggccgggtgtggaggctgctgagccaccaggccgtgcagccccccagcctgcctgaggcccggagcctgcaccaccacctgcggcatgaccggcggggcggcggccgcctgcagcaggccctgtag

SEQ ID NO: 197141 - DNA, 1173 bp, Artificial Sequence
  derived and/or modified sequence
atggtgacccgggccggcgccggcaccgccgtggccggcgccgtggtggtggccttgctgtcagccgctttagccctttatggaccccctctcgacgctgtcctcgagcgcgccttttcgttgaggaaggctcattcaattaaagatatggagaacacattacagctggtaagaaacatcatccctcctttgagttccactaagcataagggacaggacgggcgcatcggcgtagtggggggatgtcaggagtacacgggagccccttactttgcagcaatttctgcccttaaggtcggagccgatctctcccacgtattctgcgccagcgctgccgctcctgtgataaaggcatattcccctgaacttatcgtacaccctgttcttgactctccaaacgctgttcatgaggtggagaagtggctgccccggctccacgccctggtagttggaccagggctcggacgcgacgacgccttacttcgtaacgtacaaggcattctggaagtgagtaaggccagggatattccagttgtcattgatgccgacggcctctggctggttgcccagcagccagctttgatacacggttatagaaaagcagtcctcacacccaaccacgttgaattctctaggttgtatgatgctgtgcttagaggtcctatggactccgatgattcccacggaagcgtcttgagattgagtcaagcattgggaaacgttactgtggttcaaaaaggggaacgagacatactgtccaatggacaacaggtccttgtatgcagtcaggaggggagctcaaggaggtgtgggggccagggtgacctgctttccggatctcttggagttcttgtccattgggccctgctcgcagggccccagaagaccaatggcggaataagtgacttgaagttaactatctggggacccgaaatcgagaccggtgtgaaaaccagggcgcagggctcctgtggtccccggactaccacacccacttctccccatttgctgctttccccctccccacaagtccagccctcacccggaggtcgtgtctggcgactcctgtctcatcaagccgtccagccaccctccctaccggaggcacggtctctccatcatcacctgaggcatgaccggcgtggcggtggtagacttcagcaggctctttag

SEQ ID NO: 197142 - DNA, 1173 bp, Artificial Sequence
  derived and/or modified sequence
atggtaaccagagcaggagctggaacggccgtggcaggtgcagtggtggtggctctcctcagcgctgcgctggccctgtacggcccacccctggatgctgtgttagagagagcctttagcctaaggaaagcacattctattaaggacatggagaacacattacagcttgtgagaaacatcattcctccactgtcctctacaaaacataaaggtcaggatggcaggatcggagtggtgggaggatgccaggagtacacaggcgcaccctacttcgctgcaatctcagcattgaaagtgggcgctgatttatcgcacgtattctgtgcctctgccgcagcacctgtcatcaaggcctactctcccgagcttattgtacatcccgtactcgacagtcctaatgctgtgcatgaggtggagaaatggctcccgaggttacacgcacttgtggttggaccaggccttggaagggacgacgcgcttctgcgcaatgttcagggaatacttgaagtgtccaaggcacgcgacattcccgtggtaattgatgcagacggactgtggcttgtggctcagcaaccggctctcatccatgggtatcggaaggccgtcctgacacctaatcacgtagagttcagtagattgtacgacgctgtactacggggaccaatggattcagatgattcgcatggcagtgtgcttcggctgtcccaagccctcggcaatgtaacagttgtgcagaagggtgaaagggacattctctcgaacggccagcaggtcctcgtgtgctcccaggaggggtcttcccgtagatgtggtggccagggggacctactgagcggttctctgggagtcctagtgcactgggccctgctagccggtccacagaaaacgaacgggggtatctccgaccttaagctcacgatctgggggcctgagatagaaactggcgtgaagacccgggctcagggctcctgcggacccaggactacaacgccgacctcgccccacttgctgttgagcccgagcccgcaggtccagccatcgcccggaggcagagtgtggaggctcttgtctcatcaggcagtacagcccccatctttacccgaggccagatcacttcaccaccacttacggcacgatcggaggggaggagggaggctgcagcaggccctgtag

SEQ ID NO: 197143 - DNA, 2659 bp, Artificial Sequence
  derived and/or modified sequence
catttggcccggggatggtcacacgcgcgggggccggaactgccgtcgccggcgcggtcgttgtcgcattgctctcggccgcactcgcgctgtacgggccgccactggacgcagttttagaaagagcgttttcgctacgtaaagcacattcgataaaggatatggaaaatactttgcagctggtgagaaatatcatacctcctctgtcttccacaaagcacaaagggcaagatggaagaataggcgtagttggaggctgtcaggagtacactggagccccatattttgcagcaatctcagctctcaaagtgggcgcagacttgtcccacgtgttctgtgccagtgcggccgcacctgtgattaaggcctacagcccggagctgatcgtccacccagttcttgacagccccaatgctgttcatgaggtggagaagtggctgccccggctgcatgctcttgtcgtaggacctggcttgggtagagatgatgcgcttctcagaaatgtccagggcattttggaagtgtcaaaggccagggacatccctgttgtcatcgacgcggatggcctgtggctggtcgctcagcagccggccctcatccatggctaccggaaggctgtgctcactcccaaccacgtggagttcagcagactgtatgacgctgtgctcagaggccctatggacagcgatgacagccatggatctgtgctaagactcagccaagccctgggcaacgtgacggtggtccagaaaggagagcgcgacatcctctccaacggccagcaggtgcttgtgtgcagccaggaaggcagcagccgcaggtgtggagggcaaggggacctcctgtcgggctccctgggcgtcctggtacactgggcgctccttgctggaccacagaaaacaaatgggggcatatcagacttgaaattgacaatttggggtcctgagattgaaacaggagtcaaaaccagagcccagggtagctgcggcccccggaccacgacgcccacttccccacacctcctgctgtccccctctccgcaggtccagccctctcctggtggccgcgtttggcgcctgctctctcaccaggcagtgcaaccaccaagccttccagaagcacggtcgctccaccaccacctccgacatgatcgccgaggtgggggccgccttcagcaagctctttgaaacctgagcccgcgcagaccagaagtaaacaggcaccttggacgggggagagcgtgtgtgtgatgggaaaatccggacccacgcgtgtgctgaaggcgtacggtgcttgccagattttcaacttgagcataaattggttgccattgagaatttaagaatctggaatattgcagcttttggttaaacttaatgcatggttggagatgttatggcgacactaaacaaagtattcctgaactttccttagctccttggtagtaactgggaagacagaaatgaagaaaatcacatgagaatgaagaattctttagcagctcaacagagtttctcggcctgctcccagatcggcgaagtttctacttgttactctctctgccggcgcccttcgttcctcctctgcttcccttccctagtctttcctccggcagggagctgggcaggggtccccgggtgtctccctgagtcccgactgcactgactgggtccatcagagggctgcttcgttctccagctcatcttcttttaaagtggtgactagcttggtggtatctggctgctggtgtttggcttattgacatactccagggtaatcaatgatgactttgtttggaaacccttttggaggcaccatgggaacagaaggaaacatgagtgacgctgacccttgagtgtgtgggtggggagctctgagacgcctcctgtcccacgctctccggtgtccgtgtctacacaggggtccccatgatacccaccggccccagcagggcagaccggaccggggacgggcacggtgaagggctgcagcctggggtctgacgtggcccctagtgctgtctcaggagaaggctctggaggacttgaggcatgctgggcctggtgcagtgatggcgctaaggagacccggggaaagacagtatcgtggtcacgtatgcttaggaagcagcacagccgtgtccttagggatgttcgcgtccagtaaagacactggtaactgcggtttcagccaacactcttcatggcagtgtcgacctcgggttagcttctgttgtctttgtggatggttttcctggagcggcctgacgttgacgtgttctctggtcccatgtcttagcggggcatggtacggtttcgtgcctgacgcgtgcattagggtgttctcttatactttcagtagcatctttccacagcaagggccaaaccctcctggttcccttcagagtctttttggcctgatgatgactcttgagtgataccctgtgatgcagacatgccccagatggattctactttctttaaaactagggactttcaagattaaaaaaaagattgtcactactaatttgacgcctaacttcagaagcttcactgtctacatgtgaacttttccagaaaaactgtgccatggacatttttcctctggggaattaacatctaaattctggtaactattaaaagacagatctggttaattt

SEQ ID NO: 197144 - protein, 570 aa, Artificial Sequence
  derived and/or modified sequence
MSEQSICQARAAVMVYDDANKKWVPAGGSTGFSRVHIYHHTGNNTFRVVGRKIQDHQVVINCAIPKGLKYNQATQTFHQWRDARQVYGLNFGSKEDANVFASAMMHALEVLNSQETGPTLPRQNSQLPAQVQNGPSQEELEIQRRQLQEQQRQKELERERLERERMERERLERERLERERLERERLEQEQLERERQERERQERLERQERLERQERLERQERLDRERQERQERERLERLERERQERERQEQLEREQLEWERERRISSAAAPASVETPLNSVLGDSSASEPGLQAASQPAETPSQQGIVLGPLAPPPPPPLPPGPAQASVALPPPPGPPPPPPLPSTGPPPPPPPPPLPNQVPPPPPPPPAPPLPASGFFLASMSEDNRPLTGLAAAIAGAKLRKVSRMEDTSFPSGGNAIGVNSASSKTDTGRGNGPLPLGGSGLMEEMSALLARRRRIAEKGSTIETEQKEDKGEDSEPVTSKASSTSTPEPTRKPWERTNTMNGSKSPVISRPKSTPLSQPSANGVQTEGLDYDRLKQDILDEMRKELTKLKEELIDAIRQELSKSNTA

SEQ ID NO: 197145 - DNA, 1713 bp, Artificial Sequence
  derived and/or modified sequence
atgagcgagcagagcatctgccaggccagagccgccgtgatggtgtacgacgacgccaacaagaagtgggtgcccgccggcggcagcaccggcttcagcagagtgcacatctaccaccacaccggcaacaacaccttcagagtggtgggcagaaagatccaggaccaccaggtggtgatcaactgcgccatccccaagggcctgaagtacaaccaggccacccagaccttccaccagtggagagacgccagacaggtgtacggcctgaacttcggcagcaaggaggacgccaacgtgttcgccagcgccatgatgcacgccctggaggtgctgaacagccaggagaccggccccaccctgcccagacagaacagccagctgcccgcccaggtgcagaacggccccagccaggaggagctggagatccagagaagacagctgcaggagcagcagagacagaaggagctggagagagagagactggagagagagagaatggagagagagagactggagagagagagactggagagagagagactggagagagagagactggagcaggagcagctggagagagagagacaggagagagagagacaggagagactggagagacaggagagactggagagacaggagagactggagagacaggagagactggacagagagagacaggagagacaggagagagagagactggagagactggagagagagagacaggagagagagagacaggagcagctggagagagagcagctggagtgggagagagagagaagaatcagcagcgccgccgcccccgccagcgtggagacccccctgaacagcgtgctgggcgacagcagcgccagcgagcccggcctgcaggccgccagccagcccgccgagacccccagccagcagggcatcgtgctgggccccctggccccccccccccccccccccctgccccccggccccgcccaggccagcgtggccctgccccccccccccggcccccccccccccccccccctgcccagcaccggccccccccccccccccccccccccccccctgcccaaccaggtgccccccccccccccccccccccccgccccccccctgcccgccagcggcttcttcctggccagcatgagcgaggacaacagacccctgaccggcctggccgccgccatcgccggcgccaagctgagaaaggtgagcagaatggaggacaccagcttccccagcggcggcaacgccatcggcgtgaacagcgccagcagcaagaccgacaccggcagaggcaacggccccctgcccctgggcggcagcggcctgatggaggagatgagcgccctgctggccagaagaagaagaatcgccgagaagggcagcaccatcgagaccgagcagaaggaggacaagggcgaggacagcgagcccgtgaccagcaaggccagcagcaccagcacccccgagcccaccagaaagccctgggagagaaccaacaccatgaacggcagcaagagccccgtgatcagcagacccaagagcacccccctgagccagcccagcgccaacggcgtgcagaccgagggcctggactacgacagactgaagcaggacatcctggacgagatgagaaaggagctgaccaagctgaaggaggagctgatcgacgccatcagacaggagctgagcaagagcaacaccgcctag

SEQ ID NO: 197146 - DNA, 2758 bp, Artificial Sequence
  derived and/or modified sequence
cggcggccgggcgcgcggccccggcgggcacccctcagagggcggccgaggaagctccgggaggaggagcaggaccacgaggaggtgggaggcggcggccgcctggggaccagctccgcgcctcggcctctccgccccctccccagcctttctctcgccctcttctcccacactcccggccggcgcctcggctttgtgcgaggagatggtgtagccccctggccgccgaaggaggagccggacacttgtctcccgtctccgagctgctccccacccctggaggagagacccccccctcggctcggcgccttctgcgtctcccggctggtggggaagcctctgcgccgccggcaccatgagtgaacagagtatctgtcaggcaagagctgctgtgatggtttatgatgatgccaataagaagtgggtgccagctggtggctcaactggattcagcagagttcatatctatcaccatacaggcaacaacacattcagagtggtgggcaggaagattcaggaccatcaggtcgtgataaactgtgccattcctaaagggttgaagtacaatcaagctacacagaccttccaccagtggcgagatgctagacaggtgtatggtctcaactttggcagcaaagaggatgccaatgtcttcgcaagtgccatgatgcatgccttagaagtgttaaattcacaggaaacagggccaacattgcctagacaaaactcacaactacctgctcaagttcaaaatggcccatcccaagaagaattggaaattcaaagaagacaactacaagaacagcaacggcaaaaggagctggagcgggaaaggctggagcgagaaagaatggaaagagaaaggttggagagagagaggttagaaagggaaaggctggagagggagcgactggaacaagaacagctggagagagagagacaagaacgggaacggcaggaacgcctggagcggcaggaacgcctggagcggcaggaacgcctggagcggcaggaacgcctggatcgggagaggcaagaaagacaagaacgagagaggctggagagactggaacgggagaggcaagaaagggagcgacaagagcagttagaaagggaacagctggaatgggagagagagcgcagaatatcaagtgctgctgcccctgcctctgttgagactcctctaaactctgtgctgggagactcttctgcttctgagccaggcttgcaggcagcctctcagccggccgagactccatcccaacagggcattgtcttgggaccacttgcacctccacctcctccaccactcccaccagggcctgcacaggcttcagtagccctccctcctcccccagggccccctccacctcctccactcccatccaccgggcctccaccgccccctcctccccctcctctccctaatcaagtaccccctcctcctccaccacctcctgccccacccctccctgcatctggattctttttggcatccatgtcagaagacaatcgccctttaactggacttgcagctgcaattgccggagcaaaacttaggaaagtgtcacggatggaggatacctctttcccaagtggagggaatgctattggtgtgaactccgcctcatctaaaacagatacaggccgtggaaatggaccccttcctttagggggtagtggtttaatggaagaaatgagtgccctgctggccaggaggagaagaattgctgaaaagggatcaacaatagaaacagaacaaaaagaggacaaaggtgaagattcagagcctgtaacttctaaggcctcttcaacaagtacacctgaaccaacaagaaaaccttgggaaagaacaaatacaatgaatggcagcaagtcacctgttatctccagaccaaaatccacacccttatcacagcccagtgccaatggagtccagacggaaggacttgactatgacaggctgaagcaggacattttagatgaaatgagaaaagaattaacaaagctaaaagaagagctcattgatgcaatcaggcaggaactgagcaagtcaaatactgcatagaggaacagactaaggagagataggactttaatctggaggaaaaatatcctacaaacaacaactgttcacaacagcaaacccctacatttatgagctgtaagaagaaaatggagacaaacagaaggagggaaaaaccaacctactctgaaagccttcagacattatgactctggtgataagctctttccctctccgtttgctgcttttttctggcctttacaacagaatggaagagaatcatttaagagttcctgtaacagttatgcagaaaatactaaaacccatcaggcaagatcaccacgcattgaaatattttcatatcaagataaagtcgcacattttccacaatacattgctaaaataaagaggagaaaggcttaggaagtttttttgcagagagtgctggtaaagaattgagcaagtttgctattgtattgtaatgtttctctcaggtttgttcttcctatcatgtttgatattccatgaataattgagatcagccctatgtaagttaagatcataatatgtggaacaaatggaattgtaagtgctttcaaagggtaatatttataagaaagtgtccgaaaaatgtttcttcagcttgagaaattttagaatgataggaagtttctcgagttagccttcatgcaattttgtagattaaaacataaaatttgtccagaacttaaa

SEQ ID NO: 197147 - DNA, 1713 bp, Artificial Sequence
  derived and/or modified sequence
atgagtgagcagagtatctgtcaggcacgagcagcggttatggtgtacgacgacgccaataagaaatgggtgcccgcgggtgggagtactgggttttctcgcgtgcacatctaccaccacacgggaaataatacattcagggtggtcggaagaaaaattcaggatcatcaggtagtgatcaattgcgccatcccaaaagggctaaagtataatcaggcaactcagaccttccatcagtggagggatgcgcgtcaagtttacggccttaactttggttccaaggaggatgcaaacgttttcgcctccgctatgatgcacgctctggaggtcctcaactcgcaagaaaccgggcccacactcccacgccagaattcccagctgcctgcgcaggttcaaaacgggccaagccaggaggagctggaaattcagagacgtcagcttcaggagcagcaacggcagaaagagcttgaacgggaacgacttgagcgagagcggatggaaagggagcgtctcgagagggagcgactggaacgggagcgcctcgagcgggagaggctggaacaagagcagctcgaaagggagcgacaggaacgggaacggcaggagcggctggaaaggcaagaacgtctggagcggcaggaacggttagagagacaagagagacttgaccgagaacggcaggaaagacaggaacgcgagcgtctcgaaaggctcgagcgagagaggcaagagcgggaaagacaagagcagcttgaaagagagcagctcgaatgggagagggaaagaagaatctcctctgccgcagcacctgccagcgtggaaacccctctgaacagcgtgctcggcgactcgtctgcaagcgagccaggcctccaggctgcatcccaaccggctgaaacacctagtcaacagggcattgtcttgggcccactagctccaccaccccctcccccgttgcctcccggtccggcccaagccagcgtggctctgccaccccctcctggacccccaccgcccccccccctgcccagcacaggccctcctcctccaccaccgccaccccccctaccgaatcaggtccctccaccacccccaccccctccggcgccccctcttccagccagtggttttttcctggcttctatgtcggaggataatcggcccctaaccgggttggcagcggccatcgccggcgcaaaactgagaaaggtgagtcggatggaagacaccagcttcccaagcggaggaaacgctattggagttaactctgctagctccaaaaccgacactggtcgcggcaacgggccactgcccctgggcggcagcggattaatggaagaaatgtctgctttgcttgctcggcgccggcgtattgcggaaaagggatccaccatcgaaaccgaacagaaagaagacaaaggcgaggactcagagcccgttactagcaaagcctcttcaacaagtactcccgaaccaaccagaaagccatgggagaggaccaacactatgaatggatctaagtctcccgtcatatcacggccaaagtctacccctctctctcagccttccgctaatggagtgcagaccgaaggcctcgattatgaccgtcttaaacaggatatacttgacgagatgagaaaggaactaaccaaactgaaagaggagcttatcgacgccataaggcaggaactatcaaagtcgaacaccgcctag

SEQ ID NO: 197148 - DNA, 1713 bp, Artificial Sequence
  derived and/or modified sequence
atgtctgagcagagcatctgccaggcccgggctgctgtgatggtgtatgatgatgccaacaagaagtgggtgcctgctgggggcagcacaggcttcagccgggtgcacatctaccaccacactggaaacaacaccttccgggtggtgggcaggaagatccaggaccaccaggtggtgatcaactgtgccatccccaagggcctgaagtacaaccaggccacccagaccttccaccagtggagagatgcccggcaggtgtatggcctgaactttggcagcaaagaagatgccaacgtgtttgccagcgccatgatgcacgccctggaggtgctgaacagccaggagaccggccccaccctgccccggcagaacagccagctgcctgcccaggtgcagaatggccccagccaggaggagctggagatccagaggcggcagctgcaggagcagcagaggcagaaggagctggagcgggagcggctggagcgggagaggatggagcgggagcggctggagcgggagcggctggagcgggagcggctggagcgggagcggctggagcaggagcagctggagcgggagcggcaggagcgggagcggcaggagcggctggagcggcaggagcggctggagcggcaggagcggctggagcggcaggagcggctggaccgggagcggcaggagcggcaggagcgggagcggctggagcggctggagcgggagcggcaggagcgggagcggcaggagcagctggagcgggagcagctggagtgggagcgggagcggcgcatcagcagcgctgctgccccagcctctgtggagacccccctgaacagcgtgctgggggacagcagcgccagcgagcccggcctgcaggccgccagccagcctgctgagacccccagccagcagggcatcgtgctgggccccctggcccctcctcctcctccacccctgcccccaggccctgcccaggcctctgtggccctgcccccacctcctggccccccacctcctccacccctgcccagcactggacctcctcctcctcctcctcctccacccctgcccaaccaggtgcccccacctcctcctcctcctccagccccacccctgcctgccagcggcttcttcctggcctccatgtctgaggacaaccggcccctgaccggcctggccgccgccatcgccggggccaagctgaggaaggtgtccaggatggaggacaccagcttccccagcggcggcaatgccatcggcgtgaacagcgccagcagcaagacagacaccggcagaggaaatggccccctgcccctgggcggcagcggcctgatggaggagatgtctgccctgctggccaggagaagaagaattgctgagaagggcagcaccattgaaacagagcagaaggaggacaagggagaagattctgagcctgtgaccagcaaggccagcagcaccagcaccccagagcccaccaggaagccctgggagaggaccaacaccatgaatggcagcaagagccctgtgatcagccggcccaagagcacccccctgagccagcccagcgccaatggagtgcagacagagggcctggactatgaccggctgaagcaggacatcctggatgagatgaggaaggagctgaccaagctgaaggaggagctgattgatgccatccggcaggagctgagcaagagcaacacagcctag

SEQ ID NO: 197149 - DNA, 1713 bp, Artificial Sequence
  derived and/or modified sequence
atgagcgagcagagcatctgccaggcccgggccgccgtgatggtgtacgacgacgccaacaaaaagtgggtccctgcggggggaagcaccggattcagcagagtacacatatatcatcatacaggaaacaacacctttcgcgtagtcggcagaaaaatacaggaccaccaggtcgtgataaactgtgctatccccaagggactaaagtacaaccaggccacccagacttttcaccaatggcgggatgcccgtcaggtgtacggactgaattttggatcaaaagaggacgcaaatgtgtttgccagcgctatgatgcacgcgctggaggtcttaaactcccaggaaaccggtcctacacttccgcgccagaactctcagttgccagctcaggtgcagaacggcccctcgcaggaggaattggagatccagaggcgccaactccaggagcagcagcgccagaaggaattggaacgggaaagactggaacgggagcggatggagcgggagagactggagagggaacgactagagcgagagagactcgagcgggagaggctggagcaagagcagctggagcgcgagcgccaggaacgtgaacgtcaagagcgattggaacgccaggagcgtcttgaaagacaggagcgcctagagcgccaggaaaggttggacagggagcggcaggaacgtcaggaacgagagagactcgagcgcctggagcgagagcgccaagaacgtgagcgacaagagcaactggaaagagaacagctagagtgggaaagggagaggcgcatatcctccgctgcagcacccgccagtgtggagacaccattgaactcagtgctgggcgactcttcagccagcgagccaggactgcaggctgcttcccagccagccgaaaccccaagtcagcaaggcatagtgcttggccctcttgccccccccccccccccgccactgcccccgggaccagcccaggcatcggtggccctcccacccccacccggcccaccaccaccccccccactgccgagcaccggtccccctccccctcccccacctcctccactcccgaaccaggtgccgccccccccacccccccccccggccccccccctccccgcttcggggtttttcctagcctcaatgtcagaggacaaccgcccactaaccggcctcgccgcggccattgccggagcgaaactgcgtaaagtttctagaatggaagacacttccttcccatcaggggggaacgccatcggggtgaattccgcaagcagcaaaaccgacaccggccgcggcaacggacccctcccacttggcgggtctgggctaatggaagaaatgtctgccttgcttgcccgacgccggcgcatcgcagaaaagggctcaacaatcgaaactgaacaaaaagaggataagggtgaagactccgagcccgtgacctcgaaggcttcttcaactagtacccctgaacccacgcgcaagccatgggaacggactaacacgatgaacggcagcaagtctcctgtgatctcccggcccaaatcaactccactgtcccaaccatctgcgaatggagtgcaaaccgagggacttgattatgatcggctgaagcaggacatcctagacgagatgcgcaaagaactgacgaaattaaaagaagagctgattgacgcgattaggcaggaactctctaagagcaataccgcgtag

SEQ ID NO: 197150 - DNA, 1713 bp, Artificial Sequence
  derived and/or modified sequence
atgagcgagcagagtatttgccaggcccgtgccgctgtgatggtctatgacgacgctaataagaaatgggtgcctgctggagggtctacaggattctcaagggtgcacatataccaccatactggtaataacacctttcgcgtcgtggggaggaaaattcaagatcaccaggtcgttattaattgcgccatccccaaggggctgaagtataatcaagcgactcagacctttcaccagtggcgagatgccagacaagtgtacggattgaacttcggcagtaaggaggacgcaaatgtctttgcttccgccatgatgcacgcgctggaggtgttaaacagccaggagaccggaccaaccctcccgagacagaatagccagctgcctgctcaggtccagaatgggccaagtcaggaggagctggaaatacagcggcgacagctgcaagagcaacagcgccagaaggaactggagcgcgaacggttagagagggagagaatggaaagagaacgtctggagcgcgaacggctggaacgagagagattggaaagagaaagactcgagcaagaacagctggagagagaaagacaggagagagagagacaggagcgtttagagcgccaggagcgactggagcgccaggaaaggctggagaggcaggagcgactcgaccgtgaaaggcaggagaggcaggagagagagcgactggagaggctcgagcgagaaagacaggaaagagaaagacaggagcagctagaacgcgagcagcttgagtgggagagagaaagacggattagtagcgcagccgctccagcttctgttgaaacaccactcaatagcgtactgggcgactcatcagcctccgaacccggactgcaagccgcaagtcaaccagcagagactccctctcaacagggcatcgtgcttggccctctggcgccaccgccacccccacctctaccaccgggacctgctcaggcctccgttgcccttccaccaccccctgggccacctccccctccaccattaccctctaccggccctcctccccctccccctccaccaccgttgcccaaccaggtgccaccccctcccccaccccctcctgccccacctctgcccgcaagcggttttttcctggcgtctatgagtgaagacaataggccgctgacaggactggctgccgcaatcgctggcgcaaaattgcggaaggtcagtaggatggaggatacctcctttccatcaggcggtaacgctatcggcgtcaattccgctagttcaaagacagacactgggagaggcaatggtccgttaccattgggcggtagcggactgatggaggaaatgtcagccctgctggcccgtcgtcgcagaatcgccgagaagggcagcactattgaaaccgagcagaaggaagacaaaggggaagatagcgagcccgtaacctccaaggcatcctccaccagcaccccagaaccgacacgcaaaccttgggaacgtactaatactatgaatggaagcaaatcccctgtgattagccggcctaagtctacaccactcagccagcctagcgcgaatggcgttcagactgaggggctggactatgataggctcaaacaggacatacttgatgaaatgaggaaggaactgacgaaactgaaagaagaattgattgacgcaatccgacaggagttatccaagtcaaacaccgcatag

SEQ ID NO: 197151 - protein, 154 aa, Artificial Sequence
  derived and/or modified sequence
MFHCIPLWRCNRHVESIDKRHCSLVYVPEEIYRYARSLEELLLDANQLRELPEQFFQLVKLRKLGLSDNEIQRLPPEIANFMQLVELDVSRNEIPEIPESISFCKALQVADFSGNPLTRLPESFPELQNLTCLSVNDISLQSLPENIGKQKTTS

SEQ ID NO: 197152 - protein, 524 aa, Artificial Sequence
  derived and/or modified sequence
MFHCIPLWRCNRHVESIDKRHCSLVYVPEEIYRYARSLEELLLDANQLRELPEQFFQLVKLRKLGLSDNEIQRLPPEIANFMQLVELDVSRNEIPEIPESISFCKALQVADFSGNPLTRLPESFPELQNLTCLSVNDISLQSLPENIGNLYNLASLELRENLLTYLPDSLTQLRRLEELDLGNNEIYNLPESIGALLHLKDLWLDGNQLSELPQEIGNLKNLLCLDVSENRLERLPEEISGLTSLTDLVISQNLLETIPDGIGKLKKLSILKVDQNRLTQLPEAVGECESLTELVLTENQLLTLPKSIGKLKKLSNLNADRNKLVSLPKEIGGCCSLTVFCVRDNRLTRIPAEVSQATELHVLDVAGNRLLHLPLSLTALKLKALWLSDNQSQPLLTFQTDTDYTTGEKILTCVLLPQLPSEPTCQENLPRCGALENLVNDVSDEAWNERAVNRVSAIRFVEDEKDEEDNETRTLLRRATPHPGELKHMKKTVENLRNDMNAAKGLDSNKNEVNHAIDRVTTSV

SEQ ID NO: 197153 - DNA, 465 bp, Artificial Sequence
  derived and/or modified sequence
atgttccattgtattccactgtggaggtgcaatagacacgtggaatcaattgataagcgccactgctccctggtttatgttcctgaggagatttacaggtatgcacgctctctcgaggagctgctgcttgatgcaaatcagctgagggaattgcctgaacagtttttccagctggtgaaactgagaaagctgggattaagcgacaatgagattcagaggctcccacccgagattgccaattttatgcagttggtggaactggacgttagccgcaacgaaatacccgaaatccccgagagtatttcattctgcaaagctttacaagtggcagatttctccggaaaccctctcactcgactgcctgagagttttccagaacttcagaatttgacgtgtctgagtgtgaacgacatcagcctacaatccttacccgaaaatattggcaaacagaagaccacttcttag

SEQ ID NO: 197154 - DNA, 1575 bp, Artificial Sequence
  derived and/or modified sequence
atgttccactgcatccccctttggaggtgtaacagacacgtggagtccatcgacaagaggcattgctccctagtttatgtgcccgaggagatctacaggtacgcccggtcgcttgaggagctcctcctggacgccaaccagctcagagagcttccagaacagttttttcagctagtgaaactgcgaaagcttggcctctccgataatgagattcagcggctgccgcccgagatcgctaattttatgcaattggtcgaactagatgtctcacggaacgaaatccctgaaatccctgaaagcatatctttttgcaaggccctgcaggtagcggatttctcaggtaaccctctgactcgattaccagaatcgtttccagagcttcagaatcttacttgtctctcagtgaatgatatttctctgcagagcctgccagaaaatatcggcaatctttataatctggcgtccctggagctgagagagaacctgctaacctatctaccagatagtctgacacagcttaggaggctcgaggagttggatctgggcaataatgaaatctacaatttacccgagagcatcggagctctactgcacctaaaggatttgtggctggatggaaatcagctttccgagttaccccaggaaattggtaatctgaagaatctgctgtgtctggacgtgtcagaaaatcggctggagaggttgccagaagagatttcaggcctgacatcgctgactgatctggtcatctcccaaaacctcttagaaacaataccggatgggattggtaagctcaaaaagctgtcaatactaaaggtcgatcaaaacaggttaacccagctgcccgaggcagtcggcgaatgcgaatccctcactgaactcgttttgacagagaaccagctattgactctgccgaaatcaatcggaaagcttaaaaaactgtccaacctaaatgcagaccggaataaactagtctcattaccaaaagagattgggggttgctgttcactgaccgtgttttgtgtccgtgacaacaggctgacgcggatcccagccgaagtgtcccaagctaccgaactccatgtcctggacgtggcgggcaaccgattgttgcacctgcccctgtccctgaccgcccttaaactcaaagcactatggctttctgacaatcagagtcagcccctgctgacctttcagacagacacggattacacaaccggggagaagattttaacatgcgttctccttccacaattgcccagtgaaccaacgtgccaggagaatctgccgagatgcggagcattggagaatctagtcaacgatgtgtctgacgaggcctggaatgaacgcgccgttaatcgcgtaagcgccatccgtttcgtggaggacgagaaggacgaggaggataacgagacaagaacactgctaaggagagcaaccccccatcctggcgagctgaaacatatgaagaagacggttgagaaccttagaaatgacatgaatgcagctaagggcctggatagcaataagaacgaagtgaaccacgccatcgaccgcgtgacaaccagtgtgtag

SEQ ID NO: 197155 - DNA, 465 bp, Artificial Sequence
  derived and/or modified sequence
atgttccactgcatccccctgtggcgctgcaacagacatgtggagagcattgacaagaggcactgcagcctggtgtatgtgcctgaggagatctaccgctatgcccggagcctggaggagctgctgctggatgccaaccagctgcgggagctgcctgagcagttcttccagctggtgaagctgaggaagctgggcctgagtgacaatgagatccagaggctgcccccagagatcgccaacttcatgcagctggtggagctggatgtgtccagaaatgagatccctgagatccctgagagcatctccttctgcaaggccctgcaggtggccgacttcagcggcaaccccctgacccggctgcctgagagcttccctgagctgcagaacctgacctgcctgtctgtgaatgacatcagcctgcagagcctgcctgaaaatattggcaagcagaagaccaccagctag

SEQ ID NO: 197156 - DNA, 1575 bp, Artificial Sequence
  derived and/or modified sequence
atgttccactgcatccccctgtggcgctgcaacagacatgtggagagcattgacaagaggcactgcagcctggtgtatgtgcctgaggagatctaccgctatgcccggagcctggaggagctgctgctggatgccaaccagctgcgggagctgcctgagcagttcttccagctggtgaagctgaggaagctgggcctgagtgacaatgagatccagaggctgcccccagagatcgccaacttcatgcagctggtggagctggatgtgtccagaaatgagatccctgagatccctgagagcatctccttctgcaaggccctgcaggtggccgacttcagcggcaaccccctgacccggctgcctgagagcttccctgagctgcagaacctgacctgcctgtctgtgaatgacatcagcctgcagagcctgcctgaaaatattggcaacctgtacaacctggccagcctggagctgcgggagaacctgctgacctacctgcctgacagcctgacccagctgcggcggctggaggagctggacctgggcaacaatgagatctacaacctgcctgagagcattggagccctgctgcacctgaaggacctgtggctggatggcaaccagctgtctgagctgccccaggagatcggcaacctgaagaacctgctgtgcctggatgtgtctgaaaatcggctggagcggctgcctgaggagatcagcggcctgaccagcctgacagacctggtgatcagccagaacctgctggagaccatcccagatggcatcggcaagctgaagaagctgagcatcctgaaggtggaccagaaccggctgacccagctgcctgaggccgtgggagaatgtgagagcctgacagagctggtgctgacagagaaccagctgctgaccctgcccaagagcatcggcaagctgaagaagctgagcaacctgaatgctgacaggaacaagctggtgtccctgcccaaggagattggaggctgctgcagcctgaccgtcttctgtgtgcgggacaaccggctgacccgcatcccagctgaggtgtcccaggccacagagctgcacgtgctggatgtggccggcaaccggctgctgcacctgcccctgagcctgacagccctgaagctgaaggccctgtggctgagtgacaaccagagccagcccctgctgaccttccagacagacacagactacaccaccggggagaagatcctgacctgtgtgctgctgccccagctgcccagcgagcccacctgccaggagaacctgccccgctgtggggccctggagaacctggtgaatgatgtgtctgatgaggcctggaatgaaagagctgtgaacagagtgtctgccatccgctttgtggaggatgagaaggatgaggaggacaatgagaccaggaccctgctgcggcgggccaccccccaccctggagagctgaagcacatgaagaagacagtggagaacctgagaaatgacatgaatgctgccaagggcctggacagcaacaagaatgaggtgaaccacgccatcgacagagtgaccacctctgtgtag

SEQ ID NO: 197157 - DNA, 808 bp, Artificial Sequence
  derived and/or modified sequence
ccttgaagcacttccgaccgcgaagcccggcgcgagaagcgagctaacccaagagccaacaacgagcgcggagagggcagcggactgagcggagccgccggccagagcgggctcggagcccgggtctccgccgctcgggacccggctaggcggcggcgggggcggcgatgttccactgcatccccctgtggcggtgcaaccgtcatgtggagagcatcgacaagcgccactgctcgctggtctacgtccccgaggagatctaccgctatgcccggagcctggaggagctgctgctggacgccaaccagctccgcgagctgcccgagcaatttttccagctagtcaaattacgaaagcttggacttagtgataatgaaattcagcggctccctccagaaatagcaaacttcatgcagctggtggaactagatgtgtctcgaaatgagattcctgaaattccagaaagcatttcattctgtaaagcactgcaggtagctgacttcagcggaaacccactgactaggttgccagaaagctttcctgaattacagaatttaacatgtctttctgtaaatgacatctcactacagtctctacctgaaaatattggcaagcagaagacaactagctgacacctgttcagccagcaagttggtgtttttctgaaatgtacactgatgttttatctttatgccattagacttgctaattaaaaattctgcccttaaactctcaggaggagaagaagacaggaagccctcaatacactctaggtgtatggtatcagttgcagagaaaacagtggtat

SEQ ID NO: 197158 - DNA, 3180 bp, Artificial Sequence
  derived and/or modified sequence
ggaagctccgcgcggcggcgggggcggcgacggcgactggcgggtgggagtggaggcaccggctggcgggcgggggtacagggacggggcaggggctcccgctccaggttccttgaagcacttccgaccgcgaagcccggcgcgagaagcgagctaacccaagagccaacaacgagcgcggagagggcagcggactgagcggagccgccggccagagcgggctcggagcccgggtctccgccgctcgggacccggctaggcggcggcgggggcggcgatgttccactgcatccccctgtggcggtgcaaccgtcatgtggagagcatcgacaagcgccactgctcgctggtctacgtccccgaggagatctaccgctatgcccggagcctggaggagctgctgctggacgccaaccagctccgcgagctgcccgagcaatttttccagctagtcaaattacgaaagcttggacttagtgataatgaaattcagcggctccctccagaaatagcaaacttcatgcagctggtggaactagatgtgtctcgaaatgagattcctgaaattccagaaagcatttcattctgtaaagcactgcaggtagctgacttcagcggaaacccactgactaggttgccagaaagctttcctgaattacagaatttaacatgtctttctgtaaatgacatctcactacagtctctacctgaaaatattggcaatctttataacctggcttcactggaactgagagagaatcttcttacatatcttcctgactctcttacccagctgcgaagactagaagaacttgatttaggaaacaatgaaatatataatttgccagaatcaattggagccctcttacatctaaaagatctctggttggatggaaatcaactgtcagaattacctcaggaaataggaaatctgaagaacctgctgtgtttagatgtctctgaaaacaggttggaaagacttcctgaagaaatcagtggcctgacttcattaacggatttagtcatttcccagaacttattagaaacgattccggatggcattggaaaactaaagaaactgtcaatcttgaaggtggatcagaatagactcacacagttgcctgaagcagttggggaatgtgaaagtctcactgagttagttcttacagaaaatcagctcctgaccctgcctaaaagcattggaaaactaaagaagttgagcaacttgaatgcagacagaaataaattagtgtccttaccaaaagagatcggcgggtgctgcagcctcactgtgttctgtgtacgtgacaacagactaactcggatacctgcagaggtgtcacaggcaacagaacttcatgtcctggatgtggcagggaacaggttgctgcatctacctttatccctgactgccttgaagttgaaggctctgtggctatctgacaaccagtcccagcccctgcttacattccagacagacacagactacaccacaggagagaagattttaacctgtgtcttacttcctcagctgccttctgaacctacttgtcaagagaatctgcctcgctgtggtgcactggagaacttggtaaatgatgtctctgatgaagcctggaacgagcgtgctgtcaacagagtcagtgcgatccgatttgtggaggatgagaaagatgaagaagacaatgagacgagaacacttctaaggcgagccactccacacccaggggagttaaagcacatgaaaaagacagtggagaatttacggaatgacatgaatgctgctaaaggactggactcaaacaaaaacgaggtcaatcatgccattgaccgagtgaccacttctgtgtagagtttcacctccaagttttacctcctgtgtcttcctctgctgtcgagacgttcctgtctgcttcccgggagcctcacgtgctccttgtcctaaccagcccccgcgcgccatcttcccgtggagtgtggggaagctgctgtctcccaggaagtgccttactcatcccgcaaccagtcagcgcaccagtggtctcccggtgtgattttttttttttttaatttcagttgtttgtaataagtagaatacactactgtaaacatacgacctttgtttttgtcttatgttggggtaaaggaaagcaggaaggggaatttttatcctcctcccttccgtaaagtgctgggatattttgaatcccccaagttcccttggacctactgatgagagatagttttatgtatggggaaaaatggatactttttaaaccttttttggcagctcagatggtgtaaattttaaaattttgtataggtatttcataacaaaaatatgtatttcttttttgttattttatcttgaaaacggtacatattttagtatttgtgcagaaaaacaagtcctaaagtatttgtttttatttgtaccatccacttgtgccttactgtatcctgtgtcatgtccaatcagttgtaaacaatggcatctttgaacagtgtgatgagaataggaatgtggtgttttaaagcagtgttgcattttaatcagtaatctacctggtggatttgtttttaaccaaaaagatgaattatcaatgatttgtaattatatcagttgattttttttgaaaagatgaaccaaaggatttgactgctaatattttattccttacactttttttctgaataagtctctcataatgagtgcagtgtcagactgtgcctactctgatggtatgtgccatttgtaaaataaaatagagcagaaaaacacaaaaagagaacactggttcagacattcagtgggcaagtaaattatggactgcaaaataatgatttttattcaagaaagctttaaaagttttatatccagatatacaaccacaataaagcaaaataacctactatcaaaatagaaatgttgctatctttataagtgcaatttaatttgtaaatagagtttgaatcaaagtatcacaaaatactgcttcaagatttaattttaaatctgctaatttaagggatattgggaaaagttttggtgtgtttctgttgatttcttttttgtatgctgtgataaaagagaaatgaaaagtgccagtcactgtgtggtgtctaggaaaatcatatatatttttttctccaagaaataaattcatcctggacattggc

SEQ ID NO: 197159 - DNA, 465 bp, Artificial Sequence
  derived and/or modified sequence
atgttccactgcatccccctgtggcggtgcaaccggcacgtggagtcaattgacaaaagacactgcagcttagtctacgtgcctgaagagatatacaggtacgctcgctcgcttgaagaactcctcctggacgccaatcagctccgcgagctgcctgagcagttctttcagctggtgaaactcaggaagttagggttgtctgataatgagattcagagactgcccccagagatcgccaatttcatgcagctggtggaactcgacgtgtcacggaatgagataccggagatccccgagagcatctctttttgcaaagctttgcaggtcgcagatttcagcgggaatccgctgacccgtctgcctgaatccttccccgagctgcaaaatctaacctgtctcagcgtgaatgatatctccctccagtcactgcctgaaaacattggcaagcaaaagacaacttcatag

SEQ ID NO: 197160 - DNA, 1575 bp, Artificial Sequence
  derived and/or modified sequence
atgttccactgcatccccctgtggcggtgcaaccggcacgtggagtccattgacaagcggcattgctccctggtgtatgtgccagaggagatttatcgctacgcccgaagcctcgaagagctcctgctcgatgccaaccagctgcgagaactgcccgagcagtttttccaactggtgaaactgcgcaagctcggattgagcgacaacgaaatccaacgcctgccgccggaaattgctaacttcatgcagctggtggagcttgatgtctcaaggaacgagatccctgagatccctgagtctatctcattctgtaaggcccttcaagtggcagatttctcgggtaatcccctaacccgtctgcccgagtccttccccgaactgcagaacctgacctgcttgagcgtgaacgatatatctctacagtcactgcccgagaacattgggaacctgtataacctcgccagcctggagctacgggaaaatctgttaacatatttgccagactccttgacacagttgcgacggttagaggagctggacctgggcaacaatgagatctacaacctaccggagagtatcggggctttgcttcacctaaaggatttgtggctagacggcaaccaactgtctgagcttccgcaggaaattgggaacctaaaaaatctattatgtctggatgtgtctgaaaatcgcctcgagcgattacctgaagaaatctccgggctgacatcccttaccgacctcgttatcagtcagaatttactggaaactattcctgatgggattggaaagctcaagaaactgagcatactaaaggttgatcagaacagactaacccaattacccgaagctgttggcgagtgtgagagcctgaccgaattagtgcttactgagaatcaactactaactttaccaaaatcgatcggaaagttaaagaagctgtcgaacttaaacgcggatcgaaacaaactggtctccctgccaaaggagattggcgggtgttgttcactgaccgttttctgtgtgagggacaatcgactgacgaggatccctgccgaggtgtcccaagctacagaacttcatgttctagacgttgccgggaataggttgcttcaccttcccctgtcattgactgcccttaagctgaaggccctatggctgtctgataatcaatcacagccactgctgacttttcagacagatactgattacaccaccggcgagaaaatcttaacgtgcgttctgctcccccaactcccctcggagcctacttgtcaggagaacctgccccggtgcggcgccctggaaaatctggtaaatgacgtgtctgacgaagcatggaatgaaagagccgtgaatcgcgtgtcagccattagatttgtggaggatgagaaggatgaggaagacaatgaaactcgcaccttactgcggcgcgccactccacacccaggagaactcaaacatatgaaaaaaacagtcgagaatctgagaaacgatatgaacgcggccaagggactcgatagcaacaagaatgaggttaatcatgccatcgaccgggtgacgacatccgtgtag

SEQ ID NO: 197161 - DNA, 465 bp, Artificial Sequence
  derived and/or modified sequence
atgttccactgcatcccactgtggcgctgcaatcggcatgttgaatccatagacaagcgacactgttccctggtttacgtgcccgaggaaatctaccggtatgcaagaagcctggaggagctgctcctagatgctaaccagcttagagaactcccagaacagtttttccagctagtaaagcttcgaaagctgggactgagcgacaatgagatacagcgcctgccgccagagatcgcgaacttcatgcagttagtggaactggatgtcagccgcaatgagatcccagagatccctgagtctattagcttctgcaaagcgttacaagtcgctgatttcagtggaaatcctctgactaggctgccagagagtttcccagaattgcaaaacctgacctgtttatccgtgaatgatattagtttgcaaagcctgcccgagaacattggcaagcagaaaacgacaagttag

SEQ ID NO: 197162 - DNA, 1575 bp, Artificial Sequence
  derived and/or modified sequence
atgttccattgcattcccttgtggaggtgcaacaggcacgtggagagtatagataagcgacattgcagtctagtgtatgtgcctgaagagatctatcgttacgcacggagcctagaagagctcctcctggatgcgaatcaactgagagaactgcccgaacaatttttccagctggtgaaactgagaaagttagggttatcagataacgaaattcagagactcccccctgagattgcaaatttcatgcagcttgttgaattggatgtttcccggaacgagattccagaaattcctgagtccatttccttctgtaaagctttacaggtggctgatttctcaggtaaccctcttacacggcttccagagtccttccctgaactccaaaacctcacgtgtctgagtgtaaacgacataagcctgcagagcctccccgaaaatattggaaatttgtacaacttggcatctctggagctgcgagaaaatcttctgacctatcttccagattcacttacccagctccgtagactggaggagctggatcttggaaacaatgaaatttacaatctccctgagtccatcggagccctactccatcttaaagacctctggcttgacggtaatcagctgtcagagctgccacaggagataggcaacctcaaaaatctgctgtgccttgatgtctcagaaaaccgccttgagagacttccagaagaaatcagcggtctgaccagcctgaccgaccttgtgatcagccaaaatcttctggagacaataccagatgggatagggaagctgaagaagttaagtattttaaaagtggaccagaatcggctgactcagttgcctgaggccgtcggtgagtgcgagagcttaacggagctggtgttaactgaaaaccagttgctcactttgccaaaatctataggcaagctcaagaaactctctaacctgaacgcagaccgcaataagctcgtgagcctgcccaaggagatcggcggatgttgctccctcactgtcttttgcgtcagggacaacagactaacaaggatacccgctgaggtgagccaagcaactgaactacatgtcttagacgtagccggtaaccgactcctccacttaccgctgagcttgactgccttgaagctcaaggctctgtggctgagtgacaaccaatcacagcccctgctaaccttccagacagataccgattatacaaccggtgaaaagatcctgacatgcgtcctgctaccccagctgcccagcgaaccaacttgccaagaaaatctgccacgctgtggcgctcttgagaatctagttaatgacgtgagcgacgaggcctggaatgaaagagcggtcaaccgcgtctctgccatacggttcgtcgaggacgaaaaggatgaggaggataacgagacccgaaccctactgagacgggcaaccccacatcccggagagcttaagcatatgaagaaaacagtggagaacttgcgtaatgatatgaacgcagctaaggggctggacagcaacaaaaacgaagttaaccatgctatagaccgggttaccaccagcgtctag

SEQ ID NO: 197163 - DNA, 465 bp, Artificial Sequence
  derived and/or modified sequence
atgttccactgcatccccctgtggagatgcaacagacacgtggagagcatcgacaagagacactgcagcctggtgtacgtgcccgaggagatctacagatacgccagaagcctggaggagctgctgctggacgccaaccagctgagagagctgcccgagcagttcttccagctggtgaagctgagaaagctgggcctgagcgacaacgagatccagagactgccccccgagatcgccaacttcatgcagctggtggagctggacgtgagcagaaacgagatccccgagatccccgagagcatcagcttctgcaaggccctgcaggtggccgacttcagcggcaaccccctgaccagactgcccgagagcttccccgagctgcagaacctgacctgcctgagcgtgaacgacatcagcctgcagagcctgcccgagaacatcggcaagcagaagaccaccagctag

SEQ ID NO: 197164 - DNA, 1575 bp, Artificial Sequence
  derived and/or modified sequence
atgttccactgcatccccctgtggagatgcaacagacacgtggagagcatcgacaagagacactgcagcctggtgtacgtgcccgaggagatctacagatacgccagaagcctggaggagctgctgctggacgccaaccagctgagagagctgcccgagcagttcttccagctggtgaagctgagaaagctgggcctgagcgacaacgagatccagagactgccccccgagatcgccaacttcatgcagctggtggagctggacgtgagcagaaacgagatccccgagatccccgagagcatcagcttctgcaaggccctgcaggtggccgacttcagcggcaaccccctgaccagactgcccgagagcttccccgagctgcagaacctgacctgcctgagcgtgaacgacatcagcctgcagagcctgcccgagaacatcggcaacctgtacaacctggccagcctggagctgagagagaacctgctgacctacctgcccgacagcctgacccagctgagaagactggaggagctggacctgggcaacaacgagatctacaacctgcccgagagcatcggcgccctgctgcacctgaaggacctgtggctggacggcaaccagctgagcgagctgccccaggagatcggcaacctgaagaacctgctgtgcctggacgtgagcgagaacagactggagagactgcccgaggagatcagcggcctgaccagcctgaccgacctggtgatcagccagaacctgctggagaccatccccgacggcatcggcaagctgaagaagctgagcatcctgaaggtggaccagaacagactgacccagctgcccgaggccgtgggcgagtgcgagagcctgaccgagctggtgctgaccgagaaccagctgctgaccctgcccaagagcatcggcaagctgaagaagctgagcaacctgaacgccgacagaaacaagctggtgagcctgcccaaggagatcggcggctgctgcagcctgaccgtgttctgcgtgagagacaacagactgaccagaatccccgccgaggtgagccaggccaccgagctgcacgtgctggacgtggccggcaacagactgctgcacctgcccctgagcctgaccgccctgaagctgaaggccctgtggctgagcgacaaccagagccagcccctgctgaccttccagaccgacaccgactacaccaccggcgagaagatcctgacctgcgtgctgctgccccagctgcccagcgagcccacctgccaggagaacctgcccagatgcggcgccctggagaacctggtgaacgacgtgagcgacgaggcctggaacgagagagccgtgaacagagtgagcgccatcagattcgtggaggacgagaaggacgaggaggacaacgagaccagaaccctgctgagaagagccaccccccaccccggcgagctgaagcacatgaagaagaccgtggagaacctgagaaacgacatgaacgccgccaagggcctggacagcaacaagaacgaggtgaaccacgccatcgacagagtgaccaccagcgtgtag

SEQ ID NO: 197165 - protein, 1235 aa, Artificial Sequence
  derived and/or modified sequence
MFGDLFEEEYSTVSNNQYGKGKKLKTKALEPPAPREFTNLSGIRNQGGTCYLNSLLQTLHFTPEFREALFSLGPEELGLFEDKDKPDAKVRIIPLQLQRLFAQLLLLDQEAASTADLTDSFGWTSNEEMRQHDVQELNRILFSALETSLVGTSGHDLIYRLYHGTIVNQIVCKECKNVSERQEDFLDLTVAVKNVSGLEDALWNMYVEEEVFDCDNLYHCGTCDRLVKAAKSAKLRKLPPFLTVSLLRFNFDFVKCERYKETSCYTFPLRINLKPFCEQSELDDLEYIYDLFSVIIHKGGCYGGHYHVYIKDVDHLGNWQFQEEKSKPDVNLKDLQSEEEIDHPLMILKAILLEENNLIPVDQLGQKLLKKIGISWNKKYRKQHGPLRKFLQLHSQIFLLSSDESTVRLLKNSSLQAESDFQRNDQQIFKMLPPESPGLNNSISCPHWFDINDSKVQPIREKDIEQQFQGKESAYMLFYRKSQLQRPPEARANPRYGVPCHLLNEMDAANIELQTKRAECDSANNTFELHLHLGPQYHFFNGALHPVVSQTESVWDLTFDKRKTLGDLRQSIFQLLEFWEGDMVLSVAKLVPAGLHIYQSLGGDELTLCETEIADGEDIFVWNGVEVGGVHIQTGIDCEPLLLNVLHLDTSSDGEKCCQVIESPHVFPANAEVGTVLTALAIPAGVIFINSAGCPGGEGWTAIPKEDMRKTFREQGLRNGSSILIQDSHDDNSLLTKEEKWVTSMNEIDWLHVKNLCQLESEEKQVKISATVNTMVFDIRIKAIKELKLMKELADNSCLRPIDRNGKLLCPVPDSYTLKEAELKMGSSLGLCLGKAPSSSQLFLFFAMGSDVQPGTEMEIVVEETISVRDCLKLMLKKSGLQGDAWHLRKMDWCYEAGEPLCEEDATLKELLICSGDTLLLIEGQLPPLGFLKVPIWWYQLQGPSGHWESHQDQTNCTSSWGRVWRATSSQGASGNEPAQVSLLYLGDIEISEDATLAELKSQAMTLPPFLEFGVPSPAHLRAWTVERKRPGRLLRTDRQPLREYKLGRRIEICLEPLQKGENLGPQDVLLRTQVRIPGERTYAPALDLVWNAAQGGTAGSLRQRVADFYRLPVEKIEIAKYFPEKFEWLPISSWNQQITKRKKKKKQDYLQGAPYYLKDGDTIGVKNLLIDDDDDFSTIRDDTGKEKQKQRALGRRKSQEALHEQSSYILSSAETPARPRAPETSLSIHVGSFR

SEQ ID NO: 197166 - protein, 1247 aa, Artificial Sequence
  derived and/or modified sequence
MSLFLRVVFSFTMFGDLFEEEYSTVSNNQYGKGKKLKTKALEPPAPREFTNLSGIRNQGGTCYLNSLLQTLHFTPEFREALFSLGPEELGLFEDKDKPDAKVRIIPLQLQRLFAQLLLLDQEAASTADLTDSFGWTSNEEMRQHDVQELNRILFSALETSLVGTSGHDLIYRLYHGTIVNQIVCKECKNVSERQEDFLDLTVAVKNVSGLEDALWNMYVEEEVFDCDNLYHCGTCDRLVKAAKSAKLRKLPPFLTVSLLRFNFDFVKCERYKETSCYTFPLRINLKPFCEQSELDDLEYIYDLFSVIIHKGGCYGGHYHVYIKDVDHLGNWQFQEEKSKPDVNLKDLQSEEEIDHPLMILKAILLEENNLIPVDQLGQKLLKKIGISWNKKYRKQHGPLRKFLQLHSQIFLLSSDESTVRLLKNSSLQAESDFQRNDQQIFKMLPPESPGLNNSISCPHWFDINDSKVQPIREKDIEQQFQGKESAYMLFYRKSQLQRPPEARANPRYGVPCHLLNEMDAANIELQTKRAECDSANNTFELHLHLGPQYHFFNGALHPVVSQTESVWDLTFDKRKTLGDLRQSIFQLLEFWEGDMVLSVAKLVPAGLHIYQSLGGDELTLCETEIADGEDIFVWNGVEVGGVHIQTGIDCEPLLLNVLHLDTSSDGEKCCQVIESPHVFPANAEVGTVLTALAIPAGVIFINSAGCPGGEGWTAIPKEDMRKTFREQGLRNGSSILIQDSHDDNSLLTKEEKWVTSMNEIDWLHVKNLCQLESEEKQVKISATVNTMVFDIRIKAIKELKLMKELADNSCLRPIDRNGKLLCPVPDSYTLKEAELKMGSSLGLCLGKAPSSSQLFLFFAMGSDVQPGTEMEIVVEETISVRDCLKLMLKKSGLQGDAWHLRKMDWCYEAGEPLCEEDATLKELLICSGDTLLLIEGQLPPLGFLKVPIWWYQLQGPSGHWESHQDQTNCTSSWGRVWRATSSQGASGNEPAQVSLLYLGDIEISEDATLAELKSQAMTLPPFLEFGVPSPAHLRAWTVERKRPGRLLRTDRQPLREYKLGRRIEICLEPLQKGENLGPQDVLLRTQVRIPGERTYAPALDLVWNAAQGGTAGSLRQRVADFYRLPVEKIEIAKYFPEKFEWLPISSWNQQITKRKKKKKQDYLQGAPYYLKDGDTIGVKNLLIDDDDDFSTIRDDTGKEKQKQRALGRRKSQEALHEQSSYILSSAETPARPRAPETSLSIHVGSFR

SEQ ID NO: 197167 - DNA, 3708 bp, Artificial Sequence
  derived and/or modified sequence
atgttcggcgacctgttcgaggaggagtacagcaccgtgagcaacaaccagtacggcaagggcaagaagctgaagaccaaggccctggagccccccgcccccagagagttcaccaacctgagcggcatcagaaaccagggcggcacctgctacctgaacagcctgctgcagaccctgcacttcacccccgagttcagagaggccctgttcagcctgggccccgaggagctgggcctgttcgaggacaaggacaagcccgacgccaaggtgagaatcatccccctgcagctgcagagactgttcgcccagctgctgctgctggaccaggaggccgccagcaccgccgacctgaccgacagcttcggctggaccagcaacgaggagatgagacagcacgacgtgcaggagctgaacagaatcctgttcagcgccctggagaccagcctggtgggcaccagcggccacgacctgatctacagactgtaccacggcaccatcgtgaaccagatcgtgtgcaaggagtgcaagaacgtgagcgagagacaggaggacttcctggacctgaccgtggccgtgaagaacgtgagcggcctggaggacgccctgtggaacatgtacgtggaggaggaggtgttcgactgcgacaacctgtaccactgcggcacctgcgacagactggtgaaggccgccaagagcgccaagctgagaaagctgccccccttcctgaccgtgagcctgctgagattcaacttcgacttcgtgaagtgcgagagatacaaggagaccagctgctacaccttccccctgagaatcaacctgaagcccttctgcgagcagagcgagctggacgacctggagtacatctacgacctgttcagcgtgatcatccacaagggcggctgctacggcggccactaccacgtgtacatcaaggacgtggaccacctgggcaactggcagttccaggaggagaagagcaagcccgacgtgaacctgaaggacctgcagagcgaggaggagatcgaccaccccctgatgatcctgaaggccatcctgctggaggagaacaacctgatccccgtggaccagctgggccagaagctgctgaagaagatcggcatcagctggaacaagaagtacagaaagcagcacggccccctgagaaagttcctgcagctgcacagccagatcttcctgctgagcagcgacgagagcaccgtgagactgctgaagaacagcagcctgcaggccgagagcgacttccagagaaacgaccagcagatcttcaagatgctgccccccgagagccccggcctgaacaacagcatcagctgcccccactggttcgacatcaacgacagcaaggtgcagcccatcagagagaaggacatcgagcagcagttccagggcaaggagagcgcctacatgctgttctacagaaagagccagctgcagagaccccccgaggccagagccaaccccagatacggcgtgccctgccacctgctgaacgagatggacgccgccaacatcgagctgcagaccaagagagccgagtgcgacagcgccaacaacaccttcgagctgcacctgcacctgggcccccagtaccacttcttcaacggcgccctgcaccccgtggtgagccagaccgagagcgtgtgggacctgaccttcgacaagagaaagaccctgggcgacctgagacagagcatcttccagctgctggagttctgggagggcgacatggtgctgagcgtggccaagctggtgcccgccggcctgcacatctaccagagcctgggcggcgacgagctgaccctgtgcgagaccgagatcgccgacggcgaggacatcttcgtgtggaacggcgtggaggtgggcggcgtgcacatccagaccggcatcgactgcgagcccctgctgctgaacgtgctgcacctggacaccagcagcgacggcgagaagtgctgccaggtgatcgagagcccccacgtgttccccgccaacgccgaggtgggcaccgtgctgaccgccctggccatccccgccggcgtgatcttcatcaacagcgccggctgccccggcggcgagggctggaccgccatccccaaggaggacatgagaaagaccttcagagagcagggcctgagaaacggcagcagcatcctgatccaggacagccacgacgacaacagcctgctgaccaaggaggagaagtgggtgaccagcatgaacgagatcgactggctgcacgtgaagaacctgtgccagctggagagcgaggagaagcaggtgaagatcagcgccaccgtgaacaccatggtgttcgacatcagaatcaaggccatcaaggagctgaagctgatgaaggagctggccgacaacagctgcctgagacccatcgacagaaacggcaagctgctgtgccccgtgcccgacagctacaccctgaaggaggccgagctgaagatgggcagcagcctgggcctgtgcctgggcaaggcccccagcagcagccagctgttcctgttcttcgccatgggcagcgacgtgcagcccggcaccgagatggagatcgtggtggaggagaccatcagcgtgagagactgcctgaagctgatgctgaagaagagcggcctgcagggcgacgcctggcacctgagaaagatggactggtgctacgaggccggcgagcccctgtgcgaggaggacgccaccctgaaggagctgctgatctgcagcggcgacaccctgctgctgatcgagggccagctgccccccctgggcttcctgaaggtgcccatctggtggtaccagctgcagggccccagcggccactgggagagccaccaggaccagaccaactgcaccagcagctggggcagagtgtggagagccaccagcagccagggcgccagcggcaacgagcccgcccaggtgagcctgctgtacctgggcgacatcgagatcagcgaggacgccaccctggccgagctgaagagccaggccatgaccctgccccccttcctggagttcggcgtgcccagccccgcccacctgagagcctggaccgtggagagaaagagacccggcagactgctgagaaccgacagacagcccctgagagagtacaagctgggcagaagaatcgagatctgcctggagcccctgcagaagggcgagaacctgggcccccaggacgtgctgctgagaacccaggtgagaatccccggcgagagaacctacgcccccgccctggacctggtgtggaacgccgcccagggcggcaccgccggcagcctgagacagagagtggccgacttctacagactgcccgtggagaagatcgagatcgccaagtacttccccgagaagttcgagtggctgcccatcagcagctggaaccagcagatcaccaagagaaagaagaagaagaagcaggactacctgcagggcgccccctactacctgaaggacggcgacaccatcggcgtgaagaacctgctgatcgacgacgacgacgacttcagcaccatcagagacgacaccggcaaggagaagcagaagcagagagccctgggcagaagaaagagccaggaggccctgcacgagcagagcagctacatcctgagcagcgccgagacccccgccagacccagagcccccgagaccagcctgagcatccacgtgggcagcttcagatag

SEQ ID NO: 197168 - DNA, 3744 bp, Artificial Sequence
  derived and/or modified sequence
atgagcctgttcctgagagtggtgttcagcttcaccatgttcggcgacctgttcgaggaggagtacagcaccgtgagcaacaaccagtacggcaagggcaagaagctgaagaccaaggccctggagccccccgcccccagagagttcaccaacctgagcggcatcagaaaccagggcggcacctgctacctgaacagcctgctgcagaccctgcacttcacccccgagttcagagaggccctgttcagcctgggccccgaggagctgggcctgttcgaggacaaggacaagcccgacgccaaggtgagaatcatccccctgcagctgcagagactgttcgcccagctgctgctgctggaccaggaggccgccagcaccgccgacctgaccgacagcttcggctggaccagcaacgaggagatgagacagcacgacgtgcaggagctgaacagaatcctgttcagcgccctggagaccagcctggtgggcaccagcggccacgacctgatctacagactgtaccacggcaccatcgtgaaccagatcgtgtgcaaggagtgcaagaacgtgagcgagagacaggaggacttcctggacctgaccgtggccgtgaagaacgtgagcggcctggaggacgccctgtggaacatgtacgtggaggaggaggtgttcgactgcgacaacctgtaccactgcggcacctgcgacagactggtgaaggccgccaagagcgccaagctgagaaagctgccccccttcctgaccgtgagcctgctgagattcaacttcgacttcgtgaagtgcgagagatacaaggagaccagctgctacaccttccccctgagaatcaacctgaagcccttctgcgagcagagcgagctggacgacctggagtacatctacgacctgttcagcgtgatcatccacaagggcggctgctacggcggccactaccacgtgtacatcaaggacgtggaccacctgggcaactggcagttccaggaggagaagagcaagcccgacgtgaacctgaaggacctgcagagcgaggaggagatcgaccaccccctgatgatcctgaaggccatcctgctggaggagaacaacctgatccccgtggaccagctgggccagaagctgctgaagaagatcggcatcagctggaacaagaagtacagaaagcagcacggccccctgagaaagttcctgcagctgcacagccagatcttcctgctgagcagcgacgagagcaccgtgagactgctgaagaacagcagcctgcaggccgagagcgacttccagagaaacgaccagcagatcttcaagatgctgccccccgagagccccggcctgaacaacagcatcagctgcccccactggttcgacatcaacgacagcaaggtgcagcccatcagagagaaggacatcgagcagcagttccagggcaaggagagcgcctacatgctgttctacagaaagagccagctgcagagaccccccgaggccagagccaaccccagatacggcgtgccctgccacctgctgaacgagatggacgccgccaacatcgagctgcagaccaagagagccgagtgcgacagcgccaacaacaccttcgagctgcacctgcacctgggcccccagtaccacttcttcaacggcgccctgcaccccgtggtgagccagaccgagagcgtgtgggacctgaccttcgacaagagaaagaccctgggcgacctgagacagagcatcttccagctgctggagttctgggagggcgacatggtgctgagcgtggccaagctggtgcccgccggcctgcacatctaccagagcctgggcggcgacgagctgaccctgtgcgagaccgagatcgccgacggcgaggacatcttcgtgtggaacggcgtggaggtgggcggcgtgcacatccagaccggcatcgactgcgagcccctgctgctgaacgtgctgcacctggacaccagcagcgacggcgagaagtgctgccaggtgatcgagagcccccacgtgttccccgccaacgccgaggtgggcaccgtgctgaccgccctggccatccccgccggcgtgatcttcatcaacagcgccggctgccccggcggcgagggctggaccgccatccccaaggaggacatgagaaagaccttcagagagcagggcctgagaaacggcagcagcatcctgatccaggacagccacgacgacaacagcctgctgaccaaggaggagaagtgggtgaccagcatgaacgagatcgactggctgcacgtgaagaacctgtgccagctggagagcgaggagaagcaggtgaagatcagcgccaccgtgaacaccatggtgttcgacatcagaatcaaggccatcaaggagctgaagctgatgaaggagctggccgacaacagctgcctgagacccatcgacagaaacggcaagctgctgtgccccgtgcccgacagctacaccctgaaggaggccgagctgaagatgggcagcagcctgggcctgtgcctgggcaaggcccccagcagcagccagctgttcctgttcttcgccatgggcagcgacgtgcagcccggcaccgagatggagatcgtggtggaggagaccatcagcgtgagagactgcctgaagctgatgctgaagaagagcggcctgcagggcgacgcctggcacctgagaaagatggactggtgctacgaggccggcgagcccctgtgcgaggaggacgccaccctgaaggagctgctgatctgcagcggcgacaccctgctgctgatcgagggccagctgccccccctgggcttcctgaaggtgcccatctggtggtaccagctgcagggccccagcggccactgggagagccaccaggaccagaccaactgcaccagcagctggggcagagtgtggagagccaccagcagccagggcgccagcggcaacgagcccgcccaggtgagcctgctgtacctgggcgacatcgagatcagcgaggacgccaccctggccgagctgaagagccaggccatgaccctgccccccttcctggagttcggcgtgcccagccccgcccacctgagagcctggaccgtggagagaaagagacccggcagactgctgagaaccgacagacagcccctgagagagtacaagctgggcagaagaatcgagatctgcctggagcccctgcagaagggcgagaacctgggcccccaggacgtgctgctgagaacccaggtgagaatccccggcgagagaacctacgcccccgccctggacctggtgtggaacgccgcccagggcggcaccgccggcagcctgagacagagagtggccgacttctacagactgcccgtggagaagatcgagatcgccaagtacttccccgagaagttcgagtggctgcccatcagcagctggaaccagcagatcaccaagagaaagaagaagaagaagcaggactacctgcagggcgccccctactacctgaaggacggcgacaccatcggcgtgaagaacctgctgatcgacgacgacgacgacttcagcaccatcagagacgacaccggcaaggagaagcagaagcagagagccctgggcagaagaaagagccaggaggccctgcacgagcagagcagctacatcctgagcagcgccgagacccccgccagacccagagcccccgagaccagcctgagcatccacgtgggcagcttcagatag

SEQ ID NO: 197169 - DNA, 3708 bp, Artificial Sequence
  derived and/or modified sequence
atgtttggcgacctgtttgaagaagagtattccactgtgagcaacaatcagtacggcaagggaaaaaaactgaagacaaaagcgctagagcctcccgcacctagagagtttacaaatctatctggcatacgaaaccagggaggcacctgttatctcaattccctgctgcagacactgcacttcacccctgaatttcgcgaggcactgtttagcctcggccctgaggaactgggactgttcgaagataaggacaagcccgatgctaaggttaggatcattcccctccagctgcagaggctgttcgcccagctgttgctgcttgaccaggaggccgcctcaaccgcagacctgaccgacagcttcgggtggacttccaacgaagagatgcgtcagcacgatgtgcaggaactgaacaggattctgttcagtgcgctcgaaacatctctggtagggacttcaggtcacgacctgatttaccggttgtaccacgggacaatagtgaaccaaattgtttgcaaggagtgcaagaacgtttcggaacggcaggaggattttctggacctgactgtagccgtcaagaatgtgtctggactcgaagacgcactgtggaatatgtatgtggaggaggaggtctttgattgtgacaatctgtaccactgtgggacatgcgataggctggttaaagccgccaaaagtgcaaaactgcggaagctgccccctttcttaacagtgagcctgctgaggtttaacttcgacttcgtcaagtgcgagaggtacaaagaaactagttgttatacttttccccttaggattaacctgaagcccttctgtgagcagtctgagttggacgacctggaatatatttatgatctgttcagtgtcatcatccacaaaggcggctgctatggtggccactaccacgtttacataaaagatgttgaccacttgggaaactggcagttccaggaggaaaagtccaaaccggacgtgaatctaaaggacttgcagtctgaggaggagattgaccatcctttaatgatcctgaaggcaatactgcttgaggaaaataacttaattcccgttgaccaattgggacaaaagctgctcaaaaagatcggcatttcctggaacaagaaatatcgtaaacagcacggtcctctgcgcaagttcctgcagctgcattctcagatcttcctcttgtcaagtgatgagtctaccgtgcggctgcttaaaaatagtagtctgcaggccgagtctgacttccagcggaacgaccaacagatcttcaagatgctgccccctgagtctcctggcttgaataacagcatcagctgcccccactggttcgacattaatgactccaaggtgcaaccgattagggagaaagacattgagcagcagtttcagggcaaggaaagcgcatatatgctgttctatcgaaagagtcagcttcagcggccccccgaggcaagggccaatcccagatacggcgtgccctgtcacctgctcaacgagatggacgccgccaatatcgagctacaaactaaaagagctgagtgcgattcggctaataacaccttcgaactgcatctacatttgggcccacagtaccacttcttcaacggggcccttcaccctgtggtgtctcagacagaatcagtttgggatctgacatttgacaaaaggaagacgttaggagatttgcggcagagtatctttcaactcttagaattctgggaaggcgacatggtgctgtccgtagctaagctggtgccggccgggttgcacatctatcaaagtctgggcggggacgagctaacactgtgcgagacagagatcgccgacggcgaagatatattcgtgtggaacggggttgaggttggcggggtgcatatccaaactggcatcgattgcgaacctctgttgttaaacgtgctccatctggacaccagtagcgatggagagaagtgttgccaagtgattgagtcacctcacgttttccccgccaacgccgaagtgggtactgtgctgacagccctggccatacccgccggagtcattttcattaattctgctggttgtcctggaggcgagggctggaccgctatcccgaaagaagacatgcgcaaaacattccgagaacagggtctgaggaatgggagctctatcctcatccaggattcccatgatgataactcacttctgacaaaagaagagaagtgggtgacttccatgaatgagatagattggctacacgttaaaaatttatgccagctggagtctgaggaaaaacaggttaaaatttccgctacagtgaacactatggtgtttgacatccggatcaaagcaatcaaggagctgaagctcatgaaagaactcgctgataatagttgcctgaggccgatcgacagaaacggtaagctactttgtcctgtgcctgatagctacacccttaaggaggccgaactgaagatgggcagcagtcttgggctgtgtctgggtaaggcacccagctcatcccagctattcctatttttcgctatgggaagcgacgtccaacccgggaccgagatggagattgttgtggaggagacgatttctgtcagggactgccttaaattgatgctaaaaaaaagtggcttgcagggtgatgcatggcatcttagaaaaatggactggtgctatgaagccggcgagcctctctgcgaggaagacgccaccctaaaagaacttcttatctgttctggcgacaccctcctgttgattgagggccagttacctccactgggtttcctcaaagtgcctatctggtggtaccagctgcaaggacccagcggtcactgggagagtcaccaggatcaaactaactgtacctcaagctggggcagagtgtggcgcgctacctcgagccagggggcatccggcaacgagcctgcccaggtgtccctgctatacttgggggacatcgagatcagcgaggatgcgacactcgcagagctgaaatcccaggcaatgaccctgccaccctttctggaattcggtgtgccatctcctgcgcatttgagagcctggaccgtagaacggaagcggcccggccggttgctgagaacggaccgccagcctttgcgtgagtataaactcggcagacggattgagatctgtctggagcctctccaaaagggcgaaaacctcgggcctcaagacgtacttctgagaactcaggtacgcataccaggggaacggacctacgccccagccctagatttagtctggaatgctgctcagggtggcaccgccggttcccttcgtcaaagggttgccgacttctatcggctgccagtcgagaaaattgagatcgccaagtattttcccgagaagttcgaatggttacctatctccagctggaatcagcaaattactaagagaaagaagaaaaagaagcaggattacctgcagggagccccatactacctgaaagacggcgatacaatcggtgttaaaaatcttctcatcgacgatgatgacgacttcagcaccatcagagacgatacaggcaaagaaaagcagaagcagcgagctttgggccggagaaagtcccaggaggccctccacgagcaatcatcatatatccttagttccgcagagacgcctgcgagacctagggcccctgagacttccctctcaatccacgttggttcatttagatag

SEQ ID NO: 197170 - DNA, 3708 bp, Artificial Sequence
  derived and/or modified sequence
atgttcggagacctgttcgaggaggagtactctaccgtgtccaataaccaatacggaaagggcaagaaactgaagactaaggccctagaacctcctgcgcccagagagtttacaaacttgtccgggatcagaaatcaggggggcacgtgttatttaaattctctattacagaccttacactttacgcctgaatttagagaggcactgttctctctggggccagaggaactcggtctgtttgaagacaaggataagccggacgcaaaagttaggattattcccttgcagctccagcgcctctttgcccagctcctgctgcttgaccaagaggcagcttccaccgccgacctcacagattccttcggctggaccagcaacgaagaaatgcggcagcatgacgtgcaagagctgaataggattttgttttcagcgctggaaacatcattggtagggacaagcggccacgacctcatttatcgactatatcacggaactatcgtgaaccagattgtgtgtaaagaatgtaaaaatgtctcagagagacaagaagacttcctggaccttacggtcgccgtgaaaaacgttagtggcctggaggacgctctttggaacatgtatgtggaggaagaagtttttgactgcgacaacctttatcattgcggaacatgtgatagacttgtcaaagccgctaagagtgctaagcttcgaaagctgccacctttcctgacagtctccctgttaaggtttaatttcgacttcgtcaagtgcgagcgctataaggagacaagctgttatacctttccactgaggattaatctgaagcccttttgcgaacagagcgagctggacgacttagagtatatttacgacctgtttagcgtcattattcacaaggggggctgttacggtggacactaccacgtgtacattaaagatgtcgaccatttgggcaactggcagttccaggaggagaaatctaagcccgacgttaacctgaaagatctgcagtccgaagaggagatcgaccacccacttatgatcttaaaggcaattttacttgaggaaaacaatttaatccctgttgatcagctcgggcaaaagcttttaaaaaaaatcgggatctcttggaacaagaaatacagaaagcagcatggccctcttagaaagtttctgcagctacactcacaaatttttcttttgagctccgacgagtcaacggttagactgcttaagaatagtagtctccaggcggaatccgacttccagcggaacgatcaacagattttcaagatgttgccacctgaatccccgggcctcaacaattcaatttcatgccctcactggtttgacatcaatgattccaaagtacagcccatccgagagaaagacatagagcagcaatttcagggcaaggaatccgcctacatgctgttctataggaagtctcagttacagaggcccccagaggctagggccaaccccaggtacggggtgccctgtcatttactgaatgagatggacgcagcgaacattgaactccagacaaagcgcgctgaatgcgacagtgccaacaatacttttgaacttcatctccacttaggccctcagtatcattttttcaacggcgctctgcaccccgtggtttcccagactgaatcagtgtgggacctgacttttgacaagagaaagaccctgggagatctgcgacagagcatttttcaactcctggagttttgggagggagacatggtactctcagtggccaagttagtgcctgccggcctgcacatctatcagagcctggggggggacgagctgactctatgcgagactgagattgccgatggagaggacattttcgtatggaatggcgtggaggtgggtggagtacacattcaaacgggtatcgattgcgagccccttctgttaaatgtgcttcacctcgacacaagttcggacggcgagaaatgttgccaagtgattgagagtccgcacgtgtttcccgccaacgcagaggtgggaacagtgctcacagccctcgccatccctgccggagtcatcttcataaattcagctggatgtcctggtggagaggggtggacagcaatcccgaaagaggatatgaggaaaacattccgcgaacagggcctccgtaacgggagttcgatcctgattcaggacagtcatgacgataactctctccttactaaggaggagaagtgggtaacgtctatgaacgagattgattggttgcacgtgaagaacctgtgtcaactcgagtcggaagagaagcaagtgaagattagcgcgacagttaatacgatggtctttgatatcaggattaaggccatcaaggaactcaagcttatgaaggaactggcggacaattcttgcctgagaccgatcgataggaacggtaagttactgtgcccagtgccagattcctataccctcaaagaagccgagctcaaaatgggctctagcctcggactctgtctcgggaaggccccttcatcctctcagttattcctgttcttcgccatggggtccgatgtgcagcccggcaccgaaatggagatcgtggtggaggagacaatttccgtgcgcgattgtctcaaattgatgttgaaaaaatcaggacttcagggcgatgcgtggcatctgcggaagatggattggtgttatgaagcaggcgagcccctgtgcgaagaggacgcgacactcaaagagctcctgatatgttcaggtgacacactgctgctgattgaaggccagttgccaccgctgggattcctcaaagtgccgatatggtggtaccagctccagggaccctccggacactgggaatctcaccaggaccagacaaactgcacctctagctggggccgcgtctggagagccacaagcagccagggtgcttccggaaatgagccggcccaggtttccctgctgtatcttggcgacattgaaatcagcgaggacgcgaccctagcggagcttaaaagccaagccatgaccctgccacccttcctggaatttggcgtgccgagccccgcgcacttgagagcctggactgtggaaaggaaacgacccgggcggcttctgcggacggacaggcaacctctgcgtgagtacaagcttgggcggcgtatcgagatatgtcttgaacccttgcaaaagggcgagaatcttggcccacaggacgttctcctacgtactcaggttagaataccaggtgagcgcacctatgccccagcacttgatctggtgtggaatgctgcccaaggggggaccgccggctccctgcgtcagagggtcgcagatttttatcgcctcccagtcgaaaagatcgagatagccaagtactttcctgagaaatttgagtggctccccattagcagctggaaccagcagatcacaaaaagaaagaaaaagaagaaacaagactacttacagggtgccccttattatctgaaggacggggacaccatcggcgtgaaaaaccttttgatagacgacgatgatgattttagtacaatccgcgacgacacgggcaaggagaagcagaagcagcgggccctgggccgaagaaagtcacaggaagctttacatgagcagtcaagctacattctgtcgtctgctgaaacaccggctcgccccagggctccagaaacaagtctgagcatacatgtggggtcattcaggtag

SEQ ID NO: 197171 - DNA, 3744 bp, Artificial Sequence
  derived and/or modified sequence
atgagtctttttcttagagtggtgtttagctttactatgttcggtgatctttttgaagaagagtacagtaccgtgtctaacaatcagtacggaaaagggaaaaagctcaaaaccaaggcattggagccccccgcgcctagggagttcacgaatctgtcaggtatccgtaatcaaggaggaacctgctatctgaactcactcctgcagactctgcactttacgcctgaattccgtgaagcacttttctctctcggccctgaagagctgggcttattcgaagacaaagacaaacctgacgcaaaggtcaggatcatacctctacagttgcagagactgttcgcacagcttctgctccttgatcaggaggccgcctcgaccgcagacctgacagattcttttggctggacctctaacgaggaaatgagacagcatgacgtccaggagcttaatcgaatactcttttccgctctggagacatcactcgtgggaacatccggacacgacctaatctaccggctttatcacggcaccatcgtgaatcagattgtgtgcaaagaatgcaagaacgtatcagagcgacaagaagattttctggacctgactgtcgcggtgaaaaacgtgtcagggctagaagatgcactctggaacatgtacgtcgaggaggaagtattcgattgcgacaacctttatcactgtggcacctgtgaccgcctcgtgaaagccgcaaaatctgcaaagctgagaaaactgcccccgtttttgaccgtctccctgctccggtttaacttcgacttcgtaaagtgcgagagatacaaagagacaagttgttatacctttcctctcagaatcaacttaaaaccattttgtgagcagtccgaacttgatgacctggaatatatttacgatttgttctcagtgatcattcacaagggggggtgctatggaggccactaccacgtgtacattaaagacgtggatcacctgggcaactggcagtttcaggaggaaaaatcaaagccagacgtgaatctgaaagacttgcaatcagaagaggagattgaccacccacttatgatccttaaggcaattctgctcgaggagaataatctcattccggtagatcagctgggtcagaaactgcttaagaaaattggtatctcatggaataagaagtacagaaaacaacacggccctctcagaaagttcttgcagcttcactctcagatttttctcctctcatctgatgaatcaaccgttaggctcctaaagaattcctccctccaagccgaaagcgatttccagcggaacgaccagcagatcttcaagatgttaccacctgaaagcccaggactgaacaatagtatctcttgtccccactggtttgatatcaatgacagcaaggttcaaccaatccgcgagaaagatattgaacagcagtttcagggcaaggagagtgcttatatgttgttctacaggaaaagccagcttcagagaccaccagaggccagagctaatcctcgttacggggttccatgccatctactgaacgagatggacgcagctaatatcgaacttcagaccaagcgggccgaatgcgactcagccaacaatacctttgaactacaccttcacctgggtcctcagtaccattttttcaacggcgctttacatccagttgtctcacagacagaaagcgtgtgggacctcacattcgacaaaagaaaaaccctaggcgacttgcgacagtctatctttcagttactggaattttgggagggagatatggtgctcagcgtggccaagctggtcccagccggactccacatctaccagtccctggggggcgacgagctcaccctttgcgaaacagagatcgccgacggcgaggatatcttcgtgtggaatggggtagaggtgggtggcgttcacattcaaactggcatcgactgcgaaccgctgttgctgaatgttctacatctcgacacgtcgagcgatggggagaagtgctgtcaggttattgagagcccgcatgtgtttcccgccaatgcagaggttggaactgtgcttacagccttagcgattcctgctggagttattttcatcaatagcgctgggtgtccaggaggagaggggtggaccgcaatccccaaggaagacatgagaaagacttttagagagcagggcctgagaaatggcagcagcattctgattcaggatagtcacgatgacaattctctcctgaccaaggaggaaaaatgggtgacatctatgaatgaaatagactggttgcacgtcaagaatctgtgccaactcgagagtgaagagaagcaggtgaagatctccgccactgtaaacaccatggtttttgatatccggattaaagcaatcaaggaacttaagctgatgaaggagctcgccgataatagttgtctcagacctatcgacagaaacgggaaactgctgtgtcctgtacctgattcttacactttgaaagaggcagaattgaaaatgggcagcagtctcggtttgtgcctgggcaaagcaccgagttcttcccaactatttctgttttttgccatgggcagtgatgtgcagccaggaaccgaaatggaaattgtggtggaagaaaccatctctgtgagggactgcctgaagctgatgttgaagaagagcggcctgcaaggggacgcctggcacctgcgaaaaatggactggtgctatgaagccggagaacctctgtgtgaagaggacgcaaccctaaaagagctgctgatatgctccggcgacaccctgcttctcatcgaaggacaacttcctccactgggtttcttgaaggtccccatatggtggtaccagctccaaggcccaagtggccactgggaaagccaccaagatcaaacaaactgtacatccagttgggggcgggtatggagggctacttcatctcaaggcgcgtctgggaatgagcctgctcaggtgtctttgctctacctgggcgacattgaaatctccgaggacgctaccctcgccgagcttaaatcgcaggcaatgacattgcctccttttctggagtttggagtgccctccccggctcacctgcgggcttggacagttgaacgaaaaagaccgggaagacttctccgtacagaccgacagcctctgagagaatacaagctgggcagaaggatagagatatgtctggaaccgctccaaaaaggagaaaacttgggacctcaggatgtcctgttaagaacacaggtgagaattcccggagagcggacttatgcccctgccctggacctggtgtggaatgccgcacaagggggaactgccggcagcctccgacagcgggtagctgacttctaccgcctgcccgtcgaaaaaatcgaaatcgccaaatattttcccgaaaagtttgaatggttacctattagctcctggaatcagcagatcactaagcgcaaaaaaaagaaaaaacaggactacctccagggcgctccatactatttaaaggacggcgacaccatcggcgtgaaaaatttgctcattgatgacgacgacgatttctcaactatccgagacgatacaggtaaggagaagcagaagcagagagccctgggcaggcgtaagtcacaggaggctctgcatgagcaaagctcctatatccttagttccgccgaaactccagcaagaccccgcgccccagaaactagtctgtccattcacgtgggatccttccgctag

SEQ ID NO: 197172 - DNA, 3708 bp, Artificial Sequence
  derived and/or modified sequence
atgtttggagacctgtttgaggaggagtacagcacagtgagcaacaaccagtatggcaagggcaagaagctgaagaccaaggccctggagcccccagccccccgggagttcaccaacctgagcggcatccggaaccagggcggcacctgctacctgaacagcctgctgcagaccctgcacttcaccccagagttccgggaggccctcttcagcctgggccctgaggagctgggcctgtttgaggacaaggacaagccagatgccaaggtgcgcatcatccccctgcagctgcagaggctgtttgcccagctgctgctgctggaccaggaggccgccagcacagctgacctgacagacagctttggctggaccagcaatgaggagatgaggcagcatgatgtgcaggagctgaaccgcatcctcttcagcgccctggagaccagcctggtgggcaccagcggccatgacctgatctaccgcctgtaccacggcaccatcgtgaaccagatcgtgtgcaaggagtgcaagaatgtgtctgagcggcaggaggacttcctggacctgactgtggccgtgaagaatgtgtctggcctggaggatgccctgtggaacatgtatgtggaggaggaggtgtttgactgtgacaacctgtaccactgcggcacctgtgaccggctggtgaaggccgccaagagcgccaagctgaggaagctgccccccttcctgactgtgtccctgctgcgcttcaactttgattttgtgaagtgtgagcgctacaaggagaccagctgctacaccttccccctgcgcatcaacctgaagcccttctgtgagcagagcgagctggatgacctggagtacatctatgacctcttcagcgtcatcatccacaagggcggctgctacggcggccactaccacgtgtacatcaaggatgtggaccacctgggcaactggcagttccaggaggagaagagcaagccagatgtgaacctgaaggacctgcagagcgaggaggagattgaccaccccctgatgatcctgaaggccatcctgctggaggagaacaacctgatccctgtggaccagctgggccagaagctgctgaagaagattggcatctcctggaacaagaagtacaggaagcagcacggccccctgaggaagttcctgcagctgcacagccagatcttcctgctgagcagtgatgagagcacagtgcggctgctgaagaacagcagcctgcaggccgagagtgacttccagagaaatgaccagcagatcttcaagatgctgcccccagagagccctggcctgaacaacagcatcagctgcccccactggtttgacatcaatgacagcaaggtgcagcccatccgggagaaggacatcgagcagcagttccagggcaaggagagcgcctacatgctgttctacaggaagagccagctgcagaggcctcctgaggcccgggccaaccccaggtatggagtgccctgccacctgctgaatgagatggatgctgccaacatcgagctgcagaccaagagagcagaatgtgacagcgccaacaacacctttgagctgcacctgcacctgggcccccagtaccacttcttcaatggagccctgcaccctgtggtgtcccagacagaatctgtgtgggacctgacctttgacaagaggaagaccctgggggacctgcggcagagcatcttccagctgctggagttctgggagggggacatggtgctgtctgtggccaagctggtgcctgctggcctgcacatctaccagagcctgggcggagatgagctgaccctgtgtgaaacagaaattgctgatggagaggacatctttgtgtggaatggagtggaggtgggcggcgtgcacatccagacaggcatcgactgtgagcccctgctgctgaatgtgctgcacctggacaccagcagtgatggagagaagtgctgccaggtgattgagagcccccacgtgtttcctgccaatgctgaggtgggcaccgtgctgacagccctggccatcccagctggggtcatcttcatcaacagcgctggctgccctggaggagagggctggacagccatccccaaggaggacatgaggaagaccttccgggagcagggcctgagaaatggcagcagcatcctgatccaggacagccatgatgacaacagcctgctgaccaaggaggagaagtgggtgacctccatgaatgaaattgactggctgcacgtgaagaacctgtgccagctggagagcgaggagaagcaggtgaagatcagcgccaccgtgaacaccatggtgtttgacatccgcatcaaggccatcaaggagctgaagctgatgaaggagctggccgacaacagctgcctgcggcccatcgacagaaatggcaagctgctgtgccctgtgcctgacagctacaccctgaaggaggccgagctgaagatgggcagcagcctgggcctgtgcctgggcaaggcccccagcagcagccagctgttcctgttctttgccatgggcagtgatgtgcagcccggcacagagatggagatcgtggtggaggagaccatctctgtgcgggactgcctgaagctgatgctgaagaagagcggcctgcagggagatgcctggcacctgaggaagatggactggtgctatgaagctggggagcccctgtgtgaggaggatgccaccctgaaggagctgctgatctgcagcggggacaccctgctgctgattgagggccagctgccccccctgggcttcctgaaggtgcccatctggtggtaccagctgcagggccccagcggccactgggagagccaccaggaccagaccaactgcaccagctcctggggccgggtgtggagggccaccagcagccagggcgccagcggaaatgagcccgcccaggtgtccctgctgtacctgggggacatcgagatcagtgaagatgccaccctggccgagctgaagagccaggccatgaccctgccccccttcctggagtttggagtgcccagccctgcccacctgcgggcctggacagtggagaggaagaggcctggccgcctgctgaggacagaccggcagcccctgcgggagtacaagctgggcagaagaattgagatctgcctggagcccctgcagaagggggagaacctgggcccccaggatgtgctgctgcggacccaggtgcgcatccctggagagaggacctacgccccagccctggacctggtgtggaatgctgcccagggcggcacagctggcagcctgcggcagagggtggccgacttctaccgcctgcctgtggagaagattgaaattgccaagtacttccctgagaagtttgagtggctgcccatcagctcctggaaccagcagatcaccaagaggaagaagaagaagaagcaggactacctgcagggcgccccctactacctgaaggatggagacaccatcggcgtgaagaacctgctgattgatgatgatgatgacttcagcaccatcagagatgacaccgggaaggagaagcagaagcagagggccctgggccgcaggaagagccaggaggccctgcacgagcagagcagctacatcctgagcagcgctgagaccccagcccggccccgggcccctgagaccagcctgagcatccacgtgggcagcttcagatag

SEQ ID NO: 197173 - DNA, 3744 bp, Artificial Sequence
  derived and/or modified sequence
atgagcctcttcctgcgggtggtgttctccttcaccatgtttggagacctgtttgaggaggagtacagcacagtgagcaacaaccagtatggcaagggcaagaagctgaagaccaaggccctggagcccccagccccccgggagttcaccaacctgagcggcatccggaaccagggcggcacctgctacctgaacagcctgctgcagaccctgcacttcaccccagagttccgggaggccctcttcagcctgggccctgaggagctgggcctgtttgaggacaaggacaagccagatgccaaggtgcgcatcatccccctgcagctgcagaggctgtttgcccagctgctgctgctggaccaggaggccgccagcacagctgacctgacagacagctttggctggaccagcaatgaggagatgaggcagcatgatgtgcaggagctgaaccgcatcctcttcagcgccctggagaccagcctggtgggcaccagcggccatgacctgatctaccgcctgtaccacggcaccatcgtgaaccagatcgtgtgcaaggagtgcaagaatgtgtctgagcggcaggaggacttcctggacctgactgtggccgtgaagaatgtgtctggcctggaggatgccctgtggaacatgtatgtggaggaggaggtgtttgactgtgacaacctgtaccactgcggcacctgtgaccggctggtgaaggccgccaagagcgccaagctgaggaagctgccccccttcctgactgtgtccctgctgcgcttcaactttgattttgtgaagtgtgagcgctacaaggagaccagctgctacaccttccccctgcgcatcaacctgaagcccttctgtgagcagagcgagctggatgacctggagtacatctatgacctcttcagcgtcatcatccacaagggcggctgctacggcggccactaccacgtgtacatcaaggatgtggaccacctgggcaactggcagttccaggaggagaagagcaagccagatgtgaacctgaaggacctgcagagcgaggaggagattgaccaccccctgatgatcctgaaggccatcctgctggaggagaacaacctgatccctgtggaccagctgggccagaagctgctgaagaagattggcatctcctggaacaagaagtacaggaagcagcacggccccctgaggaagttcctgcagctgcacagccagatcttcctgctgagcagtgatgagagcacagtgcggctgctgaagaacagcagcctgcaggccgagagtgacttccagagaaatgaccagcagatcttcaagatgctgcccccagagagccctggcctgaacaacagcatcagctgcccccactggtttgacatcaatgacagcaaggtgcagcccatccgggagaaggacatcgagcagcagttccagggcaaggagagcgcctacatgctgttctacaggaagagccagctgcagaggcctcctgaggcccgggccaaccccaggtatggagtgccctgccacctgctgaatgagatggatgctgccaacatcgagctgcagaccaagagagcagaatgtgacagcgccaacaacacctttgagctgcacctgcacctgggcccccagtaccacttcttcaatggagccctgcaccctgtggtgtcccagacagaatctgtgtgggacctgacctttgacaagaggaagaccctgggggacctgcggcagagcatcttccagctgctggagttctgggagggggacatggtgctgtctgtggccaagctggtgcctgctggcctgcacatctaccagagcctgggcggagatgagctgaccctgtgtgaaacagaaattgctgatggagaggacatctttgtgtggaatggagtggaggtgggcggcgtgcacatccagacaggcatcgactgtgagcccctgctgctgaatgtgctgcacctggacaccagcagtgatggagagaagtgctgccaggtgattgagagcccccacgtgtttcctgccaatgctgaggtgggcaccgtgctgacagccctggccatcccagctggggtcatcttcatcaacagcgctggctgccctggaggagagggctggacagccatccccaaggaggacatgaggaagaccttccgggagcagggcctgagaaatggcagcagcatcctgatccaggacagccatgatgacaacagcctgctgaccaaggaggagaagtgggtgacctccatgaatgaaattgactggctgcacgtgaagaacctgtgccagctggagagcgaggagaagcaggtgaagatcagcgccaccgtgaacaccatggtgtttgacatccgcatcaaggccatcaaggagctgaagctgatgaaggagctggccgacaacagctgcctgcggcccatcgacagaaatggcaagctgctgtgccctgtgcctgacagctacaccctgaaggaggccgagctgaagatgggcagcagcctgggcctgtgcctgggcaaggcccccagcagcagccagctgttcctgttctttgccatgggcagtgatgtgcagcccggcacagagatggagatcgtggtggaggagaccatctctgtgcgggactgcctgaagctgatgctgaagaagagcggcctgcagggagatgcctggcacctgaggaagatggactggtgctatgaagctggggagcccctgtgtgaggaggatgccaccctgaaggagctgctgatctgcagcggggacaccctgctgctgattgagggccagctgccccccctgggcttcctgaaggtgcccatctggtggtaccagctgcagggccccagcggccactgggagagccaccaggaccagaccaactgcaccagctcctggggccgggtgtggagggccaccagcagccagggcgccagcggaaatgagcccgcccaggtgtccctgctgtacctgggggacatcgagatcagtgaagatgccaccctggccgagctgaagagccaggccatgaccctgccccccttcctggagtttggagtgcccagccctgcccacctgcgggcctggacagtggagaggaagaggcctggccgcctgctgaggacagaccggcagcccctgcgggagtacaagctgggcagaagaattgagatctgcctggagcccctgcagaagggggagaacctgggcccccaggatgtgctgctgcggacccaggtgcgcatccctggagagaggacctacgccccagccctggacctggtgtggaatgctgcccagggcggcacagctggcagcctgcggcagagggtggccgacttctaccgcctgcctgtggagaagattgaaattgccaagtacttccctgagaagtttgagtggctgcccatcagctcctggaaccagcagatcaccaagaggaagaagaagaagaagcaggactacctgcagggcgccccctactacctgaaggatggagacaccatcggcgtgaagaacctgctgattgatgatgatgatgacttcagcaccatcagagatgacaccgggaaggagaagcagaagcagagggccctgggccgcaggaagagccaggaggccctgcacgagcagagcagctacatcctgagcagcgctgagaccccagcccggccccgggcccctgagaccagcctgagcatccacgtgggcagcttcagatag

SEQ ID NO: 197174 - DNA, 3708 bp, Artificial Sequence
  derived and/or modified sequence
atgttcggcgacctgttcgaggaggagtacagcaccgtgagcaacaaccagtatgggaaggggaaaaagctcaagactaaagcactagaaccaccagcgccccgcgaattcactaatctgtctggaatcaggaaccagggagggacttgctacctcaactcgttgctgcaaactctccattttacacctgaatttcgtgaggcacttttttcactgggccctgaggaactgggattgttcgaggacaaagataaaccggacgctaaagtgcgcattattcctctgcagttacagaggctgtttgctcagctgctgctcttagaccaggaggccgcatccacagctgatctgaccgactccttcgggtggactagcaacgaagagatgcggcagcacgatgtgcaggaacttaaccggatcctcttttctgcactggaaaccagcctggtagggacgtcaggccatgacctgatttatcgcctctaccacggcacaatcgtgaaccagattgtgtgcaaggagtgtaagaacgtctctgagcgccaggaagattttcttgatcttaccgtcgcagtgaagaacgtgtctgggttagaagatgccctctggaatatgtacgtggaggaagaagtgtttgattgcgacaatctgtatcactgtggtacctgtgacaggctcgttaaggccgccaagtcagcgaaactgcgcaaactgccccccttcttgaccgtctccttactgagatttaacttcgattttgtgaagtgcgagcggtacaaggaaaccagctgttatactttccccctcagaatcaacctaaaaccgttctgtgagcagtctgagttggacgatcttgagtacatctacgacctcttcagtgtaataatccacaaagggggatgttatggtggccattatcatgtgtacatcaaagatgtggatcatctgggcaattggcagttccaagaggaaaagtctaaacccgatgttaatctgaaagacctacagagtgaggaagagatcgatcaccccctgatgattctcaaggctattctgcttgaagagaacaacttgattcctgttgaccagctcggccagaaattactgaaaaagattgggattagctggaacaagaaatacagaaaacaacacggcccactgcgtaagttcctgcagctgcactcacagatctttctcctcagtagtgacgaaagtaccgtgcgtctgttaaagaacagtagcctgcaagcagaaagtgactttcagaggaatgatcagcagatcttcaaaatgctgccgccggagtcccctggcctgaacaatagcattagctgtccgcactggtttgatatcaatgatagcaaggtgcagcccatacgggagaaagacatcgagcagcagttccagggaaaggaaagcgcatatatgctgttctatagaaaatctcagcttcagaggcctcccgaggcccgggccaatcctcgctacggagtcccatgccacctgctcaatgaaatggacgctgctaatatcgagctacaaacaaagcgagcggagtgcgatagcgccaacaatactttcgaactgcatctgcacttaggtccacaataccacttttttaacggagctttgcacccagtggtgtcccagacagagagtgtgtgggacctgacatttgataaaagaaagaccctaggagatctgaggcagagcattttccagcttcttgaattctgggagggcgatatggtgctatctgttgctaaactcgttcccgcgggcctccacatctatcagtcccttggaggagacgaattaaccctctgcgagaccgaaatcgcagatggcgaggatatcttcgtgtggaatggggtcgaggtgggcggtgtccatattcagaccggtatcgactgtgagccactgctgctcaacgttctccatctagatacaagtagcgacggcgaaaagtgctgtcaagtcatagagagcccacacgtgttccctgctaatgccgaggtgggtacagttctgaccgccctagccatcccggccggtgtcatctttatcaactccgccggctgcccgggaggggagggctggacggctattcctaaggaagacatgcggaagaccttcagagagcaggggttgaggaatggcagttcgatcctgatccaggacagccacgacgataactcccttctcacgaaggaggagaagtgggtgactagcatgaacgaaattgactggctccacgttaagaacctgtgccaattagaatccgaagagaagcaggtgaagatctcagcaaccgtgaataccatggtgttcgacatacgtattaaagcaattaaggagctcaaactgatgaaagaactggcagacaatagttgcctgagacccatcgataggaatggtaagcttctttgcccagtgcccgatagttatacacttaaggaggcggaacttaaaatgggcagctctctgggcttgtgcctcggcaaagcaccttctagctcccaattgtttctgttttttgccatgggaagcgatgtgcaacccggcacggagatggaaattgtggtcgaagaaactatcagcgttcgcgactgtctaaaactgatgctgaaaaagtccggtctgcagggagacgcctggcatcttcgaaaaatggactggtgctacgaggccggcgagccactttgcgaagaggacgcaacgctcaaggagttgctgatctgctcaggcgatacacttctgctcatcgaaggtcaactcccccctctgggcttcttgaaagtgcccatctggtggtaccagctgcagggacccagtggtcactgggagtcccatcaggatcagactaattgtacttcgagctggggacgcgtgtggcgggcaacctccagccagggggctagcggaaatgagcccgcccaagtctctcttctgtatttgggggatatcgaaatatccgaagatgccactttagccgaactcaaatcccaagccatgactcttccacccttcttggaattcggggtgcctagtcccgcccacttgagggcttggactgtggagcggaagcgacctgggagactgctcaggacagaccgtcaacccctacgggagtacaaactgggcaggagaattgagatttgcttggagcccctacagaagggcgagaatttgggcccacaagatgtacttcttcgcacgcaggtgaggatcccgggcgagcggacctacgcacccgcgctggaccttgtctggaacgcggcccagggcggaacggccggttctctgcggcaaagggtggccgacttttatcgcttacctgtggagaaaatcgagatcgctaaatacttccccgagaagttcgaatggttgcccatatctagctggaatcagcagatcacaaagaggaagaaaaaaaagaaacaggattacctccaaggcgcgccctactatctcaaagatggcgataccattggtgttaagaatctcctcattgacgacgacgacgactttagtaccatccgcgacgatactggtaaggagaagcagaaacaaagggccctgggaagacgaaaatcacaggaggccctgcacgagcagtctagctacattttgagctctgcagagacaccagcacggccaagggccccagagacttctctctccatacacgtcggaagtttcagatag

SEQ ID NO: 197175 - DNA, 3708 bp, Artificial Sequence
  derived and/or modified sequence
atgttcggcgacctgttcgaggaggagtacagcaccgtgagcaacaaccagtacggaaagggcaagaagctcaaaaccaaggcattggaaccacctgcaccccgagaattcacaaacttaagtgggattaggaatcagggagggacctgttacttgaattctctcctgcaaaccctgcattttacacccgaattccgggaggctttgttctcacttggaccagaggagctgggcttgttcgaagacaaggacaagcccgacgcgaaggtgagaatcatcccactgcagttgcagaggctctttgcacagctccttctcttggatcaagaagctgccagcacggctgatctgacagacagtttcggatggaccagcaatgaggaaatgcgacaacacgatgtgcaggagctcaatcggatccttttctctgcactagaaacgagtctggtggggacatcaggtcacgatctgatctataggctgtatcacggcaccatcgtgaatcaaatcgtgtgtaaggagtgtaagaacgtctctgagcgccaggaagacttcctcgacctgactgtggccgtgaagaacgtgagcggtctggaagatgctctctggaatatgtatgtggaggaggaggtgtttgactgcgataacctctaccactgcggtacctgcgatcggctcgtcaaagcagccaagagtgccaagctgaggaagttgccgcccttcctgactgtgtctctcttgcgtttcaattttgatttcgtcaagtgtgaacgttataaggagacgtcatgttacacatttccactgcgcatcaacttgaagccattctgtgagcagtctgagctcgacgacctggagtatatttatgacctcttctctgtaatcattcataagggcggctgttacggcggccactaccatgtttatatcaaagacgttgatcacttgggaaattggcagttccaagaggaaaaatctaaacctgacgtaaatctaaaggacctgcagtctgaggaggaaatcgaccatcccctaatgattctgaaggcgatactgctcgaggaaaacaatctgattccggtcgatcagcttggacagaaactactgaaaaaaattggaatctcttggaataaaaagtatagaaagcagcatggacctttgaggaaattcctgcaactgcatagccagatcttcctgctcagttccgacgaatctacagttcggcttctgaaaaactcctctcttcaagccgagtccgatttccagagaaatgatcaacagatttttaaaatgctgccccccgaaagtcccgggctgaataacagtatttcatgcccacactggttcgatatcaatgactcgaaagtccaaccaataagggaaaaagacatcgaacagcagtttcagggcaaggagtcagcctacatgctgttttaccgaaagagccagctgcagcgccctccggaggcccgggccaatccgagatacggagtgccctgccacctactgaacgaaatggatgccgcaaacattgaactccagaccaaacgagctgagtgtgacagcgcaaacaataccttcgaattacacctccacctcggaccgcagtatcatttcttcaacggcgctctgcatccagtagtgtcccagacagaaagtgtgtgggacttgacattcgataaacgaaaaacactgggggacttgcgccagagcatatttcagctcttagaattctgggagggagatatggtactgagtgttgctaagctggtaccggctggcttgcatatttaccagtccctgggaggtgatgagttaaccctctgcgagaccgagattgccgatggtgaagatatcttcgtgtggaacggcgtggaagtggggggagtccatatacaaactggcatcgactgcgagcctctcctgcttaatgtactgcatctggatacaagttcagatggagagaaatgctgtcaggtgatcgaaagcccgcacgtgttcccagctaatgccgaggtaggaacggtgctcaccgctctggctattcctgctggcgtgatttttattaacagtgccgggtgccctgggggtgagggatggacggctatcccgaaagaagatatgaggaaaacatttcgcgagcaaggccttcgcaatggcagctcaatactgatacaggatagtcatgacgacaattccctactgactaaggaagaaaaatgggtgacctctatgaatgaaattgactggctccacgtgaaaaacttgtgccagttggaaagcgaggagaagcaggtgaaaatctctgccactgttaatacaatggtcttcgacattcgaataaaagcaattaaagaactcaaactcatgaaggaattagcagacaatagctgcctaagacccatcgataggaacgggaagttgctctgccctgtccctgattcatatacactgaaggaagcagagctgaagatggggagctccctcggtttgtgtttgggtaaggcccctagctcatcgcagctattccttttttttgcaatgggaagcgacgtgcagccaggcacagagatggaaattgtggtggaggagaccatctccgtgcgcgactgcctgaagctcatgttaaagaagtccggcctccagggtgatgcgtggcacctccgcaagatggattggtgctacgaagccggggaacccctctgtgaggaggatgccacacttaaggaactgttgatctgttcaggagacactctcctactgattgagggtcagttaccacccctagggttcttaaaggttcccatttggtggtatcagctgcagggtcccagtgggcactgggagtcacaccaggatcagaccaactgcacttcctcatgggggagggtgtggcgcgctacaagttcccagggtgcttctggtaacgagccagcccaagtaagcctcctgtatctgggagatatcgagatcagtgaggatgctactctggctgaactaaaatcccaggcaatgacccttccccccttcctggaatttggcgtgccaagccctgcgcatttgcgtgcctggactgttgaaagaaagcgcccaggccgattactccgaaccgataggcagccgctgagggagtataaactggggcgccggatcgaaatctgccttgagccgctgcagaaaggcgagaacctgggcccacaagacgtcttgctgcgcacccaagtgagaatcccaggcgagcgcacctatgcccctgccctagatttagtctggaatgccgcacagggggggacggccgggtcgctccgccagagggttgccgacttctatcggttgcccgttgaaaaaattgagattgccaaatatttcccagagaaattcgaatggctgccaatatctagttggaaccaacagatcacaaagcggaaaaagaaaaagaaacaggactacttacagggcgctccgtactatttgaaagacggcgacaccataggagtcaagaacttgctgatcgacgacgacgatgacttttccactatcagggacgacactggaaaggagaagcagaaacaacgggcactcggtcggcgaaagagccaggaggctctgcacgagcagagttcctacatattaagctccgctgagacaccagccaggccaagagctcccgaaacatcactgtcaatccatgtggggtctttcagatag

SEQ ID NO: 197176 - DNA, 3744 bp, Artificial Sequence
  derived and/or modified sequence
atgagcctgttcctgcgggtggtgttcagcttcaccatgttcggcgatctgttcgaagaagagtactcaactgtgtctaataaccaatacgggaaagggaaaaaactcaaaactaaggccctggagccccccgccccacgggaatttacaaaccttagcggcatccgtaatcagggcggtacatgctacctgaactctctgctgcagaccctgcatttcacaccagaattcagggaagctttattcagcctaggtcccgaggagctgggcctttttgaggacaaagacaaaccagatgccaaggtccgcattattcccctacaacttcagcgcctgttcgcgcagttgctccttctcgaccaggaggctgcttcaacagctgatcttaccgactccttcggttggaccagcaatgaagaaatgcgtcaacatgatgtgcaagaattaaacaggatcctcttcagcgccttagagacaagtctcgtaggaactagtggtcatgaccttatctatcggctctatcatgggactattgtgaaccagattgtatgtaaagagtgtaaaaatgtcagcgaaagacaggaggattttctggacctcacagttgccgtcaaaaatgtgagtggattagaggatgccctttggaatatgtacgtcgaggaagaggtgttcgactgtgacaatctctaccactgtgggacgtgtgatcgccttgtaaaagctgccaagtcggcaaagctgagaaagctgccccctttcttgaccgtgagcttactcagattcaacttcgacttcgtgaagtgtgagaggtacaaggaaacctcatgttacacctttccactgagaatcaacctaaaacccttctgcgaacagtcggaacttgacgatctcgaatacatctatgacctgttcagtgttataattcacaaggggggatgctacggtggacactatcacgtgtatatcaaggatgtggaccatctgggcaactggcagtttcaagaggagaagagtaaaccagacgtaaatctgaaggacttacaatctgaagaggaaatcgatcaccccctcatgattctgaaggccattctgctggaggaaaacaaccttattcctgtggatcaactgggccagaagctgctgaagaagatcggcattagctggaacaagaaatataggaaacagcatggccctctgcgaaaatttttacaactacacagtcagatcttcctcctaagtagcgacgaaagcaccgtgcggctgctaaagaacagcagcttacaggcagagagtgattttcaacggaatgaccagcagattttcaagatgcttcctcccgaaagtccaggcttgaataacagtatatcatgcccacattggttcgatatcaatgactcgaaggtgcagccgattcgtgagaaagatattgagcagcaattccaaggcaaagaatctgcttatatgctgttctaccggaagtctcaactgcagcggccccctgaagctcgggccaacccacggtatggggtgccttgccacctgctgaacgaaatggatgcggctaatattgaactccagaccaagagggcagagtgcgactctgcaaacaacactttcgaactgcaccttcatctgggtccccagtaccactttttcaatggggcactacacccagtcgtatcacagacagagagtgtttgggacttgacttttgacaaaaggaagactttaggcgacctccgccagtctatctttcagctcttagaattttgggaaggggatatggtgctgagtgtcgccaagctggtgcctgctggactgcacatctatcagagtctaggcggtgacgagctaactctctgcgagaccgaaatagccgatggtgaagacatctttgtgtggaacggggttgaagtcgggggtgtacatatccagacagggatcgactgcgagcctttattgttaaatgtcctgcatctagatactagttcggacggtgagaagtgctgccaagtcatcgaatctccccatgtgtttccagcaaacgctgaagtggggacggtcctcaccgcactggcgattcccgctggggttatctttataaattccgctggttgtcccggaggagagggctggacagccatccctaaggaagacatgagaaaaactttccgtgaacaggggctgcggaacgggagctctatcctcatccaagatagccatgacgacaatagcctactgacaaaagaagaaaaatgggtaacctcaatgaacgaaatagactggctacacgtcaagaatttgtgtcagctggagtcagaagaaaagcaggtgaaaatatccgcgaccgtgaacaccatggtcttcgacatccgcattaaggctataaaggagctgaagttaatgaaggagctcgccgataatagctgcctccggccaatcgatcggaatggcaagctgctgtgccccgtcccagattcctacaccctgaaagaggctgaactaaagatgggctcctccctcggattgtgcctggggaaggcacctagttccagccagctgtttctgttcttcgccatggggtccgacgtacagcccggcactgagatggagattgtggtcgaagagacaatctcggtccgcgattgcctcaaactcatgctcaaaaagagtggccttcagggagatgcttggcatctgcgcaaaatggattggtgctacgaggcgggcgagcctctctgcgaggaagatgccacactgaaagagttgctcatttgctcaggcgatactctccttttaatagaggggcagctcccacctctgggtttcctgaaggtgcctatttggtggtaccagttacaggggccgtccggccactgggaaagccatcaagatcagacaaattgtactagcagttggggccgcgtatggcgcgcaacttcatctcagggggcaagcgggaatgagcccgcccaagtgtcgctgctatatctgggggacatcgaaatctcagaggatgcgaccctggcagagctgaaatcccaggccatgactctcccgcctttcttggaattcggggtgcctagtcctgcccatctgcgtgcttggacagttgagaggaaaagacctggaaggctactgcggacagatcggcagccactcagagagtacaagctcgggagaaggattgagatatgtctcgagcccttgcagaagggcgaaaatctcggcccccaggacgttctactccgtacacaggtgcgaattcccggcgagagaacctacgcccccgcattggatctcgtgtggaatgcggcccagggcggcaccgccggaagcctccgccagcgggtggctgatttctaccgacttccagtagaaaaaatcgagatcgctaaatattttccggagaaatttgaatggctgccaatctcgtcgtggaatcagcaaattactaagaggaagaagaagaaaaagcaggattacctacaaggggctccttattatctcaaggatggagacaccatcggcgtgaaaaatctgttaattgacgatgatgatgacttttctactattcgagatgacacaggcaaagaaaagcagaaacaacgcgctctggggagaaggaaatcacaggaggcgctgcacgaacaatcatcttacattctgtctagcgcagagacacctgcccgacccagagcaccagagaccagcctgtccatacacgtgggctcctttagatag

SEQ ID NO: 197177 - DNA, 3708 bp, Artificial Sequence
  derived and/or modified sequence
atgttcggagacctctttgaggaggagtactcaactgtttccaataatcagtacggaaagggcaagaaactgaagacaaaagccctcgagccacccgctcctcgggaattcactaatctgtcgggcattcgcaaccagggtggcacttgctaccttaattccctgcttcagaccttgcactttactccagagtttagagaggccctattcagtctgggtcccgaggagctcggactgtttgaggataaggacaaaccagacgccaaggttcggattatccccctgcaactgcagcgattgtttgcacaactgctgctgctggatcaggaggccgcaagcacagccgacttgaccgattcgttcgggtggacctccaatgaagagatgcgacaacacgacgtgcaagaattaaatcgcattttattttcagctctggaaacttcgctcgttggaacaagtgggcacgacttgatctatagattatatcacggcactatagtgaaccagattgtatgtaaggagtgcaagaatgtcagtgaacggcaagaggatttcttagatcttacagttgctgtcaagaacgtctctggactggaggatgcattgtggaatatgtatgtggaagaagaagtgttcgactgcgataacttgtatcattgcgggacatgcgataggctggtaaaagctgccaaatcggcgaagctgcgcaagctgcccccatttctgaccgtaagcctgctcagatttaattttgacttcgtgaagtgcgaacgatacaaggagacttcttgctatacattccccctgcggattaacctgaagcccttttgcgagcagtcagaactggacgacctggagtatatatacgacctgttctcagtgatcatacacaaaggcggttgttatgggggacattaccacgtgtatattaaagatgtggaccacctgggaaactggcagttccaggaggagaaatcaaaacccgacgttaacttgaaggacttacagagcgaggaagagatcgatcatccgctgatgatccttaaggctatcctcttggaggaaaacaatttgatccctgttgaccagttgggccaaaagctgctgaaaaagatcggcatcagctggaacaaaaagtaccggaagcagcatggccctctcaggaaatttttgcagctgcactcccagatcttcctgctgtccagcgacgaatcgaccgtaagactcctgaagaattcatccctgcaggctgagtcggacttccaacggaatgatcagcagattttcaagatgttaccccctgagtccccgggattaaataactcgatatcttgtccgcattggtttgacatcaacgattctaaagtacagcctattcgagaaaaagacattgagcagcagtttcaagggaaagaatcagcttacatgctgttctataggaaatctcagctccagcggccaccggaagcacgagccaacccgaggtatggagtgccctgccaccttttgaatgagatggacgcagccaatatcgaactgcagactaagcgtgcagaatgtgactccgccaataataccttcgagcttcacctgcatctggggccacaatatcacttcttcaacggagctcttcaccccgtggtgtcccagacagaatctgtctgggatctgacttttgacaagcgcaagacgctgggagacttgcggcaatctatctttcagcttctggaattttgggaaggagatatggtcctctcagtcgcgaaactcgttcccgctggcctccatatttaccaaagccttggaggcgacgagttgaccctttgcgaaactgagatcgcggacggtgaagacatcttcgtgtggaatggcgtggaggttggaggcgttcatattcagactggcatcgactgcgagcccttgctgctgaacgtgctgcacctggacacttcgagcgatggggaaaagtgctgtcaagttattgagtctccgcatgtttttcccgctaatgcggaagtaggaacggtactgactgcactcgccattcccgctggagtgatttttatcaatagcgctgggtgtccagggggtgaaggatggaccgccataccaaaagaagatatgagaaaaacttttagagaacagggactacgaaacggctcttcgatattgatacaggatagtcacgacgataactccttgttgaccaaagaggagaaatgggtaacaagtatgaacgagattgactggttgcacgtcaagaatctgtgccagttagagagcgaagaaaaacaagtgaagatttctgccactgtgaatacaatggtgtttgatataagaattaaggccatcaaggagctgaagctgatgaaggagctggcggataatagttgccttcggcctattgaccggaacggaaaactgctgtgccctgtgccagattcttatacattaaaagaggcggagttgaagatgggttctagtctgggcctttgtctgggaaaggctccctcatcttctcaactattcctcttttttgccatgggctccgatgtgcagcctgggaccgaaatggagatcgtcgtggaggaaactatctctgtgcgtgactgtttaaaattaatgctgaaaaagagcggtctacagggagacgcctggcacttaaggaaaatggactggtgctatgaggccggagaacctctgtgtgaagaggatgccacgctcaaggaattacttatatgttcaggagatacgcttctactgatagagggtcagcttcctcccctgggtttcctcaaggtccccatctggtggtatcagctccaggggcctagcgggcactgggagtcacaccaggatcaaactaactgcacttcttcctggggcagggtgtggagggccaccagctcgcagggcgcatctggcaacgagccagctcaagttagtcttctctacttgggtgacattgaaatctctgaagacgccacactcgcagaattgaaaagtcaggccatgactctgcctcccttcctggaatttggagtgcctagccccgcacacctgagggcctggaccgtcgagagaaagcgtcctgggagattgctgaggacagaccggcagccacttcgcgagtacaaattaggcaggcggattgaaatctgtttggagccattgcagaagggcgagaatcttggaccgcaagatgttctgttgcgtactcaagtacgaatcccaggcgagaggacttacgccccagccttagatctggtgtggaacgctgctcaggggggaacggcgggatccttgcgacagagggtggcggatttctatagactgcctgtcgagaaaatcgaaattgccaagtactttccagagaaatttgagtggttgcctatttcttcatggaaccagcagattaccaagagaaaaaaaaagaaaaagcaagactatctgcagggcgctccctactaccttaaggatggggacaccatcggtgtgaaaaatctgcttatcgatgatgacgacgacttcagcacaatcagagacgacacggggaaagagaaacaaaagcaaagggcccttggacgccgaaaaagtcaggaagcccttcatgagcagagctcatacattcttagctctgcagagacacccgctcggcctagagcccctgagacctctctgtcaatacacgtagggtcttttagatag

SEQ ID NO: 197178 - DNA, 3708 bp, Artificial Sequence
  derived and/or modified sequence
atgtttggagacctgtttgaggaagagtacagcaccgtgtcaaacaatcagtacggcaagggcaagaaactgaagacaaaggccttagagccccctgctcccagggaattcaccaacctgtccggcattcggaaccagggagggacatgctaccttaactcactgctgcagaccctgcattttaccccggagtttcgggaagctttatttagcctcggcccagaggaattgggcctgtttgaggacaaagataaacccgatgctaaagttcggattatccccctccagttgcagcgtctcttcgctcagttactcttactggatcaagaggctgcaagcaccgcagatctgaccgatagctttggatggaccagcaacgaggagatgagacaacatgacgtccaagagctgaataggatcctgttttctgctcttgagacaagccttgtgggaacctccggccacgatctgatctacagactttaccacggcaccatcgtaaaccaaattgtgtgcaaagaatgtaagaacgtcagcgaacggcaggaagacttcctggatttgactgttgctgtcaagaatgtgtccggcttggaagatgccctctggaatatgtacgtggaagaggaggtgtttgactgtgacaatctttaccactgcggaacatgcgatcggttagtgaaggctgcgaagagcgctaagctgagaaaactcccaccattccttacagtgagtttgctccggtttaattttgattttgtgaagtgcgagcgctataaggaaactagctgctacacattccccctaaggattaacctaaagccgttctgcgagcaatccgaattggatgatctagaatacatctatgatttattcagtgttatcatacacaagggaggatgttacggtggtcattaccacgtgtatattaaagatgtggaccacttgggaaattggcagttccaggaggagaagtcaaagcctgacgtcaacctgaaggatctacagagcgaggaagagatcgatcatcctctcatgattctgaaggctatcttactggaagaaaataatttgatcccggttgaccagttgggtcagaagctattgaagaagatcggaatttcatggaacaagaagtatcgtaagcagcatggacccttgagaaaatttctacagcttcactcccagattttcttgttatctagcgatgagtctaccgtccgcctcttaaagaattcttccctgcaggcagagtcggactttcagaggaacgaccagcagatctttaaaatgctccccccagaatcccctgggttgaacaattccatcagctgtccccactggtttgatattaatgacagtaaggttcagccaatccgtgaaaaagacatcgagcagcagttccaaggcaaggagtctgcatacatgctcttttaccgtaagagccagctgcaaaggcctcccgaagcaagagcgaacccaaggtatggagtcccatgtcacctgttgaacgaaatggatgctgccaatattgaactgcagacgaaaagggccgagtgcgacagtgccaacaacaccttcgaactacacctgcacctggggcctcagtaccactttttcaacggcgctcttcaccctgtagtttctcaaaccgaatctgtgtgggacctgacgtttgataagcggaagactcttggcgatttgagacagtctatctttcagcttttggagttctgggagggagacatggttctttcagtggcaaaactcgtccctgctggcctccacatctaccaatcccttggtggcgatgagttgacattgtgtgaaacggaaatcgcagatggggaagatatctttgtgtggaatggcgttgaagtgggaggagtccacatccagactggcattgactgcgaacctctgttactcaacgtgctgcacctggacaccagttcggacggcgaaaagtgctgtcaggtcattgaatcccctcacgtattccctgcaaatgccgaggtgggcaccgtactgactgctctggctatacccgcaggcgtaattttcatcaattccgccggttgcccaggaggcgaaggatggaccgccattcccaaggaagatatgaggaaaactttcagggaacagggcctgaggaatggcagctcaatcctcatccaggattcacatgatgacaattctctgctgacaaaggaggaaaagtgggtgaccagtatgaatgaaatcgattggctgcacgtgaagaacctctgccaactggagagcgaggagaaacaagtaaagatctctgccaccgtgaatacgatggtctttgatattcgcattaaggcgattaaggagctcaagttgatgaaagaattagcagataattcctgcctgcgcccaatcgatagaaacggtaagctgctgtgccctgtccccgacagctataccctaaaagaagctgagttgaagatgggcagctccctggggctgtgcttaggcaaggcgccatcatcgtcacaactcttcctgttcttcgctatggggagcgacgtgcagccaggcaccgaaatggagatcgttgtcgaggaaacgatttccgtcagagattgcctgaaactgatgttgaagaaaagtggcctgcagggggatgcctggcacctgagaaagatggattggtgttatgaggcgggtgaaccactttgcgaggaggacgccaccctgaaggagctattgatctgctctggggataccctactcctaatagagggacagctccctcctctggggtttctcaaggttccaatctggtggtatcaacttcagggccctagcggccattgggaatcacaccaagaccagactaactgtacctcatcctggggacgagtctggagggccacctccagtcagggtgcaagtggtaatgagccagctcaagtgtctctgttgtatctaggagacatcgaaatcagcgaagacgcaaccctggcagagctgaagagtcaagcaatgacgctgccccctttcttggaattcggagtcccctccccagctcatttaagggcctggaccgttgaaaggaaaagacccggaagactccttcgaacagaccgccagcccctacgtgagtataaactgggaagacgaatcgagatctgtctggagcccctgcagaagggtgagaacctaggcccacaggacgtgctgctgaggacgcaggtcaggatcccaggtgaacgcacctatgcgcctgccctcgatctggtctggaatgccgctcagggtgggactgccggttcgcttagacaacgtgtcgctgatttctacagactccccgtggagaaaatcgagatagcaaagtatttcccagagaaatttgagtggctgcccatctcctcttggaaccagcagattaccaagcgtaaaaagaagaaaaagcaggactatctgcaaggcgcaccctattacctgaaggacggagacactatcggcgtaaagaatcttctcattgatgacgacgacgactttagcactatccgcgacgataccggcaaggagaagcaaaaacagcgcgctttgggccgtcggaagtcgcaggaggcactccacgaacagtcctcctatattctgagctctgcagagaccccagccaggcccagagctcccgaaactagtctttccatacacgttggctcctttagatag

SEQ ID NO: 197179 - DNA, 3744 bp, Artificial Sequence
  derived and/or modified sequence
atgagtctatttctcagggtggtgttctctttcaccatgttcggcgacttgttcgaggaggagtacagtacagtcagcaataaccagtatgggaagggcaaaaaacttaagaccaaggcactcgagcctccagcccctagggaatttactaacctgtcaggaattaggaaccagggtggcacatgctacctgaacagtctgctccaaacgctgcacttcacaccagagtttagagaggctttattcagtctgggtcccgaagagttaggcttgttcgaagacaaagataaaccggatgcgaaagttcggattatcccactgcagcttcaaagattatttgcccagcttctattattagatcaggaggcggcaagcaccgccgatcttactgatagtttcgggtggacttccaatgaggagatgaggcagcatgatgtccaggagctgaatcgaatcctgttctctgctcttgagacctcgctggtcggcacttcagggcatgacctcatctacagactgtatcatggaacaatcgtgaaccagattgtttgcaaggagtgtaagaacgtgtccgagaggcaggaagattttctggatcttaccgtagctgtaaagaacgtcagcggtctcgaggatgcactttggaacatgtatgtagaagaagaggtttttgactgtgacaacctctatcattgcggaacttgcgaccgccttgtgaaggctgcaaaatcagcaaaactgcgaaagttacctcccttcctcaccgtttctctgctcagatttaacttcgattttgtgaaatgcgagaggtacaaggaaacatcgtgctacacattccctctccgcatcaatctgaagccgttctgtgagcaatctgagctggacgacctggagtatatctatgacctgttcagcgtcatcattcataaaggcggttgctatggtggccactaccatgtgtacatcaaggatgtagatcatttaggaaactggcagtttcaggaagagaagtcaaaaccggatgtgaatctgaaagatctccagagcgaagaggagattgaccaccccctgatgatactgaaggcgatcctactggaggaaaacaatcttatcccagtggaccaactgggccagaaattgctcaagaagattggaatctcctggaacaaaaagtatcgaaagcagcatgggccacttaggaagtttctgcaattacatagtcagatctttctgctctcctcagatgaatccaccgtgcggctgctgaagaactccagcttgcaggcggagagtgatttccaaagaaacgatcagcagatcttcaagatgttgcctcccgagagcccaggcctgaataactccatatcatgcccacactggttcgacattaacgacagtaaggttcagcccatccgagagaaggatatcgaacaacagttccaaggtaaagagtcagcctatatgctcttttaccggaagtctcaactgcagagaccacccgaggcacgggctaacccaagatatggagtgccgtgccatctgctgaatgagatggacgccgctaacatcgagctgcagacgaagcgcgcagagtgtgattccgccaacaataccttcgagttgcacttgcacctgggcccacagtatcacttcttcaatggtgctctgcatccggtagtgtcacagaccgagagcgtttgggacttgactttcgacaagcgcaagaccctgggagatcttcgccagagtatatttcagctgctggaattctgggagggggacatggtgttgtccgtggccaagctcgtccctgccggtctccacatctaccaaagcctgggaggggacgagctgactctgtgtgagaccgaaatagccgacggcgaggatatattcgtctggaacggggtggaagtgggcggagttcatatccagacggggattgactgcgaaccattactgctgaacgtcttgcacctggatacaagctccgatggcgagaagtgttgccaggtcattgagagcccccacgtgttccccgcaaacgcagaggttgggaccgttcttaccgctctagcgattccagctggcgtgatcttcattaacagcgctggatgccctggaggggagggatggaccgcaatccctaaggaagacatgaggaaaacattcagagagcaagggcttcgcaatgggagctccatacttatccaggacagccacgacgacaacagcctgttaacaaaggaagagaagtgggtaaccagtatgaacgagatcgattggttgcacgtcaaaaacctgtgccagctagaaagtgaagaaaaacaagtaaagatctccgccaccgtgaataccatggttttcgatattcgtatcaaagcaattaaagaattgaagctcatgaaagagcttgccgataactcctgtctccgtccaattgatcgcaatgggaaacttctgtgcccagtcccagatagttatactctcaaggaggccgaattaaagatgggatcctcactcggtttgtgcctcgggaaagcgccatcatccagccagctttttttgttcttcgctatggggagtgacgttcagccagggacagagatggaaattgtggttgaggaaactatttctgtcagggattgtctcaaacttatgctgaaaaagtccggcctgcagggcgacgcctggcatctgagaaagatggactggtgttatgaggccggtgagccactttgtgaagaggacgccaccctgaaagagcttctgatctgctccggagacacgctcctccttatcgaaggccagctgccccctctgggatttctcaaggtacctatctggtggtatcagctccagggaccatccgggcattgggaatctcaccaggatcagacaaactgcacaagctcctggggccgagtgtggcgcgctactagttctcaaggtgccagcggaaatgagcccgcacaagtgtccctgctgtacctgggggatattgaaatctcagaggacgctactctggccgaattaaagagccaggcgatgacactcccacccttcctggagttcggtgtccctagtcccgcacacttgagggcctggacggttgaaagaaagcggccaggcagattgcttagaaccgatagacagcctttaagggagtacaagctcggcaggcggatcgagatctgcctggaacctttgcaaaaaggcgagaatctggggccacaggacgtccttctgcggacgcaggtgaggatccctggggagcggacctacgcacccgcactggacctagtgtggaatgcagcccaggggggaaccgctggaagcctgagacagcgagtggctgatttctacaggcttccagttgaaaagattgagatcgccaaatatttccccgagaaattcgaatggttacccatcagctcttggaatcaacagattacaaaaagaaagaagaaaaaaaaacaggactatctacagggcgcaccatattaccttaaagacggcgacacaatcggggtaaaaaacctgcttatcgacgacgacgacgacttctccaccatccgcgacgataccggcaaggagaaacagaagcagcgtgctcttggcaggcggaagtcacaggaagccctacatgagcagtcaagttatatcctctccagcgccgagacccccgctagaccccgtgctccagaaacctcactgtctattcacgttggcagttttagatag

SEQ ID NO: 197180 - DNA, 5692 bp, Artificial Sequence
  derived and/or modified sequence
actttctggagacccgccctcgccaacatggcggcgcccagttggggcgggttcgttcgcttcgcgttttggccagggcgggggtctgggctttaggcaggtagtatttagtttcacaatgtttggggacctgtttgaagaggagtattccactgtgtctaataatcagtatggaaaagggaagaaattaaagactaaagctttggagccacctgctcctagagaattcaccaatttaagcggaatcagaaatcagggtggaacctgttacctcaattcccttcttcagactcttcatttcacacctgaattcagagaagctctattttctcttggcccagaagagcttggtttgtttgaagataaggataaacccgatgcaaaggttcgaatcatccctttacagttacagcgcttgtttgctcagcttctgctcttagaccaggaagctgcatccacagcagacctcactgacagctttgggtggaccagtaatgaggaaatgaggcaacatgatgtgcaggaactgaatcgaatcctcttcagcgctttggaaacttctttagttgggacctccggtcatgacctcatctatcgtctgtaccatggaaccattgttaaccagattgtttgtaaagaatgtaagaacgttagcgagaggcaggaagacttcttagatctaacagtagcagtcaaaaatgtatccggtttggaagatgctctctggaacatgtatgtagaagaggaagtttttgattgtgacaacttgtaccactgtggaacttgtgacaggctggttaaagcagcaaagtcggccaaattacgtaagctgcctccttttcttactgtttcattactaagatttaattttgattttgtgaaatgcgaacgctacaaggaaactagctgttatacattccctctccggattaatctcaagcccttttgtgaacagagtgaattggatgacttagaatatatatatgacctcttctcagttattatacacaaaggtggctgctacggaggccattaccatgtatatattaaagatgttgatcatttgggaaactggcagtttcaagaggaaaaaagtaaaccagatgtgaatctgaaagatctccagagtgaagaagagattgatcatccactgatgattctaaaagcaatcttattagaggagaataatctaattcctgttgatcagctgggccagaaacttttgaaaaagataggaatatcttggaacaagaagtacagaaaacagcatggaccactgcggaagttcttacagctccattctcagatatttctactcagttcagatgaaagtacagttcgtctcttgaagaatagttctctccaggctgagtctgatttccaaaggaatgaccagcaaattttcaagatgcttcctccagaatccccaggtttaaacaatagcatctcctgtccccactggtttgatataaatgattctaaagtccagccaatcagggaaaaggatattgaacagcaatttcagggtaaagaaagtgcctacatgttgttttatcggaaatcccagttgcagagaccccctgaagctcgagctaatccaagatatggggttccatgtcatttactgaatgaaatggatgcagctaacattgaactgcaaaccaaaagggcagaatgtgattctgcaaacaatacttttgaattgcatcttcacctgggccctcagtatcatttcttcaatggggctctgcacccagtagtctctcaaacagaaagcgtgtgggatttgacctttgataaaagaaaaactttaggagatctccggcagtcaatatttcagctgttagaattttgggaaggagacatggttcttagtgttgcaaagcttgtaccagcaggacttcacatttaccagtcacttggcggggatgaactgacactgtgtgaaactgaaattgctgatggggaagacatctttgtgtggaatggggtggaggttggtggagtccacattcaaactggtattgactgcgaacctctacttttaaatgttcttcatctagacacaagcagtgatggagaaaagtgttgtcaggtgatagaatctccacatgtctttccagctaatgcagaagtgggcactgtcctcacagccttagcaatcccagcaggtgtcatcttcatcaacagtgctggatgtccaggtggggagggttggacggccatccccaaggaagacatgaggaagacgttcagggagcaagggctcagaaatggaagctcaattttaattcaggattctcatgatgataacagcttgttgaccaaggaagagaaatgggtcactagtatgaatgagattgactggctccacgttaaaaatttatgccagttagaatctgaagagaagcaagttaaaatatcagcaactgttaacacaatggtgtttgatattcgaattaaagccataaaggaattaaaattaatgaaggaactagctgacaacagctgtttgagacctattgatagaaatgggaagcttctttgtccagtgccggacagctatactttgaaggaagcagaattgaagatgggaagttcattgggactgtgtcttggaaaagcaccaagttcgtctcagttgttcctgttttttgcaatggggagtgacgttcaacctgggacagaaatggaaatcgtagtagaagaaacaatatctgtgagagattgtttaaagttaatgctgaagaaatctggcctacaaggagatgcctggcatttacgaaaaatggattggtgctatgaagctggagagcctttatgtgaagaagatgcaacactgaaagaacttctgatatgttctggagatactttgcttttaattgaaggacaacttcctcctctgggtttcctgaaggtgcccatctggtggtaccagcttcagggtccctcaggacactgggagagtcatcaggaccagaccaactgtacttcgtcttggggcagagtttggagagccacttccagccaaggtgcttctgggaacgagcctgcgcaagtttctctcctctacttgggagacatagagatctcagaagatgccacgctggcggagctgaagtctcaggccatgaccttgcctcctttcctggagttcggtgtcccgtccccagcccacctcagagcctggacggtggagaggaagcgcccaggcaggcttttacgaactgaccggcagccactcagggaatataaactaggacggagaattgagatctgcttagagccccttcagaaaggcgaaaacttgggcccccaggacgtgctgctgaggacacaggtgcgcatccctggtgagaggacctatgcccctgccctggacctggtgtggaacgcggcccagggtgggactgccggctccctgaggcagagagttgccgatttctatcgtcttcccgtggagaagattgaaattgccaaatactttcccgaaaagttcgagtggcttccgatatctagctggaaccaacaaataaccaagaggaaaaagaaaaaaaaacaagattatttgcaaggggcaccgtattacttgaaagacggagatactattggtgttaagaatctcctgattgacgacgatgatgatttcagtacaatcagagatgacactggaaaagaaaagcagaaacaacgggccctggggagaaggaaaagccaagaagccctccatgagcagagcagctacatcctctccagtgcagagacgcctgcccggccccgagccccggaaacttctctctccatccacgtggggagcttcagataaccgcgccgctgcacggctctactcccgatgaactctccggctgatgccacaaacgtgggtttcctgggcatggggactggctgcctggcgcctccaatcccaaatcctctgcttcctttgagcacagggacggctcctctgaggcctggccagtgcatgtagtcacttagctctgcaacacgtggcagccacgggggctggtgcagctctggatgtcgcccacccagctgccagtaggtgctgggctctctcacacagcacccggccccagctgcctttttttttcttttaaccagaaaatgcacaacgtgtgcgtgaaccgcaggtatggaggcagcggcatgccgttgctccgctgtgggaggtgtgtggggtcaggccagccactttcctccgtgttcagatgactctcgttcgccctgaccggcttctcacagtgtctcaggccactgcgccaccgcgctggtgctgagcagaagcgggcagaagtggggtctgctttcaggacttcatttcccccactcgttccggccccgcatgctccacgtctgccctttggtctgagttaaaactgcgatgctgaaaagtgcgagctctttccacgaggaggagccacacagggtggcctccgagggtgagtcgctctgctaagcaagggcagccgctgcacgtcagcccgcaggccaagggtccagcttatcctgggtgctctgtgatcagaaggtccttggatcccgaggactgcagctgctgccgtccacagcgcctcagcctctcttcctgtgtggaagcggggcaggcagggctgtggcagacaggcctggcatagcccaggttccaggtgtcctgggcagcctgaccggtttcctgagtagcctcaatgaaaacacctgagaaaaagaaaatgtaaactaaggaagggttttcccacttaatccaacccagatttctattcaacttaaaggatttaattggcatttgtgagaaataatagtacctgtgtcactgagttgattgatttgggacatagacggttgactttcccagacagcagcttagcggaaagcagcatcccgaagacggtgtcgcatgtcctgagcctgcttgtcacctgggcctcacggtttctcgtcagccccgtcactgatgggaagcagcactgaagtgtgagggcagaaaggacaccgctggagtcaggcgctcccctgcctgtgacccttttccaacaagctgatgctgagccagcggcctgctttgtccctcatactcctcccaacagtccaaacccctaccagacagaagccacgtcgcttctgcacacgtgtctgagagcgtctgccatagacgtctgtgcgtttccgtgaagcactgcgccctaaggacccaactctgactagcagctgcctcccactcccaaacactaaccccgctcaggagactcgcactgggtgtagactgcgtctttgcagagggagatgatagaggcttctgatgacgccagagctgtaagtgtcgtgacgagctgggcgcccagcccttcttaagctgttctgtttctgtggctttaactgacatatttctgtagcatctgccttcatctcatctcagcgtaatgaaatattaatgaaatcgctgaaaagctttgccttcgagaggccagaagcctcgcggaatgtctgcaagtccaaagacgcgtgtgggttgtgccctgaagtgccgtccagcaggcgcgtgcggccgggccggcctgtgcgtgtggcctttgccttcttccctttcttcctgttttctgtttttttaatttggggattgagaaagctgtacgattttgttaaagaaaaaaataaaccattttttaaagttgta

SEQ ID NO: 197181 - DNA, 3744 bp, Artificial Sequence
  derived and/or modified sequence
atgtcactttttttaagggtagtatttagtttcacaatgtttggggacctgtttgaagaggagtattccactgtgtctaataatcagtatggaaaagggaagaaattaaagactaaagctttggagccacctgctcctagagaattcaccaatttaagcggaatcagaaatcagggtggaacctgttacctcaattcccttcttcagactcttcatttcacacctgaattcagagaagctctattttctcttggcccagaagagcttggtttgtttgaagataaggataaacccgatgcaaaggttcgaatcatccctttacagttacagcgcttgtttgctcagcttctgctcttagaccaggaagctgcatccacagcagacctcactgacagctttgggtggaccagtaatgaggaaatgaggcaacatgatgtgcaggaactgaatcgaatcctcttcagcgctttggaaacttctttagttgggacctccggtcatgacctcatctatcgtctgtaccatggaaccattgttaaccagattgtttgtaaagaatgtaagaacgttagcgagaggcaggaagacttcttagatctaacagtagcagtcaaaaatgtatccggtttggaagatgctctctggaacatgtatgtagaagaggaagtttttgattgtgacaacttgtaccactgtggaacttgtgacaggctggttaaagcagcaaagtcggccaaattacgtaagctgcctccttttcttactgtttcattactaagatttaattttgattttgtgaaatgcgaacgctacaaggaaactagctgttatacattccctctccggattaatctcaagcccttttgtgaacagagtgaattggatgacttagaatatatatatgacctcttctcagttattatacacaaaggtggctgctacggaggccattaccatgtatatattaaagatgttgatcatttgggaaactggcagtttcaagaggaaaaaagtaaaccagatgtgaatctgaaagatctccagagtgaagaagagattgatcatccactgatgattctaaaagcaatcttattagaggagaataatctaattcctgttgatcagctgggccagaaacttttgaaaaagataggaatatcttggaacaagaagtacagaaaacagcatggaccactgcggaagttcttacagctccattctcagatatttctactcagttcagatgaaagtacagttcgtctcttgaagaatagttctctccaggctgagtctgatttccaaaggaatgaccagcaaattttcaagatgcttcctccagaatccccaggtttaaacaatagcatctcctgtccccactggtttgatataaatgattctaaagtccagccaatcagggaaaaggatattgaacagcaatttcagggtaaagaaagtgcctacatgttgttttatcggaaatcccagttgcagagaccccctgaagctcgagctaatccaagatatggggttccatgtcatttactgaatgaaatggatgcagctaacattgaactgcaaaccaaaagggcagaatgtgattctgcaaacaatacttttgaattgcatcttcacctgggccctcagtatcatttcttcaatggggctctgcacccagtagtctctcaaacagaaagcgtgtgggatttgacctttgataaaagaaaaactttaggagatctccggcagtcaatatttcagctgttagaattttgggaaggagacatggttcttagtgttgcaaagcttgtaccagcaggacttcacatttaccagtcacttggcggggatgaactgacactgtgtgaaactgaaattgctgatggggaagacatctttgtgtggaatggggtggaggttggtggagtccacattcaaactggtattgactgcgaacctctacttttaaatgttcttcatctagacacaagcagtgatggagaaaagtgttgtcaggtgatagaatctccacatgtctttccagctaatgcagaagtgggcactgtcctcacagccttagcaatcccagcaggtgtcatcttcatcaacagtgctggatgtccaggtggggagggttggacggccatccccaaggaagacatgaggaagacgttcagggagcaagggctcagaaatggaagctcaattttaattcaggattctcatgatgataacagcttgttgaccaaggaagagaaatgggtcactagtatgaatgagattgactggctccacgttaaaaatttatgccagttagaatctgaagagaagcaagttaaaatatcagcaactgttaacacaatggtgtttgatattcgaattaaagccataaaggaattaaaattaatgaaggaactagctgacaacagctgtttgagacctattgatagaaatgggaagcttctttgtccagtgccggacagctatactttgaaggaagcagaattgaagatgggaagttcattgggactgtgtcttggaaaagcaccaagttcgtctcagttgttcctgttttttgcaatggggagtgacgttcaacctgggacagaaatggaaatcgtagtagaagaaacaatatctgtgagagattgtttaaagttaatgctgaagaaatctggcctacaaggagatgcctggcatttacgaaaaatggattggtgctatgaagctggagagcctttatgtgaagaagatgcaacactgaaagaacttctgatatgttctggagatactttgcttttaattgaaggacaacttcctcctctgggtttcctgaaggtgcccatctggtggtaccagcttcagggtccctcaggacactgggagagtcatcaggaccagaccaactgtacttcgtcttggggcagagtttggagagccacttccagccaaggtgcttctgggaacgagcctgcgcaagtttctctcctctacttgggagacatagagatctcagaagatgccacgctggcggagctgaagtctcaggccatgaccttgcctcctttcctggagttcggtgtcccgtccccagcccacctcagagcctggacggtggagaggaagcgcccaggcaggcttttacgaactgaccggcagccactcagggaatataaactaggacggagaattgagatctgcttagagccccttcagaaaggcgaaaacttgggcccccaggacgtgctgctgaggacacaggtgcgcatccctggtgagaggacctatgcccctgccctggacctggtgtggaacgcggcccagggtgggactgccggctccctgaggcagagagttgccgatttctatcgtcttcccgtggagaagattgaaattgccaaatactttcccgaaaagttcgagtggcttccgatatctagctggaaccaacaaataaccaagaggaaaaagaaaaaaaaacaagattatttgcaaggggcaccgtattacttgaaagacggagatactattggtgttaagaatctcctgattgacgacgatgatgatttcagtacaatcagagatgacactggaaaagaaaagcagaaacaacgggccctggggagaaggaaaagccaagaagccctccatgagcagagcagctacatcctctccagtgcagagacgcctgcccggccccgagccccggaaacttctctctccatccacgtggggagcttcagataa

SEQ ID NO: 197182 - DNA, 5616 bp, Artificial Sequence
  derived and/or modified sequence
atgtcactttttttaagggtagtatttagtttcacaatgtttggggacctgtttgaagaggagtattccactgtgtctaataatcagtatggaaaagggaagaaattaaagactaaagctttggagccacctgctcctagagaattcaccaatttaagcggaatcagaaatcagggtggaacctgttacctcaattcccttcttcagactcttcatttcacacctgaattcagagaagctctattttctcttggcccagaagagcttggtttgtttgaagataaggataaacccgatgcaaaggttcgaatcatccctttacagttacagcgcttgtttgctcagcttctgctcttagaccaggaagctgcatccacagcagacctcactgacagctttgggtggaccagtaatgaggaaatgaggcaacatgatgtgcaggaactgaatcgaatcctcttcagcgctttggaaacttctttagttgggacctccggtcatgacctcatctatcgtctgtaccatggaaccattgttaaccagattgtttgtaaagaatgtaagaacgttagcgagaggcaggaagacttcttagatctaacagtagcagtcaaaaatgtatccggtttggaagatgctctctggaacatgtatgtagaagaggaagtttttgattgtgacaacttgtaccactgtggaacttgtgacaggctggttaaagcagcaaagtcggccaaattacgtaagctgcctccttttcttactgtttcattactaagatttaattttgattttgtgaaatgcgaacgctacaaggaaactagctgttatacattccctctccggattaatctcaagcccttttgtgaacagagtgaattggatgacttagaatatatatatgacctcttctcagttattatacacaaaggtggctgctacggaggccattaccatgtatatattaaagatgttgatcatttgggaaactggcagtttcaagaggaaaaaagtaaaccagatgtgaatctgaaagatctccagagtgaagaagagattgatcatccactgatgattctaaaagcaatcttattagaggagaataatctaattcctgttgatcagctgggccagaaacttttgaaaaagataggaatatcttggaacaagaagtacagaaaacagcatggaccactgcggaagttcttacagctccattctcagatatttctactcagttcagatgaaagtacagttcgtctcttgaagaatagttctctccaggctgagtctgatttccaaaggaatgaccagcaaattttcaagatgcttcctccagaatccccaggtttaaacaatagcatctcctgtccccactggtttgatataaatgattctaaagtccagccaatcagggaaaaggatattgaacagcaatttcagggtaaagaaagtgcctacatgttgttttatcggaaatcccagttgcagagaccccctgaagctcgagctaatccaagatatggggttccatgtcatttactgaatgaaatggatgcagctaacattgaactgcaaaccaaaagggcagaatgtgattctgcaaacaatacttttgaattgcatcttcacctgggccctcagtatcatttcttcaatggggctctgcacccagtagtctctcaaacagaaagcgtgtgggatttgacctttgataaaagaaaaactttaggagatctccggcagtcaatatttcagctgttagaattttgggaaggagacatggttcttagtgttgcaaagcttgtaccagcaggacttcacatttaccagtcacttggcggggatgaactgacactgtgtgaaactgaaattgctgatggggaagacatctttgtgtggaatggggtggaggttggtggagtccacattcaaactggtattgactgcgaacctctacttttaaatgttcttcatctagacacaagcagtgatggagaaaagtgttgtcaggtgatagaatctccacatgtctttccagctaatgcagaagtgggcactgtcctcacagccttagcaatcccagcaggtgtcatcttcatcaacagtgctggatgtccaggtggggagggttggacggccatccccaaggaagacatgaggaagacgttcagggagcaagggctcagaaatggaagctcaattttaattcaggattctcatgatgataacagcttgttgaccaaggaagagaaatgggtcactagtatgaatgagattgactggctccacgttaaaaatttatgccagttagaatctgaagagaagcaagttaaaatatcagcaactgttaacacaatggtgtttgatattcgaattaaagccataaaggaattaaaattaatgaaggaactagctgacaacagctgtttgagacctattgatagaaatgggaagcttctttgtccagtgccggacagctatactttgaaggaagcagaattgaagatgggaagttcattgggactgtgtcttggaaaagcaccaagttcgtctcagttgttcctgttttttgcaatggggagtgacgttcaacctgggacagaaatggaaatcgtagtagaagaaacaatatctgtgagagattgtttaaagttaatgctgaagaaatctggcctacaaggagatgcctggcatttacgaaaaatggattggtgctatgaagctggagagcctttatgtgaagaagatgcaacactgaaagaacttctgatatgttctggagatactttgcttttaattgaaggacaacttcctcctctgggtttcctgaaggtgcccatctggtggtaccagcttcagggtccctcaggacactgggagagtcatcaggaccagaccaactgtacttcgtcttggggcagagtttggagagccacttccagccaaggtgcttctgggaacgagcctgcgcaagtttctctcctctacttgggagacatagagatctcagaagatgccacgctggcggagctgaagtctcaggccatgaccttgcctcctttcctggagttcggtgtcccgtccccagcccacctcagagcctggacggtggagaggaagcgcccaggcaggcttttacgaactgaccggcagccactcagggaatataaactaggacggagaattgagatctgcttagagccccttcagaaaggcgaaaacttgggcccccaggacgtgctgctgaggacacaggtgcgcatccctggtgagaggacctatgcccctgccctggacctggtgtggaacgcggcccagggtgggactgccggctccctgaggcagagagttgccgatttctatcgtcttcccgtggagaagattgaaattgccaaatactttcccgaaaagttcgagtggcttccgatatctagctggaaccaacaaataaccaagaggaaaaagaaaaaaaaacaagattatttgcaaggggcaccgtattacttgaaagacggagatactattggtgttaagaatctcctgattgacgacgatgatgatttcagtacaatcagagatgacactggaaaagaaaagcagaaacaacgggccctggggagaaggaaaagccaagaagccctccatgagcagagcagctacatcctctccagtgcagagacgcctgcccggccccgagccccggaaacttctctctccatccacgtggggagcttcagataaccgcgccgctgcacggctctactcccgatgaactctccggctgatgccacaaacgtgggtttcctgggcatggggactggctgcctggcgcctccaatcccaaatcctctgcttcctttgagcacagggacggctcctctgaggcctggccagtgcatgtagtcacttagctctgcaacacgtggcagccacgggggctggtgcagctctggatgtcgcccacccagctgccagtaggtgctgggctctctcacacagcacccggccccagctgcctttttttttcttttaaccagaaaatgcacaacgtgtgcgtgaaccgcaggtatggaggcagcggcatgccgttgctccgctgtgggaggtgtgtggggtcaggccagccactttcctccgtgttcagatgactctcgttcgccctgaccggcttctcacagtgtctcaggccactgcgccaccgcgctggtgctgagcagaagcgggcagaagtggggtctgctttcaggacttcatttcccccactcgttccggccccgcatgctccacgtctgccctttggtctgagttaaaactgcgatgctgaaaagtgcgagctctttccacgaggaggagccacacagggtggcctccgagggtgagtcgctctgctaagcaagggcagccgctgcacgtcagcccgcaggccaagggtccagcttatcctgggtgctctgtgatcagaaggtccttggatcccgaggactgcagctgctgccgtccacagcgcctcagcctctcttcctgtgtggaagcggggcaggcagggctgtggcagacaggcctggcatagcccaggttccaggtgtcctgggcagcctgaccggtttcctgagtagcctcaatgaaaacacctgagaaaaagaaaatgtaaactaaggaagggttttcccacttaatccaacccagatttctattcaacttaaaggatttaattggcatttgtgagaaataatagtacctgtgtcactgagttgattgatttgggacatagacggttgactttcccagacagcagcttagcggaaagcagcatcccgaagacggtgtcgcatgtcctgagcctgcttgtcacctgggcctcacggtttctcgtcagccccgtcactgatgggaagcagcactgaagtgtgagggcagaaaggacaccgctggagtcaggcgctcccctgcctgtgacccttttccaacaagctgatgctgagccagcggcctgctttgtccctcatactcctcccaacagtccaaacccctaccagacagaagccacgtcgcttctgcacacgtgtctgagagcgtctgccatagacgtctgtgcgtttccgtgaagcactgcgccctaaggacccaactctgactagcagctgcctcccactcccaaacactaaccccgctcaggagactcgcactgggtgtagactgcgtctttgcagagggagatgatagaggcttctgatgacgccagagctgtaagtgtcgtgacgagctgggcgcccagcccttcttaagctgttctgtttctgtggctttaactgacatatttctgtagcatctgccttcatctcatctcagcgtaatgaaatattaatgaaatcgctgaaaagctttgccttcgagaggccagaagcctcgcggaatgtctgcaagtccaaagacgcgtgtgggttgtgccctgaagtgccgtccagcaggcgcgtgcggccgggccggcctgtgcgtgtggcctttgccttcttccctttcttcctgttttctgtttttttaatttggggattgagaaagctgtacgattttgttaaagaaaaaaataaaccattttttaaagttgtagccctt

SEQ ID NO: 197183 - protein, 216 aa, Artificial Sequence
  derived and/or modified sequence
MSFLFSSRSSKTFKPKKNIPEGSHQYELLKHAEATLGSGNLRQAVMLPEGEDLNEWIAVNTVDFFNQINMLYGTITEFCTEASCPVMSAGPRYEYHWADGTNIKKPIKCSAPKYIDYLMTWVQDQLDDETLFPSKIGVPFPKNFMSVAKTILKRLFRVYAHIYHQHFDSVMQLQEEAHLNTSFKHFIFFVQEFNLIDRRELAPLQELIEKLGSKDR

SEQ ID NO: 197184 - protein, 148 aa, Artificial Sequence
  derived and/or modified sequence
MLFYLSSRSSKTFKPKKNIPEGSHQYELLKHAEATLGSGNLRQAVMLPEGEDLNEWIAVNTVDFFNQINMLYGTITEFCTEASCPVMSAGPRYEYHWADGTNIKKPIKCSAPKYIDYLMTWVQDQLDDETLFPSKIGELTLSKYSFFF

SEQ ID NO: 197185 - DNA, 651 bp, Artificial Sequence
  derived and/or modified sequence
atgagcttcctgttcagcagcagaagcagcaagaccttcaagcccaagaagaacatccccgagggcagccaccagtacgagctgctgaagcacgccgaggccaccctgggcagcggcaacctgagacaggccgtgatgctgcccgagggcgaggacctgaacgagtggatcgccgtgaacaccgtggacttcttcaaccagatcaacatgctgtacggcaccatcaccgagttctgcaccgaggccagctgccccgtgatgagcgccggccccagatacgagtaccactgggccgacggcaccaacatcaagaagcccatcaagtgcagcgcccccaagtacatcgactacctgatgacctgggtgcaggaccagctggacgacgagaccctgttccccagcaagatcggcgtgcccttccccaagaacttcatgagcgtggccaagaccatcctgaagagactgttcagagtgtacgcccacatctaccaccagcacttcgacagcgtgatgcagctgcaggaggaggcccacctgaacaccagcttcaagcacttcatcttcttcgtgcaggagttcaacctgatcgacagaagagagctggcccccctgcaggagctgatcgagaagctgggcagcaaggacagatag

SEQ ID NO: 197186 - DNA, 651 bp, Artificial Sequence
  derived and/or modified sequence
atgtcattcctgttctcatcacgcagctcaaagacctttaagcctaagaagaatatccccgaaggcagccaccaatacgaactgctgaagcacgcagaagccaccttaggctctggcaatctgcgccaggctgttatgttacctgaaggcgaggatttgaacgaatggatagctgtcaatacagttgacttctttaatcagattaatatgctgtatggtacgatcaccgaattctgcaccgaggctagttgccctgtgatgtccgccgggccaagatacgaataccattgggccgacgggacgaacatcaaaaagccaatcaagtgttcggccccaaagtatatcgactatctgatgacctgggtgcaggatcagttggacgatgaaacactattcccaagcaaaatcggcgtgccatttccaaagaattttatgtccgtagccaagacaatcctcaaaaggctttttcgcgtgtatgcacacatctatcatcagcattttgactctgtgatgcaactgcaggaagaagcccacctgaacacttctttcaagcattttatcttcttcgtgcaggaatttaatctcatcgatagacgggaactggctccattacaggaactgattgaaaagttaggaagtaaggaccgctag

SEQ ID NO: 197187 - DNA, 651 bp, Artificial Sequence
  derived and/or modified sequence
atgtccttcctgttcagcagccgcagcagcaagaccttcaagcccaagaagaacatccctgagggcagccaccagtatgagctgctgaagcacgccgaggccaccctgggcagcggcaacctgcggcaggccgtgatgctgcctgaaggagaggacctgaatgagtggattgctgtgaacacagtggacttcttcaaccagatcaacatgctgtatggcaccatcacagagttctgcacagaggccagctgccctgtgatgtctgctggccccaggtatgagtaccactgggcagatggcaccaacatcaagaagcccatcaagtgcagcgcccccaagtacatcgactacctgatgacctgggtgcaggaccagctggatgatgagaccctcttccccagcaagattggagtgcccttccccaagaacttcatgtctgtggccaagaccatcctgaagaggctcttccgggtgtatgcccacatctaccaccagcactttgattctgtgatgcagctgcaggaggaggcccacctgaacaccagcttcaagcacttcatcttctttgtgcaggagttcaacctgattgaccggcgggagctggcccccctgcaggagctgattgagaagctgggcagcaaggacagatag

SEQ ID NO: 197188 - DNA, 651 bp, Artificial Sequence
  derived and/or modified sequence
atgagcttcctgttcagcagccggagcagcaagaccttcaagcccaagaagaacataccagaaggctcacaccagtacgagttactcaaacacgcagaggcaactttgggttctggaaacctgagacaggctgtgatgttacccgagggcgaagatctgaacgagtggatcgcagtgaacaccgttgatttctttaatcaaattaacatgctgtatggtacgatcacagagttctgcactgaggcatcttgtccggtcatgtctgccggcccgaggtatgagtaccattgggctgatggaacaaacataaaaaaaccgattaaatgtagcgcccctaagtatattgactatctcatgacttgggtccaggaccaactcgatgacgaaaccctgttcccgtctaagattggcgtcccattcccaaagaatttcatgagcgtggctaaaactattctgaagagactgtttcgggtgtatgcccatatttaccaccaacacttcgatagtgttatgcagttgcaagaagaagcacacctgaatacgtctttcaaacatttcattttctttgtgcaggaatttaacctgatcgaccgcagggagctcgcacctctgcaggagctaattgagaaattgggaagtaaggaccgctag

SEQ ID NO: 197189 - DNA, 2375 bp, Artificial Sequence
  derived and/or modified sequence
gcgaggtggggtaggcgggcaaggcgggcgccgaggtttgcaaaggctcgcagcggccagaaacccggctccgagcggcggcggcccggcttccgctgcccgtgagctaaggacggtccgctccctctagccagctccgaatcctgatccaggcgggggccaggggcccctcgcctcccctctgaggaccgaagatgagcttcctcttcagcagccgctcttctaaaacattcaaaccaaagaagaatatccctgaaggatctcatcagtatgaactcttaaaacatgcagaagcaactctaggaagtgggaatctgagacaagctgttatgttgcctgagggagaggatctcaatgaatggattgctgtgaacactgtggatttctttaaccagatcaacatgttatatggaactattacagaattctgcactgaagcaagctgtccagtcatgtctgcaggtccgagatatgaatatcactgggcagatggtactaatattaaaaagccaatcaaatgttctgcaccaaaatacattgactatttgatgacttgggttcaagatcagcttgatgatgaaactctttttccttctaagattggtgtcccatttcccaaaaactttatgtctgtggcaaagactattctaaagcgtctgttcagggtttatgcccatatttatcaccagcactttgattctgtgatgcagctgcaagaggaggcccacctcaacacctcctttaagcactttattttctttgttcaggagtttaatctgattgataggcgtgagctggcacctcttcaagaattaatagagaaacttggatcaaaagacagataaatgtttcttctagaacacagttacccccttgcttcatctattgctagaactatctcattgctatctgttatagactagtgatacaaactttaagaaaacaggataaaaagatacccattgcctgtgtctactgataaaattatcccaaaggtaggttggtgtgatagtttccgagtaagaccttaaggacacagccaaatcttaagtactgtgtgaccactcttgttgttatcacatagtcatacttggttgtaatatgtgatggttaacctgtagcttataaatttacttattattcttttactcatttactcagtcatttctttacaagaaaatgattgaatctgttttaggtgacagcacaatggacattaagaatttccatcaataatttatgaataagtttccagaacaaatttcctaataacacaatcagattggttttattcttttattttacgaataaaaaatgtatttttcagtatccttgagatttagaacatctgtgtcacttcagataacattttagtttcaagtttgtatggtagtgtttttatagataagatacgtctattttttcaaaattcatgattgcagtttaaatcatcatatgacgtgtgggtgggagcaaccaaagttatttttacagggactttattttttgatctttatttgagattgttttcatatctatctaaattattaggagtgtgtgtatcagaagtaattttttaatgtcttctaaggatggtcttccaggcttttaaactgaaaagcttaattcagatagtagcttttggctgagaaaaggaatccaaaatattaataaatttagatctcaaaaccactatttttattatttcattatttttcagaggccttaaaattctggataagagaatggaggaaaatactcagagtacttgattattttatttccttttattaaaaaattacttctatgtttttattgtctcttgagccttagttaagagtagtgtagaaatgcatgaacttcatcctaataaggataaaacttaaggaaaaccacaataaaccatgaaggtgtacacatcttataacacagataaagttttggtgtgctacctattcttgagagagtgagtgagtgtatgtgtttaaaggaaacaaaatgggagaaataagttttaaaaaaatcctcattttgttaatattcaaaagatggactgagcttccacttgggttttatcttgttttaattgtttttgtatcaaaacttgaaattcctctatttctattgggatataaaagccttccccttcagtgaagaaaacatttattttttatttgattcctaggatttagtaaactctagctgtctatttaaaatgtactgaggcacaacaagtattatactggaagacttgccaaactggcaaagctttaagttcatcagcattctatgtggttcagagctgtgatttttgcaaagtattttaccaacctcctcgatggctttgataaaggttagatttgatgttttttttt

SEQ ID NO: 197190 - DNA, 651 bp, Artificial Sequence
  derived and/or modified sequence
atgagctttctgtttagctcacgttcttccaaaacatttaagccaaagaagaatattccggagggtagccaccaatacgaactgctgaaacatgctgaggctacactcggttcagggaacctcaggcaagctgtgatgttacctgagggcgaggatttaaacgagtggatcgccgtgaatacagtggatttttttaatcagattaacatgctgtacggaaccatcactgagttctgcacagaagcctcctgccccgtcatgtccgcagggccaaggtatgagtaccactgggctgatggcaccaacatcaagaaacccattaagtgtagtgcccctaagtacatagactatctgatgacttgggtccaggaccagcttgacgacgagaccctctttccaagtaaaattggcgtgccattccccaagaatttcatgtccgtggctaaaaccatcctgaagagactgtttcgggtttatgcccacatataccaccagcacttcgatagcgtgatgcagctccaggaagaagcgcacctcaataccagttttaagcactttatattttttgtccaggagttcaaccttatcgataggagggaactcgccccactccaagaactgattgaaaagttaggttcaaaggatagatag

SEQ ID NO: 197191 - protein, 412 aa, Artificial Sequence
  derived and/or modified sequence
MLGIIPLPFGKPQPQSRRRPLRPPSASSASRPARGSLRRAMATSPQKSPSVPKSPTPKSPPSRKKDDSFLGKLGGTLARRKKAKEVSELQEEGMNAINLPLSPIPFELDPEDTMLEENEVRTMVDPNSRSDPKLQELMKVLIDWINDVLVGERIIVKDLAEDLYDGQVLQKLFEKLESEKLNVAEVTQSEIAQKQKLQTVLEKINETLKLPPRSIKWNVDSVHAKSLVAILHLLVALSQYFRAPIRLPDHVSIQVVVVQKREGILQSRQIQEEITGNTEALSGRHERDAFDTLFDHAPDKLNVVKKTLITFVNKHLNKLNLEVTELETQFADGVYLVLLMGLLEGYFVPLHSFFLTPDSFEQKVLNVSFAFELMQDGGLEKPKPRPEDIVNCDLKSTLRVLYNLFTKYRNVE

SEQ ID NO: 197192 - protein, 290 aa, Artificial Sequence
  derived and/or modified sequence
MNAINLPLSPIPFELDPEDTMLEENEVRTMVDPNSRSDPKLQELMKVLIDWINDVLVGERIIVKDLAEDLYDGQVLQKLFEKLESEKLNVAEVTQSEIAQKQKLQTVLEKINETLKLPPRSIKWNVDSVHAKSLVAILHLLVALSQYFRAPIRLPDHVSIQVVVVQKREGILQSRQIQEEITGNTEALSGRHERDAFDTLFDHAPDKLNVVKKVGKGCLGWTEGSEMQQNIGKTHPCSLRASCQNWWHHLTSAHTGLSPLPSMYLSVPHWMLHLGLFPSISMNSLSSHPG

SEQ ID NO: 197193 - protein, 372 aa, Artificial Sequence
  derived and/or modified sequence
MATSPQKSPSVPKSPTPKSPPSRKKDDSFLGKLGGTLARRKKAKEVSELQEEGMNAINLPLSPIPFELDPEDTMLEENEVRTMVDPNSRSDPKLQELMKVLIDWINDVLVGERIIVKDLAEDLYDGQVLQKLFEKLESEKLNVAEVTQSEIAQKQKLQTVLEKINETLKLPPRSIKWNVDSVHAKSLVAILHLLVALSQYFRAPIRLPDHVSIQVVVVQKREGILQSRQIQEEITGNTEYVSSRHKRDAFDTLFDHAPDKLNVVKKTLITFVNKHLNKLNLEVTELETQFADGVYLVLLMGLLEGYFVPLHSFFLTPDSFEQKVLNVSFAFELMQDGGLEKPKPRPEDIVNCDLKSTLRVLYNLFTKYRNVE

SEQ ID NO: 197194 - protein, 372 aa, Artificial Sequence
  derived and/or modified sequence
MATSPQKSPSVPKSPTPKSPPSRKKDDSFLGKLGGTLARRKKAKEVSELQEEGMNAINLPLSPIPFELDPEDTMLEENEVRTMVDPNSRSDPKLQELMKVLIDWINDVLVGERIIVKDLAEDLYDGQVLQKLFEKLESEKLNVAEVTQSEIAQKQKLQTVLEKINETLKLPPRSIKWNVDSVHAKSLVAILHLLVALSQYFRAPIRLPDHVSIQVVVVQKREGILQSRQIQEEITGNTEALSGRHERDAFDTLFDHAPDKLNVVKKTLITFVNKHLNKLNLEVTELETQFADGVYLVLLMGLLEGYFVPLHSFFLTPDSFEQKVLNVSFAFELMQDGGLEKPKPRPEDIVNCDLKSTLRVLYNLFTKYRNVE

SEQ ID NO: 197195 - DNA, 249 bp, Artificial Sequence
  derived and/or modified sequence
atgctgtgggatccggccttgccgcgcttagctgtgtacgccagctgtctgttcttttcctgcttggacgcccatgagggcccagttcacgggccaagaggtcgcggtgagggcggtcgagggtccgaacgacaaagagtgagaccgggcggagggggcggtgccgggtctgtgcacattcaccttgaggaagaggatggcgctgaggatcaagaccacagagatgaagactggataactaagaagtag

SEQ ID NO: 197196 - DNA, 1239 bp, Artificial Sequence
  derived and/or modified sequence
atgctcggcattatcccactccccttcgggaaaccacagccacagagtaggcgccgacctttgcggccgccttctgcctcttccgcctcccgccccgccagaggatcacttcgccgtgccatggcaacatcccctcagaagagtcctagcgtgccgaagtctcctacccctaagagtcctcccagtcgcaagaaagatgacagcttccttggcaagttgggcggcactctcgcccggcgtaaaaaggccaaagaggttagcgagctgcaggaagaggggatgaacgcgattaacctgccattatctccgattccctttgaactggatccagaggatacaatgctcgaggagaacgaggtccgaaccatggtagacccaaactcccggtcagacccaaagcttcaggagctgatgaaggtattgatagactggattaatgacgtcctggtgggagagagaatcatcgtgaaggatctggcagaggatctgtacgatggacaggtgctgcagaagctcttcgagaaactcgagtcagaaaagctgaacgttgccgaagttacacagagcgagatcgcacagaagcagaaactacagacggtgttagagaaaatcaatgaaacgttgaaattgccgccgcggtctatcaaatggaatgtcgacagcgtgcacgcaaagtccttagtcgctattctccacctactggtggcccttagccagtatttccgggcccccattcggctccccgatcacgtttctatacaagtagtcgtggttcagaaaagggaaggaattctccagtcacgtcagatccaggaggaaatcactggtaatacagaggcattatcgggcaggcacgagagagacgcctttgatacccttttcgatcatgcgccagataagctaaacgttgtgaagaagacactaataaccttcgttaataaacaccttaacaagctgaacttggaggttaccgaactggaaacccagtttgccgacggcgtatatctggttcttctcatgggcctcttggaagggtactttgtgcctttgcactctttctttctcaccccagattcattcgagcagaaggtgttgaatgtgtcctttgcctttgagctgatgcaggacggaggattggaaaagccaaaacctcgccccgaagacatcgttaactgtgatctgaagagtactttgcgtgtgctttacaatctcttcactaaataccggaatgtggagtag

SEQ ID NO: 197197 - DNA, 1119 bp, Artificial Sequence
  derived and/or modified sequence
atggcgacatcacctcagaagtccccgtctgtcccgaagagcccaaccccgaaatccccgcctagcaggaaaaaagatgatagcttcctcgggaaactaggtggcactttggccagacgtaagaaggcaaaagaagtgagcgaactccaggaggaaggcatgaatgctataaatctgcctctgagcccaatccccttcgaactggatccagaagataccatgctggaagagaatgaggtacggacaatggtcgaccctaactcccgttccgatcccaaactgcaggagcttatgaaggtactgatcgactggataaacgacgtgctggtcggcgaacgtataatcgtcaaggacttggccgaggacctctatgatggccaggttctgcaaaaactgtttgaaaagctcgaatcggaaaaactgaatgtagccgaggtgacacagtcggagattgcccagaaacagaaactgcagacagtgctggagaagatcaatgagacactaaagctgccaccaaggtccatcaagtggaacgtggacagcgtccacgcaaaatctctcgtggccattctgcacctgctggtcgctctgagccagtactttcgagcccccattcgactaccggaccacgtgtctattcaagtcgtggtcgtacagaagagggaaggaatcctgcagtcacgtcagatccaggaagaaataaccggaaatacagaatatgtttccagtagacacaaaagggatgccttcgacacattattcgatcacgctccagataaactgaacgtggtgaaaaagactctcatcacattcgtaaataaacatctgaataagctcaacctggaggtgacagaactagaaacacagttcgccgacggagtttacctggtattgcttatgggccttctcgagggctactttgttcctcttcatagttttttccttacgcccgatagcttcgagcagaaggtgttgaacgtcagcttcgcatttgaactaatgcaggacggtggactggagaagcccaagccaaggcctgaggatatagtcaactgcgatctgaagagcaccttaagagtgctgtacaacctttttaccaagtatagaaacgttgagtag

SEQ ID NO: 197198 - DNA, 1119 bp, Artificial Sequence
  derived and/or modified sequence
atggccacgagtcctcagaagtcaccatcggtgcccaaaagccccactcctaaaagcccgccctcccgaaagaaggacgacagcttcttgggaaaactaggcggaacattagcaagacgtaaaaaagcaaaggaggtcagcgaacttcaggaagaagggatgaacgctataaacctgcccttgagcccaatccctttcgagctggaccccgaggacacaatgcttgaggagaacgaagtgcgcactatggttgatccaaacagcaggagcgaccctaagctgcaagaacttatgaaggttttgattgactggatcaatgacgtcctggtcggggagagaatcatcgttaaggatttggctgaggacctgtatgatggtcaggtcctccagaagctttttgagaagcttgagtcagagaaacttaacgtggccgaagtcacacagagcgagatcgcccagaaacagaaactgcagaccgtgctcgagaaaattaacgaaacacttaagcttccccctcggagcattaaatggaacgtggactcagtgcacgcgaaatcactagtagctattctgcacttactggtagctctcagccagtattttcgagcacccatccggctgccagatcacgtcagcattcaagttgtggtcgttcagaaacgcgaggggatcctacagtccaggcagatacaggaggaaattaccggtaacactgaagcactctctgggaggcacgaacgggatgcctttgataccttgttcgatcatgccccggataagctgaatgtggtcaagaagacacttatcactttcgtgaataagcatttgaacaaacttaacctggaggttactgaactcgagactcagttcgcggatggggtgtatctagtgctcctcatgggccttctggaaggatacttcgtgcccctgcatagctttttccttactcctgattcttttgagcagaaagtgctgaatgtttcttttgccttcgaactaatgcaagatgggggcctggaaaagcccaagccaagaccagaagatattgtcaactgcgacctgaagagcaccttgcgtgtcttgtacaacctatttactaaatatagaaatgtagagtag

SEQ ID NO: 197199 - DNA, 1239 bp, Artificial Sequence
  derived and/or modified sequence
atgctgggcatcatccccctgccctttgggaagccccagccccagagcagaagaagacccctgcggcccccatctgccagcagcgccagcaggcctgcccggggcagcctgcggcgggccatggccaccagcccccagaagagccccagcgtgcccaagagccccacccccaagagcccccccagcaggaagaaggatgacagcttcctgggcaagctgggcggcaccctggcccggaggaagaaggccaaggaggtgtctgagctgcaggaggagggcatgaatgccatcaacctgcccctgagccccatcccctttgagctggaccctgaggacaccatgctggaggagaatgaggtgaggaccatggtggaccccaacagcagaagtgaccccaagctgcaggagctgatgaaggtgctgattgactggatcaatgatgtgctggtgggggagcgcatcatcgtgaaggacctggccgaggacctgtatgatggccaggtgctgcagaagctgtttgagaagctggagagcgagaagctgaatgtggccgaggtgacccagagcgagatcgcccagaagcagaagctgcagacagtgctggagaagatcaatgagaccctgaagctgcccccaagaagcatcaagtggaatgtggacagcgtgcacgccaagagcctggtggccatcctgcacctgctggtggccctgagccagtacttccgggcccccatccggctgcctgaccacgtgtccatccaggtggtggtggtgcagaagcgggagggcatcctgcagagccggcagatccaggaggagatcactggaaacacagaggccctgagcggcagacatgaaagagatgcctttgacaccctgtttgaccacgccccagacaagctgaatgtggtgaagaagaccctcatcacctttgtgaacaagcacctgaacaagctgaacctggaggtgacagagctggagacccagtttgctgatggagtgtacctggtgctgctgatgggcctgctggagggctactttgtgcccctgcacagcttcttcctgaccccagacagctttgagcagaaggtgctgaatgtgtcctttgcctttgagctgatgcaggacggcggcctggagaagcccaagcccaggccagaagatattgtgaactgtgacctgaagagcaccctgcgggtgctgtacaacctcttcaccaagtacagaaatgtggagtag

SEQ ID NO: 197200 - DNA, 1119 bp, Artificial Sequence
  derived and/or modified sequence
atggccaccagcccccagaagagccccagcgtgcccaagagccccacccccaagagcccccccagcaggaagaaggatgacagcttcctgggcaagctgggcggcaccctggcccggaggaagaaggccaaggaggtgtctgagctgcaggaggagggcatgaatgccatcaacctgcccctgagccccatcccctttgagctggaccctgaggacaccatgctggaggagaatgaggtgaggaccatggtggaccccaacagcagaagtgaccccaagctgcaggagctgatgaaggtgctgattgactggatcaatgatgtgctggtgggggagcgcatcatcgtgaaggacctggccgaggacctgtatgatggccaggtgctgcagaagctgtttgagaagctggagagcgagaagctgaatgtggccgaggtgacccagagcgagatcgcccagaagcagaagctgcagacagtgctggagaagatcaatgagaccctgaagctgcccccaagaagcatcaagtggaatgtggacagcgtgcacgccaagagcctggtggccatcctgcacctgctggtggccctgagccagtacttccgggcccccatccggctgcctgaccacgtgtccatccaggtggtggtggtgcagaagcgggagggcatcctgcagagccggcagatccaggaggagatcactggaaacacagaatatgtgagcagccgccacaagagagatgcctttgacaccctgtttgaccacgccccagacaagctgaatgtggtgaagaagaccctcatcacctttgtgaacaagcacctgaacaagctgaacctggaggtgacagagctggagacccagtttgctgatggagtgtacctggtgctgctgatgggcctgctggagggctactttgtgcccctgcacagcttcttcctgaccccagacagctttgagcagaaggtgctgaatgtgtcctttgcctttgagctgatgcaggacggcggcctggagaagcccaagcccaggccagaagatattgtgaactgtgacctgaagagcaccctgcgggtgctgtacaacctcttcaccaagtacagaaatgtggagtag

SEQ ID NO: 197201 - DNA, 1119 bp, Artificial Sequence
  derived and/or modified sequence
atggccaccagcccccagaagagccccagcgtgcccaagagccccacccccaagagcccccccagcaggaagaaggatgacagcttcctgggcaagctgggcggcaccctggcccggaggaagaaggccaaggaggtgtctgagctgcaggaggagggcatgaatgccatcaacctgcccctgagccccatcccctttgagctggaccctgaggacaccatgctggaggagaatgaggtgaggaccatggtggaccccaacagcagaagtgaccccaagctgcaggagctgatgaaggtgctgattgactggatcaatgatgtgctggtgggggagcgcatcatcgtgaaggacctggccgaggacctgtatgatggccaggtgctgcagaagctgtttgagaagctggagagcgagaagctgaatgtggccgaggtgacccagagcgagatcgcccagaagcagaagctgcagacagtgctggagaagatcaatgagaccctgaagctgcccccaagaagcatcaagtggaatgtggacagcgtgcacgccaagagcctggtggccatcctgcacctgctggtggccctgagccagtacttccgggcccccatccggctgcctgaccacgtgtccatccaggtggtggtggtgcagaagcgggagggcatcctgcagagccggcagatccaggaggagatcactggaaacacagaggccctgagcggcagacatgaaagagatgcctttgacaccctgtttgaccacgccccagacaagctgaatgtggtgaagaagaccctcatcacctttgtgaacaagcacctgaacaagctgaacctggaggtgacagagctggagacccagtttgctgatggagtgtacctggtgctgctgatgggcctgctggagggctactttgtgcccctgcacagcttcttcctgaccccagacagctttgagcagaaggtgctgaatgtgtcctttgcctttgagctgatgcaggacggcggcctggagaagcccaagcccaggccagaagatattgtgaactgtgacctgaagagcaccctgcgggtgctgtacaacctcttcaccaagtacagaaatgtggagtag

SEQ ID NO: 197202 - DNA, 1239 bp, Artificial Sequence
  derived and/or modified sequence
atgctgggcatcatccccctgcccttcggcaagccccagccccagtcacgcaggcgacccttgcggcctcctagcgcatcatccgcgtctcgtcctgctcggggcagcctgcggcgagctatggcgacctccccccaaaaatcaccgtctgttcctaaaagtcccactcccaagagccccccaagccggaaaaaggacgactcatttctgggtaaactcgggggcaccctcgctcgccgcaaaaaggcaaaggaggtctctgaactccaagaagagggcatgaacgccatcaacctacctttaagtcccattccgttcgagctggaccccgaggacactatgttagaggagaacgaagtccgcacaatggtggaccctaactctaggagcgatccaaaactgcaggaactcatgaaggtcctcatcgactggatcaatgacgtgttggtgggggaacggattatagtgaaggatttggccgaagacctgtacgatgggcaagtcctgcaaaagctgttcgagaaactggaaagcgaaaagctgaatgtggccgaggtcacacagagcgagatagctcagaagcagaaactccaaactgtgctcgaaaaaataaacgagacgctgaaactgcctcccaggtcgataaaatggaatgtggattctgtacacgcgaagagcctggttgccatcttacatctgctggtggcactatctcaatactttcgcgcccctattcgtttgcctgaccacgtgtctatacaggtcgtggtcgtgcaaaaacgggaggggatattgcaaagccgtcagatccaggaagaaattacgggaaataccgaagctctgagtggtcgccatgagcgcgatgcattcgacacattgttcgatcacgctccagacaaactgaacgtggtcaaaaagacccttatcactttcgtaaacaaacacctcaataaactgaacctggaagtgacagagctggaaactcaatttgccgatggcgtgtatctagttcttctaatgggtctacttgagggctattttgtgccactgcactcattctttctaactccagactcctttgagcagaaagtcttgaacgtctctttcgcgtttgaactcatgcaggacgggggtctggaaaagcccaagccccggccagaggacattgtcaactgcgacttaaaaagtacattacgggtactctacaatctgttcactaagtatcggaatgtcgagtag

SEQ ID NO: 197203 - DNA, 1119 bp, Artificial Sequence
  derived and/or modified sequence
atggccaccagcccccagaagagccccagcgtgcccaagagccccaccccaaagtctccaccaagcagaaaaaaagacgatagtttcttggggaagctggggggaaccttggcacgccggaagaaggctaaagaggtctcagagttgcaggaagagggcatgaatgcgattaacttgcccctgtcaccaattccgttcgaactggatcccgaggataccatgctggaggagaatgaagtacggaccatggtggatcctaactccaggagcgatcccaaactgcaggagctgatgaaagtactgatcgattggataaacgacgtgctggttggtgagcgaattatcgtgaaggatctcgccgaagatctctatgatggacaggttctccaaaaactcttcgaaaagctcgagtcagagaagctgaatgttgcagaagtgacacaaagtgagatcgcccaaaaacagaagctgcagactgtgttagagaaaattaatgagacactgaagctgccacctcgctccatcaagtggaacgtggattcagtacacgccaagtctctggtcgcaattctccaccttcttgtggccctgagtcagtacttccgcgctcctatacggcttccagaccacgtctcaattcaggtggtggtcgttcagaagagggaaggcatcctacaatctcgacaaattcaggaggagatcactggtaatacagaatatgtctctagcaggcacaagcgcgatgcttttgataccctgttcgatcacgctcctgacaaattaaatgtagtgaagaaaacactgatcaccttcgtgaataagcacctaaataagttgaaccttgaggtgacagagctggagacgcaattcgccgacggcgtgtaccttgttctgctgatgggattactggaagggtactttgttcccctccattctttctttctcacaccagacagtttcgagcaaaaggttctgaatgtctcgttcgcctttgagcttatgcaggacggcggcttagagaaacccaaaccccgcccggaggatattgtgaattgtgacttaaaatcaactctccgggtcctatacaatttgttcaccaagtatagaaacgttgaatag

SEQ ID NO: 197204 - DNA, 1119 bp, Artificial Sequence
  derived and/or modified sequence
atggccaccagcccccagaagagccccagcgtgcccaagagccccacgccaaagtcaccaccttcaagaaagaaggacgattctttcctgggaaagctaggtggaaccttagctcgccggaagaaagcgaaagaggttagcgagctccaggaagaaggcatgaatgcgatcaatctccctctgtcaccgatcccatttgaactggacccagaagacacaatgctggaagagaacgaggtgcgaaccatggtcgatccaaactccagatccgatcccaagttacaagagcttatgaaagttctcatcgactggatcaatgacgtgcttgtgggcgagaggatcatcgtcaaggatctggccgaggatctgtatgatggccaggttctgcagaagttgtttgagaagctggagtctgaaaagctcaatgttgccgaagtaacacagtctgaaatagcgcagaaacagaaactgcagactgttctggaaaagatcaatgagactctaaaactcccacccagatcgattaaatggaatgtggatagcgtgcatgctaaaagcctggtcgcaatcctgcatctgctcgtggccctctctcaatattttagggcacccattaggctacccgaccacgttagtattcaagtggtggtggtgcaaaagagagaaggtatacttcagtcaagacagattcaggaggaaataacgggtaacactgaagcattgtctggccgacatgagcgcgatgctttcgacacactttttgaccacgccccggacaagcttaacgtggttaaaaaaaccttaataacattcgttaacaagcatctcaataaactcaatttagaggtgaccgagctcgaaacccaattcgctgacggggtctacctagtgcttttaatggggctcctggagggttacttcgttccattgcatagtttttttctgactccagattcctttgagcagaaagtgcttaacgtgtcttttgctttcgaactaatgcaagatggtgggttggaaaaacccaaacccagaccggaggacatcgtcaactgcgatcttaagtccactctgagagtgctctataacctttttactaaatatcgtaatgttgagtag

SEQ ID NO: 197205 - DNA, 4458 bp, Artificial Sequence
  derived and/or modified sequence
acaggcagtagtgctggggcagagcgagctcaccagccgccggctggaagaccccgggagagtagcagggttgggttggttctcagatgtgttttgcgccaggctgtgtggtggggacagagcctgggtaaatgaagctttccggctcgaccgctcccaacctgggcacacacgtcctcctgtcctgcaaggggcagttttggggcatcctccctgcttggggcaacccaggggcgcaaggcgcggccccgggagcgcagctccttccagggcagagggcggcgcgagggagggagcgagggagggagcgagggaagggaaaggcgagcgtgagctgcctcaaatgcttggaataattccgcttccgtttggaaagccgcagcctcagtcccgccgccgcccgctgcgtccgcccagcgccagctccgcgtcccgaccggcccgcggcagcctgcgccgcgccatggccacctccccgcagaagtcgccttctgtccccaagtctcccactcccaagtcgcccccgtcccgcaagaaagatgattccttcttggggaaactcggagggaccctggcccggaggaagaaagccaaggaggtgtccgagctgcaggaggagggaatgaacgccatcaacctgcccctcagcccaattccctttgagctggaccccgaggacacgatgctggaggagaatgaggtgcgaacaatggtggatccaaactcacgcagtgaccccaagcttcaagaactgatgaaggtattaattgactggattaatgatgtgttggttggagaaagaatcattgtgaaagacctagctgaagatttgtatgatggacaagtcctgcagaagcttttcgagaaactggagagtgagaagctaaatgtggctgaggtcacccagtcagagattgctcagaagcaaaaactgcagactgtcctggagaagatcaatgaaaccctgaaacttcctcccaggagcatcaagtggaatgtggattctgttcatgccaagagcctggtggccatcttacacctgctcgttgctctgtctcagtatttccgcgcaccaattcgactcccagaccatgtttccatccaagtggttgtggtccagaaacgagaaggaatcctccagtctcggcaaatccaagaggaaataactggtaacacagaggctctttccgggaggcatgaacgtgatgcctttgacaccttgttcgaccatgccccagacaagctgaatgtggtgaaaaagacactcatcactttcgtgaacaagcacctgaataaactgaacctggaggtcacagaactggaaacccagtttgcagatggggtgtacctggtgctgctcatggggctcctggagggctactttgtgcccctgcacagcttcttcctgaccccggacagctttgaacagaaggtcttgaatgtctcctttgcctttgagctcatgcaagatggagggttggaaaagccaaaaccgcggccagaagacatagtcaactgtgacctgaaatctacactacgagtgttgtacaacctcttcaccaagtaccgtaacgtggagtgaggggctgccctgggcccaccactgcccaagagttcttgctgttggcgtactggaccctcctccgaactgccttaccctgcttattcctgtctcttgcactgtgctctcccacaagtccagctgcaacccagagatagtggaaactgaaattaggaaggaaatcatcaataactcagtgggctgacccatccctcccaggcgctggggaccaacctagcaatgaaggttgggaaggttgttcccttcccggtgccaggtccagatttccctccatgatttgggaaccagcttaggcaaaagagtccccacaagatgaaaataaagatcctagttaccattcaaaggatgctaactgtgtgtcaggccccacactaagtgctctgctctgatatactcaaggccattaatcttcaggactcccattgacgtaggtgtttcattccccttttacagatgaggaaactaaggcttggaggttaaatgacttgccagaagttggaatttttttcctctttgaacataacctctcccttctccctaaaggtaaccactattctgagtccaatcatcaaggttttgcttttctttttagctaagtatgcattcctcaatagtagacagtacaacatgtttataacaagccaattacattatgttctttgcatgttctaaagttgtgtatgtgtgtgcacatctgagcacgtgcacatgtacacctgagccaaaaacacgagaacccactgatctcaccactggggcaagctaggtcagagcttagtgattcacactgaaattggcaaattggatttaacccaattaatagtgtgtgtgtggcaggagtcatgtccctcacatcctttgtacaaatgaaaattactcttaattccttcagatttataataactctgtactttggtttcagggtgacatttgggaaggattttgtttagaattaatggagtggcacattttgcagcctttttgcttgattgcatgtaatggaaatgccctatattttcctgcaaaataagtactaaattcattatcgttaagcaaatgtacaatatgctcaggcaccgcagagagctgggcacgggcccatgtgagcatcactttggaagtagggctcttcaacagggacccttgaactttaaagaaaggaacttctttttgccttctaattgatcatttagactattctggctaagtctgcccacatgtaattaccggctaattcaagcgaggaaaaatgtaagtcatttagaccaaagccaagcagtttctttgcgtgggttactcaagggcttgtggttacttgtatctcctctatgtgaacttgactttgaaagacagagctctagtgtgccagcctgctaagtcctgtaagaatagggaagggcggaggggggtgggcagtgactaggggacgagaagcatggggaaaatatttgcactctaaacatacagagatagaggtggggcttgtggtacttaacacttgtagccatcaactgactgagaccttgggctaaataatcaattgtgctgatattacatctcgttatggaatgttcctaaatatgccaggtagacaccagcccaagtaccctcctccagaagtctgtgactaccttgtcactactttaggcccattccacaaagcccatctctggtttgagaattcattttgatctgtatctacaccacccaaagttaggcctcctataatgtccaaaacattcctttcagcctttttatttcttactgtactgtctcttactgtactgtctatctgcagtaattgaggacccataaaatttagataactacatgtctttgctcttagaattgtcactcagcataatgagcatttaacatacaaaggcaatgtactgttttgtgttgatctatgtaaaagaatacaattcttttttacataattagtgaaattttattttttattaggaaacactaaatagtgtaatatttcttttgcttttaaaaaaattcctggtagcaaatcaagataaataattgcttcattttcttgagcaatactgaagcaggatgaagtaagaggaatgcattcatttaaacatgctttgctttatgaattttgtctcttttttggtctctttttcttatattcaagttacaaatgtacaagtatccttactaagagtgctccttttgtattttacatatatacagtatgaaaatacattggaacactaggaaagtttttaaataacagttctaatttatcagaaaattgtgttttgggattgagttctttgtctcagcccagaatcccaggtcctgggcctggttttctaatgctgtcatctcagttcgatattttactttagaacctggaatctcctacttaatatatgaccatgactttgaaaggcaaaagaggaatcaagaataaataaaacaaacttaatcttcatctttaaaaaaaagaaaaaagaaaccaaaatgagaatcaacacttcataggctcactgggttttcttttcttttctgttaatttaaactcagttatttttaatgcttaatacatacatggtgcaaaatttaaaaagcgcaaataggtatctagtggaaaacctaagcctccctctctcctccggcacccattacctctccctggaggcaactgttttgatccatttcttacacacactgccagagatactctaggcatgtaaagcacaaacatacatataaaatctgcgggcttcaaaaaatataagtaggatgtcatctatactgtcatacactttgttttttatcacttaatgttatatcttggatattgtattaccctgggtattaaaaagaactcctttcacattttaaaataacaa

SEQ ID NO: 197206 - DNA, 1544 bp, Artificial Sequence
  derived and/or modified sequence
gcagcctcagtcccgccgccgcccgctgcgtccgcccagcgccagctccgcgtcccgaccggcccgcggcagcctgcgccgcgccatggccacctccccgcagaagtcgccttctgtccccaagtctcccactcccaagtcgcccccgtcccgcaagaaagatgattccttcttggggaaactcggagggaccctggcccggaggaagaaagccaaggaggtgtccgagctgcaggaggagggaatgaacgccatcaacctgcccctcagcccaattccctttgagctggaccccgaggacacgatgctggaggagaatgaggtgcgaacaatggtggatccaaactcacgcagtgaccccaagcttcaagaactgatgaaggtattaattgactggattaatgatgtgttggttggagaaagaatcattgtgaaagacctagctgaagatttgtatgatggacaagtcctgcagaagcttttcgagaaactggagagtgagaagctaaatgtggctgaggtcacccagtcagagattgctcagaagcaaaaactgcagactgtcctggagaagatcaatgaaaccctgaaacttcctcccaggagcatcaagtggaatgtggattctgttcatgccaagagcctggtggccatcttacacctgctcgttgctctgtctcagtatttccgcgcaccaattcgactcccagaccatgtttccatccaagtggttgtggtccagaaacgagaaggaatcctccagtctcggcaaatccaagaggaaataactggtaacacagagtatgtcagttcccggcacaaacgtgatgcctttgacaccttgttcgaccatgccccagacaagctgaatgtggtgaaaaagacactcatcactttcgtgaacaagcacctgaataaactgaacctggaggtcacagaactggaaacccagtttgcagatggggtgtacctggtgctgctcatggggctcctggagggctactttgtgcccctgcacagcttcttcctgaccccggacagctttgaacagaaggtcttgaatgtctcctttgcctttgagctcatgcaagatggagggttggaaaagccaaaaccgcggccagaagacatagtcaactgtgacctgaaatctacactacgagtgttgtacaacctcttcaccaagtaccgtaacgtggagtgaggggctgccctgggcccaccactgcccaagagttcttgctgttggcgtactggaccctcctccgaactgccttaccctgcttattcctgtctcttgcactgtgctctcccacaagtccagctgcaacccagagatagtggaaactgaaattaggaaggaaatcatcaataactcagtgggctgacccatccctcccaggcgctggggaccaacctagcaatgaaggttgggaaggttgttcccttcccggtgccaggtccagatttccctccatgatttgggaaccagcttaggcaaaagagtccccacaagatgaaaataaagatcctagttaccattc

SEQ ID NO: 197207 - DNA, 3106 bp, Artificial Sequence
  derived and/or modified sequence
cagcgccagctccgcgtcccgaccggcccgcggcagcctgcgccgcgccatggccacctccccgcagaagtcgccttctgtccccaagtctcccactcccaagtcgcccccgtcccgcaagaaagatgattccttcttggggaaactcggagggaccctggcccggaggaagaaagccaaggaggtgtccgagctgcaggaggagggaatgaacgccatcaacctgcccctcagcccaattccctttgagctggaccccgaggacacgatgctggaggagaatgaggtgcgaacaatggtggatccaaactcacgcagtgaccccaagcttcaagaactgatgaaggtattaattgactggattaatgatgtgttggttggagaaagaatcattgtgaaagacctagctgaagatttgtatgatggacaagtcctgcagaagcttttcgagaaactggagagtgagaagctaaatgtggctgaggtcacccagtcagagattgctcagaagcaaaaactgcagactgtcctggagaagatcaatgaaaccctgaaacttcctcccaggagcatcaagtggaatgtggattctgttcatgccaagagcctggtggccatcttacacctgctcgttgctctgtctcagtatttccgcgcaccaattcgactcccagaccatgtttccatccaagtggttgtggtccagaaacgagaaggaatcctccagtctcggcaaatccaagaggaaataactggtaacacagaggctctttccgggaggcatgaacgtgatgcctttgacaccttgttcgaccatgccccagacaagctgaatgtggtgaaaaagacactcatcactttcgtgaacaagcacctgaataaactgaacctggaggtcacagaactggaaacccagtttgcagatggggtgtacctggtgctgctcatggggctcctggagggctactttgtgcccctgcacagcttcttcctgaccccggacagctttgaacagaaggtcttgaatgtctcctttgcctttgagctcatgcaagatggagggttggaaaagccaaaaccgcggccagaagacatagtcaactgtgacctgaaatctacactacgagtgttgtacaacctcttcaccaagtaccgtaacgtggagtgaggggctgccctgggcccaccactgcccaagagttcttgctgttggcgtactggaccctcctccgaactgccttaccctgcttattcctgtctcttgcactgtgctctcccacaagtccagctgcaacccagagatagtggaaactgaaattaggaaggaaatcatcaataactcagtgggctgacccatccctcccaggcgctggggaccaacctagcaatgaaggttgggaaggttgttcccttcccggtgccaggtccagatttccctccatgatttgggaaccagcttaggcaaaagagtccccacaagatgaaaataaagatcctagttaccattcaaaggatgctaactgtgtgtcaggccccacactaagtgctctgctctgatatactcaaggccattaatcttcaggactcccattgacgtaggtgtttcattccccttttacagatgaggaaactaaggcttggaggttaaatgacttgccagaagttggaatttttttcctctttgaacataacctctcccttctccctaaaggtaaccactattctgagtccaatcatcaaggttttgcttttctttttagctaagtatgcattcctcaatagtagacagtacaacatgtttataacaagccaattacattatgttctttgcatgttctaaagttgtgtatgtgtgtgcacatctgagcacgtgcacatgtacacctgagccaaaaacacgagaacccactgatctcaccactggggcaagctaggtcagagcttagtgattcacactgaaattggcaaattggatttaacccaattaatagtgtgtgtgtggcaggagtcatgtccctcacatcctttgtacaaatgaaaattactcttaattccttcagatttataataactctgtactttggtttcagggtgacatttgggaaggattttgtttagaattaatggagtggcacattttgcagcctttttgcttgattgcatgtaatggaaatgccctatattttcctgcaaaataagtactaaattcattatcgttaagcaaatgtacaatatgctcaggcaccgcagagagctgggcacgggcccatgtgagcatcactttggaagtagggctcttcaacagggacccttgaactttaaagaaaggaacttctttttgccttctaattgatcatttagactattctggctaagtctgcccacatgtaattaccggctaattcaagcgaggaaaaatgtaagtcatttagaccaaagccaagcagtttctttgcgtgggttactcaagggcttgtggttacttgtatctcctctatgtgaacttgactttgaaagacagagctctagtgtgccagcctgctaagtcctgtaagaatagggaagggcggaggggggtgggcagtgactaggggacgagaagcatggggaaaatatttgcactctaaacatacagagatagaggtggggcttgtggtacttaacacttgtagccatcaactgactgagaccttgggctaaataatcaattgtgctgatattacatctcgttatggaatgttcctaaatatgccaggtagacaccagcccaagtaccctcctccagaagtctgtgactaccttgtcactactttaggcccattccacaaagcccatctctggtttgagaattcattttgatctgtatctacaccacccaaagttaggcctcctataatgtccaaaacattcctttcagcctttttatttcttactgtactgtctcttactgtactgtctatctgcagtaattgaggacccataaaatttagataactacatgtctttgctcttagaattgtcactcagcataatgagcatttaacatacaaaggcaatgtactgttttgtgttgatctatgtaaaagaatacaattcttttttacat

SEQ ID NO: 197208 - DNA, 1239 bp, Artificial Sequence
  derived and/or modified sequence
atgctgggaatcataccgcttcccttcgggaagccacagccccagtctcggaggcggcctctacgccctcccagtgcctcaagtgcaagtagaccagctcgcggaagcctccggcgagccatggctacttccccccagaagtccccctcagtccctaaatctcccaccccaaagtccccaccttcccggaagaaggatgattcctttctcggcaaactgggcggaacgttagcgaggagaaagaaagcaaaggaagtgtcagagctccaggaggagggcatgaatgctatcaacctgcccttatcccctattccattcgaactcgacccggaggatacaatgttggaagagaacgaagtaaggactatggtggatcccaattcccgatctgaccctaaactgcaagagctcatgaaggtgctgatcgattggatcaatgacgtgctggtgggtgaaaggatcattgtgaaggatctcgcagaggacctatacgacggccaagttctccagaaattgtttgaaaaactggagtcagaaaagctgaacgtcgctgaggtgacacagagcgaaatcgcgcagaaacagaagctgcagactgttttggagaagattaacgagacgctgaaactcccccctcgtagcattaaatggaatgtcgatagcgtccacgcgaagtcactggtggccatcttgcaccttttggtcgccctatcgcagtatttcagagcacctatccggttgcctgaccacgtcagcatccaagtcgtcgtcgtacaaaagcgggagggaatcctccagtccagacagatacaagaggaaatcactggcaacactgaggcccttagtggtcgccacgagcgagacgcctttgacacactgtttgaccacgcccctgataaacttaacgtagtgaaaaagacgctgattacatttgtgaacaagcacttgaacaagctcaaccttgaagtgaccgaattggagactcagtttgctgatggggtgtatctggtgctcctgatgggccttctagagggatacttcgtccccctacacagtttttttctgacccctgactccttcgaacagaaagtccttaatgtcagtttcgcttttgagcttatgcaggatggcggtctggagaaacccaaacccaggcctgaggacattgttaactgcgatctgaaatcaacccttcgtgtactatacaatctcttcacaaaatatcgcaacgttgagtag

SEQ ID NO: 197209 - DNA, 1119 bp, Artificial Sequence
  derived and/or modified sequence
atggccacatcaccacagaagagtccctctgtcccaaagagccccactcccaagagccctccatcccggaagaaggatgacagctttctgggaaaactcggagggacactggctcgcagaaagaaggcaaaagaggtttccgagctgcaggaggaagggatgaacgctatcaacctcccactaagccccatccccttcgaacttgacccagaagatactatgttggaagaaaacgaggtccgcactatggtggatcctaactcccgatctgatcccaagctccaggagctgatgaaagtcctcatcgactggatcaatgacgtgttggtcggagaacgaattattgtgaaagatctggccgaggacctgtacgatggacaggtcttacagaaactctttgaaaaactggaaagtgaaaagctcaacgtcgccgaggtgactcaatcggaaattgcccagaagcagaagctacagacagtgctggagaaaattaacgaaactctcaaactaccaccaaggtcaatcaagtggaacgtcgattcagtgcacgctaagagtctggttgcaatcctgcatttacttgtagcactgagtcagtacttccgggcaccaatccggctccccgaccacgtgtccattcaagttgtagttgtgcagaaaagagagggaatcctgcagtcccgccagattcaggaagagatcaccggtaacactgagtatgtgtctagccggcataagcgggacgccttcgacactctgtttgatcacgcgcctgacaaactgaacgttgtaaagaagaccctgatcacttttgttaacaaacacttgaataagctgaatcttgaggttactgagctcgaaactcagtttgcagatggcgtctatctggtccttctaatgggtttgttggagggctatttcgtgcctctgcattctttttttcttacacccgacagcttcgaacagaaagttctcaatgtgagtttcgcattcgaactgatgcaggatggtggcttggaaaagcctaaacctaggcctgaggacatcgtcaactgcgacctgaaatccactctgcgagtgctgtacaatttgtttacaaaatacagaaacgttgaatag

SEQ ID NO: 197210 - DNA, 1119 bp, Artificial Sequence
  derived and/or modified sequence
atggctacctctccacaaaagagcccaagcgtacccaagtcaccgacacccaaaagtcctccttcgaggaagaaagatgatagcttcttgggaaagctcggcggtactctggcacgcagaaaaaaagctaaggaggtgagtgaattgcaggaagagggaatgaacgcgattaatttgcctttaagcccaatcccattcgaactcgatcccgaggatacaatgctggaggagaacgaggtccggaccatggtggatcccaatagccgctccgacccaaagctccaggaacttatgaaagtccttattgattggattaatgacgtgctagtgggggagcgcatcatcgtgaaggatctggcagaagatctgtacgacgggcaggttctgcagaagctctttgagaaactcgagtccgaaaagctaaacgtggcggaggttactcagagcgagatcgcacagaaacaaaaactgcagaccgtgctggaaaagatcaacgagaccctgaaactgccgccaaggagtattaaatggaacgttgacagtgtccatgccaagtcactcgtggccatcctccacctactggtggcactaagccagtacttccgggctccaattaggctacccgaccatgtatccatccaagtggtggtggtgcagaagcgggaaggaattctacagagtagacaaatccaggaagagattacaggaaacacagaagccctgtctggacgccacgagagagacgccttcgacactctgttcgaccatgcacctgacaagttaaatgtggtcaaaaaaacactgatcacatttgttaacaaacacctgaataagcttaacctcgaagttaccgaactcgagacccagtttgccgatggcgtatatctcgtccttctgatggggctactggaaggttacttcgttccactccactctttcttcctgacaccggattcttttgaacagaaggtgctgaatgtcagctttgccttcgagctcatgcaggacggcggactcgaaaagccaaagccacggccagaggacatagtgaactgtgatttgaagagtaccctgcgtgtcctgtataacctgttcaccaagtacaggaacgttgaatag

SEQ ID NO: 197211 - DNA, 1239 bp, Artificial Sequence
  derived and/or modified sequence
atgctgggcatcatccccctgcccttcggcaagccccagccccagagcagaagaagacccctgagaccccccagcgccagcagcgccagcagacccgccagaggcagcctgagaagagccatggccaccagcccccagaagagccccagcgtgcccaagagccccacccccaagagcccccccagcagaaagaaggacgacagcttcctgggcaagctgggcggcaccctggccagaagaaagaaggccaaggaggtgagcgagctgcaggaggagggcatgaacgccatcaacctgcccctgagccccatccccttcgagctggaccccgaggacaccatgctggaggagaacgaggtgagaaccatggtggaccccaacagcagaagcgaccccaagctgcaggagctgatgaaggtgctgatcgactggatcaacgacgtgctggtgggcgagagaatcatcgtgaaggacctggccgaggacctgtacgacggccaggtgctgcagaagctgttcgagaagctggagagcgagaagctgaacgtggccgaggtgacccagagcgagatcgcccagaagcagaagctgcagaccgtgctggagaagatcaacgagaccctgaagctgccccccagaagcatcaagtggaacgtggacagcgtgcacgccaagagcctggtggccatcctgcacctgctggtggccctgagccagtacttcagagcccccatcagactgcccgaccacgtgagcatccaggtggtggtggtgcagaagagagagggcatcctgcagagcagacagatccaggaggagatcaccggcaacaccgaggccctgagcggcagacacgagagagacgccttcgacaccctgttcgaccacgcccccgacaagctgaacgtggtgaagaagaccctgatcaccttcgtgaacaagcacctgaacaagctgaacctggaggtgaccgagctggagacccagttcgccgacggcgtgtacctggtgctgctgatgggcctgctggagggctacttcgtgcccctgcacagcttcttcctgacccccgacagcttcgagcagaaggtgctgaacgtgagcttcgccttcgagctgatgcaggacggcggcctggagaagcccaagcccagacccgaggacatcgtgaactgcgacctgaagagcaccctgagagtgctgtacaacctgttcaccaagtacagaaacgtggagtag

SEQ ID NO: 197212 - DNA, 1119 bp, Artificial Sequence
  derived and/or modified sequence
atggccaccagcccccagaagagccccagcgtgcccaagagccccacccccaagagcccccccagcagaaagaaggacgacagcttcctgggcaagctgggcggcaccctggccagaagaaagaaggccaaggaggtgagcgagctgcaggaggagggcatgaacgccatcaacctgcccctgagccccatccccttcgagctggaccccgaggacaccatgctggaggagaacgaggtgagaaccatggtggaccccaacagcagaagcgaccccaagctgcaggagctgatgaaggtgctgatcgactggatcaacgacgtgctggtgggcgagagaatcatcgtgaaggacctggccgaggacctgtacgacggccaggtgctgcagaagctgttcgagaagctggagagcgagaagctgaacgtggccgaggtgacccagagcgagatcgcccagaagcagaagctgcagaccgtgctggagaagatcaacgagaccctgaagctgccccccagaagcatcaagtggaacgtggacagcgtgcacgccaagagcctggtggccatcctgcacctgctggtggccctgagccagtacttcagagcccccatcagactgcccgaccacgtgagcatccaggtggtggtggtgcagaagagagagggcatcctgcagagcagacagatccaggaggagatcaccggcaacaccgagtacgtgagcagcagacacaagagagacgccttcgacaccctgttcgaccacgcccccgacaagctgaacgtggtgaagaagaccctgatcaccttcgtgaacaagcacctgaacaagctgaacctggaggtgaccgagctggagacccagttcgccgacggcgtgtacctggtgctgctgatgggcctgctggagggctacttcgtgcccctgcacagcttcttcctgacccccgacagcttcgagcagaaggtgctgaacgtgagcttcgccttcgagctgatgcaggacggcggcctggagaagcccaagcccagacccgaggacatcgtgaactgcgacctgaagagcaccctgagagtgctgtacaacctgttcaccaagtacagaaacgtggagtag

SEQ ID NO: 197213 - DNA, 1119 bp, Artificial Sequence
  derived and/or modified sequence
atggccaccagcccccagaagagccccagcgtgcccaagagccccacccccaagagcccccccagcagaaagaaggacgacagcttcctgggcaagctgggcggcaccctggccagaagaaagaaggccaaggaggtgagcgagctgcaggaggagggcatgaacgccatcaacctgcccctgagccccatccccttcgagctggaccccgaggacaccatgctggaggagaacgaggtgagaaccatggtggaccccaacagcagaagcgaccccaagctgcaggagctgatgaaggtgctgatcgactggatcaacgacgtgctggtgggcgagagaatcatcgtgaaggacctggccgaggacctgtacgacggccaggtgctgcagaagctgttcgagaagctggagagcgagaagctgaacgtggccgaggtgacccagagcgagatcgcccagaagcagaagctgcagaccgtgctggagaagatcaacgagaccctgaagctgccccccagaagcatcaagtggaacgtggacagcgtgcacgccaagagcctggtggccatcctgcacctgctggtggccctgagccagtacttcagagcccccatcagactgcccgaccacgtgagcatccaggtggtggtggtgcagaagagagagggcatcctgcagagcagacagatccaggaggagatcaccggcaacaccgaggccctgagcggcagacacgagagagacgccttcgacaccctgttcgaccacgcccccgacaagctgaacgtggtgaagaagaccctgatcaccttcgtgaacaagcacctgaacaagctgaacctggaggtgaccgagctggagacccagttcgccgacggcgtgtacctggtgctgctgatgggcctgctggagggctacttcgtgcccctgcacagcttcttcctgacccccgacagcttcgagcagaaggtgctgaacgtgagcttcgccttcgagctgatgcaggacggcggcctggagaagcccaagcccagacccgaggacatcgtgaactgcgacctgaagagcaccctgagagtgctgtacaacctgttcaccaagtacagaaacgtggagtag

SEQ ID NO: 197214 - protein, 623 aa, Artificial Sequence
  derived and/or modified sequence
MERPEEGKQSPPPQPWGRLLRLGAEEGEPHVLLRKREWTIGRRRGCDLSFPSNKLVSGDHCRIVVDEKSGQVTLEDTSTSGTVINKLKVVKKQTCPLQTGDVIYLVYRKNEPEHNVAYLYESLSEKQGMTQESFEMVPCCVAQAGLKLLGSSDPPTLASQSIVITGSGGGGISPKGSGPSVASDEVSSFASALPDRKTASFSSLEPQDQEDLEPVKKKMRGDGDLDLNGQLLVAQPRRNAQTVHEDVRAAAGKPDKMEETLTCIICQDLLHDCVSLQPCMHTFCAACYSGWMERSSLCPTCRCPVERICKNHILNNLVEAYLIQHPDKSRSEEDVQSMDARNKITQDMLQPKVRRSFSDEEGSSEDLLELSDVDSESSDISQPYVVCRQCPEYRRQAAQPPHCPAPEGEPGAPQALGDAPSTSVSLTTAVQDYVCPLQGSHALCTCCFQPMPDRRAEREQDPRVAPQQCAVCLQPFCHLYWGCTRTGCYGCLAPFCELNLGDKCLDGVLNNNSYESDILKNYLATRGLTWKNMLTESLVALQRGVFLLSDYRVTGDTVLCYCCGLRSFRELTYQYRQNIPASELPVAVTSRPDCYWGRNCRTQVKAHHAMKFNHICEQTRFKN

SEQ ID NO: 197215 - DNA, 1872 bp, Artificial Sequence
  derived and/or modified sequence
atggaaagaccagaggagggtaaacagtctccccctcctcaaccctggggaagactgttgcggttaggcgcagaagagggggagccccacgtgctgcttcgcaagagggagtggacgatcgggcggcggagaggttgtgacctgagcttcccatccaacaagttggtgtctggagaccattgtagaattgtggtggacgagaagagtgggcaagtgactctcgaggacacatcaacctctggtactgtgattaacaaactaaaggtggttaagaagcagacttgcccactgcaaaccggcgatgttatttacctggtgtaccgaaagaacgaacctgagcataatgttgcgtatctgtacgagtctctctctgaaaaacaagggatgacccaagagagttttgaaatggtgccttgctgcgtcgctcaagctggcctaaaactgctcgggagcagcgatccccctaccctggcctcccaaagcatagtgattaccgggtctggaggcggcggaatcagccccaaagggtctggaccgtctgtggcgagcgacgaagtcagctcatttgcctctgctttgcctgatcgcaagacggcaagcttcagctccctggagccgcaggaccaagaagatctcgaacccgtgaaaaaaaagatgcggggggatggagacctggacttgaatggccagctgcttgttgcacagcctcgacggaacgcacagactgttcacgaggatgttagagctgccgcaggcaaacctgacaagatggaggagaccttaacatgtataatctgccaggatctcctgcatgattgtgtgagcttacagccatgcatgcacactttctgtgccgcctgctattccgggtggatggagaggagctccctctgtccaacatgcaggtgccccgttgagcgaatctgtaaaaaccacattcttaataacttggtggaggcatatctgatccagcatccagacaagtccagatcagaggaggacgtccagagcatggacgctaggaataagataactcaagatatgttgcagcctaaggtgcgccgctctttttccgatgaagaaggtagctccgaggacctcctcgagctgagcgacgtcgattctgagagtagtgatatctctcaaccttatgtggtctgcaggcagtgtcccgaatacagacgacaagcggctcagccacctcattgccccgctcccgagggcgagccaggcgctccccaggcactgggcgacgctccatcaacatcagtgtctctgacaaccgccgtgcaggattacgtgtgtcccctgcaaggaagccatgccttgtgtacctgctgctttcagcccatgccggaccgcagagcggagagggagcaggatcccagggtggcgccgcagcaatgcgccgtgtgcttacagcccttctgccatctgtactggggatgcacccgaactgggtgctacggctgtctagcacccttctgtgaactgaaccttggggacaagtgtctggatggcgtgttgaacaacaacagctatgagtcagacatcttaaaaaactatctcgctactagggggctgacgtggaaaaacatgctcactgagagcctggtcgccttgcagagaggcgtcttcctgctctccgactacagggtgaccggcgatacagtgttgtgctattgttgcggcctgcgttcctttcgagaacttacatatcagtacagacaaaacatcccagcttccgaactgcctgtagccgtgacatctagacccgactgctactggggacggaactgcagaactcaggttaaggcacatcatgcgatgaagtttaatcatatctgtgagcagacaagattcaagaactag

SEQ ID NO: 197216 - DNA, 1872 bp, Artificial Sequence
  derived and/or modified sequence
atggagaggcctgaggagggcaagcagagccccccaccccagccctggggccgcctgctgcggctgggcgctgaggagggggagccccacgtgctgctgaggaagcgggagtggaccatcggcagaagaagaggctgtgacctgtccttccccagcaacaagctggtgtctggggaccactgcagaattgtggtggatgagaagagcggccaggtgaccctggaggacaccagcaccagcggcaccgtcatcaacaagctgaaggtggtgaagaagcagacctgccccctgcagacaggagatgtgatctacctggtgtacaggaagaatgaacctgagcacaacgtggcctacctgtatgagagcctgtctgagaagcagggcatgacccaggagagctttgagatggtgccctgctgcgtggcccaggccggcctgaagctgctgggcagcagtgacccccccaccctggccagccagagcatcgtcatcactggaagtggcggcggcggcatcagccccaagggcagcggccccagcgtggccagtgatgaggtgagcagctttgccagcgccctgcctgacaggaagacagccagcttcagcagcctggagccccaggaccaggaggacctggagcctgtgaagaagaagatgagaggagatggagacctggacctgaatggccagctgctggtggcccagcccaggagaaatgcccagacagtgcatgaagatgtgcgggctgctgctgggaagccagacaagatggaggagaccctgacctgcatcatctgccaggacctgctgcatgactgtgtgtccctgcagccctgcatgcacaccttctgtgccgcctgctacagcggctggatggagaggagcagcctgtgccccacctgccgctgccctgtggagcgcatctgcaagaaccacatcctgaacaacctggtggaggcctacctgatccagcacccagacaagagccgctcagaagaagatgtgcagagcatggatgccaggaacaagatcacccaggacatgctgcagcccaaggtgcggcgctccttcagtgatgaggagggcagcagcgaggacctgctggagctgagtgatgtggacagcgagagcagtgacatcagccagccctacgtggtgtgccggcagtgcccagagtaccgccggcaggccgcccagcccccccactgcccagcccctgagggggagcccggggccccccaggccctgggagatgcccccagcacctctgtgtccctgaccacagctgtgcaggactatgtgtgccccctgcagggcagccacgccctgtgcacctgctgcttccagcccatgccagaccggcgggcagagcgggagcaggacccccgggtggccccccagcagtgtgctgtgtgcctgcagcccttctgccacctgtactggggctgcaccaggacaggctgctacggctgcctggcccccttctgtgagctgaacctgggggacaagtgcctggatggagtgctgaacaacaacagctatgaaagtgacatcctgaagaactacctggccacccggggcctgacctggaagaacatgctgacagagagcctggtggccctgcagaggggcgtcttcctgctgagtgactacagagtgactggagacacagtgctgtgctactgctgcggcctgcgctccttccgggagctgacctaccagtaccggcagaacatcccagccagcgagctgcctgtggccgtgaccagcaggccagactgctactggggcaggaactgcaggacccaggtgaaggcccaccacgccatgaagttcaaccacatctgtgagcagacccgcttcaagaactag

SEQ ID NO: 197217 - DNA, 1872 bp, Artificial Sequence
  derived and/or modified sequence
atggagcggcccgaggagggcaagcagagcccccccccccagccctgggggcgcttgttgcggttaggggctgaagagggagaaccgcacgtcctcctcaggaagagggagtggaccattggccgtaggagaggctgcgatttatcctttccttccaataaactcgtgtctggcgaccattgcaggatcgttgtcgacgagaaatctggtcaggttacactggaagacaccagcacgtcaggtaccgttattaataaactgaaagtggtgaagaagcagacctgccctttgcagactggtgatgtcatctacctcgtgtatcgcaaaaacgagcccgagcacaatgtggcttatttatacgaatcactgtccgagaagcagggtatgacacaggaatcctttgaaatggtcccttgttgtgtcgcccaggcaggcctcaaactgctcggaagtagcgacccacctaccttagcatcacagagtatcgttatcactggctccgggggcggtggaatatccccaaaggggagtgggccctccgtcgcctctgatgaagtctccagcttcgcatcggctcttccggatcgcaaaaccgcatcattttcgagcctggagcctcaggatcaagaggacctagagccagtaaagaaaaaaatgagaggggacggagatcttgatctgaacggccagctgctggtggctcagcctcgacggaacgcacaaaccgttcacgaggacgtaagggctgctgctggcaaaccggacaagatggaggaaacccttacatgcataatttgccaagatctgctgcatgactgtgttagccttcagccctgcatgcacaccttttgcgccgcctgttatagcgggtggatggaacgtagtagtctgtgcccaacatgtcgctgccctgtggagcgtatttgcaagaatcacatcttaaacaaccttgttgaagcctatctcatacagcatccagacaaatcacgctctgaggaagatgttcagagtatggacgctcggaataagatcacacaggatatgctgcagcctaaggtgaggcgaagcttttccgatgaagagggctcttctgaagatctgctggagctgtccgacgtcgactccgaatcatctgatatttcacagccctatgtggtgtgccggcagtgtccagaatatagacgtcaggctgcccaacctccccattgcccagctcccgagggagaaccaggcgccccgcaggctttaggggacgccccaagtactagtgtctccttaaccactgctgttcaagattatgtttgtccactgcaaggaagtcacgccttatgtacttgttgtttccaacctatgccagacaggcgtgcagaaagggaacaggatcctcgcgttgcacctcagcagtgtgccgtgtgcctccagcccttctgtcatctgtactggggctgcaccagaaccggttgctacggctgcctcgcaccgttctgtgaattgaacctgggtgacaagtgcttagatggagtgctgaataataactcttacgagtctgatatcctcaagaactatcttgcaaccagaggtctgacatggaaaaacatgctaactgagtcactggttgccctgcagcgcggcgtctttcttctgagcgattatagggtcacgggcgataccgttttgtgctactgttgtggattaagaagtttccgcgaactgacttaccagtaccgccagaacattcctgcttctgagctccccgtggccgtgacaagtagacccgattgttattggggccggaattgccggacccaggtgaaagcacatcacgctatgaaattcaatcacatctgtgagcagacgcgcttcaaaaactag

SEQ ID NO: 197218 - DNA, 1872 bp, Artificial Sequence
  derived and/or modified sequence
atggagcggccagaagaggggaaacagagtcctccaccccaaccctggggcagactcctgagactgggggctgaggagggagaaccccatgtccttcttcgtaagagggagtggacaatcggcagaagaagaggctgcgacttgtcattcccctccaacaagctggtcagcggcgaccactgtaggatcgtggtggacgaaaagagcgggcaggtcacactcgaggacacatccacttccggcacagtcattaataaactgaaagtggttaagaaacagacatgtcccctgcagaccggagacgtcatttatttagtctatcggaagaatgaaccggagcacaacgttgcttacctgtatgagtctctgagcgaaaaacaagggatgacccaggaatcttttgagatggtgccctgttgcgttgctcaggctggactcaagctcctcggcagctcagacccccctacactggctagtcagtctatcgtcatcaccgggtccggcggaggcggtattagtcccaagggttccgggcctagcgttgcatccgatgaggtgagtagcttcgcatccgcgctacctgataggaagaccgcttctttctcaagcctcgagccccaggaccaggaagatttggagccagtcaagaagaagatgcggggagacggagatctagacctgaacggtcagttacttgttgcgcagccccgaagaaacgcccagacggtacacgaggatgtgagagcagcagctgggaaacctgacaagatggaggaaaccctaacatgcattatctgtcaggatttgctccatgactgtgtgagtctccagccatgcatgcacaccttctgtgccgcatgttattctggatggatggagcggtccagtctctgccctacctgtcggtgcccagttgagagaatttgcaagaatcacatactaaacaatctggttgaagcttatctgattcagcacccggataaatcacggtcagaggaggacgtgcagtctatggacgctaggaacaaaattacgcaggacatgctgcagccaaaggtcagacgttctttctctgacgaagaggggtccagcgaggatttgctggagcttagtgacgtcgactcggaaagcagcgacattagccagccttacgttgtgtgccgacagtgtccggagtaccggagacaggcggctcagccaccacattgcccggctcccgagggagaacctggtgcaccccaagccttgggcgatgccccaagcacatccgttagcctgacaactgccgtgcaggattatgtatgccctttacagggaagtcatgccctgtgtacttgttgctttcagccaatgcccgatagaagagctgaacgtgagcaggaccctcgcgtggctccacagcagtgtgcagtctgcctgcaaccattctgtcacctttattggggatgtaccaggacaggatgctacgggtgcctagcacctttttgcgagttgaatttaggagacaagtgtctggacggcgtcctaaacaataatagttacgagagcgacattctgaagaattatctggctacaaggggactgacctggaagaatatgcttacagagtcactggtggcgctgcagcggggagttttcctcttgtcagattaccgggtgacaggagataccgtgttatgctattgctgcgggttgcgctcctttcgggaactcacgtatcagtataggcagaacattccagcctccgagttgcctgtggccgttactagccgccctgactgctattgggggagaaattgccgaactcaagttaaagcacaccatgcaatgaaatttaatcacatctgcgagcagacgcgttttaagaactag

SEQ ID NO: 197219 - DNA, 3139 bp, Artificial Sequence
  derived and/or modified sequence
ctcttgacagcggcggcggcgcagccggttccgggttcggcgcggggcggggatgtgaatcccgatggagcggcccgaggaaggcaagcagtcgccgccgccgcagccctggggacggctcctgcgtctgggcgcggaggagggcgagccgcacgtcctcctgaggaagcgggagtggaccatcgggcggagacgaggttgcgacctttccttccccagcaataaactggtctctggagatcactgtagaattgtagtggatgaaaaatcaggtcaggtgacactggaagataccagcaccagtggaacagtgattaacaagctgaaggttgttaagaagcagacatgccctttacagactggggatgtcatctacttggtgtacaggaagaatgaaccggaacacaacgtggcatacctctatgaatctttaagtgaaaagcaaggcatgacacaagaatcctttgagatggtgccttgctgtgttgcccaggctggtctaaaactcctgggatcaagtgatcctcccaccttggcctcccaaagtattgtgattacagggtctgggggtggtggcatctcccctaaaggaagtggtccctctgtggcaagtgatgaagtctccagctttgcctcagctctcccagacagaaagactgcgtccttttcgtcgttggaaccccaggatcaggaggatttggagcccgtgaagaagaaaatgagaggagatggggaccttgacctgaacgggcagttgttggtcgcacaaccgcgtagaaatgcccaaaccgtccacgaggacgtcagagcagcggctgggaagccagacaagatggaggagacgctgacatgcatcatctgccaggacctgctgcacgactgcgtgagtttgcagccctgcatgcacacgttctgcgcggcttgctactcgggctggatggagcgctcgtccctgtgtcctacctgccgctgtcccgtggagcggatctgtaaaaaccacatcctcaacaacctcgtggaagcatacctcatccagcatccagacaagagtcgcagtgaagaagatgtgcaaagtatggatgccagaaataaaatcactcaagacatgctgcagcccaaagtcaggcggtctttttctgatgaagaagggagttcagaggacctgctggagctgtcagacgttgacagtgagtcctcagacattagccagccatacgtcgtgtgccggcagtgtcctgagtacagaaggcaggcggcgcagcctccccactgcccagcacccgagggcgagccaggagccccacaggccctgggggatgcaccctccacgtccgtcagcctgacgacagcagtccaggattacgtgtgccctctgcaaggaagccacgccctgtgcacctgctgcttccagcccatgcccgaccggagagcggagcgcgagcaggacccgcgtgtcgcccctcagcagtgtgcggtctgcctgcagcctttctgccacctgtactggggctgcacccggaccggctgctacggctgcctggccccgttttgtgagctcaacctgggtgacaagtgtctggacggcgtgctgaacaacaacagctacgagtcagacatcctgaagaattacctggcaaccagaggtttgacatggaaaaacatgttgaccgagagcctcgtggctctccagcggggagtgtttctgctgtctgattacagagtcacgggagacaccgttctgtgttactgctgtggcctgcgcagcttccgtgagctgacctatcagtatcggcagaacattcctgcttccgagttgccagtggccgtaacatcccgtcctgactgctactggggccgtaactgccgcactcaggtgaaagctcaccacgccatgaaattcaatcatatctgtgaacagacaaggttcaaaaactaagcatccagaggccctgagcagctttcagcactggaggtgaagagagcgtgtttttaaaatacagagacaagcacgtcaaggtgttttcacagccccctgagggaagggacgcagggtctccgacaggtgctctggggtgactcttctgtggagctttaccctctgagtgagaccctccccagagccccgggggccgcagcccgccctcctggtgagcgctgggcagggctcgtggtggcatcagcagcagagacgaagcctttctgtaacatgcggccgtcccgccgagaggggcagttttgctcttttgtacattttccgaaactacagttaaagcagaagtctgtttttaggaaaagtttcaagggagaagggcaagtttatcaaaaacattgtttcaggagaagggagcataagtttacagcctacaggacgtacacaatatcctgctgctgggaaaaccacagcattttatctattttttattttaataggtttggtgcttatcttctaataagatttaaatgtcacaaactgtagcacaaataatataatttataatttacaaattgactaaaattgggtatagtatggtatttgaaagaataagcatatgcttctgtttattaaaaaaagaaaccttccaatgtccaaaactgctaaccctcgacgtggccgccaagttagtcgctccttgctaaccggtgagtgaccgcggccccgagcctggggctggacgcaggtcccaggacatgctgctcccttgtgtgagtgaccgcggccccgagcctggggctggacgcaggtcccaggacgtgctgctcccttgtgtgagtgaccacggccccaagcccagggctggaggcaggtcccaggacgcgccgctccctcatgctgcccgggcccttcctccaagaccctacagagcctgaggggcaccttggcttccgcctgtgctagctttgccatgtcatctggaataatacttgaaattttgatttttggaaaaaaaagttttttatcttttgttgaaatcacctgttatccttgtttgtaaactgataacttttttgcttcttctcaggaatacagttttcaactgttgtcttgctcttgatagaaactgagaagcagcaatctgtatttgtggaggaaagtcctctcttttgcatattctaataaatgagccgcgtttgctcctcc

SEQ ID NO: 197220 - DNA, 2446 bp, Artificial Sequence
  derived and/or modified sequence
agaatgctgatattcaggccaggcacggtggctcatgcctgtaatcccagcagtttgggaggccaaaacaggaggatctcttgaccctgttgcgacctttccttccccagcaataaactggtctctggagatcactgtagaattgtagtggatgaaaaatcaggtcaggtgacactggaagataccagcaccagtggaacagtgattaacaagctgaaggttgttaagaagcagacatgccctttacagactggggatgtcatctacttggtgtacaggaagaatgaaccggaacacaacgtggcatacctctatgaatctttaagtgaaaagcaaggcatgacacaagaatcctttgggtctgggggtggtggcatctcccctaaaggaagtggtccctctgtggcaagtgatgaagtctccagctttgcctcagctctcccagacagaaagactgcgtccttttcgtcgttggaaccccaggatcaggaggatttggagcccgtgaagaagaaaatgagaggagatggggaccttgacctgaacgggcagttgttggtcgcacaaccgcgtagaaatgcccaaaccgtccacgaggacgtcagagcagcggctgggaagccagacaagatggaggagacgctgacatgcatcatctgccaggacctgctgcacgactgcgtgagtttgcagccctgcatgcacacgttctgcgcggcttgctactcgggctggatggagcgctcgtccctgtgtcctacctgccgctgtcccgtggagcggatctgtaaaaaccacatcctcaacaacctcgtggaagcatacctcatccagcatccagacaagagtcgcagtgaagaagatgtgcaaagtatggatgccagaaataaaatcactcaagacatgctgcagcccaaagtcaggcggtctttttctgatgaagaagggagttcagaggacctgctggagctgtcagacgttgacagtgagtcctcagacattagccagccatacgtcgtgtgccggcagtgtcctgagtacagaaggcaggcggcgcagcctccccactgcccagcacccgagggcgagccaggagccccacaggccctgggggatgcaccctccacgtccgtcagcctgacgacagcagtccaggattacgtgtgccctctgcaaggaagccacgccctgtgcacctgctgcttccagcccatgcccgaccggagagcggagcgcgagcaggacccgcgtgtcgcccctcagcagtgtgcggtctgcctgcagcctttctgccacctgtactggggctgcacccggaccggctgctacggctgcctggccccgttttgtgtgtcgggcagacagtgctttcctgcgacatcattataaacaggtaacattgccccttcatctcggcagagctcaacctgggtgacaagtgtctggacggcgtgctgaacaacaacagctacgagtcagacatcctgaagaattacctggcaaccagaggtttgacatggaaaaacatgttgaccgagagcctcgtggctctccagcggggagtgtttctgctgtctgattacagagtcacgggagacaccgttctgtgttactgctgtggcctgcgcagcttccgtgagctgacctatcagtatcggcagaacattcctgcttccgagttgccagtggccgtaacatcccgtcctgactgctactggggccgtaactgccgcactcaggtgaaagctcaccacgccatgaaattcaatcatatctgtgaacagacaaggttcaaaaactaagcatccagaggccctgagcagctttcagcactggaggtgaagagagcgtgtttttaaaatacagagacaagcacgtcaaggtgttttcacagccccctgagggaagggacgcagggtctccgacaggtgctctggggtgactcttctgtggagctttaccctctgagtgagaccctccccagagccccgggggccgcagcccgccctcctggtgagcgctgggcagggctcgtggtggcatcagcagcagagacgaagcctttctgtaacatgcggccgtcccgccgagaggggcagttttgctcttttgtacattttccgaaactacagttaaagcagaagtctgtttttaggaaaagtttcaagggagaagggcaagtttatcaaaaacattgtttcaggagaagggagcataagtttacagcctacaggacgtacacaatatcctgctgctgggaaaaccacagcattttatctattttttattttaataggtttggtgcttatcttctaataagatttaaatgtcacaaactgtagcacaaataatataatttataatttacaaattgactaaaattgggtatagtatggtatttgaaagaataagcatatgcttctgtttattaaaaaaagaaaccttc

SEQ ID NO: 197221 - DNA, 1872 bp, Artificial Sequence
  derived and/or modified sequence
atggagagacccgaggagggcaagcagagcccccccccccagccctggggcagactgctgagactgggcgccgaggagggcgagccccacgtgctgctgagaaagagagagtggaccatcggcagaagaagaggctgcgacctgagcttccccagcaacaagctggtgagcggcgaccactgcagaatcgtggtggacgagaagagcggccaggtgaccctggaggacaccagcaccagcggcaccgtgatcaacaagctgaaggtggtgaagaagcagacctgccccctgcagaccggcgacgtgatctacctggtgtacagaaagaacgagcccgagcacaacgtggcctacctgtacgagagcctgagcgagaagcagggcatgacccaggagagcttcgagatggtgccctgctgcgtggcccaggccggcctgaagctgctgggcagcagcgacccccccaccctggccagccagagcatcgtgatcaccggcagcggcggcggcggcatcagccccaagggcagcggccccagcgtggccagcgacgaggtgagcagcttcgccagcgccctgcccgacagaaagaccgccagcttcagcagcctggagccccaggaccaggaggacctggagcccgtgaagaagaagatgagaggcgacggcgacctggacctgaacggccagctgctggtggcccagcccagaagaaacgcccagaccgtgcacgaggacgtgagagccgccgccggcaagcccgacaagatggaggagaccctgacctgcatcatctgccaggacctgctgcacgactgcgtgagcctgcagccctgcatgcacaccttctgcgccgcctgctacagcggctggatggagagaagcagcctgtgccccacctgcagatgccccgtggagagaatctgcaagaaccacatcctgaacaacctggtggaggcctacctgatccagcaccccgacaagagcagaagcgaggaggacgtgcagagcatggacgccagaaacaagatcacccaggacatgctgcagcccaaggtgagaagaagcttcagcgacgaggagggcagcagcgaggacctgctggagctgagcgacgtggacagcgagagcagcgacatcagccagccctacgtggtgtgcagacagtgccccgagtacagaagacaggccgcccagcccccccactgccccgcccccgagggcgagcccggcgccccccaggccctgggcgacgcccccagcaccagcgtgagcctgaccaccgccgtgcaggactacgtgtgccccctgcagggcagccacgccctgtgcacctgctgcttccagcccatgcccgacagaagagccgagagagagcaggaccccagagtggccccccagcagtgcgccgtgtgcctgcagcccttctgccacctgtactggggctgcaccagaaccggctgctacggctgcctggcccccttctgcgagctgaacctgggcgacaagtgcctggacggcgtgctgaacaacaacagctacgagagcgacatcctgaagaactacctggccaccagaggcctgacctggaagaacatgctgaccgagagcctggtggccctgcagagaggcgtgttcctgctgagcgactacagagtgaccggcgacaccgtgctgtgctactgctgcggcctgagaagcttcagagagctgacctaccagtacagacagaacatccccgccagcgagctgcccgtggccgtgaccagcagacccgactgctactggggcagaaactgcagaacccaggtgaaggcccaccacgccatgaagttcaaccacatctgcgagcagaccagattcaagaactag

SEQ ID NO: 197222 - protein, 146 aa, Artificial Sequence
  derived and/or modified sequence
MMWQKYAGSRRSMPLGARILFHGVFYAGGFAIVYYLIQKFHSRALYYKLAVEQLQSHPEAQEALGPPLNIHYLKLIDRENFVDIVDAKLKIPVSGSKSEGLLYVHSSRGGPFQRWHLDEVFLELKDGQQIPVFKLSGENGDEVKKE

SEQ ID NO: 197223 - protein, 113 aa, Artificial Sequence
  derived and/or modified sequence
MMWQKYAGSRRSMPLGARILFHGVFYAGGFAIVYYLIQKFHSRALYYKLAVEQLQSHPEAQEALGPPLNIHYLKLIDRENFVDIVDAKLKIPVSGSKSEGLLYVHSSRGGPFQ

SEQ ID NO: 197224 - protein, 88 aa, Artificial Sequence
  derived and/or modified sequence
MMWQKYAGSRRSMPLGARILFHGVFYAGGFAIVYYLIQKFHSRALYYKLAVEQLQSHPEAQEALGPPLNIHYLKLIDRENFVDIVDAK

SEQ ID NO: 197225 - DNA, 857 bp, Artificial Sequence
  derived and/or modified sequence
caagcctggaagaactcgtcatgctctttgtagcgtggtgcttctgttgctcacaggacaacttgcctttgatgattttcaagagagttgtgctatgatgtggcaaaagtatgcaggaagcaggcggtcaatgcctctgggagcaaggatccttttccacggtgtgttctatgccgggggctttgccattgtgtattacctcattcaaaagtttcattccagggctttatattacaagttggcagtggagcagctgcagagccatcccgaggcacaggaagctctgggccctcctctcaacatccattatctcaagctcatcgacagggaaaacttcgtggacattgttgatgccaagttgaagattcctgtctctggatccaaatcagagggccttctctacgtccactcatccagaggtggcccctttcagaggtggcaccttgacgaggtctttttagagctcaaggatggtcagcagattcctgtgttcaagctcagtggggaaaacggtgatgaagtgaaaaaggagtagagacgacccagaagacccagcttgcttctagtccatccttccctcatctctaccatatggccactggggtggtggcccatctcagtgacagacactcctgcaacccagttttccagccaccagtgggatgatggtatgtgccagcacatggtaattttggtgtaattctaacttgggcacaacaaatgctatttgtcatttttaaactgaatccgaaagaaactcctattataaatttaagataatgtaatgtatttgaaagtgctttgtataaaaaagcacatgataaaaggaatcagaattaataaaatgtttgttgatc

SEQ ID NO: 197226 - DNA, 1085 bp, Artificial Sequence
  derived and/or modified sequence
tttcccaagcctggaagaactcgtcatgctctttgtagcgtggtgcttctgttgctcacaggatgtttgccacacgagtcactcgagagaatctctgagtcctggcgagggctttctgaggcttcgtgtgttagcagctgttgtcttccaactcagcggcaggtttgcctttccccacggacactctggaccttgtagctcctcaagcttccctgtctattgagcagataggaagccgtgtcaaatatgtggcaccttgaggaaatgcctagtgaatgacagacaacttgcctttgatgattttcaagagagttgtgctatgatgtggcaaaagtatgcaggaagcaggcggtcaatgcctctgggagcaaggatccttttccacggtgtgttctatgccgggggctttgccattgtgtattacctcattcaaaagtttcattccagggctttatattacaagttggcagtggagcagctgcagagccatcccgaggcacaggaagctctgggccctcctctcaacatccattatctcaagctcatcgacagggaaaacttcgtggacattgttgatgccaagttgaagattcctgtctctggatccaaatcagagggccttctctacgtccactcatccagaggtggcccctttcagaggtggcaccttgacgaggtctttttagagctcaaggatggtcagcagattcctgtgttcaagctcagtggggaaaacggtgatgaagtgaaaaaggagtagagacgacccagaagacccagcttgcttctagtccatccttccctcatctctaccatatggccactggggtggtggcccatctcagtgacagacactcctgcaacccagttttccagccaccagtgggatgatggtatgtgccagcacatggtaattttggtgtaattctaacttgggcacaacaaatgctatttgtcatttttaaactgaatccgaaagaaactcctattataaatttaagataatgtaatgtatttgaaagtgctttgtataaaaaagcacatgataaaaggaatcagaattaataaaatgtttgttgatcttt

SEQ ID NO: 197227 - DNA, 2448 bp, Artificial Sequence
  derived and/or modified sequence
acccttttgcggcacacttgctaccttggtcttagctctgggctttggtgtcctctggcagtcctgctgcattgccttctctcccccatctgcccacccctgtcccagagagatttttctgtagcccctcatctgcagagtccgacagctcagggtcgagggtctttcttagcagtaatcacccactatgctctcacccctccatttctggacatgcttcctgtggcttctctcctgcgctttacacttcagcagttcttgtttctgctcactctgcctttgtttgtcatttcctggatttgaagctgttctgctcttttcacctttctcttctcaaggtaaacttcctctgtgaaacctccgctgatgccctgcagcaaggttgaccacttcctgagtgttacttcctctcttggtgcatatgtctggttgcactaaccaggctgctgctagcccaaaggcacctttgtgcaaattagaaaaagacaaccatccccatcccttcttcaagatactttatagtacttccaactgttggcaaactgtcttaataaagatacaaatctttgatttctctaatgtgcatggtgccctacaagggttgtgcagtgcatagccgtgcagttgcatgtgatagatctatgttataattatttgtttaattgtctgtattcccctcaggaccaaggaaaattccttatatcttgatactgtttttatattcttactgtctgaccagatcagaccctcagtaaccgtttgctaaacaaaagaaggaatgaaggtacaaatatgtatccaccttgtctggaaaaatagcaggaaaggcatgcctgccaaggacttttacactgaacagtaagaatatattttagctcagagacactgtttgttttcacatttcaatattgctttaattagatatcttaaagctcgtgtaccacagtggttgaaagagcagatgctggagccagactgcatgaatttgaatcccagttctaccacttattcacttattagtgcacctttgggcatgttacttaacctttctgtgcctcagtttactcatctgcaaaatgagcgtgatgataatagttcctacttcaaagggttgtgagaattaaatgaattatataaagtgcttagaatagtacaagacacataatagtcagagacagaagtattaggtattatcaatattgttaaagtccatgtataagtttactgtactattgtttctttttaactctgaagtgctgttttcactctgtcacgtacagcttttattgctagcatcttgcttctgcaggtccagcctcctgttgattggccctgtgtttgtgctgtggtcaaagcacttgctgtctgcggttctcccttgtgcacaccggttctttggttgctgtaacaaaaactacataggacacagacaggaaacccgcaggctttgttttttcttcctaatttggcagcagaagggggaaaaaccagggcctttcacagacaaggcttgttttagagtttaattttaacttcttgttcgtgttctaaagcttgggttggtaataaatcttggctgtatgagactagagagaactgggctttaaaaatatgattttaatgtaaaatcttttctaattgcaggacaacttgcctttgatgattttcaagagagttgtgctatgatgtggcaaaagtatgcaggaagcaggcggtcaatgcctctgggagcaaggatccttttccacggtgtgttctatgccgggggctttgccattgtgtattacctcattcaaaagtttcattccagggctttatattacaagttggcagtggagcagctgcagagccatcccgaggcacaggaagctctgggccctcctctcaacatccattatctcaagctcatcgacagggaaaacttcgtggacattgttgatgccaagttgaagattcctgtctctggatccaaatcagagggccttctctacgtccactcatccagaggtggcccctttcagaggtggcaccttgacgaggtctttttagagctcaaggatggtcagcagattcctgtgttcaagctcagtggggaaaacggtgatgaagtgaaaaaggagtagagacgacccagaagacccagcttgcttctagtccatccttccctcatctctaccatatggccactggggtggtggcccatctcagtgacagacactcctgcaacccagttttccagccaccagtgggatgatggtatgtgccagcacatggtaattttggtgtaattctaacttgggcacaacaaatgctatttgtcatttttaaactgaatccgaaagaaactcctattataaatttaagataatgtaatgtatttgaaagtgctttgtataaaaaagcacatgataaaaggaatcagaattaataaaatgtttgttgatcttt

SEQ ID NO: 197228 - DNA, 893 bp, Artificial Sequence
  derived and/or modified sequence
gcgtggtgcttctgttgctcacagaggtgcctgcttccccttctgccatgattggaagtttcctgaggcctccccagccatgtggaactgacaacttgcctttgatgattttcaagagagttgtgctatgatgtggcaaaagtatgcaggaagcaggcggtcaatgcctctgggagcaaggatccttttccacggtgtgttctatgccgggggctttgccattgtgtattacctcattcaaaagtttcattccagggctttatattacaagttggcagtggagcagctgcagagccatcccgaggcacaggaagctctgggccctcctctcaacatccattatctcaagctcatcgacagggaaaacttcgtggacattgttgatgccaagttgaagattcctgtctctggatccaaatcagagggccttctctacgtccactcatccagaggtggcccctttcagaggtggcaccttgacgaggtctttttagagctcaaggatggtcagcagattcctgtgttcaagctcagtggggaaaacggtgatgaagtgaaaaaggagtagagacgacccagaagacccagcttgcttctagtccatccttccctcatctctaccatatggccactggggtggtggcccatctcagtgacagacactcctgcaacccagttttccagccaccagtgggatgatggtatgtgccagcacatggtaattttggtgtaattctaacttgggcacaacaaatgctatttgtcatttttaaactgaatccgaaagaaactcctattataaatttaagataatgtaatgtatttgaaagtgctttgtataaaaaagcacatgataaaaggaatcagaattaataaaatgtttgttgatcttt

SEQ ID NO: 197229 - DNA, 1709 bp, Artificial Sequence
  derived and/or modified sequence
aggaccgcgggcatttacccgtgctttcccaagcctggaagaactcgtcatgctctttgtagcgtggtgcttctgttgctcacaggacaacttgcctttgatgattttcaagagagttgtgctatgatgtggcaaaagtatgcaggaagcaggcggtcaatgcctctgggagcaaggatccttttccacggtgtgttctatgccgggggctttgccattgtgtattacctcattcaaaagtttcattccagggctttatattacaagttggcagtggagcagctgcagagccatcccgaggcacaggaagctctgggccctcctctcaacatccattatctcaagctcatcgacagggaaaacttcgtggacattgttgatgccaagttgaagattcctgtctctggatccaaatcagagggccttctctacgtccactcatccagaggtggcccctttcagaggtggcaccttgacgaggtctttttagagctcaaggatggtcagcagattcctgtgttcaagctcagtggggaaaacggtgatgaagtgaaaaaggagtagagacgacccagaagacccagcttgcttctagtccatccttccctcatctctaccatatggccactggggtggtggcccatctcagtgacagacactcctgcaacccagttttccagccaccagtgggatgatgaaacacaactggttttgagaatccatcccttcttcactcagtccacgtaaaggttaggatggtagaaagtgttatacctcttcctccagagttggagcctatgacactgatgacactggcatggaaagccaaagccctacaccaaccagcacacttactggttccaaattgatctacgctggtgtaatcagagtgaatctcagaactttggacagagctgtgagcagagactgactttcctgctgtctccaggtagctgcaaggctgaacagcagcacctactttattaccatcttactgtcattcaaagaaggcagagctgaatgctggagaaaaactgagtactagcaacagtttttgaaccctgaatactgtcataactgaagctagaattatccctggacttgtttgccactaaaatttccttgttttgcttaccctggtttcagctggcaccctgatcacttgaaaggaacataactgatatactgtcctttgtttttctttccttcctcttctccgcctttgatgattttaaattagaaatctacctgcctctaatctctttaattttctcatttatttactgctgcctattttccaaaacactgcttctcgaatattcctggctcaaaaatcatctatgtcttcatgacatatgaaacccctagaatccagcctttccccagcttttaatatctcctaattgatttctcaattccagtgaaatgattccatttatttttttcccaaacacatcacaaatattcctaactcttgtgagcaattttctctcattcttctcaacttatctaaatcctaacttttcaaaagatctagctcaagttctgtcttatcatattttgagttcctttctttggcattgtattattttgtatctttccatgtacacatgtgtgcattatctccctgataaaactaactggctagaggataggagtaaagactcaattctaatatccttgttacctaataatacacaaacgtgaaa

SEQ ID NO: 197230 - DNA, 524 bp, Artificial Sequence
  derived and/or modified sequence
gctggcgcgcaggaccgcgggcatttacccgtgctttcccaagcctggaagaactcgtcatgctctttgtagcgtggtgcttctgttgctcacagagtctcgctctggccagagattttctaaataatggtcaggaatctgcattgacaacttgcctttgatgattttcaagagagttgtgctatgatgtggcaaaagtatgcaggaagcaggcggtcaatgcctctgggagcaaggatccttttccacggtgtgttctatgccgggggctttgccattgtgtattacctcattcaaaagtttcattccagggctttatattacaagttggcagtggagcagctgcagagccatcccgaggcacaggaagctctgggccctcctctcaacatccattatctcaagctcatcgacagggaaaacttcgtggacattgttgatgccaagttgaagattcctgtctctggatccaaatcagagggccttctctacgtccactcatccagaggtggcccctttcagag

SEQ ID NO: 197231 - DNA, 720 bp, Artificial Sequence
  derived and/or modified sequence
gggcatttacccgtgctttcccaagcctggaagaactcgtcatgctctttgtagcgtggtgcttctgttgctcacagaggtgcctgcttccccttctgccatgattggaagtttcctgaggcctccccagccatgtggaactagtggttcagatttactttcccggagtagtcacaggactgggcagtgaaaacaggttgacttggatcagctgatggttcttttgtcccatggatgttctgctggtactgcagtcatctggtagcccacttaaactagaatgtccatgacagctcattcacatggctagtgccttggatgtttgccacacgagtcactcgagagaatctctgagtcctggcgagggctttctgaggcttcgtgtgttagcagctgttgtcttccaactcagcggcaggacaacttgcctttgatgattttcaagagagttgtgctatgatgtggcaaaagtatgcaggaagcaggcggtcaatgcctctgggagcaaggatccttttccacggtgtgttctatgccgggggctttgccattgtgtattacctcattcaaaagtttcattccagggctttatattacaagttggcagtggagcagctgcagagccatcccgaggcacaggaagctctgggccctcctctcaacatccattatctcaagctcatcgacagggaaaacttcgtggacattgttgatgccaag

SEQ ID NO: 197232 - DNA, 3223 bp, Artificial Sequence
  derived and/or modified sequence
cgaaacccttcccggcgcgagtccgagcgtctgagaagcagaagccacacgtcccggcgacctaagttctggatcagccggccggaggacccgtgttagcatttacaatccgaggtgagctgaagcctccggttgtcccggttcgacgctctagccctgcgagcagccgacgccggaagtctctactgctccccgctggcgcgcaggaccgcgggcatttacccgtgctttcccaagcctggaagaactcgtcatgctctttgtagcgtggtgcttctgttgctcacagaggtgcctgcttccccttctgccatgattggaagtttcctgaggcctccccagccatgtggaactgacaacttgcctttgatgattttcaagagagttgtgctatgatgtggcaaaagtatgcaggaagcaggcggtcaatgcctctgggagcaaggatccttttccacggtgtgttctatgccgggggctttgccattgtgtattacctcattcaaaagtttcattccagggctttatattacaagttggcagtggagcagctgcagagccatcccgaggcacaggaagctctgggccctcctctcaacatccattatctcaagctcatcgacagggaaaacttcgtggacattgttgatgccaagttgaagattcctgtctctggatccaaatcagagggccttctctacgtccactcatccagaggtggcccctttcagaggtggcaccttgacgaggtctttttagagctcaaggatggtcagcagattcctgtgttcaagctcagtggggaaaacggtgatgaagtgaaaaaggagtagagacgacccagaagacccagcttgcttctagtccatccttccctcatctctaccatatggccactggggtggtggcccatctcagtgacagacactcctgcaacccagttttccagccaccagtgggatgatggcctccctattccctgagacacaacagtattgaaattgggccaattaataaccccacagtggcctctcactaaatgtgagaggtgaggaagctgcaggagaaaatttgaagctagcagtgttcatgagatgtaagtaaagaagccatctccataaaagtacaacgtgacgcagcaagtgctgatggagaagctgtagaagttacacagaagatctagcttggaccatcgatgaaagtggctacactaaacaacagattttaaatgtagataaaacagcattttattggaaaaagatgccatctaggactttcatagttagaaaaactcaatgcctggcttcaaaggacaagctgactcttgtcaggggctagtgcagctgtgactttcagttaaagccaatgctcattgactattctgaaaatcccagggcccttaagatatgctgtataaacgcaacaacaaagcctggatgacgttgggtctgtttacagcctggtctactgagtaagcccactgttgagacctagtgctcagaaaaaatagatttctttcaaaatatggctgggtgcagtggctcacaccggtaatcccagcactttgggaggctggggcgggtggattgcttgatgccaggagttcaagaccagcctgggcaacatggtgaaaccctgtctcaaaaaacaaatccaaaaaaccaaaatattgctactcattaacaatgcacctggttacccaagagctctgatggagatgtacaaggagatgaatactgttttcatgcctgctaacacagtatccattctgctgctgatagatcaagaagtacttttgactttcaaaacttgttatttaagaaatacattttgtggtttctctgatggttctgggcagtcagttcaaaaccttctggaaaggattcaccattctagatgccatcaagagcattcaattcacgggaggaggtcaaaatatcaacattaattggaatttggaagaaatagattccaatcctcatggaggacttggagggtttcaagacttcagaggaggaaggaactgtagatgggctgaaaatagcaagagaactagaagtggaggggcctagagatgtgaccgaattgctgtaacctcaggatcaaacttgtatggatgagaagttccttctcatggacgagcaaagaaggtgatttcttgaaatggaatctactcctggtgaagatgctatgaacattgttgaaatgacaaaagatttagaatattccataaacttagctgtggccagggtttgagaggattgactcctaattttgaagttctactgtgggtaaatgctgtcaaacagcattgcatgccacagaggaatctctcatgaaagagttaataaatgcagcaaacttcactgttgtcttactttaagaaactgccacagtcactgcaggcttcagcaacttatcttttcctaccctcctctcgcatttaaaagtacttttaaattaatgtatgtacattatttttaggcataacactgctgctcatttaaaaaaactacagtatgaaccatgttatatgcagtggaaaggcaaaaaattcatgtgacttacttgcttgtatttggtttattgcagtggtctggaactgaaagtgatgcgtatttctgagttatgcctgtatttaagaagctgagtgaaacccaaagaagtccatgataggacagacttctgaaaactaaagacagaaaaaagcttgaaagcatcaagaaagaagtgaaatcttagctagagggaaaagtaactcagatgacagtggatttctctctggaaaccatggaggccagaaggaagtgagacaagttcttttagtgccagaagaactatcaacttgtggctgggcacggtggctcacacctgtaatcccagcactttgggagaccaaggtgggcagatcacttgaagtcaggagtttgagaccagcctggccaacatggcaaaaccctgtctctactaaaaatacaaaaattagccaggcatggtggcacatgcctgtaatctcagctacttgggaggctgaggcacgagaattacttgaacccgggaggtggaggttgcagtgagccaagatcctgccactgcactccagcctgggcaacagagcaagactgcctcaaaacaaaactctgtcaactccaaattcctatttggtgaaatgatccttcaggattgatggggtaataaaaacattctcggttgatagaaaact

SEQ ID NO: 197233 - DNA, 1509 bp, Artificial Sequence
  derived and/or modified sequence
aggaccgcgggcatttacccgtgctttcccaagcctggaagaactcgtcatgctctttgtagcgtggtgcttctgttgctcacaggacaacttgcctttgatgattttcaagagagttgtgctatgatgtggcaaaagtatgcaggaagcaggcggtcaatgcctctgggagcaaggatccttttccacggtgtgttctatgccgggggctttgccattgtgtattacctcattcaaaagtttcattccagggctttatattacaagttggcagtggagcagctgcagagccatcccgaggcacaggaagctctgggccctcctctcaacatccattatctcaagctcatcgacagggaaaacttcgtggacattgttgatgccaagttgaagattcctgtctctggatccaaatcagagggccttctctacgtccactcatccagaggtggcccctttcagaggtggcaccttgacgaggtctttttagagctcaaggatggtcagcagattcctgtgttcaagctcagtggggaaaacggtgatgaagtgaaaaaggagtagagacgacccagaagacccagcttgcttctagtccatccttccctcatctctaccatatggccactggggtggtggcccatctcagtgacagacactcctgcaacccagttttccagccaccattgcacctggacttgatatgaaagtaaccatcagaaaatcaacagagatcttaaacttgcctaccacagacacctgcaggaatatactaagaatcatcatagtggacctttattgtctcctgagcacccattctttgttctttcagaaacacaactggttttgagaatccatcccttcttcactcagtccacgtaaaggttaggatggtagaaagtgttatacctcttcctccagagttggagcctatgacactgatgacactggcatggaaagccaaagccctacaccaaccagcacacttactggttccaaattgatctacgctggtgtaatcagagtgaatctcagaactttggacagagctgtgagcagagactgactttcctgctgtctccaggtagctgcaaggctgaacagcagcacctactttattaccatcttactgtcattcaaagaaggcagagctgaatgctggagaaaaactgagtactagcaacagtttttgaaccctgaatactgtcataactgaagctagaattatccctggacttgtttgccactaaaatttccttgttttgcttaccctggtttcagctggcaccctgatcacttgaaaggaacataactgatatactgtcctttgtttttctttccttcctcttctccgcctttgatgattttaaattagaaatctacctgcctctaatctctttaattttctcatttatttactgctgcctattttccaaaacactgcttctcgaatattcctggctcaaaaatcatctatgtcttcatgacatatgaaacccctagaatcca

SEQ ID NO: 197234 - DNA, 1177 bp, Artificial Sequence
  derived and/or modified sequence
aagcctggaagaactcgtcatgctctttgtagcgtggtgcttctgttgctcacaggatgtttgccacacgagtcactcgagagaatctctgagtcctggcgagggctttctgaggcttcgtgtgttagcagctgttgtcttccaactcagcggcaggacaacttgcctttgatgattttcaagagagttgtgctatgatgtggcaaaagtatgcaggaagcaggcggtcaatgcctctgggagcaaggatccttttccacggtgtgttctatgccgggggctttgccattgtgtattacctcattcaaaagtttcattccagggctttatattacaagttggcagtggagcagctgcagagccatcccgaggcacaggaagctctgggccctcctctcaacatccattatctcaagctcatcgacagggaaaacttcgtggacattgttgatgccaagttgaagattcctgtctctggatccaaatcagagggccttctctacgtccactcatccagaggtggcccctttcagaggtggcaccttgacgaggtctttttagagctcaaggatggtcagcagattcctgtgttcaagctcagtggggaaaacggtgatgaagtgaaaaaggagtagagacgacccagaagacccagcttgcttctagtccatccttccctcatctctaccatatggccactggggtggtggcccatctcagtgacagacactcctgcaacccagttttccagccaccagtgggatgatgttgcacctggacttgatatgaaagtaaccatcagaaaatcaacagagatcttaaacttgcctaccacagacacctgcaggaatatactaagaatcatcatagtggacctttattgtctcctgagcacccattctttgttctttcagaaacacaactggttttgagaatccatcccttcttcactcagtccacgtaaaggttaggatggtagaaagtgttatacctcttcctccagagttggagcctatgacactgatgacactggcatggaaagccaaagccctacaccaaccagcacacttactggttccaaattgatctacgctggtgtaatcagagtgaatctcagaactttggacagagctgtgagcagagactgactttcctgctgtctccaggtagctgcaag

SEQ ID NO: 197235 - DNA, 441 bp, Artificial Sequence
  derived and/or modified sequence
atgatgtggcagaagtacgccggcagcagaagaagcatgcccctgggcgccagaatcctgttccacggcgtgttctacgccggcggcttcgccatcgtgtactacctgatccagaagttccacagcagagccctgtactacaagctggccgtggagcagctgcagagccaccccgaggcccaggaggccctgggcccccccctgaacatccactacctgaagctgatcgacagagagaacttcgtggacatcgtggacgccaagctgaagatccccgtgagcggcagcaagagcgagggcctgctgtacgtgcacagcagcagaggcggccccttccagagatggcacctggacgaggtgttcctggagctgaaggacggccagcagatccccgtgttcaagctgagcggcgagaacggcgacgaggtgaagaaggagtag

SEQ ID NO: 197236 - DNA, 342 bp, Artificial Sequence
  derived and/or modified sequence
atgatgtggcagaagtacgccggcagcagaagaagcatgcccctgggcgccagaatcctgttccacggcgtgttctacgccggcggcttcgccatcgtgtactacctgatccagaagttccacagcagagccctgtactacaagctggccgtggagcagctgcagagccaccccgaggcccaggaggccctgggcccccccctgaacatccactacctgaagctgatcgacagagagaacttcgtggacatcgtggacgccaagctgaagatccccgtgagcggcagcaagagcgagggcctgctgtacgtgcacagcagcagaggcggccccttccagtag

SEQ ID NO: 197237 - DNA, 267 bp, Artificial Sequence
  derived and/or modified sequence
atgatgtggcagaagtacgccggcagcagaagaagcatgcccctgggcgccagaatcctgttccacggcgtgttctacgccggcggcttcgccatcgtgtactacctgatccagaagttccacagcagagccctgtactacaagctggccgtggagcagctgcagagccaccccgaggcccaggaggccctgggcccccccctgaacatccactacctgaagctgatcgacagagagaacttcgtggacatcgtggacgccaagtag

SEQ ID NO: 197238 - DNA, 441 bp, Artificial Sequence
  derived and/or modified sequence
atgatgtggcagaagtacgcaggaagcaggcgaagcatgcctttgggggctcgcatcttgttccacggagtgttctacgctggcggctttgccattgtatattacctcattcagaagttccactcccgggccctgtactacaaactggcagttgaacagttgcagtctcaccccgaagctcaagaggctctcgggcccccactgaacattcactatctgaaactaatagacagagaaaactttgttgacatagtggacgctaaactgaagattccagtttctgggagcaaatccgaagggctgctgtacgtccactcgtcccgcggcggaccatttcagagatggcaccttgatgaagtgttccttgagttgaaagacgggcagcagatccccgtttttaaattgtctggcgaaaatggcgatgaagtgaaaaaagagtag

SEQ ID NO: 197239 - DNA, 441 bp, Artificial Sequence
  derived and/or modified sequence
atgatgtggcaaaaatacgccgggagtaggagaagcatgcctcttggtgcgagaattctgtttcatggtgttttttacgctggaggatttgcaatcgtgtattacctgatccagaaattccacagcagagctctgtactacaagttagccgtggagcagctccagtcccacccagaggcgcaggaagccctgggccctcccctgaatatacactatttgaagctgatagatcgggagaattttgtggacatcgtcgacgccaaattgaaaattcccgtgtctggtagtaagagtgaaggcttactgtatgtgcatagcagccgtggcggcccatttcaacgatggcacctggacgaggtgtttttggagcttaaagatgggcagcagatacccgttttcaaattgtccggcgagaacggcgatgaggtcaagaaggagtag

SEQ ID NO: 197240 - DNA, 441 bp, Artificial Sequence
  derived and/or modified sequence
atgatgtggcagaagtatgcaggcagcagacgctctatgcctcttggggctaggatcctcttccatggtgtgttttacgccggcggctttgccattgtatactatctgatccaaaagtttcatagcagggccttgtactataagctggcagtagagcagttacagtctcaccctgaagctcaggaggcgttgggccctccactcaatatccattatctcaaactcatcgatcgcgagaacttcgtggatatcgtggacgcgaaactgaagatcccagtttcagggagtaagtctgaaggcttactgtacgtgcactcatcccgaggtggaccattccagcgttggcacttagacgaggttttcttggaactgaaagacggccagcagatccctgtttttaagttaagtggcgaaaacggagatgaagtcaaaaaggagtag

SEQ ID NO: 197241 - DNA, 441 bp, Artificial Sequence
  derived and/or modified sequence
atgatgtggcagaagtatgctggcagtagacgctccatgccgctgggtgcacggatcctgtttcatggagtcttctatgctggaggattcgctattgtgtattacctcatccaaaagtttcactctcgcgccctctactacaaacttgctgtggagcagttgcagtcccaccccgaagctcaggaggcattaggaccacctctgaatatccactatctgaaactcatcgaccgagagaactttgtagacatagttgacgccaagctcaagattcctgtgtcagggagtaagtccgagggcctcctctacgtgcattctagtagaggcggccccttccagcgatggcacctcgacgaagtattcctagaactgaaggatggccagcaaatccctgtattcaagctatctggtgagaatggcgacgaagtgaagaaagaatag

SEQ ID NO: 197242 - DNA, 342 bp, Artificial Sequence
  derived and/or modified sequence
atgatgtggcaaaagtacgctggatcccgccggagtatgccgctcggcgcccggattctgttccatggtgtcttttatgccggtgggtttgctatagtgtattacctgatacagaagttccacagccgcgctctctattacaagcttgctgtcgaacaactgcagtctcaccctgaagcccaagaggcattgggtcctcctcttaatatacactaccttaagctgatcgaccgggaaaattttgttgacatcgtggacgccaagcttaagatcccagtgagcggctccaaatcagagggcctgctgtacgtccactctagcagaggtgggcctttccagtag

SEQ ID NO: 197243 - DNA, 267 bp, Artificial Sequence
  derived and/or modified sequence
atgatgtggcagaaatacgctgggagccggcgatcaatgcccttaggggccagaattctgtttcacggagtgttctacgcaggcggctttgctattgtgtactaccttattcagaaattccactcccgagccctgtattacaaattggcggtcgaacaactgcagagtcacccagaagcccaggaagcacttggcccacctctgaatattcattatttaaagttgatcgacagggagaactttgtggatatagtagacgcaaagtag

SEQ ID NO: 197244 - DNA, 441 bp, Artificial Sequence
  derived and/or modified sequence
atgatgtggcaaaagtatgccggcagcaggcggagtatgcccctgggagcaaggatcctttttcacggggtcttttacgcgggcggctttgcgatagtctactatctgatccaaaagtttcacagtcgagccctatactacaagctcgcggtcgagcaacttcaatcccacccagaggctcaggaggctctgggaccgcctttaaacatccattatctgaagctgattgaccgggagaacttcgtagacattgtcgatgcaaaacttaagatccccgtgtcagggagcaaaagcgagggtctgctctacgtccattccagcagaggaggccccttccagcggtggcatctcgatgaagtgtttctcgaactaaaagatggtcagcagattcctgtgtttaaattgtctggcgaaaacggggacgaagttaagaaggaatag

SEQ ID NO: 197245 - DNA, 441 bp, Artificial Sequence
  derived and/or modified sequence
atgatgtggcagaagtacgctgggagtcgccgatccatgccactcggagctcgtatcctctttcatggcgtattctacgcaggcggattcgccattgtgtactacctcattcaaaagtttcatagccgagctctgtattataaactcgccgtggagcaactccagtcacaccccgaagcacaagaggcactggggccccccttgaatatccactacctgaaattgatcgacagggagaactttgtcgacattgtagatgccaaactgaaaatacccgtatcaggttcaaaatcagagggactcctgtatgtccacagcagcagaggcggaccgtttcagcggtggcacctcgacgaggtgtttttggagctgaaggatgggcagcagattcctgtatttaaactgagcggtgagaatggtgatgaagtgaaaaaggagtag

SEQ ID NO: 197246 - DNA, 441 bp, Artificial Sequence
  derived and/or modified sequence
atgatgtggcagaaatatgccgggtcacgccgaagcatgcctctcggggctaggatcctttttcacggggtgttctatgccggcggctttgccatcgtctactatctgattcaaaagtttcacagccgagctctgtattataaactagcagtggaacaattacagagccaccctgaagctcaggaagccctggggccacccctcaacatacactacctaaagctgatcgaccgcgagaattttgtcgacatagtggacgctaagcttaagatccccgtatccggcagtaagtctgaaggtctgctgtatgtccatagctcccgaggtggaccattccaacggtggcatctggatgaagtatttttggaactcaaggatgggcagcagatcccagtctttaaactttcgggcgagaacggagacgaagtgaagaaggaatag

SEQ ID NO: 197247 - DNA, 441 bp, Artificial Sequence
  derived and/or modified sequence
atgatgtggcagaagtatgccggcagccgccgctccatgcccctgggcgcccgcatcctcttccacggcgtcttctacgccggcggctttgccatcgtgtactacctgatccagaagttccacagccgggccctgtactacaagctggccgtggagcagctgcagagccaccctgaggcccaggaggccctgggcccccccctgaacatccactacctgaagctgattgacagagaaaattttgtggacatcgtggatgccaagctgaagatccctgtgtctggcagcaagtctgagggcctgctgtatgtgcacagcagcagaggaggccccttccagcgctggcacctggatgaggtgttcctggagctgaaggatggccagcagatccctgtgttcaagctgagcggggagaatggagatgaggtgaagaaggagtag

SEQ ID NO: 197248 - DNA, 342 bp, Artificial Sequence
  derived and/or modified sequence
atgatgtggcagaagtatgccggcagccgccgctccatgcccctgggcgcccgcatcctcttccacggcgtcttctacgccggcggctttgccatcgtgtactacctgatccagaagttccacagccgggccctgtactacaagctggccgtggagcagctgcagagccaccctgaggcccaggaggccctgggcccccccctgaacatccactacctgaagctgattgacagagaaaattttgtggacatcgtggatgccaagctgaagatccctgtgtctggcagcaagtctgagggcctgctgtatgtgcacagcagcagaggaggccccttccagtag

SEQ ID NO: 197249 - DNA, 267 bp, Artificial Sequence
  derived and/or modified sequence
atgatgtggcagaagtatgccggcagccgccgctccatgcccctgggcgcccgcatcctcttccacggcgtcttctacgccggcggctttgccatcgtgtactacctgatccagaagttccacagccgggccctgtactacaagctggccgtggagcagctgcagagccaccctgaggcccaggaggccctgggcccccccctgaacatccactacctgaagctgattgacagagaaaattttgtggacatcgtggatgccaagtag

SEQ ID NO: 197250 - DNA, 441 bp, Artificial Sequence
  derived and/or modified sequence
atgatgtggcagaagtacgccggcagccggcggagcatgcccctgggggcgcgaatcttgttccatggtgtgttttatgccggcggctttgccatcgtatactacttgattcagaaatttcatagtcgagccttgtactacaagctggctgtggagcaactgcagagccaccccgaggcccaagaagccctgggccccccactcaacattcattatcttaagctgattgaccgagagaattttgttgacatagtggatgccaagcttaaaatcccagtgtccggaagcaagagcgagggcttattatacgtgcattcatctcggggtgggccattccagaggtggcatcttgacgaggtgttcctggagctgaaagacgggcagcaaatccctgtttttaaactctccggagagaacggagatgaagtaaagaaggaatag

SEQ ID NO: 197251 - DNA, 441 bp, Artificial Sequence
  derived and/or modified sequence
atgatgtggcagaagtacgccggcagccggcggagcatgcccctgggcgccagaattttatttcacggagtattttacgcgggaggcttcgctattgtttactatctgatccagaaattccacagcagagccctttactacaaactggcagtggagcagctgcagtctcatcctgaggcccaggaagctctgggtcctcctctgaacatacattatctcaaactgattgacagagagaacttcgtggacatcgtagatgccaagctaaagatcccggtcagtggctcaaaatcagagggcctgctgtacgtccattcttctaggggcggcccttttcagcggtggcacctggacgaagtgtttcttgagcttaaagatggccagcagatccctgtgttcaagttatctggggagaacggcgacgaggtaaagaaggagtag

SEQ ID NO: 197252 - DNA, 441 bp, Artificial Sequence
  derived and/or modified sequence
atgatgtggcagaagtacgccggcagccggcggagcatgcccctgggggcgcgaatcctgttccacggggttttctacgcgggtgggtttgcaatcgtgtattatttaattcagaaattccacagtagggcactttactataagttggcggtcgagcagctgcagtctcaccccgaagctcaggaggctcttggaccccccctcaacatccactatctgaagctgatagatagggaaaactttgtcgacatcgttgatgccaagctgaagattcccgttagtggcagcaaatctgagggactcctctacgtgcattccagccgtggtgggcccttccaaaggtggcacttggacgaggtgtttctggaattaaaggatggccaacagatcccagtgttcaagctctctggggaaaatggcgacgaggtcaagaaggaatag

SEQ ID NO: 197253 - DNA, 441 bp, Artificial Sequence
  derived and/or modified sequence
atgatgtggcagaagtacgccggcagccggcggagcatgcccctgggggccaggattctcttccacggcgtgttctacgccgggggatttgccatcgtctattatctaattcagaagtttcattcccgcgccctctactacaagttggcagtggagcagttgcagtctcatcctgaggctcaggaggcgctcgggccgcctttgaacattcactacctgaagcttatcgacagggagaattttgtcgacattgtggatgcaaagttgaaaatcccggtgagtgggagcaaatccgaggggttactatatgtgcattcatcacgaggcggtccttttcaacgctggcacctcgacgaagtcttcttggagctaaaggatgggcagcagattccagtgttcaagctctccggtgaaaatggtgacgaggtaaagaaagaatag

SEQ ID NO: 197254 - DNA, 342 bp, Artificial Sequence
  derived and/or modified sequence
atgatgtggcagaagtacgccggcagccggcggagcatgcccctgggggcccgcattttgtttcatggagtgttttacgctgggggctttgcgatcgtgtactacctgatacagaagttccactcacgggccctttattacaaactcgccgttgagcagctgcagtcccacccagaggcccaagaagctctggggccccctcttaatatccattatcttaaactgatcgaccgggagaatttcgtggatattgtcgatgctaagctcaaaatccctgtatctggcagcaagtcggaagggctgttgtacgtacactcctcacggggggggcctttccaatag

SEQ ID NO: 197255 - DNA, 267 bp, Artificial Sequence
  derived and/or modified sequence
atgatgtggcagaagtacgccggcagccggcggagcatgcccctgggggcccgaattctgttccatggagtgttttatgctgggggttttgctattgtgtattacctgattcagaaattccattcacgtgcgttgtactataaactagccgtggaacaactgcagtcacacccagaggcccaagaagcccttggtcctccgttaaatatccactacctgaaactgattgatcgcgagaacttcgttgatatcgttgatgcaaaatag

SEQ ID NO: 197256 - DNA, 441 bp, Artificial Sequence
  derived and/or modified sequence
atgatgtggcagaagtacgccggcagccggcggagcatgcccctgggagcaaggatactgtttcacggagtgttttacgcaggtggcttcgccatagtctattatcttatccagaaattccattcaagggccctgtattataagttagccgtggaacagcttcagtctcaccccgaggcgcaagaggctctgggaccccccttaaacatccattatttgaaactaattgaccgagagaactttgtggacattgtggatgcaaagctcaagattccggtctccggctcaaagtcagagggtcttctgtacgtgcacagtagtaggggaggaccatttcaacgctggcacctggatgaggtctttttagaactcaaagatggacaacaaatccccgtgtttaagttatccggggaaaacggtgatgaggtcaagaaggaatag

SEQ ID NO: 197257 - DNA, 441 bp, Artificial Sequence
  derived and/or modified sequence
atgatgtggcagaagtacgccggcagccggcggagcatgcccctgggagcaaggatcctgtttcacggcgttttctacgcagggggctttgccatagtgtactacctgatccagaagttccactctagggcactgtactacaaactggccgtggagcaattacaatctcaccctgaagcacaggaggctcttggcccccccctaaacatccattatctcaaactgatcgatcgggaaaactttgtggatattgtggatgccaagctcaaaatccccgtgagtggatctaagtctgaagggctcctttatgtgcatagttcacgaggcggtccttttcagcgttggcacttggatgaagtgtttttggaactgaaggacgggcagcagataccagtgtttaagttatccggggaaaacggagatgaggtgaaaaaagaatag

SEQ ID NO: 197258 - DNA, 441 bp, Artificial Sequence
  derived and/or modified sequence
atgatgtggcagaagtacgccggcagccggcggagcatgcccctgggcgctaggatcctctttcacggggtattctacgcagggggattcgccatcgtgtactaccttatccagaaatttcatagccgtgctttgtactataaactagctgttgagcaactgcagtcacatcccgaggcccaggaagctcttgggccacccctcaacatccattatctgaaattgatcgaccgggagaattttgtagacatcgttgacgcgaaattgaagattcctgtgtcaggatccaagtctgagggcctgctgtacgtacattcgagccgggggggaccattccagcggtggcacctggatgaagtcttcctggagctgaaggacggacagcaaatcccagtgttcaagttgtccggcgagaatggcgatgaggtgaagaaagagtag

SEQ ID NO: 197259 - DNA, 441 bp, Artificial Sequence
  derived and/or modified sequence
atgatgtggcagaagtatgcaggttctcggcgaagcatgcctcttggcgctcgaatactttttcatggcgtgttctacgccggtggttttgcgatcgtctactatctgatccagaaattccactccagggcgctgtattacaaactggcagtggaacagctccaaagccaccctgaagctcaggaggccctggggccaccactaaatatccactacctcaagctgatcgatagggaaaactttgtcgatatcgttgatgcaaagctgaaaattccggtttccgggtctaagtccgagggcctgctgtacgtgcactcaagccgcggaggtccgttccagcgatggcatctggatgaggtatttctagaattgaaggatgggcagcagatccccgtttttaagcttagcggtgagaatggcgacgaggtgaagaaggagtag

SEQ ID NO: 197260 - DNA, 441 bp, Artificial Sequence
  derived and/or modified sequence
atgatgtggcagaagtacgctggatcccggagatctatgcctttgggagctaggattctatttcacggcgtgttctatgcaggagggttcgcaattgtctattaccttatacagaagttccattcccgggctctctattacaagctggccgtcgaacagctgcagtctcatcccgaggcccaagaggcgctcggtcctccacttaacatccactacctgaagctgatagatcgggaaaatttcgtggacatcgtagacgctaagctgaagatccctgtctcaggcagtaagagtgaggggctactttacgtccatagcagccgagggggaccctttcaacgatggcacctcgacgaagtgtttctggagttgaaggacgggcaacagatccctgtcttcaaacttagcggggagaacggagacgaggtgaaaaaggagtag

SEQ ID NO: 197261 - DNA, 441 bp, Artificial Sequence
  derived and/or modified sequence
atgatgtggcagaaatacgccggtagccgtagaagcatgccactcggagcgaggatcctgtttcacggcgtattctacgccggaggattcgctatcgtttattatctgatccagaagtttcattctcgggctctctattacaaattagctgtagaacaactccagtcacaccccgaagctcaagaggccctgggtcctccactaaacattcactacctgaaactcattgatagggaaaattttgtggatatcgttgatgctaagctgaagattccagtgagcggatctaagtccgaaggcctgctgtacgtgcattcatcacgtggaggacccttccagcggtggcatcttgacgaggtttttctggaattgaaagacgggcagcaaattccggtgtttaaacttagcggtgaaaacggagacgaggtgaagaaggagtag

SEQ ID NO: 197262 - DNA, 441 bp, Artificial Sequence
  derived and/or modified sequence
atgatgtggcaaaagtacgcagggtccaggcgcagcatgcctcttggcgctaggatcctattccatggtgttttttacgccggagggttcgctattgtgtattaccttattcagaaatttcactcacgtgcactctattataagttagcagtggagcagctccagagtcaccccgaagcccaggaggccctcggacccccactcaacatccactatcttaaattaatcgatcgggagaattttgtagatatcgtggatgctaaactgaagatccccgtgagcggttctaaatccgaaggactgctctacgtgcacagcagtagggggggacccttccaaagatggcatctcgacgaagtgttcctcgagctcaaagatggtcagcagatacctgtgttcaaattgtcaggggagaacggggacgaggtcaaaaaagagtag

SEQ ID NO: 197263 - DNA, 342 bp, Artificial Sequence
  derived and/or modified sequence
atgatgtggcagaaatatgctggaagccgtcgaagcatgccgctgggggcaagaatccttttccatggcgtgttttatgccggaggctttgcaatagtgtactacctcattcaaaagtttcacagcagagcactttattataagttagccgtggagcagctccaaagccacccagaagctcaggaggcactgggcccacccctgaacattcactatcttaaactaatagaccgggaaaatttcgtggatatcgtagatgcaaaattgaaaatacccgtgagtggcagcaaatctgaaggcctgttatatgtccacagttcgcggggaggacctttccagtag

SEQ ID NO: 197264 - DNA, 267 bp, Artificial Sequence
  derived and/or modified sequence
atgatgtggcagaagtacgccggatcacggcgaagcatgccccttggggcacggatcctcttccacggggttttctatgccggaggcttcgctatcgtctactacttgattcagaaatttcactctagagcgctgtactataaactagcggttgaacagctacagtcccaccctgaggctcaggaggccctcggtcctcccttgaatattcactacctgaaactcatcgacagggaaaattttgtggacatcgtggacgctaaatag

SEQ ID NO: 197265 - DNA, 441 bp, Artificial Sequence
  derived and/or modified sequence
atgatgtggcagaagtacgcaggtagtaggagaagcatgcccctgggagccaggattctgtttcatggggtgttttatgcaggcggatttgccattgtttattatctgatccaaaaattccactcccgtgcgctctattataagttggcagttgaacaactacaatctcaccctgaggcacaagaagctctaggacccccactcaacattcactacctgaaattgattgaccgcgagaacttcgttgatatcgttgacgcaaaattgaagatccctgtaagtggatccaaatccgagggccttctttacgttcactctagcagagggggtccatttcagagatggcatctcgacgaggtgtttctcgagctaaaggacggacaacagatcccggtcttcaaacttagcggcgagaacggcgatgaagtcaagaaggaatag

SEQ ID NO: 197266 - DNA, 441 bp, Artificial Sequence
  derived and/or modified sequence
atgatgtggcaaaaatatgccggtagtcgacgttctatgcctctgggggcaaggatacttttccacggagttttctatgcgggtggcttcgctatagtgtattacctgatacagaagtttcattcacgggctctgtactataagcttgccgtggagcaactgcagtcgcacccagaagctcaggaggctctgggtccgcctctgaacatccattacctgaagctgattgaccgcgagaatttcgtggacattgttgacgccaagctgaaaatccccgtttccgggagcaagagtgagggtctgttatatgtccattccagcagaggcggaccctttcagaggtggcacttagacgaggttttccttgaactgaaggacggacagcaaattccagtttttaagctcagcggcgaaaacggggacgaagtcaagaaggagtag

SEQ ID NO: 197267 - DNA, 441 bp, Artificial Sequence
  derived and/or modified sequence
atgatgtggcaaaagtacgcagggtctagacggagcatgcctctgggcgcaaggattttattccacggcgtgttttatgccggagggttcgcaattgtgtactatctgatccaaaaattccatagtcgagccctttattacaaactggctgtggagcaattgcagtcccaccctgaagcccaggaagcactgggcccacctctgaacatacactatctcaagcttatcgaccgagagaacttcgtagatattgtggacgccaagctgaagataccagttagcgggagcaaatccgaggggctattgtatgtgcattccagcaggggagggccattccagaggtggcacctcgacgaggtgttcctggagctgaaggacggccagcaaatacccgtgttcaagttaagtggtgaaaacggggatgaggtcaaaaaggagtag

SEQ ID NO: 197268 - DNA, 441 bp, Artificial Sequence
  derived and/or modified sequence
atgatgtggcaaaagtacgccggctcgcggcgatccatgccactcggcgctaggatcctctttcatggcgttttttacgcagggggattcgctatcgtctattatctgattcaaaaatttcactcaagggccctgtattacaagctcgcagtggagcagctgcagtcacatccagaagcccaggaggctctgggaccaccgctgaatattcattatctgaagctgattgatagagaaaactttgtcgatatcgtcgatgccaaacttaaaatccctgtgagtgggagcaagtccgaaggactgctgtacgtccactcaagcagaggaggtccatttcagagatggcatcttgacgaggtcttcctggaactgaaggatggtcagcaaatccccgttttcaaactctcaggagagaatggcgacgaggtgaagaaagagtag

SEQ ID NO: 197269 - DNA, 441 bp, Artificial Sequence
  derived and/or modified sequence
atgatgtggcagaagtacgccggcagccggcggagcatgcccctgggcgcccgtattttgttccatggcgtgttttatgccgggggctttgccattgtatattatctgatacagaaatttcattcccgcgccctctactacaagctggccgtcgaacaactgcaaagccatcctgaggcacaagaagcactgggtccccccctgaatatccactacctgaagctcatagatcgggaaaactttgtggacatagttgatgcaaaactgaaaattcctgtgtccgggtcaaagtcagaaggtctcctctatgtccactcaagtagaggtggcccattccaacgttggcacttggatgaagtctttctggagttgaaagacggtcagcagattcccgtgtttaagctgtccggggaaaacggtgacgaggttaagaaggaatag

SEQ ID NO: 197270 - DNA, 441 bp, Artificial Sequence
  derived and/or modified sequence
atgatgtggcagaaatacgccggatctaggcgttctatgccgctcggcgcaagaatcctgtttcatggggtcttctacgccggaggatttgctatcgtatactatttgattcagaagtttcactcaagagcactgtactacaagcttgcagtcgagcagctgcagtcacacccagaggcccaggaggcactgggaccaccattaaacattcattacctgaagctgattgatcgggagaatttcgttgatattgtggatgcaaagttaaaaattcccgtcagtggctcaaagtctgaggggttgctgtacgttcatagcagcagaggcggaccgtttcagcgatggcacctggacgaagtttttttggagttaaaagatggacaacagatccctgtgttcaagttgagcggggagaacggcgatgaagtgaagaaagaatag

SEQ ID NO: 197271 - protein, 513 aa, Artificial Sequence [sequence omitted]

SEQ ID NO: 197272 - protein, 352 aa, Artificial Sequence
  derived and/or modified sequence
MALLGQALKWQQHQGLLPPGMTIDLFRGKAAVKDVEEEKFPTQLSRHIKFGQKSHVECARFSPDGQYLVTGSVDGFIEVWNFTTGKIRKDLKYQAQDNFMMMDDAVLCMCFSRDTEMLATGAQDGKIKVWKIQSGQCLRRFERAHSKGVTCLSFSKDSSQILSASFDQTIRIHGLKSGKTLKEFRGHSSFVNEATFTQDGHYIISASSDGTVKIWNMKTTECSNTFKSLGSTAGTDITVNSVILLPKNPEHFVVCNRSNTVVIMNMQGQIVRSFSSGKREGGDFVCCALSPRGEWIYCVGEDFVLYCFSTVTGKLERTLTVHEKDVIGIAHHPHQNLIATYSEDGLLKLWKP

SEQ ID NO: 197273 - DNA, 1542 bp, Artificial Sequence
  derived and/or modified sequence
atgagcatcgagatcgagagcagcgacgtgatcagactgatcatgcagtacctgaaggagaacagcctgcacagagccctggccaccctgcaggaggagaccaccgtgagcctgaacaccgtggacagcatcgagagcttcgtggccgacatcaacagcggccactgggacaccgtgctgcaggccatccagagcctgaagctgcccgacaagaccctgatcgacctgtacgagcaggtggtgctggagctgatcgagctgagagagctgggcgccgccagaagcctgctgagacagaccgaccccatgatcatgctgaagcagacccagcccgagagatacatccacctggagaacctgctggccagaagctacttcgaccccagagaggcctaccccgacggcagcagcaaggagaagagaagagccgccatcgcccaggccctggccggcgaggtgagcgtggtgccccccagcagactgatggccctgctgggccaggccctgaagtggcagcagcaccagggcctgctgccccccggcatgaccatcgacctgttcagaggcaaggccgccgtgaaggacgtggaggaggagaagttccccacccagctgagcagacacatcaagttcggccagaagagccacgtggagtgcgccagattcagccccgacggccagtacctggtgaccggcagcgtggacggcttcatcgaggtgtggaacttcaccaccggcaagatcagaaaggacctgaagtaccaggcccaggacaacttcatgatgatggacgacgccgtgctgtgcatgtgcttcagcagagacaccgagatgctggccaccggcgcccaggacggcaagatcaaggtgtggaagatccagagcggccagtgcctgagaagattcgagagagcccacagcaagggcgtgacctgcctgagcttcagcaaggacagcagccagatcctgagcgccagcttcgaccagaccatcagaatccacggcctgaagagcggcaagaccctgaaggagttcagaggccacagcagcttcgtgaacgaggccaccttcacccaggacggccactacatcatcagcgccagcagcgacggcaccgtgaagatctggaacatgaagaccaccgagtgcagcaacaccttcaagagcctgggcagcaccgccggcaccgacatcaccgtgaacagcgtgatcctgctgcccaagaaccccgagcacttcgtggtgtgcaacagaagcaacaccgtggtgatcatgaacatgcagggccagatcgtgagaagcttcagcagcggcaagagagagggcggcgacttcgtgtgctgcgccctgagccccagaggcgagtggatctactgcgtgggcgaggacttcgtgctgtactgcttcagcaccgtgaccggcaagctggagagaaccctgaccgtgcacgagaaggacgtgatcggcatcgcccaccacccccaccagaacctgatcgccacctacagcgaggacggcctgctgaagctgtggaagccctag

SEQ ID NO: 197274 - DNA, 1542 bp, Artificial Sequence
  derived and/or modified sequence
atgagtattgagatagagtccagtgacgtcattcgactcattatgcagtatctgaaagagaattccctgcatagggcgctggcgacgttgcaggaggagaccactgtgagcctgaacaccgtggattctatagagtcctttgtggcagacatcaattctggacactgggacaccgtacttcaagctatccagagcctcaaactgcccgacaagacgctaatcgatctgtacgaacaggtggtgctggagctcatcgagcttagagaattgggtgctgcaagatctctccttaggcagactgaccccatgatcatgctaaaacagacccagcctgaaagatatatccaccttgagaacctcttggcgcgtagctatttcgacccgagagaagcgtaccctgacggctcctctaaagagaagcgtagagctgcaatcgctcaagcattagccggagaggtgtctgtggttccccccagtcggctcatggccctccttggccaggcactcaagtggcagcagcaccagggactcctccctccaggcatgaccatagacctttttcgcggtaaagcagccgttaaggatgtagaggaggagaagtttccgactcagctgtcccgccatataaagtttggccagaagtcccacgtcgagtgcgcacgcttctcaccagatggacagtatcttgtgaccggatctgtggacgggtttatcgaagtgtggaatttcacaaccggtaagataagaaaagatttgaagtaccaggcacaagacaacttcatgatgatggatgacgccgtgctgtgcatgtgtttttctcgcgacactgagatgttggccaccggtgctcaggacggcaagattaaagtgtggaagatccagtccggacagtgcctgcgaagattcgagcgtgcacatagcaagggcgtgacctgcctctccttctccaaagactcctcacagatcctgtccgcgtcctttgaccagacgatccgtatccatggtttaaaatctgggaaaacacttaaagagtttcgtgggcacagcagcttcgtgaacgaagccacattcacccaagacggtcattatatcatctcagcttcctccgacggcacggtgaagatttggaacatgaaaaccacagagtgctccaacaccttcaaaagcctggggtcaactgctgggacagacatcaccgtaaattcagtgatcctgctgcctaaaaatcctgaacacttcgtggtgtgcaaccgaagtaacacagtggtgattatgaatatgcagggacagatcgtcagatccttctcttcaggtaagcgagaaggcggcgattttgtgtgttgtgccctatccccacgtggagaatggatttactgtgtgggagaggatttcgttctctactgcttttcaaccgtgactggcaaattggagcgaacattaactgtccacgagaaggatgtcatcgggattgctcatcatccccaccagaatttgatagcaacatactccgaggacggcctgctgaaactctggaagccgtag

SEQ ID NO: 197275 - DNA, 1542 bp, Artificial Sequence
  derived and/or modified sequence
atgagcattgaaattgagagcagtgatgtgatccgcctcatcatgcagtacctgaaggagaacagcctgcaccgggccctggccaccctgcaggaggagaccaccgtgtccctgaacacagtggacagcattgagagctttgtggccgacatcaacagcggccactgggacacagtgctgcaggccatccagagcctgaagctgcctgacaagaccctgattgacctgtatgagcaggtggtgctggagctgattgagctgcgggagctgggcgccgcccggagcctgctgcggcagacagaccccatgatcatgctgaagcagacccagcctgagcgctacatccacctggagaacctgctggcccggagctactttgacccccgggaggcctacccagatggcagcagcaaggagaagagaagagctgccatcgcccaggccctggccggggaggtgtctgtggtgccccccagccggctgatggccctgctgggccaggccctgaagtggcagcagcaccagggcctgctgcccccaggcatgaccatcgacctcttccggggcaaggctgctgtgaaggatgtggaggaggagaagttccccacccagctgagccgccacatcaagtttggccagaagagccacgtggagtgtgcccgcttctccccagatggccagtacctggtgactggatctgtggatggcttcatcgaggtgtggaacttcaccaccgggaagatcaggaaggacctgaagtaccaggcccaggacaacttcatgatgatggatgatgctgtgctgtgcatgtgcttcagccgggacacagagatgctggccactggagcccaggacggcaagatcaaggtgtggaagatccagagcggccagtgcctgcggagatttgagcgggcccacagcaagggcgtgacctgcctgtccttcagcaaggacagcagccagatcctgagcgccagctttgaccagaccatccgcatccacggcctgaagagcggcaagaccctgaaggagttccggggccacagcagctttgtgaatgaggccaccttcacccaggacggccactacatcatcagcgccagcagtgatggcaccgtgaagatctggaacatgaagaccacagagtgcagcaacaccttcaagagcctgggcagcacagctggaacagacatcaccgtgaacagcgtcatcctgctgcccaagaaccctgagcactttgtggtgtgcaacagaagcaacacagtggtgatcatgaacatgcagggccagatcgtgcgctccttcagcagcggcaagcgggagggcggggactttgtgtgctgtgccctgagccccagaggagagtggatctactgtgtgggggaggactttgtgctgtactgcttcagcacagtgacaggcaagctggagaggaccctgactgtgcatgagaaggatgtgattggcatcgcccaccacccccaccagaacctgattgccacctacagtgaagatggcctgctgaagctgtggaagccctag

SEQ ID NO: 197276 - DNA, 7122 bp, Artificial Sequence
  derived and/or modified sequence
cgcgactggccttgagggagagctggggcctgctcccggagagatacggctatgtcgatcgaaatcgaatcttcggatgtgatccgccttattatgcagtacttgaaggagaacagtttacatcgggcgttagccaccttgcaggaggagactactgtgtctctgaatactgtggacagcattgagagttttgtggctgacattaacagtggccattgggatactgtgttgcaggctatacagtctctgaaattgccagacaaaaccctcattgacctctatgaacaggttgttctggaattgatagagctccgtgaattgggtgctgccaggtcacttttgagacagactgatcccatgatcatgttaaaacaaacacagccagagcgatatattcatctggagaaccttttggccaggtcttactttgatcctcgtgaggcatacccagatggaagtagcaaagaaaagagaagagcagcaattgcccaggccttagctggcgaagtcagtgtggtgcctccatctcgtctcatggcattgctgggacaggcactgaagtggcagcagcatcagggattgcttcctcctggtatgaccatagatttgtttcgaggcaaggcagctgtcaaagatgtggaagaagaaaagtttcctacacaactgagcaggcatattaagtttggtcagaaatcacatgtggagtgtgctcgattttctccagatggtcagtatttggtcactgggtctgttgatggattcattgaagtatggaactttactactggaaaaatcagaaaggatcttaagtaccaggcccaagataactttatgatgatggatgatgctgtcctctgcatgtgtttcagcagagatacagaaatgttagcaactggggcccaagatggaaaaatcaaggtgtggaagattcagagtggacaatgtttaaggagatttgagagggcacacagtaagggtgtcacctgtctaagcttttctaaggatagcagtcagatccttagtgcttcttttgaccagacaattagaattcatggtttaaaatctgggaaaaccctgaaggaatttcgtggccattcctcctttgttaacgaagcaacatttacacaagatggacattacattattagtgcatcctctgatggcactgtaaagatctggaatatgaagaccacagaatgttcaaatacctttaaatccctgggcagcaccgcagggacagatattaccgtcaacagtgtgattctacttcctaaaaaccctgagcactttgtggtgtgcaacagatcaaacacggtggtcatcatgaacatgcaggggcagattgtcagaagcttcagttctggtaaaagagaaggtggggactttgtttgctgtgccctctctccccgtggtgaatggatctactgtgtaggggaggactttgtgctctactgtttcagtacagtcactggcaaactggagagaactttgacagtgcacgagaaggatgtgattggtattgcacatcaccctcatcagaacctgattgctacctacagtgaagatggactcctaaagctctggaaaccataattcaacttttctttttaaatcagctcgaaagcatgtacttaaatgaagcatattcatgtaatgtgcttttttttttttttgccagcttttctaagcaaatagattgtctgaattagtcacagaataattttgtgaaaattcatgtttaagtagcaactaccctttctttttttatatatttttaaggtattagtttatcttcttctaactggtgcagtcacttaatgttttcattaatcttcgacctggagagtgaaatactgatatttctagaaaaaaattctactcctctgattatttgaaatgctgaggaaaatgtccctcccatagtaaaacttgtaaataaggaactatatcatattcagtagctgtgttctgttccatctttttttttttttttgagatggagttttgcttgttgcccaggctggagtgcagcggcacgatcttggttcactgcaacctccgcctcccaggttcaagcgattctcttgcctcagcctcccgagtagctggggactacaggtgtgcgacaccatgcctggctaatttttttgtatttttagtagagatggggtttcaccatgttggccaggctggtctcaaactcctgacctcaaaggatccacccgccttggcctcccaaagtgctgggatcacaggcgtgagccaccatgcccggcccatctttttttttttttttttttttaaagatgttaataaactttatacctttctggagactttgttctaaaatgtacataaatgctcatctagttaacatatttacttagaatgtgggaggaggagtcacattattatccctgaatctcaagtacagcagaagtgaattcctgggatagtaggatagactaacatgtaaaaaggccaggtgatgcataggttctcatttcactgccctcagccttcctctccttctgagctgtgccttctcacatgttcagtcaactccagggaatattgtctccatcttctggatagaactagttgcaggatccgttacaagaattcagagttttggcatctcccctttgtatgttgtaggagaaggtttggcattgaaaatgtgctgttgttccaaagaaaaattagcaaaggacttgagatttagaaaagtctcctttgtaatgtgcatcattaccagttatctaaagaaaaacatgtaaaagccaacaaaacccttgaaaatattttgcatatggatgtctgtttcacgtttcaactgaagatgtatagagcacctctgatgatgaggaagataccatgctaggcagtactttcaagaacgtgagttcttatttctgcaggccttttgtgcccccttttaaatgttagcatttattaggtacaaactagtggggaaggtttttttaaaaagttttgcagtcttgtaatttacctttttaaaaaatttattttatttttctgagatggagtcttgctctgttgcccaggctggagtgcagtggtgccatctcagctaactgcaacttccacttcccaggttcaagcgattctcctgccttagcctcccaagtagctgggactacaggcgcatgccagcatgcctggctaatttttgtatttttagtagagcgggggttttgccatgttggccaggctggtcttgaactcctgacctcaggtgatccgcctgccctggcctcccaaagtgctgggattacaggcatgagccactgcgcccagccttgtaatttacctttgatggtgacctgaaatgcagtatgatcctatatgtggcacgtagtaatgttcagtgtttgctgaattaattctgggcagcactaagaaatccctctttcccagtcatattctataacacatttcccatttgccacaaaacctgcagctttttggtccaggtaatgacatttgctgccattttgatgatttaaaaatggtcgtgggagttgaacatagtcatgaattcaggattcctgagcatgtagacagtcatcccagtggaaagacacgttcacttaagagaagtttaagttagaggaaacagtttatgctaaaaaaatttttagaaaagtccttgagaatttttgatttagtcttgacctcatgaagctggtagttatgatgtgcatagtttgtatcaccgtttatgaagatggagaatctagtcagcacgtgttggtttattctaggaatttttagggaacacttctgttgctggcaccaggtgatgaatatggttaaaaaaagactcgtttctgcctaaacatagggaagaagagcaaattaaaaggagtaattaaaactgataaaagctcaagttacctttgtgatgatgaggcgggcagttaacgcgaaagggttgggaaaggcttcctggagggactagggggcggtctaagcacagggaacctaaccggggactccagtgtggcacagcggcaaggtatgtgctgggcaaaatgataggtgtcttgggagaccaggcaaagagagctggattaggagccgttaagtatatatttttcttctttttaaataaaataatgcactgggtgaacatgtaaacgctaagttgaaaatctgcctttcccaggtaacccttgttaatctttctacaacttcatttcgtacaaacctgaaaaacacactgattttgtctttaaatgggcacacgctgcttacactcctcggcgcctagcctttctgaagccccacgcggccgtccctccagcattgaaggctggggcagcccagctcccctccagcgcccttacagccagaccgcggcggggtcgggccgcgcacgcgcagggcggacggccggatctggggcgccgctgctccgggtggtcggaggtaggagtcccatcttgggtccagggccggtagagccccttaccgggggtagggagactgcgcacccgctagagccaactgtcagggcctgcagacgtcgggtgacgtcactgttacaaaattggcggtcacatcgtcttaagggccggtggcagcggctgcgcgaacgggagttggctgccgggaatcagtgctcacttccttctgaattgggcgtgtgcagtcggttcctagggaagtgctctgctgcagccaccagatttaacggatgctgctctctagcacttaacatagaagctaaactacctggcgttaaaattaattccatgagcataaggacatttgtcctatcccctattctgctgttgaattaatgactggaaaacattgcgcggaggtatttgggagtagtatggctttttttttttttttttttttaacagcaaatggtataaatctcaggtacaattcagtatcttcttcaccagttgttttttttcagcatgtattattactaccactaacggcctctgttgagcccttccttgctatgtaagcagccatatttaattctcagaacaatgtaatgagggtgcgcaaatgcacatgaagaaacaggtttccagacgtgaggcacctaactcagtccaacttgcacgaagctcgcattgaaaaccagatgtgactccgaagctaggttttttttctctcttgcctcactctcaatattgctgtcagttcctcctcaatctttaggtttgggcagggacaaagaatacatggattgttcctccacatgctgcaaacacattcacctaagcagagcacaggtagtgagatgagtagagagaactgaattagaggattctggatgtcagtctttgctgtcacttcttttggcttgtgctagaacagtggttcttacaagtgtcacgtgatagacacattctaaggtcctatcccagacctacagaatcagaaattggtggtggggcccagcaagcgtgctcaaatttgagagcaggtagactacagggtagtttccgcatatacaaaaggtgttttaattcttgctgtcagtctcagaagtttcatgctgagataaccaaatttaaatgataaaggtgcaagactgactcttaaaatcacattttttcaaattgccatagcttgctagtgttctcattcactgtgcttttacagcttcattttccactattttaagagaagaaattgctatgaagtgtatgtccaagtgaggaagttccctggtctgaggttgtttaaaacttacaataggccgggcacggtggctcaagcctgtaatcccagcactttgggaggccgaggtgggtggatcacgaggtcaggagttcaagaccaccctggccaacatggtgacaccctgtctctactaaggatacaaaattagccgggcatggtggcacacgcctgtagtcccagctacctaggaggctgaggcaggagaatagctggaacccgggaggcagaggttgcagtgagctgagactgtgccactgcactccagcctgggtgacagagcaagacttggtctcaaaaacaaaaaacaaaaaaaccaaacttggaatagcaagggctgcccattatttaaccttccacggcaattttaacagtggtattctgttccaagtggttaatattaaatccatgtgtcagtgttggtggctttcaaccttggctgcgcataatcattttgatgcttaggctacacccagccgagttatacagaatccctggagggtgggacctgatgagtgttttaatgtttcccgggtaattccaatggtagccaaggttaagaaccagtaccgtacgtacaaaaaagttgagaagctaatttcacgtacagaaaatttgccactgttccaagagcactctcaagcgacataattggcctctactcctattccctacaagtatgaatgggcaggagaagcatcacagagaaagcagagttagtgctggaacttgtatttttgtggatgatgaccttggttaatgttttttcataggctctgtttcataggctttgttttttcataggctctccctcattacattgttctgagaattaaatatggctgcttacatagtaatgaagggttcaacagaggctgttagtggtagtaataatacaagctgaaaaactacacagacaaacctatcagtttctgcctcttcaggatataactattaggttagtgcaaaagtaattgcggtttttgccattaaaagtaatggcacattacttttgcaccaaccgacctaatatgactttcttttagtgttcttaggatttttaattgtaaaacatgtaacaaattttcctaaacaattgtgcaattcagtggcattatttacgatgttacgcaaccactattgtatttccaaaatgtcatcaccctaaacagaagccctgtaacattgtcaattaacttctccttcccttcccctcagcctttggtactgtttctgcctcaatgcatttgtctaagtttagttcatataagtgaaattatacaatacttgtccttttttatctggcttatttcatttagcatgttttaaaggttcatccatgtatcaaacagtaaagtgcttcatatttgggggaagtataaaaag

SEQ ID NO: 197277 - DNA, 1542 bp, Artificial Sequence
  derived and/or modified sequence
atgagcatcgagatcgagagcagcgacgtgatccggctgatcatgcagtaccttaaggaaaactctctgcacagagcactggctacattgcaagaggagaccactgtctctctgaacaccgtggactcaattgagtcgttcgtagccgacattaattcggggcattgggataccgtgctacaggccatccaatccctgaaactgcctgataaaaccctgatcgacctctatgagcaggttgtcctggagcttatcgagctgcgcgaactgggcgccgctcgatccctactgcggcagacggatcccatgatcatgttaaaacagacccagcctgagcggtacatccacctggagaatttgctggccaggagctactttgacccaagagaggcttatcccgatggaagttccaaggagaaacgacgcgccgctattgctcaggcgctggcgggcgaagtgtccgttgtgcctccaagcagactgatggcgttactgggccaggcacttaagtggcaacagcaccagggattgctccctcccggcatgactattgaccttttccggggaaaagccgcggtgaaagacgtcgaagaggaaaagttcccaacacagctgagccgacatattaagttcggacagaagtctcatgtggaatgcgctcgcttctcccccgatgggcagtatctcgtcaccggttccgtagacgggtttattgaagtttggaatttcacgacagggaagatccggaaagatttaaagtaccaggcccaggataactttatgatgatggacgatgcagttctttgcatgtgcttcagcagggacacggaaatgttagctacgggagcccaggacggaaaaattaaggtgtggaagatccaatctgggcagtgtctgcggcgcttcgaacgagcacattcaaaaggagttacctgcctgagtttctccaaagactcatcgcagattctgagcgctagttttgaccagacgatacggattcacggcctcaaaagcggaaagactttgaaagaatttagaggtcattcctccttcgtcaacgaggctaccttcacacaggatggtcattatattatctctgcgtcctctgacgggacggtgaaaatttggaatatgaagaccaccgagtgttccaatacatttaagtccttaggctctacagcggggactgatattacagtgaatagcgtgatcttactgccgaagaatcccgagcattttgttgtatgtaatcgctccaatacagtcgtgatcatgaatatgcagggtcaaatcgttagaagctttagctccgggaaacgcgaaggcggtgattttgtgtgctgcgccctgagccctaggggtgagtggatttattgcgtgggggaggactttgttctgtactgtttctcaactgtgactggtaaactagagagaactttaaccgtgcacgaaaaagatgtgattggaattgctcaccacccgcaccagaatctgattgccacgtacagcgaagacggattactgaaactctggaagccatag

SEQ ID NO: 197278 - DNA, 1542 bp, Artificial Sequence
  derived and/or modified sequence
atgtctatcgagattgagtctagcgatgtcatccgtttgatcatgcagtacttgaaagagaactctctacacagggctctcgctaccctccaggaagaaacgaccgtgagtctgaacactgtggactccattgagagtttcgtcgccgacattaactccggccactgggacacagtactccaggcgatccaaagcctgaagctgccagataagaccctgatcgatttatacgaacaagttgtgctcgaacttatcgaactgcgcgagttaggggctgctcggagcctactcagacaaacagatccaatgatcatgctgaaacaaacacaacctgagcgctacattcatctagagaatttgctcgcacgatcatattttgacccaagagaggcctatcccgacgggtcatcaaaggaaaagcgcagagccgcaatagcccaggctctggctggcgaagtgagtgtcgttccaccctccaggctcatggccctgttgggccaggcgctgaagtggcagcaacaccagggattgctgcccccaggtatgacaatcgacttattcagagggaaggctgctgttaaagatgtcgaggaggagaaattcccaactcaactgtctagacatattaagttcggacagaagtcacatgtcgaatgcgccaggttttctcccgatggccagtacctcgtgactgggagtgtcgacgggttcatagaggtctggaacttcaccacaggtaagattcggaaagatttgaaataccaagctcaggacaacttcatgatgatggatgacgctgttctctgtatgtgcttttcccgagataccgaaatgctggctacaggggcacaggacggaaaaattaaagtgtggaagatccagtccgggcaatgtctccggaggtttgagcgggcacattcgaaaggcgtaacatgtctctctttctccaaagattcctcccagattctttctgcctctttcgatcagacaatccgcatccatgggttgaaaagtggaaagacccttaaagagtttagaggacattcaagctttgtgaatgaggccacttttacccaggatggccattacatcatatctgcttccagtgatgggaccgtgaagatctggaacatgaaaacaacagaatgcagcaatacgttcaagtccttgggtagtaccgccggaactgacatcacagtgaactcagtcattctgctgcccaagaatcctgaacacttcgtggtgtgtaaccggtccaataccgtagtaattatgaacatgcaaggtcagatcgtgcgtagcttttcttctggcaagcgggaggggggtgactttgtctgttgtgcccttagcccacggggagaatggatttattgcgttggcgaggacttcgtgctgtactgtttcagcacggtcactggtaagctcgagagaaccctcaccgttcacgagaaggacgtgataggcatcgcgcaccacccccaccagaacctgatcgccacctactccgaagacggcctgctcaaattgtggaagccatag

SEQ ID NO: 197279 - protein, 494 aa, Artificial Sequence
  derived and/or modified sequence
MSATRSAYMEEEGVFHFHMEHPVPAYLVALVAGDLKPADIGPRSRVWAEPCLLPTATSKLSGAVEQWLSAAERLYGPYMWGRYDIVFLPPSFPIVAMENPCLTFIISSILESDEFLVIDVIHEVAHSWFGNAVTNATWEEMWLSEGLATYAQRRITTETYGAAFTCLETAFRLDALHRQMKLLGEDSPVSKLQVKLEPGVNPSHLMNLFTYEKGYCFVYYLSQLCGDPQRFDDFLRAYVEKYKFTSVVAQDLLDSFLSFFPELKEQSVDCRAGLEFERWLNATGPPLAEPDLSQGSSLTRPVEALFQLWTAEPLDQAAASASAIDISKWRTFQTALFLDRLLDGSPLPQEVVMSLSKCYSSLLDSMNAEIRIRWLQIVVRNDYYPDLHRVRRFLESQMSRMYTIPLYEDLCTGALKSFALEVFYQTQGRLHPNLRRAIQQILSQGLGSSTEPASEPSTELGKAEADTDSDAQALLLGDEAPSSAISLRDVNVSA

SEQ ID NO: 197280 - DNA, 1485 bp, Artificial Sequence
  derived and/or modified sequence
atgagtgccacaagaagcgcgtacatggaagaagagggtgtgttccacttccacatggagcatcccgtgcctgcttatctggtggctctggttgccggcgacctcaagccggctgatatcggcccaaggtcccgcgtctgggctgaaccttgcctgctgccaacggctaccagcaaactttctggcgccgttgaacagtggttatcggccgcagagcgattgtacggtccatacatgtggggtaggtatgacatcgtgtttctgcctcccagttttcccattgtggcgatggaaaacccttgtctgacttttataatctcctctatcctcgaatccgacgaatttctggtgatagatgtcattcatgaagtggcacacagttggtttgggaacgcagtcactaacgccacttgggaagaaatgtggctgagtgaggggctcgctacttacgctcagcggcgcattacgactgagacatatggggctgccttcacgtgcctagagaccgcgttccgactggatgcgctgcatcgacagatgaaactcctcggcgaggattctccggtcagcaagctccaggtgaaactagaaccgggcgtgaaccccagccacttaatgaatctttttacttatgaaaagggctattgtttcgtatattacctgtcccagctgtgcggggacccgcaacggtttgacgattttctgagagcatacgtcgaaaagtacaaattcactagcgtagtggctcaggatttgctcgattcattcctcagttttttcccagaactgaaagagcagagtgtggattgccgggccggccttgaattcgagaggtggctgaatgctacaggaccgccgctggctgaacctgatcttagccaggggtctagcctcactcgccctgttgaggccttattccagctttggacagctgaacccttggatcaggctgccgcctccgccagtgctattgatatttccaaatggagaacctttcagaccgcactattccttgaccgactgctggatggctccccgctccctcaggaggtcgtcatgtccctgtcaaaatgttactcatcactgctggattccatgaatgcagaaattaggataaggtggctgcagattgtggtaaggaacgattattaccccgatctccacagagttaggaggttcctcgaatctcagatgagcagaatgtatacaatccccctttatgaggacttatgcacaggagctttgaagagcttcgccctggaggtcttttatcagacacaagggcggctgcatcccaatctaagaagggcaattcagcagatactgagccagggactgggcagctctaccgagcccgcgtccgagccatccacagagttggggaaggcagaggctgacactgacagcgatgctcaggcgctgttgctcggggacgaagccccttcaagcgcgatctcattgcgcgatgtcaacgtgtccgcatag

SEQ ID NO: 197281 - DNA, 1485 bp, Artificial Sequence
  derived and/or modified sequence
atgtctgccaccaggtctgcctacatggaggaggagggcgtcttccacttccacatggagcaccctgtgcctgcctacctggtggccctggtggccggggacctgaagccagctgacatcggccccaggagccgggtgtgggccgagccctgcctgctgcccacagccaccagcaagctgtctggagctgtggagcagtggctgtctgctgctgagcggctgtatggcccctacatgtggggccgctatgacatcgtgttcctgcccccatccttccccatcgtggccatggagaacccctgcctgaccttcatcatcagcagcatcctggagagtgatgagttcctggtgattgatgtgatccacgaggtggcccacagctggtttggaaatgctgtgaccaatgccacctgggaggagatgtggctgtctgagggcctggccacctacgcccagaggcgcatcaccacagagacctacggggccgccttcacctgcctggagacagccttccggctggatgccctgcaccggcagatgaagctgctgggggaggacagccctgtgtccaagctgcaggtgaagctggagcccggggtgaaccccagccacctgatgaacctcttcacctatgagaagggctactgctttgtgtactacctgagccagctgtgtggggacccccagagatttgatgacttcctgcgggcctacgtggagaagtacaagttcacctctgtggtggcccaggacctgctggacagcttcctgtccttcttccctgagctgaaggagcagagcgtggactgccgggccggcctggagtttgagcgctggctgaatgccactggaccacccctggccgagccagacctgagccagggcagcagcctgaccaggcctgtggaggccctcttccagctgtggacagctgagcccctggaccaggccgccgccagcgccagcgccatcgacatcagcaagtggaggaccttccagacagccctcttcctggaccggctgctggatggcagccccctgccccaggaggtggtgatgagcctgagcaagtgctacagcagcctgctggacagcatgaatgctgagatccgcatccgctggctgcagatcgtggtgagaaatgactactacccagacctgcaccgggtgcggcgcttcctggagagccagatgagcaggatgtacaccatccccctgtatgaggacctgtgcaccggggccctgaagagctttgccctggaggtgttctaccagacccagggccgcctgcaccccaacctgcggcgggccatccagcagatcctgagccagggcctgggcagcagcacagagcccgccagcgagcccagcacagagctgggcaaggccgaggccgacacagacagtgatgcccaggccctgctgctgggagatgaggcccccagcagcgccatcagcctgagagatgtgaatgtgtctgcctag

SEQ ID NO: 197282 - DNA, 1485 bp, Artificial Sequence
  derived and/or modified sequence
atgagcgccacccggagcgcctacatggaggaggagggcgtgttccacttccatatggagcacccagtgccagcatatctggtcgctctggttgctggggacctcaaacccgcagacatcggccctagatcgagggtgtgggctgagccatgcttgctcccaaccgcaacatccaaactttcaggtgccgtggagcagtggttaagtgccgcagagcggctctatgggccctacatgtggggcagatacgacatcgtttttttgccgccgtccttccccatcgtggccatggagaacccttgtctgacttttatcatctcaagcattctggagtccgatgagttccttgtcatagatgttatccatgaggtggcacacagttggttcggaaacgctgtgactaatgcaacctgggaggagatgtggctgagcgaaggtctcgcaacctacgcacagcggcgtattacgacggagacatacggcgctgcattcacttgcttggagacagccttccgcctggatgctttgcatcggcagatgaaactactgggcgaggactcccctgtcagcaagttgcaagttaaactggagccaggagtcaatccgagccacttaatgaatctatttacatacgagaaaggctattgcttcgtgtactacctttctcaactttgcggagaccctcagcggttcgacgacttcctccgagcttatgtggagaaatataagtttacttcagtagtcgctcaggacctgctggacagctttttatccttctttccagaattaaaagaacagagtgtggactgccgtgctggactggagttcgagaggtggctaaatgctaccggccccccgctggcggagcctgacttaagtcagggcagcagtctgaccaggcctgtggaggccctgttccaattgtggacagccgaaccgcttgaccaggctgctgcctccgccagtgccattgatatctccaaatggcgaacattccaaacagctctctttttggaccggctgcttgacggtagcccactcccccaggaggtggtgatgagtctgagtaagtgttattccagcctgctcgatagcatgaatgctgagatccggattcgctggcttcaaattgttgtgaggaacgattattaccccgacttgcatcgcgtgcggcgctttctggagagccagatgagcagaatgtacactattccgctctatgaagacctgtgcacaggtgccttgaaatcctttgcattggaggtcttttaccagacccagggccgtttacaccccaacttgcgtcgcgctattcagcaaatactttcgcagggccttgggagttcaactgaaccggcgagcgagccaagcacggagctcgggaaggctgaggcagacaccgactctgatgcacaggccttgctgcttggcgacgaagcaccaagctctgctatttcattaagggacgttaatgtctccgcatag

SEQ ID NO: 197283 - DNA, 1485 bp, Artificial Sequence
  derived and/or modified sequence
atgtcggctaccaggagcgcttatatggaagaagaaggagtattccacttccatatggagcaccctgtgcctgcctatctggttgcgctggtcgccggtgatctgaaacctgccgatattggcccaaggtcacgtgtctgggcggaaccgtgtctcttgcccacagcgacttctaaactgagcggagctgtggagcagtggttgagtgccgctgagcgtctgtacggaccctacatgtggggtcggtacgacattgtgtttcttcctccttctttccccattgtggcaatggaaaatccatgcctgaccttcattataagcagcatcttggaaagtgacgaatttctcgtgatagatgtcattcatgaagtggcccattcttggttcggcaatgccgtaaccaacgcaacttgggaggaaatgtggctgagtgaaggactggcaacctacgctcagcgtcgtatcactaccgagacatacggcgcagcatttacatgtctcgagactgcatttcggctggatgcactgcacagacagatgaagttactgggagaagattctcccgttagcaaattgcaggtgaagttggagcccggtgtcaatccctcacacctcatgaatttgttcacatacgagaagggatattgcttcgtgtactacttgtctcagctatgcggcgaccctcagaggtttgacgattttctgagggcctatgtggaaaaatataaattcacaagtgtggttgcccaggacctcttggattcctttctttctttcttccccgaactaaaggagcaatctgtcgattgccgggcaggcctggaattcgagcgttggctgaacgctactggccctcccttggctgagccggatctctctcagggaagcagccttacccggcctgtggaggcactcttccaactatggactgcagagcctttggaccaggctgcagccagcgcttcagccatcgatatatctaagtggcgcacttttcaaaccgctttgttcctggatcggctactagacggatcgccactccctcaagaggtggtgatgtctctgagtaagtgctacagctctctcctggactcaatgaacgccgagattcggattcgctggctacagatagttgtgcggaatgattactatcccgacctccaccgcgtgagacgtttcctggaatctcagatgagtcgtatgtacacgattcctttgtacgaggatctttgcacaggggctctgaagtcctttgcactggaagtgttttaccagacacagggcagactgcatcctaatctaagacgcgctatccaacagatcctcagtcaggggctcgggagctctaccgagcccgcatctgagccgtctactgagttgggcaaggctgaggcagacaccgatagtgatgcccaggcactgctgctcggcgatgaagctccaagctcagccatttctctgcgggacgtcaatgtgtctgcttag

SEQ ID NO: 197284 - DNA, 2918 bp, Artificial Sequence
  derived and/or modified sequence
ccagcgcgcagctcttccgcctccgccacctgcagctgggcctggagctgcggcccgaggcgcgcgagttggccggctgcctggtgctcgagctgtgcgcgctgcggcccgcgccccgcgcgctcgtgctcgacgcgcacccggctctgcgcctgcactcagccgccttccgtcgcgcccccgccgccgccgccgagacgccctgcgccttcgccttctccgcccccgggccggggcccgcgccgccgcccccgctgcccgccttccccgaggcgcccggctccgagcccgcctgctgtccgctggccttcagggtggacccgttcaccgactacggctcctcgctcaccgtcacgctgccgcccgagctgcaggcgcaccagcccttccaggtcatcctgcggtacacctcgaccgacgcccccgccatctggtggctggacccagagctgacctatggctgcgccaagcccttcgtcttcacccagggccactccgtgtgcaaccgctccttcttcccgtgcttcgacacacctgccgtgaagtgcacctactctgccgtcgtcaaggcgccatcgggggtgcaggtgctgatgagtgccacccggagtgcatacatggaggaagaaggcgtcttccacttccacatggagcaccccgtgcccgcctacctcgtggccctggtggccggagacctcaagccggcagacatcgggcccaggagccgcgtgtgggccgagccatgcctcctgcccacggccaccagcaagctgtcgggcgcagtggagcagtggctgagtgcagctgagcggctgtatgggccctacatgtggggcaggtacgacattgtcttcctgccaccctccttccccatcgtggccatggagaacccctgcctcaccttcatcatctcctccatcctggagagcgatgagttcctggtcatcgatgtcatccacgaggtggcccacagttggttcggcaacgctgtcaccaacgccacgtgggaagagatgtggctgagcgagggcctggccacctatgcccagcgccgtatcaccaccgagacctacggtgctgccttcacctgcctggagactgccttccgcctggacgccctgcaccggcagatgaagcttctgggagaggacagcccggtcagcaaactgcaggtcaagctggagccaggagtgaatcccagccacctgatgaacctgttcacctacgagaagggctactgcttcgtgtactacctgtcccagctctgcggagacccacagcgctttgatgactttctccgagcctatgtggagaagtacaagttcaccagcgtggtggcccaggacctgctggactccttcctgagcttcttcccggagctgaaggagcagagcgtggactgccgggcagggctggaattcgagcgctggctcaatgccacaggcccgccgctggctgagccggacctgtctcagggatccagcctgacccggcccgtggaggcccttttccagctgtggaccgcagaacctctggaccaggcagctgcctcggccagcgccattgacatctccaagtggaggaccttccagacagcactcttcctggaccggctcctggatgggtccccgctgccgcaggaggtggtgatgagcctgtccaagtgctactcctccctgctggactcgatgaacgctgagatccgcatccgctggctgcagattgtggtccgcaacgactactatcctgacctccacagggtgcggcgcttcctggagagccagatgtcacgcatgtacaccatcccgctgtacgaggacctctgcaccggtgccctcaagtccttcgcgctggaggtcttctaccagacgcagggccggctgcaccccaacctgcgcagagccatccagcagatcctgtcccagggcctgggctccagcacagagcccgcctcagagcccagcacggagctgggcaaggctgaagcagacacagactcggacgcacaggccctgctgcttggggacgaggcccccagcagtgccatctctctcagggacgtcaatgtgtctgcctagccctgttggcgggctgaccctcgacctcccagacaccacaattgtgccttctgtgggccaggcctgccatgactgcgtctcggctctggccatgagctctgcccaggcccacaagcccctcccctgggctctcccaggcagggagaatggggagagggacctccttgtgtctggcagagacctgtggacctggcctccccactcccagctctcttgcactgcaggccctggggccagcccgcacacaccatgcctcctgtctcaacactgacagctgtgcctagccccggatgccagcacctgccaggtgccgccccggggcaagggccccagcagccctatggtgaccgccacactgtgccttaatgtctgccgggggcccaggctgtgctgtccctgcagcacgcctccttgcagggatctgagccaccctccccgcacagccctgcaccccgcccctggggttggcagcctcagttggcccctggcagaggaacaaggacacagacattccctcagtgtggggggcaggggacacagggagaggatggttgtccctggggagggccctctggccccaggcaaccttagcccctcagaacagggagtcccaggacccagggagagtgtggggacaggacagcctgtctcttgtagcttcctggggtgggaggcacaggggcaaagcaataccccagggaaagtgggaggtggtgctggtgctctctccaggcccaccatgctgggagaggcggccagagcctggggcctccagcctgggactgctgtgatggggtatcacggtgatggtcccattaaacttccactctgcaaacctga

SEQ ID NO: 197285 - DNA, 1485 bp, Artificial Sequence
  derived and/or modified sequence
atgagcgccaccagaagcgcctacatggaggaggagggcgtgttccacttccacatggagcaccccgtgcccgcctacctggtggccctggtggccggcgacctgaagcccgccgacatcggccccagaagcagagtgtgggccgagccctgcctgctgcccaccgccaccagcaagctgagcggcgccgtggagcagtggctgagcgccgccgagagactgtacggcccctacatgtggggcagatacgacatcgtgttcctgccccccagcttccccatcgtggccatggagaacccctgcctgaccttcatcatcagcagcatcctggagagcgacgagttcctggtgatcgacgtgatccacgaggtggcccacagctggttcggcaacgccgtgaccaacgccacctgggaggagatgtggctgagcgagggcctggccacctacgcccagagaagaatcaccaccgagacctacggcgccgccttcacctgcctggagaccgccttcagactggacgccctgcacagacagatgaagctgctgggcgaggacagccccgtgagcaagctgcaggtgaagctggagcccggcgtgaaccccagccacctgatgaacctgttcacctacgagaagggctactgcttcgtgtactacctgagccagctgtgcggcgacccccagagattcgacgacttcctgagagcctacgtggagaagtacaagttcaccagcgtggtggcccaggacctgctggacagcttcctgagcttcttccccgagctgaaggagcagagcgtggactgcagagccggcctggagttcgagagatggctgaacgccaccggcccccccctggccgagcccgacctgagccagggcagcagcctgaccagacccgtggaggccctgttccagctgtggaccgccgagcccctggaccaggccgccgccagcgccagcgccatcgacatcagcaagtggagaaccttccagaccgccctgttcctggacagactgctggacggcagccccctgccccaggaggtggtgatgagcctgagcaagtgctacagcagcctgctggacagcatgaacgccgagatcagaatcagatggctgcagatcgtggtgagaaacgactactaccccgacctgcacagagtgagaagattcctggagagccagatgagcagaatgtacaccatccccctgtacgaggacctgtgcaccggcgccctgaagagcttcgccctggaggtgttctaccagacccagggcagactgcaccccaacctgagaagagccatccagcagatcctgagccagggcctgggcagcagcaccgagcccgccagcgagcccagcaccgagctgggcaaggccgaggccgacaccgacagcgacgcccaggccctgctgctgggcgacgaggcccccagcagcgccatcagcctgagagacgtgaacgtgagcgcctag

SEQ ID NO: 197286 - protein, 490 aa, Artificial Sequence
  derived and/or modified sequence
MAQRAVWLISHEPGTPLCGTVRFSRRYPTVEKRARVFNGASYVPVPEDGPFLKALLFELRLLDDDKDFVESRDSCSRINKTSIYGLLIGGEELWPVVAFLKNDMIYACVPLVEQTLSPRPPLISVSGVSQGFEFLFGIQDFLYSGQKNDSELNTKLSQLPDLLLQACPFGTLLDANLQNSLDNTNFASVTQPQKQPAWKTGTYKGKPQVSISITEKVKSMQYDKQGIADTWQVVGTVTCKCDLEGIMPNVTISLSLPTNGSPLQDILVHPCVTSLDSAILTSSSIDAMDDSAFSGPYKFPFTPPLESFNLCFYTSQVPVPPILGFYQMKEEEVQLRITINLKLHESVKNNFEFCEAHIPFYNRGPITHLEYKTSFGQLEVFREKSLLIWIIGQKFPKSMEISLSGTVTFGAKSHEKQPFDPICTGETAYLKLHFRILDYTLTGCYADQHSVQVFASGKPKISAHRKLISSDYYIWNSKAPAPVTYGSLLL

SEQ ID NO: 197287 - DNA, 1473 bp, Artificial Sequence
  derived and/or modified sequence
atggcacagagggctgtgtggctcatcagccacgaaccaggaacccccctgtgcggaacagttaggtttagtagaaggtaccctaccgtggagaagagagccagggtttttaacggcgcttcatacgtccccgtgccagaggacggcccctttcttaaggcactactcttcgaattaaggctgctggacgacgataaagatttcgtcgagagccgagactcttgctctcgcataaataagacatctatctacgggctactaatcgggggagaagaactgtggcccgtggtagccttcctgaagaatgatatgatttacgcttgtgtgcctctcgtagagcagaccttgtcaccaagaccgcccctaattagcgtgtctggggtttctcagggctttgaattcctattcggcatccaggactttttatattccggacagaaaaacgacagtgagttaaataccaagctctcacagctacccgatctgcttttgcaggcctgcccattcgggacccttttggacgctaatctccagaacagcctcgacaatactaattttgcctctgtcacccagccacaaaagcaacctgcctggaagactggcacatacaaaggaaaaccacaagtttcgatatcgatcactgagaaagtcaagtctatgcagtatgataagcaaggcatcgcggatacatggcaagtggtgggcaccgtgacttgtaaatgtgacctagaagggattatgcctaatgtcacgatcagccttagcctgccgacgaacggtagtcctctccaggacattctggtgcacccctgtgtgactagtctcgattccgctatcttgacttcctcctctatcgatgctatggatgacagcgccttctccggaccatacaagtttccattcacaccccccctggagtcctttaacctgtgtttttacacatcacaggtgccagttccgcccattctgggattttaccagatgaaggaagaggaagtgcagctcagaatcactatcaacttgaagctgcacgagagcgtaaagaataacttcgagttctgtgaagctcatatccctttttataacagggggcctatcactcacctcgagtataaaacttccttcggccagctggaagtctttagagagaaatcactgctcatttggataatcggacagaagttccccaaatcaatggagatctccttgtcaggtactgttacttttggagccaaatcgcacgagaagcagccgttcgaccccatctgcaccggggaaaccgcctatctgaagctgcacttccgtatcctcgactataccctcacaggctgttacgcagatcaacattcagtgcaggtgttcgcttctggcaaacccaagatttccgcccaccgcaagctgattagtagtgactattatatttggaactccaaagcccctgccccagtgacgtatggatcccttctcctctag

SEQ ID NO: 197288 - DNA, 1473 bp, Artificial Sequence
  derived and/or modified sequence
atggcccagagagctgtgtggctgatcagccatgagcccggcacccccctgtgtggcaccgtgcgcttcagccgccgctaccccaccgtggagaagagggcccgggtcttcaacggggccagctatgtgcctgtgcctgaagatggccccttcctgaaggccctgctgtttgagctgcggctgctggatgatgacaaggactttgtggagagccgggacagctgcagccgcatcaacaagaccagcatctacggcctgctgattggaggagaggagctgtggcctgtggtggccttcctgaagaatgacatgatctatgcctgtgtgcccctggtggagcagaccctgagcccccggcccccactcatctctgtgtctggagtgtcccagggctttgagttcctgtttggcatccaggacttcctgtacagcggccagaagaatgacagcgagctgaacaccaagctgagccagctgcctgacctgctgctgcaggcctgccccttcggcaccctgctggatgccaacctgcagaacagcctggacaacaccaactttgcctctgtgacccagccccagaagcagcctgcctggaagacaggcacctacaagggcaagccccaggtgtccatcagcatcacagagaaggtgaagtccatgcagtatgacaagcagggcattgctgacacctggcaggtggtgggcaccgtgacctgcaagtgtgacctggagggcatcatgcccaacgtgaccatcagcctgagcctgcccaccaacggcagccccctgcaggacatcctggtgcacccctgtgtgaccagcctggacagcgccatcctgaccagcagcagcattgatgccatggatgattctgccttcagcggcccctacaagttccccttcaccccacccctggagagcttcaacctgtgcttctacaccagccaggtgcctgtgccccccatcctgggcttctaccagatgaaggaggaggaggtgcagctgcgcatcaccatcaacctgaagctgcacgagagcgtgaagaacaactttgagttctgtgaggcccacatccccttctacaacagaggccccatcacccacctggagtacaagaccagctttggccagctggaggtgttccgggagaagagcctgctgatctggatcatcggccagaagttccccaagtccatggagatcagcctgagcggcaccgtgacctttggagccaagagccatgagaagcagccctttgaccccatctgcaccggggagacagcctacctgaagctgcacttccgcatcctggactacaccctgaccggctgctacgccgaccagcacagcgtgcaggtgtttgccagcggcaagcccaagatcagcgcccacaggaagctgatcagcagtgactactacatctggaacagcaaggccccagcccctgtgacctacggcagcctgctgctgtag

SEQ ID NO: 197289 - DNA, 3074 bp, Artificial Sequence
  derived and/or modified sequence
cgcgccagggaggttgtcgggaggggccggcgaataaaacgagcggcgaaagaaccgaaaaaaggctcgacgctaccgtgtatgaggaactttgatccttgcgggccaccattccggaagtagaatttagaggaagaaaataccggagttgcagggtataggtaaatttctcaaggttataggttggggttcttagaactttttgtggtgtgtgttggcctagagcgactcagaagcgttagtgacttcacctaaaaaagctaacctctctgctgagcgcgaccggtatgcggcgcaggatgagcctcagggcttctgttaagagtctgtctgagaaagccggtctgcgctgttcctcggtggcgaccttaattatgagatgagctaatgctttactgacttaaccatggcgcagcgggcagtgtggctcataagccacgaaccgggaactccactttgtggcaccgtgagattctccagacggtatccaactgttgaaaaacgagccagagtcttcaatggagcaagttatgtgcctgttcctgaagatggtccctttcttaaagcactgctctttgaacttagattattggatgatgataaagacttcgttgagagtcgtgatagctgttcacgcatcaataaaacatccatttatggactcctgataggaggtgaagaactctggccagttgttgcttttctgaagaatgacatgatatatgcttgtgttccactagttgaacaaactctgtcccctcgtccgccactaattagtgtcagtggagtttcacaaggctttgaatttctttttgggatacaggattttctttattcaggtcaaaaaaatgactctgagctgaatacaaaattgagccagttgcctgacttgcttctgcaggcttgtccatttggtactttattagatgccaacttacagaattcattagataataccaattttgcatctgtgactcagccacagaaacagccagcttggaaaactgggacgtacaaaggaaaaccacaagtttctatttctatcactgaaaaggtaaaatccatgcaatatgataaacagggtatagcagatacatggcaagttgttggaacagtgacttgcaagtgtgatttggaaggaatcatgccaaatgttaccatcagcttgagtctccccaccaatggatctccacttcaggatattctagttcacccttgtgtaacttctcttgactctgcaattctgacttctagtagtattgatgcaatggatgactctgcatttagtgggccttacaaatttccattcactccacctttagagtcattcaacttatgcttctacacttcccaggtccctgtcccaccaattttgggtttttatcaaatgaaggaggaagaagtacaactaagaataaccattaatttaaaacttcatgaaagtgtgaaaaataattttgaattctgtgaagcccatatacctttttacaatagaggtccaattacacatttggaatacaaaactagttttggccagcttgaagtatttcgagagaaaagcttattgatctggattattggccagaagttcccaaaatcaatggaaattagtctttctggaactgtaacttttggagccaagagccatgagaagcagccatttgacccaatttgtactggagaaacagcatatttaaagcttcattttaggatcttagattacacacttactggatgttatgcagatcagcattcagttcaagtttttgcatcaggaaaaccaaaaataagtgcacaccggaaactaatttcttctgattattacatctggaattctaaagcccctgctccagtaacatatggatcattattattgtaatagtctcatgtttaaatgggattatataatgataacagtttaaagaaaatcataatcttatatttttaatgtggatgcatataacctgtgagtgaaaaatcactgaatgatttaattgtaaaagtagtcttatgtggtgtttgtagtctgatagagcttgaaaggacattttaaaagctaatgtctccaattttgttaaccttcgattttatgccagtataattcagaacatagaaaagtaatgattcacttgggctcattttagactggtcctgggtcaccctgccacacttgtttcctagtgtttctgtggcagacattgctaatcaattacagcccttttctgtactgagccttggataaagggtcaggctcctttttagttcagagattcaggcagccactcccagtgggttgtagataatgtgcaagataaaaactattttctcttccaaatctaagtactaagctcctagtataaggtgttgttacagaataccagagaccatgttagagacaactacatctcttcaaaaaacagccaacagagacaaaggaaaagtgtttaaatagtaagctgttcttcttaatcagaactatcctattgactaataaataatctgcataattctacttaaggtgtgtaatctctgttctagagttagtttttaagtaagcttgttaatctgccactttgacattttgcttaggatgtcagtagccatattaagatgtgtagaataccttcagaagatgatcatagtgttttgtaatcatttaatgtctgcagccaaatttttaaaggtaatttagacctaatactgctcttgctgtgtcttattaagttaaaattaatgaatgaattctggtaaaaattcaaaaggcactctgtgagtagagagtatcatttaagcttattttagtcacatgtagtatatatctccttaaagctgtcactctcactttcttaccattctcttgatttcttcagaaaccatctagtcatcatctttatactctacctgcttctgcaattatatatcatattatgttttcagagcagttcattgtcaagttggactttaagtgaccattcaagaaaagatgaaatctcacgaacctcaaaacttcattcatgtctttttacaaatgagaaaaaaaaatgcattaaagattaatactcaatttgattata

SEQ ID NO: 197290 - DNA, 1473 bp, Artificial Sequence
  derived and/or modified sequence
atggcccagcgggccgtgtggctgatcagccacgagcccggcacccccctgtgtggcacggttagattctccagacggtaccccaccgtcgagaagagagctagagtcttcaacggagcctcatacgtcccagtcccggaagacgggcctttcttgaaagccctcctctttgaactgcgtctcctagatgacgacaaggactttgtcgagagtcgtgactcctgtagccgtatcaacaaaacaagcatctacggcctactgattggtggcgaggagttatggcccgtggttgctttcctaaaaaatgatatgatttacgcttgtgtgcccttagtcgagcagactctgagtccccggcctcctctgatttcagtgtccggcgtttcacaggggtttgagtttttatttggtattcaggatttcctgtattcgggtcagaagaatgattccgaactcaacaccaagctctcccagctgccagacctactcctgcaggcgtgccctttcggcacactgctagatgctaatctgcagaactcactggacaatacaaactttgctagcgtcacccagccacagaagcagccggcgtggaagacaggaacctacaaggggaaacctcaggtttccatttctattacggagaaggtgaagtcaatgcagtacgacaagcagggaatcgctgacacctggcaggtggtaggcactgtgacctgtaagtgcgacctggagggcattatgcctaatgtgaccatctcactttcactgccgactaatggcagccccctgcaggacatccttgtccacccatgtgtgacttccctggactccgccattctaacctcttcttctatcgatgctatggatgattctgcgtttagcgggccttataagtttccattcacaccgcctttggaaagttttaacttgtgcttttacacatcccaggtgccggtccccccaattctggggttctatcagatgaaggaggaggaggtccagctgcgtattacgattaatttgaagttgcacgaatcagtcaagaacaatttcgagttttgtgaggcacacattcccttctataataggggcccaattacccatttggagtacaagacaagtttcggccagctcgaggtcttcagagaaaagagtctgctcatttggatcattggacagaaattccccaagagtatggagatatccctctctggaaccgtgacattcggcgctaaatcacacgaaaaacagccattcgaccccatctgtaccggagagaccgcatacctgaaattacactttcgtatcctcgactacacgctgacaggttgttacgcagaccagcacagcgtacaggtgttcgccagtggcaaacctaaaatctccgcacatagaaagcttatctcaagcgactactatatctggaactctaaagcacccgcacccgtgacatacggctcactgctgctgtag

SEQ ID NO: 197291 - DNA, 1473 bp, Artificial Sequence
  derived and/or modified sequence
atggctcagagggcggtctggttaatttcacacgagccaggcactccgctgtgtggaactgtgcggttcagccgacgctatccaacagtcgagaagcgggctagagttttcaatggcgcatcttatgtgccggtaccagaggacggacccttcctgaaggcattacttttcgaactgagattgctagacgacgataaagacttcgtcgaaagtcgggactcatgttcaaggatcaacaaaacctccatttatggactcttgataggaggcgaagagctctggcccgtggtggcttttctgaaaaacgatatgatctatgcctgtgtgcctctggtagagcagaccctgagcccacggcctccgctgatttcagtctccggcgtttctcagggcttcgagttcttgtttggcatacaggattttctgtactccggtcagaagaatgattcagagctgaataccaaattatctcaactgccagatttgctacttcaggcttgtcctttcggtaccctgctggatgcaaacctgcagaactcactggacaataccaacttcgcctccgttacacagccacagaagcagcctgcttggaagacggggacttacaagggaaaaccacaggtctccatcagcattaccgagaaagtgaagtcaatgcaatacgataagcagggtatagccgacacttggcaggtggtcggcacggtgacatgtaaatgcgacttagagggcatcatgcccaatgttacaattagtttgtctctcccaacaaatgggtcacctctgcaggacattctcgtacacccttgtgttacgtcgctggatagcgccatcctaacatcctcctccattgatgcaatggatgactctgccttcagtgggccttacaagtttccctttacccctcctctcgaaagcttcaatctgtgtttctacactagtcaggtgccggtcccgccaattttagggttctaccagatgaaagaagaggaagtgcagctgagaattaccatcaacctcaagctgcatgaaagcgtgaagaacaactttgaattctgcgaagctcatattccattttacaaccgagggccaattacccatctggagtacaaaacgtcctttggtcagcttgaagtgtttcgcgagaagtccctgctgatttggattatcggccagaagtttccaaagagcatggaaatttctctgagcggtaccgtgacgttcggtgccaaatcacacgaaaaacaaccattcgatcctatctgtaccggggaaaccgcttatttgaaactgcacttcaggatcctggattataccctgacaggttgctatgctgatcagcatagtgtgcaggtcttcgccagcggcaagcccaagattagcgcccatcgaaaactcatatcctccgattattacatctggaatagcaaggctccggctccggttacttacgggtcattacttctatag

SEQ ID NO: 197292 - DNA, 1473 bp, Artificial Sequence
  derived and/or modified sequence
atggcccagagagccgtgtggctgatcagccacgagcccggcacccccctgtgcggcaccgtgagattcagcagaagataccccaccgtggagaagagagccagagtgttcaacggcgccagctacgtgcccgtgcccgaggacggccccttcctgaaggccctgctgttcgagctgagactgctggacgacgacaaggacttcgtggagagcagagacagctgcagcagaatcaacaagaccagcatctacggcctgctgatcggcggcgaggagctgtggcccgtggtggccttcctgaagaacgacatgatctacgcctgcgtgcccctggtggagcagaccctgagccccagaccccccctgatcagcgtgagcggcgtgagccagggcttcgagttcctgttcggcatccaggacttcctgtacagcggccagaagaacgacagcgagctgaacaccaagctgagccagctgcccgacctgctgctgcaggcctgccccttcggcaccctgctggacgccaacctgcagaacagcctggacaacaccaacttcgccagcgtgacccagccccagaagcagcccgcctggaagaccggcacctacaagggcaagccccaggtgagcatcagcatcaccgagaaggtgaagagcatgcagtacgacaagcagggcatcgccgacacctggcaggtggtgggcaccgtgacctgcaagtgcgacctggagggcatcatgcccaacgtgaccatcagcctgagcctgcccaccaacggcagccccctgcaggacatcctggtgcacccctgcgtgaccagcctggacagcgccatcctgaccagcagcagcatcgacgccatggacgacagcgccttcagcggcccctacaagttccccttcaccccccccctggagagcttcaacctgtgcttctacaccagccaggtgcccgtgccccccatcctgggcttctaccagatgaaggaggaggaggtgcagctgagaatcaccatcaacctgaagctgcacgagagcgtgaagaacaacttcgagttctgcgaggcccacatccccttctacaacagaggccccatcacccacctggagtacaagaccagcttcggccagctggaggtgttcagagagaagagcctgctgatctggatcatcggccagaagttccccaagagcatggagatcagcctgagcggcaccgtgaccttcggcgccaagagccacgagaagcagcccttcgaccccatctgcaccggcgagaccgcctacctgaagctgcacttcagaatcctggactacaccctgaccggctgctacgccgaccagcacagcgtgcaggtgttcgccagcggcaagcccaagatcagcgcccacagaaagctgatcagcagcgactactacatctggaacagcaaggcccccgcccccgtgacctacggcagcctgctgctgtag

SEQ ID NO: 197293 - protein, 462 aa, Artificial Sequence
  derived and/or modified sequence
MAQVSINNDYSEWDLSTDAGERARLLQSPCVDTAPKSEWEASPGGLDRGTTSTLGAIFIVVNACLGAGLLNFPAAFSTAGGVAAGIALQMGMLVFIISGLVILAYCSQASNERTYQEVVWAVCGKLTGVLCEVAIAVYTFGTCIAFLIIIGDQQDKIIAVMAKEPEGASGPWYTDRKFTISLTAFLFILPLSIPREIGFQKYASFLSVVGTWYVTAIVIIKYIWPDKEMTPGNILTRPASWMAVFNAMPTICFGFQCHVSSVPVFNSMQQPEVKTWGGVVTAAMVIALAVYMGTGICGFLTFGAAVDPDVLLSYPSEDMAVAVARAFIILSVLTSYPILHFCGRAVVEGLWLRYQGVPVEEDVGRERRRRVLQTLVWFLLTLLLALFIPDIGKVISVIGGLAACFIFVFPGLCLIQAKLSEMEEVKPASWWVLVSYGVLLVTLGAFIFGQTTANAIFVDLLA

SEQ ID NO: 197294 - DNA, 1389 bp, Artificial Sequence
  derived and/or modified sequence
atggcacaagtgagtataaataacgactacagcgaatgggatctgtcaacagatgctggcgagcgcgccaggttgctgcaatctccctgcgtagacaccgcacctaagagcgagtgggaagcctcgcctgggggcttagatcgtgggacaactagcacactaggggcaatttttattgtggtgaacgcatgccttggagccgggctcctcaatttccctgcggcgttttctaccgcagggggagtggctgccggtatagccctccagatggggatgctcgtgtttatcatctctgggctagtaattttagcctattgcagtcaggcatctaatgagagaacatatcaggaagtggtctgggccgtttgtggtaaactaacaggcgtgctctgcgaggtagccatcgccgtgtataccttcggcacctgtatcgcctttttgatcattattggcgaccagcaggataaaatcatcgcagtaatggccaaagagcccgagggggccagtggaccctggtataccgatcgaaagtttacaatctctctgacagcctttttattcatactgccactctccattcccagggagatcggattccagaaatacgcttccttcctcagtgtcgttggcacctggtatgtgactgcgattgttatcatcaagtatatttggccagacaaggagatgacacccggaaacatcctgactcgccccgccagttggatggctgtgttcaacgccatgccgaccatctgctttgggttccagtgccacgtgagttccgtaccagtcttcaatagcatgcaacagccagaggtgaagacgtggggaggggtcgtaaccgcggccatggtgatcgccctcgctgtatatatgggaaccggcatatgtggatttctgacatttggtgccgccgtggatcctgacgtcctgctgtcttacccatctgaagacatggcagtcgcggtggcacgggcctttatcattctgtccgttttgacctcctatcctatcctgcacttctgtggtagggccgttgtggagggactgtggctgaggtaccagggcgtgcctgttgaggaagacgtgggcagagagaggagacggagggttttgcagaccctggtttggttcctccttacacttctgctcgcactatttattcctgacattggaaaggttatatcagtgataggaggtctcgccgcttgtttcattttcgtttttcctgggctctgcctcattcaggcgaaattaagcgaaatggaagaggtgaagcctgcgagttggtgggtgctcgtcagttatggcgtccttctggtgactctgggcgcattcattttcggccagactaccgcaaacgctatattcgtggacctgttggcctag

SEQ ID NO: 197295 - DNA, 1389 bp, Artificial Sequence
  derived and/or modified sequence
atggcccaggtgtccatcaacaatgactacagcgagtgggacctgagcacagatgctggggagcgggcccggctgctgcagagcccctgtgtggacacagcccccaagtctgagtgggaggccagccctgggggcctggaccggggcaccaccagcaccctgggcgccatcttcatcgtggtgaatgcctgcctgggcgccggcctgctgaacttccctgctgccttcagcacagctggaggagtggccgccggcatcgccctgcagatgggcatgctggtgttcatcatcagcggcctggtgatcctggcctactgcagccaggccagcaatgaaagaacctaccaggaggtggtgtgggccgtgtgtgggaagctgactggagtgctgtgtgaggtggccatcgctgtgtacaccttcggcacctgcatcgccttcctgatcatcatcggggaccagcaggacaagatcatcgctgtgatggccaaggagcctgagggcgccagcggcccctggtacacagacaggaagttcaccatcagcctgacagccttcctgttcatcctgcccctgagcatcccccgggagatcggcttccagaagtatgccagcttcctgtctgtggtgggcacctggtacgtgacagccatcgtcatcatcaagtacatctggccagacaaggagatgaccccaggcaacatcctgaccaggcctgcctcctggatggctgtgttcaatgccatgcccaccatctgcttcggcttccagtgccacgtgtcctctgtgcctgtgttcaacagcatgcagcagcctgaggtgaagacctggggcggcgtggtgacagctgccatggtgattgccctggccgtgtacatgggcaccggcatctgtggcttcctgaccttcggggctgctgtggaccctgatgtgctgctgagctaccccagcgaggacatggctgtggccgtggcccgggccttcatcatcctgtctgtgctgaccagctaccccatcctgcacttctgtggccgggctgtggtggagggcctgtggctgcgctaccagggcgtgcctgtggaggaggatgtgggccgggagaggagaagaagagtgctgcagaccctggtgtggttcctgctgaccctgctgctggccctcttcatcccagacatcggcaaggtgatcagcgtcatcggcggcctggccgcctgcttcatctttgtgtttcctggcctgtgcctgatccaggccaagctgtctgagatggaggaggtgaagccagcctcctggtgggtgctggtgtcctatggagtgctgctggtgaccctgggcgccttcatcttcggccagaccacagccaatgccatctttgtggacctgctggcctag

SEQ ID NO: 197296 - DNA, 1389 bp, Artificial Sequence
  derived and/or modified sequence
atggcccaggtgagcatcaacaacgactacagcgagtgggacctgtccaccgatgcgggcgagcgagcgaggctcctgcaatcaccatgcgttgatacagcgcctaagtctgaatgggaagcctctccaggaggactggacagagggacaacttccactctgggagcgatctttatcgtggtcaatgcctgtctcggagctggcctgctcaatttccctgcagccttttcaaccgccgggggagtggccgctgggatcgccctgcaaatggggatgctggtgtttatcattagcgggttggtaatcctggcatactgttcacaggctagcaatgaaaggacctaccaggaagtcgtgtgggcagtttgcggcaagctcactggcgtgttatgcgaggtagccattgcagtatacacctttggcacctgtatcgcctttctcattattattggagaccagcaggataagattatcgctgtgatggcgaaagagcccgaaggcgccagcggcccctggtacaccgacagaaaattcactatctctttgacagccttcctgttcatcttgccgctgagtattcctcgcgaaatcggattccagaaatacgcctcgtttctgagcgtcgtaggtacttggtacgttacggcgatagtaatcataaaatacatctggcccgacaaggagatgactccaggtaacatcctgacacggccagcctcgtggatggcagtgttcaatgcgatgccaactatttgcttcggtttccagtgccacgtctcaagcgtacccgtgtttaacagtatgcagcagcctgaggttaaaacgtggggcggagtggtgaccgccgcaatggttatcgctttggctgtctacatggggacaggtatttgtggtttcctgactttcggtgcggctgtggatcccgatgtgcttctgagctatccgtccgaagatatggctgtagcagtagcccgtgcctttatcatcttgagcgtgctcacatcctatccaattcttcacttttgcggtagagcagtagttgagggcctgtggcttagataccagggcgtgcctgttgaggaggacgtcggcagggaacgcagacgccgagtactgcaaactctggtgtggtttcttctgacactcttactagccctgttcatacctgatatcgggaaagtgataagcgtcatcggggggctggcggcatgttttatctttgtgttccctggtctctgcttgattcaggccaagctgtcggaaatggaagaagtcaaaccggcttcttggtgggtgctggtttcatatggcgtgttactcgtgacacttggtgcattcattttcgggcaaacaacagcaaatgcaatttttgtcgatctgcttgcctag

SEQ ID NO: 197297 - DNA, 1389 bp, Artificial Sequence
  derived and/or modified sequence
atggctcaggtgtctatcaataatgactacagcgaatgggacctgtctacagatgcgggtgagagagcccgattgcttcagtccccttgtgtggacactgcaccaaaatccgagtgggaagcatcccccggaggcctggacaggggaactacaagtaccctgggggcaatctttattgttgtcaatgcatgcctgggcgcaggcctactgaatttccccgctgcattttcgacagctggaggtgtggcggctggaattgcactgcagatgggaatgctggtttttattattagcggcctggtgattctggcctattgtagtcaggcgagcaatgaacggacctatcaggaggttgtgtgggctgtgtgtggcaaactgacaggtgtcctgtgcgaggtggccattgcggtgtacactttcgggacctgcatagccttcctgattattattggtgatcagcaagataagataatcgccgtgatggctaaggagccagagggagcctccgggccttggtacaccgatcggaaattcacaatctctttgacagcttttcttttcattctgcccttgtctatccccagggagatcggattccagaaatacgcctcttttctgtctgtggtgggaacctggtacgtcacagccatcgtaatcattaagtatatttggcccgataaagagatgaccccgggtaacattctcacaaggccagcgagttggatggccgtgtttaatgccatgccaactatatgtttcggcttccagtgtcacgtttcatcagtgcccgtcttcaactctatgcagcaacctgaggtaaaaacctgggggggagtcgtgacagccgcaatggtgatagctctggccgtgtatatgggcaccgggatctgcgggttcctgactttcggcgctgcggtggatccagacgttctgctatcatacccaagtgaggacatggctgtcgccgtcgctagggcgttcataattttatctgtactgacctcatacccgattttgcatttttgtggacgcgcagtggtggagggcctgtggctgagatatcagggggtgcctgtagaggaggacgtcggccgtgagagacgtagacgagtactgcagaccctggtctggtttctgctcacccttctgctggcactgttcatacccgacatcggcaaggtgatcagcgtgatcggaggcctggctgcttgcttcatattcgtgttcccaggcctgtgtctcatccaggctaagctgtcagaaatggaagaggtcaagcccgcttcatggtgggtgcttgtgtcctacggggttcttttagtcacacttggcgcatttatatttggccaaacaaccgctaatgctatctttgttgatctccttgcctag

SEQ ID NO: 197298 - DNA, 4058 bp, Artificial Sequence
  derived and/or modified sequence
atgtgatgcatgctcacgtgtctccgcagccggctcgggaaagaatcccccaagctccatttcatgagtaagcgtgagagccgctcagtttcctccagctctgctgaagccagcacagaagtagcccaaactcttccctctgctgacagcaaattttaggcaaagtcttgagaaagaagaaattgggtccagaaagggaagtgaggagaatcagatcccagacctttggggagaaggagcaaccgcctctggcacagcccatcagggagaaagagcaggttgagaagagtcctaagctaacagccccaaacaggtgggtgttgctcagctccctgaggcatgtggttgtaaggcagaacccacagaccttgcaggaagaaggctctcggggccatggcccaggtcagcatcaacaatgactacagcgagtgggacttgagcacggatgccggggagcgggctcggctgctgcagagtccctgtgtggacacagcccccaagagtgagtgggaagcctctcctgggggtctggacagaggcaccacttccacacttggggccatcttcatcgtcgtcaacgcgtgcctgggtgcagggttactcaacttcccagcagccttcagcactgcggggggcgtggcagcaggcatcgcactgcagatgggtatgctggttttcatcatcagtggccttgtcatcctggcctactgctcccaggccagcaatgagaggacctaccaggaggtggtatgggctgtgtgtggcaagctgacaggtgtgctatgtgaggtggccatcgctgtctacacctttggcacctgcattgccttcctaatcatcattggcgaccagcaggacaagattatagctgtgatggcgaaagagccggagggggccagcggcccttggtacacagaccgcaagttcaccatcagcctcactgccttcctcttcatcctgcccctctccatccccagggagattggtttccagaaatatgccagcttcctgagcgtcgtgggtacctggtacgtcacagccatcgttatcatcaagtacatctggccagataaagagatgaccccagggaacatcctgaccaggccggcttcctggatggctgtgttcaatgccatgcccaccatctgcttcggatttcagtgccacgtcagcagtgtgcccgtcttcaacagcatgcagcagcctgaagtgaagacctggggtggagtggtgacagctgccatggtcatagccctcgctgtctacatggggacaggcatctgtggcttcctgacctttggagctgctgtggatcctgacgtgctcctgtcctatccctcggaggacatggccgtggccgttgcccgagccttcatcatcctgagcgtgctcacctcctaccctatcctgcacttctgtgggcgggcggtggtggaaggcctgtggctgcgctaccagggggtgccagtggaggaggacgtggggcgggagcggcggcggcgagtgctgcagacgctggtctggttcctgctcaccctgctgctggcgctcttcatccctgacatcggcaaggtgatctcagtcattggaggcctggccgcctgcttcatcttcgtcttcccagggctgtgcctcattcaagccaaactctctgagatggaagaggtcaaaccagccagctggtgggtgctggtcagctacggagtcctcttggtcaccctgggagccttcatcttcggccagaccacagccaacgccatctttgtggatctcttggcataaccactgcctcccagggaacacaaggcctttgccattggtcgcaggaacccatctcttagagctatggggccattcttagtccacgatcattccaactggtgggatgacatccggacatcctcttccagggactggggcaaactcaggccccacacctctggacagctcaaatccagtccccttcctgctccccagtcctggcagtgccgtggatggcggcaggaagtctcacatcatagaggacccctcctcctctcccagttctcaacttctccatgcctggaatccacgggtgaagagagtcggtagatctcataagaaagaatccagtctgacttccctctggagaatgactatggacagaaggccaccatcctccacagagcaccctgtcctgagtaggggttgtgctcattaccccaggccagtggtagcttcctcaggagcctggccacttccaacggtagcactgaagtcatgcaaatgcatagtcaggtagattcagaccttgtccacaccttcctgggcaacccccaccatgaacctgtcagcctctttcccatagctaatagacatttcccaggccttgaggggccccaccctgtctctttcatcaaacctgatggtccaggctgggcatccctctcctcctccatccccagacatcaccaggtctaatgtttacaaacggtgccagcccggctctgaagccaagggccgtcccgtgccacggtgctgtgagtattcctccgttagctttccccataaggttgggagtatctgcttttgtgtctgagatgggcccctcttttcagaggccgcagggtgggtgatggagaaggctgagaacctttcagaccctctgtgtgggctgggctggtcagaatcagggtgtacctccccgacaccttctttttcagtgatgttttctcttcttcctgcctttcctctgcctcctcccctgccagccctagcgtgactacccagagacaaaaaaaaaaaaaaaaaaaaaaggcagggctgggcgcagtggctcacgcctgtaatcccagcactttgggaggccaaggcgggcagatgacttgaggtcaggagttcgagaccagcctggccaacacggcaaaaccccatctctactaaaaatacaaaaaattaaccgggcatggtggcgggcacctgtaatcccagctacttgggaggctgaggcagcagagccgcttaaacccaggaggcagagactgcaatgagctgagatcgtgccattgcactccagcttgggcaacaagagtgaaacttcatctcaaaaaaacagaaacaaacaaaaaggcagctgggttgtcactgatgggcagcatttgagcctgccacactggcctggaagtttcccttccagtctggattttgtctgctccttccttccccctcaccccgttacctcttcacctcccatctcacttcactgtgtagctcagtctctcccacgcacataattggggacagtgggggctctcttaccagcctcctcagcaacgcacgtccatcaggcctggcctcagtggccagccacattgatgtcacactggaattgttaccccagagagggcgaagagataggctatctccccacctcccaccctactccccactatattcccgttttgaccacctcagcccctcagctgccccctctcactttggccaatcccaggcaccaatcagacttcctcctccacctggagcccctagcatttccttgtcccctcttccccaaaacctctgtaaagggtacgagagggaccccctgccgagccgcccgccactcagggcagtccgatctaagaagcagaagctggttggaggctggctgggcctctgtccagtccccagatggataaactgccttttctcacatcccctcttggtgcctgatcttctctgcccccggggccagacccactgtgctgttttctgtcagtctgtggcacagcaccaagctctgccagcaccagtccctgacagggctaggaggacagcctggtcagcagggctgcagtcccccagtgccgtgtttcgggggtcaagggatgtaagtggagtcattgcacagagacagaccagtcaggagaaggagctggaatctggcctcttgtcctaacctcaggagccccctcccatcctctccccaccctccctatcggggtacttcactgtttcttttctacttgtgtatactcgagaaagggaagatggttaataaaagggatttgtgctgctga

SEQ ID NO: 197299 - DNA, 1389 bp, Artificial Sequence
  derived and/or modified sequence
atggcccaggtgagcatcaacaacgactacagcgagtgggacctgagcaccgacgccggcgagagagccagactgctgcagagcccctgcgtggacaccgcccccaagagcgagtgggaggccagccccggcggcctggacagaggcaccaccagcaccctgggcgccatcttcatcgtggtgaacgcctgcctgggcgccggcctgctgaacttccccgccgccttcagcaccgccggcggcgtggccgccggcatcgccctgcagatgggcatgctggtgttcatcatcagcggcctggtgatcctggcctactgcagccaggccagcaacgagagaacctaccaggaggtggtgtgggccgtgtgcggcaagctgaccggcgtgctgtgcgaggtggccatcgccgtgtacaccttcggcacctgcatcgccttcctgatcatcatcggcgaccagcaggacaagatcatcgccgtgatggccaaggagcccgagggcgccagcggcccctggtacaccgacagaaagttcaccatcagcctgaccgccttcctgttcatcctgcccctgagcatccccagagagatcggcttccagaagtacgccagcttcctgagcgtggtgggcacctggtacgtgaccgccatcgtgatcatcaagtacatctggcccgacaaggagatgacccccggcaacatcctgaccagacccgccagctggatggccgtgttcaacgccatgcccaccatctgcttcggcttccagtgccacgtgagcagcgtgcccgtgttcaacagcatgcagcagcccgaggtgaagacctggggcggcgtggtgaccgccgccatggtgatcgccctggccgtgtacatgggcaccggcatctgcggcttcctgaccttcggcgccgccgtggaccccgacgtgctgctgagctaccccagcgaggacatggccgtggccgtggccagagccttcatcatcctgagcgtgctgaccagctaccccatcctgcacttctgcggcagagccgtggtggagggcctgtggctgagataccagggcgtgcccgtggaggaggacgtgggcagagagagaagaagaagagtgctgcagaccctggtgtggttcctgctgaccctgctgctggccctgttcatccccgacatcggcaaggtgatcagcgtgatcggcggcctggccgcctgcttcatcttcgtgttccccggcctgtgcctgatccaggccaagctgagcgagatggaggaggtgaagcccgccagctggtgggtgctggtgagctacggcgtgctgctggtgaccctgggcgccttcatcttcggccagaccaccgccaacgccatcttcgtggacctgctggcctag

SEQ ID NO: 197300 - protein, 542 aa, Artificial Sequence
  derived and/or modified sequence
MNGKRPAEPGPARVGKKGKKEVMAEFSDAVTEETLKKQVAEAWSRRTPFSHEVIVMDMDPFLHCVIPNFIQSQDFLEGLQKELMNLDFHEKYNDLYKFQQSDDLKKRREPHISTLRKILFEDFRSWLSDISKIDLESTIDMSCAKYEFTDALLCHDDELEGRRIAFILYLVPPWDRSMGGTLDLYSIDEHFQPKQIVKSLIPSWNKLVFFEVSPVSFHQVSEVLSEEKSRLSISGWFHGPSLTRPPNYFEPPIPRSPHIPQDHEILYDWINPTYLDMDYQVQIQEEFEESSEILLKEFLKPEKFTKVCEALEHGHVEWSSRGPPNKRFYEKAEESKLPEILKECMKLFRSEALFLLLSNFTGLKLHFLAPSEEDEMNDKKEAETTDITEEGTSHSPPEPENNQMAISNNSQQSNEQTDPEPEENETKKESSVPMCQGELRHWKTGHYTLIHDHSKAEFALDLILYCGCEGWEPEYGGFTSYIAKGEDEELLTVNPESNSLALVYRDRETLKFVKHINHRSLEQKKTFPNRTGFWDFSFIYYE

SEQ ID NO: 197301 - protein, 386 aa, Artificial Sequence
  derived and/or modified sequence
MNSLMPCCAFILYLVPPWDRSMGGTLDLYSIDEHFQPKQIVKSLIPSWNKLVFFEVSPVSFHQVSEVLSEEKSRLSISGWFHGPSLTRPPNYFEPPIPRSPHIPQDHEILYDWINPTYLDMDYQVQIQEEFEESSEILLKEFLKPEKFTKVCEALEHGHVEWSSRGPPNKRFYEKAEESKLPEILKECMKLFRSEALFLLLSNFTGLKLHFLAPSEEDEMNDKKEAETTDITEEGTSHSPPEPENNQMAISNNSQQSNEQTDPEPEENETKKESSVPMCQGELRHWKTGHYTLIHDHSKAEFALDLILYCGCEGWEPEYGGFTSYIAKGEDEELLTVNPESNSLALVYRDRETLKFVKHINHRSLEQKKTFPNRTGFWDFSFIYYE

SEQ ID NO: 197302 - DNA, 3037 bp, Artificial Sequence
  derived and/or modified sequence
ggtgcttcccattgggtagggccgggaaacacgataaaggggacatgccgggagttgcagtaccctcaggaaggtagcgtcttgatctgcgtggcgtggttctgtgccttgggaagagatgaatgggaagcggccagcggagcccggcccagcccgggtgggaaaaaagggaaagaaggaggtgatggcggagttttcggacgctgttacggaagaaaccttgaaaaagcaggtggctgaggcctggagccgcaggacgccgttcagtcacgaagtcattgtcatggacatggacccttttcttcactgtgtgatcccaaacttcatccaaagccaagacttcttagaagggcttcagaaggaactgatgaacttggacttccatgagaagtataatgatttatataagttccagcagtctgatgatttgaagaagagaagagagcctcacatctccactttaaggaaaattctgtttgaagatttccggtcctggctttctgatatttctaaaattgacctggaatcaaccattgacatgtcctgtgctaaatatgaattcactgatgccctgctgtgccatgatgatgagctggaagggcgccggattgccttcatcctgtacctggttcctccctgggacaggagcatgggtggtaccctggacctgtacagcattgatgaacactttcagccgaagcagattgtcaagtctcttatcccttcgtggaacaaactggttttctttgaagtatctcctgtgtcctttcaccaggtgtctgaagtgctgtctgaagaaaagtcacgtttgtctataagtggctggtttcatggtccatcattgactcggcctcccaactactttgaaccccccatacctcggagccctcacatcccacaagatcatgagattttgtatgattggatcaaccctacttatctggacatggattaccaagttcaaattcaagaagagtttgaagaaagttctgaaattctcctgaaggagtttcttaagcctgagaaattcacgaaagtctgtgaggccttggagcatggacatgtggaatggagcagccgaggtccccctaacaaaaggttttatgagaaagctgaggagagtaagcttcctgagatattgaaggagtgcatgaagttatttcgctctgaggcactattcttgctgctctccaacttcacaggcctgaagcttcatttcttggccccttcggaagaagatgagatgaatgataaaaaagaggcagaaaccactgatatcactgaagaagggactagccatagtcctcctgagccagagaataatcagatggccatcagcaacaacagccaacagagcaatgagcagacagacccagagccagaggaaaatgaaacaaagaaagaatcaagtgttcccatgtgccaaggggaactgaggcattggaagaccggtcactacactttaattcatgaccatagcaaggctgaatttgccctagacttaattctgtactgtggctgtgaaggctgggagccagaatatggcggttttacttcttacattgccaaaggtgaagatgaagagctgctaacagtgaatccagaaagcaattctttggcattggtctacagagacagagagactctgaaatttgtcaagcatattaaccaccgaagcctggaacaaaagaaaaccttcccaaacagaacaggtttctgggacttttcattcatctattatgaatgacagcactgggcaaagctgaacaaaaatgtgacccttcgtaattactgggaagtctgaaagagctaagcatggagtcaaggagaactacatggtagcttgcctgacagtgttcttaaaactggttgtcttttactaggactcataatgattgtcctcaaccgagaccttgagcttgcagctaagtacttatctcttgattaaaaaaaaaaagttggcttttttttttttaacatttagtcctttttccatattggcttcttcagtgaatttttaagttcaatttgtttttattgaggtaaaatatttataacataaaactgaccagcttacccatttttaaatatgcaattcagtggattaagtacattctcattgttgtccagccatcaccatcatccatctccagaagttttccatcttcccaaattctgtgcccattgaacaataactccccacctccccttcccctagcaacagccataccttttgtctctatcatcaacttcactactcatatttctcatgtaagtggaatcatacagtatttgtccttttgtgactggtttcacttagcataaagtctttaagatgcatccatgtttccagtgtttcggtttttttagaaaaactcatacgtgattgcagccgggcatggtggctcacgcctgtaatcccagcacttgggaggccaaggcaggcggatcacctgaggtcaggagttaaagaccagcctgacaaacatggagaaaccccatctctactaaaaatacaaaattagctgggcgtggtggcacatgcctgtaatcccagctactcaggaggctggggcaggagaattggttgaacccaggaggcggaggttgcagtgagccgagattgtgccactgcactccagcctgggcaacaagagtgaaactctgtctcaaaaaaaaaaaagaagaaaaaaacataagtgattgcagaattttgttcttctcataatttctggtttagaaaattatggagccttacatcctgatcatgctgggccttagaattctgacacagtgagtcatcacatttcctcccactgcctgtggccttgttccaccatgactctcacagtacagtgtaggcttagtgtagtattattcccttggaaagggtctggcctaccatcacatgccccaagaaacttctggttggtaaagaagataggctgcttattgccatgtgtagtcacttccaagtgcccactgcctttccatcctgcaattgtggcctgtgtataattaaatgattttagcctca

SEQ ID NO: 197303 - DNA, 2280 bp, Artificial Sequence
  derived and/or modified sequence
aacacgataaaggggacatgccgggagttgcagtaccctcaggaaggtagcgtcttgatctgcgtggcgtggttctgtgccttgggaagagatgaatgggaagcggccagcggagcccggcccagcccgggtgggaaaaaagggaaagaaggaggtgatggcggagttttcggacgctgttacggaagaaaccttgaaaaagcaggtggctgaggcctggagccgcaggacgccgttcagtcacgaagtcattgtcatggacatggacccttttcttcactgtgtgatcccaaacttcatccaaagccaagacttcttagaagggcttcagaaggaactgatgaacttggacttccatgagaagtataatgatttatataagttccagcagtctgatgatttgaagaagagaagagagcctcacatctccactttaaggaaaattctgtttgaagatttccggtcctggctttctgatatttctaaaattgacctggaatcaaccattgacatgtcctgtgctaaatatgaattcactgatgccctgctgtgccttcatcctgtacctggttcctccctgggacaggagcatgggtggtaccctggacctgtacagcattgatgaacactttcagccgaagcagattgtcaagtctcttatcccttcgtggaacaaactggttttctttgaagtatctcctgtgtcctttcaccaggtgtctgaagtgctgtctgaagaaaagtcacgtttgtctataagtggctggtttcatggtccatcattgactcggcctcccaactactttgaaccccccatacctcggagccctcacatcccacaagatcatgagattttgtatgattggatcaaccctacttatctggacatggattaccaagttcaaattcaagaagagtttgaagaaagttctgaaattctcctgaaggagtttcttaagcctgagaaattcacgaaagtctgtgaggccttggagcatggacatgtggaatggagcagccgaggtccccctaacaaaaggttttatgagaaagctgaggagagtaagcttcctgagatattgaaggagtgcatgaagttatttcgctctgaggcactattcttgctgctctccaacttcacaggcctgaagcttcatttcttggccccttcggaagaagatgagatgaatgataaaaaagaggcagaaaccactgatatcactgaagaagggactagccatagtcctcctgagccagagaataatcagatggccatcagcaacaacagccaacagagcaatgagcagacagacccagagccagaggaaaatgaaacaaagaaagaatcaagtgttcccatgtgccaaggggaactgaggcattggaagaccggtcactacactttaattcatgaccatagcaaggctgaatttgccctagacttaattctgtactgtggctgtgaaggctgggagccagaatatggcggttttacttcttacattgccaaaggtgaagatgaagagctgctaacagtgaatccagaaagcaattctttggcattggtctacagagacagagagactctgaaatttgtcaagcatattaaccaccgaagcctggaacaaaagaaaaccttcccaaacagaacaggtttctgggacttttcattcatctattatgaatgacagcactgggcaaagctgaacaaaaatgtgacccttcgtaattactgggaagtctgaaagagctaagcatggagtcaaggagaactacatggtagcttgcctgacagtgttcttaaaactggttgtcttttactaggactcataatgattgtcctcaaccgagaccttgagcttgcagctaagtacttatctcttgattaaaaaaaaaaagttggcttttttttttttaacatttagtcctttttccatattggcttcttcagtgaatttttaagttcaatttgtttttattgaggtaaaatatttataacataaaactgaccagcttacccatttttaaatatgcaattcagtggattaagtacattctcattgttgtccagccatcaccatcatccatctccagaagttttccatcttcccaaattctgtgcccattgaacaataactccccacctccccttcccctagcaacagccataccttttgtctctatcatcaacttcactactcatatttctcatgtaagtggaatcatacagtatttgtccttttgtgactggtttcacttagcataaagtctttaagatgc

SEQ ID NO: 197304 - DNA, 4647 bp, Artificial Sequence
  derived and/or modified sequence
actttggtgcttcccattgggtagggccgggaaacacgataaaggggacatgccgggagttgcagtaccctcaggaaggtagcgtcttgatctgcgtggcgtggttctgtgccttgggaagagatgaatgggaagcggccagcggagcccggcccagcccgggtgggaaaaaagggaaagaaggaggtgatggcggagttttcggacgctgttacggaagaaaccttgaaaaagcaggtggctgaggcctggagccgcaggacgccgttcagtcacgaagtcattgtcatggacatggacccttttcttcactgtgtgatcccaaacttcatccaaagccaagacttcttagaagggcttcagaaggaactgatgaacttggacttccatgagaagtataatgatttatataagttccagcagtctgatgatttgaagaagagaagagagcctcacatctccactttaaggaaaattctgtttgaagatttccggtcctggctttctgatatttctaaaattgacctggaatcaaccattgacatgtcctgtgctaaatatgaattcactgatgccctgctgtgccatgatgatgagctggaagggcgccggattgccttcatcctgtacctggttcctccctgggacaggagcatgggtggtaccctggacctgtacagcattgatgaacactttcagccgaagcagattgtcaagtctcttatcccttcgtggaacaaactggttttctttgaagtatctcctgtgtcctttcaccaggtgtctgaagtgctgtctgaagaaaagtcacgtttgtctataagtggctggtttcatggtccatcattgactcggcctcccaactactttgaaccccccatacctcggagccctcacatcccacaagatcatgagattttgtatgattggatcaaccctacttatctggacatggattaccaagttcaaattcaagaagagtttgaagaaagttctgaaattctcctgaaggagtttcttaagcctgagaaattcacgaaagtctgtgaggccttggagcatggacatgtggaatggagcagccgaggtccccctaacaaaaggttttatgagaaagctgaggagagtaagcttcctgagatattgaaggagtgcatgaagttatttcgctctgaggcactattcttgctgctctccaacttcacaggcctgaagcttcatttcttggccccttcggaagaagatgagatgaatgataaaaaagaggcagaaaccactgatatcactgaagaagggactagccatagtcctcctgagccagagaataatcagatggccatcagcaacaacagccaacagagcaatgagcagacagacccagagccagaggaaaatgaaacaaagaaagaatcaagtgttcccatgtgccaaggggaactgaggcattggaagaccggtcactacactttaattcatgaccatagcaaggctgaatttgccctagacttaattctgtactgtggctgtgaaggctgggagccagaatatggcggttttacttcttacattgccaaaggtgaagatgaagagctgctaacagtgaatccagaaagcaattctttggcattggtctacagagacagagagactctgaaatttgtcaagcatattaaccaccgaagcctggaacaaaagaaaaccttcccaaacagaacaggtttctgggacttttcattcatctattatgaatgacagcactgggcaaagctgaacaaaaatgtgacccttcgtaattactgggaagtctgaaagagctaagcatggagtcaaggagaactacatggtagcttgcctgacagtgttcttaaaactggttgtcttttactaggactcataatgattgtcctcaaccgagaccttgagcttgcagctaagtacttatctcttgattaaaaaaaaaaagttggcttttttttttttaacatttagtcctttttccatattggcttcttcagtgaatttttaagttcaatttgtttttattgaggtaaaatatttataacataaaactgaccagcttacccatttttaaatatgcaattcagtggattaagtacattctcattgttgtccagccatcaccatcatccatctccagaagttttccatcttcccaaattctgtgcccattgaacaataactccccacctccccttcccctagcaacagccataccttttgtctctatcatcaacttcactactcatatttctcatgtaagtggaatcatacagtatttgtccttttgtgactggtttcacttagcataaagtctttaagatgcatccatgtttccagtgtttcggtttttttagaaaaactcatacgtgattgcagccgggcatggtggctcacgcctgtaatcccagcacttgggaggccaaggcaggcggatcacctgaggtcaggagttaaagaccagcctgacaaacatggagaaaccccatctctactaaaaatacaaaattagctgggcgtggtggcacatgcctgtaatcccagctactcaggaggctggggcaggagaattggttgaacccaggaggcggaggttgcagtgagccgagattgtgccactgcactccagcctgggcaacaagagtgaaactctgtctcaaaaaaaaaaaagaagaaaaaaacataagtgattgcagaattttgttcttctcataatttctggtttagaaaattatggagccttacatcctgatcatgctgggccttagaattctgacacagtgagtcatcacatttcctcccactgcctgtggccttgttccaccatgactctcacagtacagtgtaggcttagtgtagtattattcccttggaaagggtctggcctaccatcacatgccccaagaaacttctggttggtaaagaagataggctgcttattgccatgtgtagtcacttccaagtgcccactgcctttccatcctgcaattgtggcctgtgtataattaaatgattttagcctcacgtgttgcttctgttttcctaaatactgtagggtcaactatataactaattgctttttattttaagagacggaatgctaaaaccacatcagaatgccaagaggctgtgcatcttgttaatttttttcttgaactgttccagggagttacatcataattacctgtgtgtgggtatgcatgggtggatgaaagatgctgttctcattccatcccaatagagtcttctgtttcctttctcttttttacatttatttttagcttttgcagtagtgtttagtgtgggttttactaattaatagaaaaagcactgggcctttaaacttcttaactactcttctctttcatctcctaaaacttttgagtattcattcttttctgaagtttgcatttaaatgaaaatgactttcgctttggcttttaggtttagtttcaaaaaggtttaattctgcaccctagccagttaagaaatgttttagcaggtatgcccttgatatggatatttatatattttacacatgtagtaatattatttctataacttactgttataaaacactaatttttaaatgatgagataaaaagaaatatctagaactagttctaacattgtcttcccctatgcatatggtaacgaaccattttacaccatactattttggagaccacaattttttttgcgtttgagatggagtctcactctgtggcccaggctggagtacagtggcatgatatcggctcactgtgacctctgtctcctgggttcaagcaattctcctgcctcagcctcctaagtagctgggattacaggcacctgcctccatacccagctaatttttttatatttttagtagagacagggtttcaccatgttggccaggctggagaccacaattttttaaccacagtgtagcaacactcaagtgggattgcgaatactgttactaatggttaatgtcacagcttgccttttctatattccagctgactaaaggtcatctcactcacttgccttctgatgtgttttcatgagttgaggggaaagggtgtcagtggcataacttcaggaagacccagggaaaagtgcttgggtaggtgaaactgtcatgtgtgccaagcttggaaaatagtttgagactcatggctgtaggcaccatccaaggccaattttccaattctggaaagccaaatctgaatcttagaatacctcacaagtgttaaaatgtgctttttagtgtctcctttatctcagtgtgtttatgatctgtcaacacataatcatcttttatacactacaaaaagggactcgggtgtctgaggggagagaatccctaggagcccaactctgatgttgctgtcagttacatcatctacagcagcacctcttagattgtgaaggatggtgtaacttaaaagattgtgtttctgcactgaagatagatacacagtgatagtgaagtttgttttccttatagtacttcattttgcatcttgattgctttttagggcctggggccaatgtcaacaactcttaggtagcaaaagaagaattagaacatgggcatcttttttatacctctttcagataaaagctatgatgttcacctgt

SEQ ID NO: 197305 - DNA, 1629 bp, Artificial Sequence
  derived and/or modified sequence
atgaacggcaagagacccgccgagcccggccccgccagagtgggcaagaagggcaagaaggaggtgatggccgagttcagcgacgccgtgaccgaggagaccctgaagaagcaggtggccgaggcctggagcagaagaacccccttcagccacgaggtgatcgtgatggacatggaccccttcctgcactgcgtgatccccaacttcatccagagccaggacttcctggagggcctgcagaaggagctgatgaacctggacttccacgagaagtacaacgacctgtacaagttccagcagagcgacgacctgaagaagagaagagagccccacatcagcaccctgagaaagatcctgttcgaggacttcagaagctggctgagcgacatcagcaagatcgacctggagagcaccatcgacatgagctgcgccaagtacgagttcaccgacgccctgctgtgccacgacgacgagctggagggcagaagaatcgccttcatcctgtacctggtgcccccctgggacagaagcatgggcggcaccctggacctgtacagcatcgacgagcacttccagcccaagcagatcgtgaagagcctgatccccagctggaacaagctggtgttcttcgaggtgagccccgtgagcttccaccaggtgagcgaggtgctgagcgaggagaagagcagactgagcatcagcggctggttccacggccccagcctgaccagaccccccaactacttcgagccccccatccccagaagcccccacatcccccaggaccacgagatcctgtacgactggatcaaccccacctacctggacatggactaccaggtgcagatccaggaggagttcgaggagagcagcgagatcctgctgaaggagttcctgaagcccgagaagttcaccaaggtgtgcgaggccctggagcacggccacgtggagtggagcagcagaggcccccccaacaagagattctacgagaaggccgaggagagcaagctgcccgagatcctgaaggagtgcatgaagctgttcagaagcgaggccctgttcctgctgctgagcaacttcaccggcctgaagctgcacttcctggcccccagcgaggaggacgagatgaacgacaagaaggaggccgagaccaccgacatcaccgaggagggcaccagccacagcccccccgagcccgagaacaaccagatggccatcagcaacaacagccagcagagcaacgagcagaccgaccccgagcccgaggagaacgagaccaagaaggagagcagcgtgcccatgtgccagggcgagctgagacactggaagaccggccactacaccctgatccacgaccacagcaaggccgagttcgccctggacctgatcctgtactgcggctgcgagggctgggagcccgagtacggcggcttcaccagctacatcgccaagggcgaggacgaggagctgctgaccgtgaaccccgagagcaacagcctggccctggtgtacagagacagagagaccctgaagttcgtgaagcacatcaaccacagaagcctggagcagaagaagaccttccccaacagaaccggcttctgggacttcagcttcatctactacgagtag

SEQ ID NO: 197306 - DNA, 1629 bp, Artificial Sequence
  derived and/or modified sequence
atgaacggcaaacgtccagcggagcctggccccgctagagtggggaagaaagggaagaaggaagttatggctgagttctctgacgcggtcaccgaggaaactctgaaaaaacaagttgccgaggcctggtctaggagaactccctttagtcacgaggttatcgtgatggacatggacccctttttgcattgcgtgatcccgaactttatccagtcccaggatttcctcgagggcctgcagaaagaactcatgaatttggactttcacgagaagtacaatgatctgtacaaattccagcagtctgacgaccttaagaaacggcgcgagcctcacatttctacgctgcggaagattttgtttgaggacttcagaagctggctgagtgatatcagcaaaattgacctggagagtactattgacatgtcatgcgcaaagtacgagttcactgacgccctgctctgccacgatgacgagctggaaggacgaagaatcgcctttatcctgtatttagtccctccatgggatcgcagcatgggagggactcttgatctctattctatcgatgagcatttccagcctaaacaaatcgtgaaatcattgattccgtcctggaataaattagtgttctttgaagtctccccagtgagtttccatcaagtctcagaggttctgagcgaggagaagagtcggttaagcatcagtggctggttccatgggcctagtctgacccggccaccaaactattttgaacctcccattcctaggtccccccacatccctcaggatcacgagatcctgtacgactggatcaaccccacctaccttgacatggattaccaggtgcagattcaggaggagttcgaagagagcagcgagatccttttaaaggagtttctgaagcccgaaaagtttactaaagtctgtgaagcattggagcacggccatgtggagtggtcttccaggggccccccaaataagcgcttctatgagaaggccgaagaaagcaagttacccgaaattcttaaggaatgcatgaaactgtttcgcagcgaggccctattccttctcctcagtaacttcaccggccttaaactgcattttctcgccccatccgaggaagacgagatgaacgacaaaaaggaagccgaaacaactgacattaccgaggaagggactagccatagccctccagagcctgaaaataatcagatggccatttcgaacaactctcaacaatcaaatgaacagactgaccctgaacctgaggagaatgagactaaaaaagaatcttctgttcctatgtgccagggcgagctcagacactggaagaccggccattacacacttattcacgatcactccaaagctgagttcgctctggacctgatcctatactgtggctgcgaagggtgggaaccagaatatggcggatttacctcatatatagcaaagggtgaggacgaggagctgttgactgtgaacccagaatcaaactccctcgctttggtctacagggaccgagaaactctgaagtttgtgaagcacatcaaccataggtccctcgagcagaaaaaaacattccccaaccgcaccggcttctgggatttcagtttcatatactatgagtag

SEQ ID NO: 197307 - DNA, 1629 bp, Artificial Sequence
  derived and/or modified sequence
atgaacggaaaacggcccgccgagccaggaccagctagagtcggaaagaagggaaaaaaggaagtgatggctgaatttagcgatgccgtgacagaagaaacattaaaaaaacaggtagctgaagcatggtcccgcaggacccctttctctcacgaggtgattgtgatggatatggatccttttctgcactgtgtcatcccaaactttattcaatcacaggactttttagaggggctgcagaaagagttaatgaatctggattttcacgagaaatacaacgacctttacaaattccagcaatccgatgacttgaaaaagcggcgggagccacatatcagcacactgagaaagatcctgtttgaagactttaggagctggttgtctgatatctccaagatcgacctcgagtccacaatagacatgtcctgtgccaaatacgaatttacggatgccctgttatgccacgacgatgaactggaaggaaggagaatcgcctttatcttgtatttggttccaccttgggaccgctccatgggtgggactctagacctttacagtattgatgaacatttccaacctaagcaaattgtcaagtcgctcatcccaagctggaacaagctagtgtttttcgaggtgtcccctgtttctttccaccaagtgtcggaggttctctctgaggagaaaagtcggctttctattagcggctggtttcacggcccaagcctgacgcgcccgccaaattactttgaaccccctatcccccggtctcctcacatcccccaggatcatgagatcctttacgattggattaatcccacgtatctggatatggattaccaggtgcagatccaggaagagtttgaagagagttctgaaattctgctgaaagagttccttaagcctgagaagttcactaaggtctgcgaagctctggaacatggccatgtggaatggagtagccgtggaccacccaacaagcggttctatgagaaagccgaagaaagcaaactgccagagatcctgaaagaatgcatgaaactttttcggtccgaagccttgtttctactcctctccaatttcaccgggctcaagttacattttctggctccatctgaagaagacgaaatgaatgataagaaagaggccgaaactaccgacattactgaggaaggcacaagtcactcaccgcctgagccagagaacaaccagatggctatttcaaacaacagccaacagtccaacgaacagaccgatccagagcccgaggaaaatgaaaccaagaaagagtcatcggtgcctatgtgtcagggggagttgcggcattggaagaccgggcattataccctgatccatgatcatagcaaagctgagtttgccttagacctgattctctactgcggctgtgaagggtgggagcccgaatatgggggcttcacatcatatatcgcgaagggggaggatgaggagctgctcacagtcaacccggaaagcaacagtctcgccttagtgtaccgggatcgggagaccttaaagtttgtgaagcacatcaatcaccgatctttagagcaaaaaaagacattccccaacagaacgggtttttgggacttttcatttatctattatgaatag

SEQ ID NO: 197308 - DNA, 1629 bp, Artificial Sequence
  derived and/or modified sequence
atgaatggcaagaggcctgctgagcccggccctgcccgggtgggcaagaagggcaagaaggaggtgatggccgagttcagtgatgctgtgacagaggagaccctgaagaagcaggtggccgaggcctggagcaggaggacccccttcagccatgaagtcatcgtgatggacatggaccccttcctgcactgcgtcatccccaacttcatccagagccaggacttcctggagggcctgcagaaggagctgatgaacctggacttccacgagaagtacaatgacctgtacaagttccagcagagtgatgacctgaagaagagaagagagccccacatcagcaccctgaggaagatcctgtttgaggacttccgctcctggctgagtgacatcagcaagattgacctggagagcaccatcgacatgagctgtgccaagtatgagttcacagatgccctgctgtgccatgatgatgagctggagggccgccgcatcgccttcatcctgtacctggtgcccccctgggaccgctccatgggcggcaccctggacctgtacagcattgatgagcacttccagcccaagcagatcgtgaagagcctcatccccagctggaacaagctggtgttctttgaggtgtcccctgtgtccttccaccaggtgtctgaggtgctgtctgaggagaagagccggctgagcatcagcggctggttccacggccccagcctgaccaggcctcccaactactttgagccccccatccccaggagcccccacatcccccaggaccacgagatcctgtatgactggatcaaccccacctacctggacatggactaccaggtgcagatccaggaggagtttgaggagagcagcgagatcctgctgaaggagttcctgaagccagagaagttcaccaaggtgtgtgaggccctggagcacggccacgtggagtggagcagccggggcccccccaacaagcgcttctatgagaaggccgaggagagcaagctgcctgagatcctgaaggagtgcatgaagctgttccgctctgaggccctcttcctgctgctgagcaacttcaccggcctgaagctgcacttcctggcccccagtgaagaagatgagatgaatgacaagaaggaggccgagaccacagacatcacagaggagggcaccagccacagccccccagagcctgagaacaaccagatggccatcagcaacaacagccagcagagcaatgagcagacagatcctgagccagaagaaaatgagaccaagaaggagagctctgtgcccatgtgccagggcgagctgcggcactggaagacaggccactacaccctcatccatgaccacagcaaggccgagtttgccctggacctgatcctgtactgcggctgtgagggctgggagccagaatatggaggcttcaccagctacatcgccaagggggaggatgaggagctgctgactgtgaaccctgagagcaacagcctggccctggtgtacagagaccgggagaccctgaagtttgtgaagcacatcaaccacaggagcctggagcagaagaagaccttccccaacagaacaggcttctgggacttctccttcatctactatgaatag

SEQ ID NO: 197309 - DNA, 1629 bp, Artificial Sequence
  derived and/or modified sequence
atgaacggcaagcggcccgccgagcccggccccgcccgggtgggcaagaaaggtaagaaagaggtgatggcagagttcagtgatgcggtgaccgaagagacacttaaaaaacaagtcgctgaggcttggagtagaaggaccccattcagccatgaggtcatcgtgatggatatggatccctttctacactgtgtcatccccaatttcatccagtctcaagacttcctcgaaggcttacagaaagaactcatgaacctggactttcatgagaagtacaatgatttatacaaattccagcaatctgacgacctgaagaagcggcgtgaaccacatataagtactctgagaaagatcctgtttgaagactttcggagttggctgagcgatatctccaagatcgatctggagagcaccattgacatgtcatgtgctaagtacgagttcacggatgctctcctctgccatgacgatgaattggaaggacggagaatcgcattcatcctctacctggttccgccctgggatagatcaatgggtggcaccctggatctctactcaatcgatgagcacttccagcccaaacagattgttaagtcgctgatcccttcttggaataagcttgtcttcttcgaagtgtcgcccgtgtccttccaccaggtgtcggaagtcctgtctgaagaaaaatctcggttatccatcagcggatggttccacggtccaagcctgactcggccaccgaattacttcgaacctccgatcccaagatcgccccatatacctcaggaccacgaaatactgtacgactggataaatcccacctatctggacatggattaccaggtgcaaattcaggaagagttcgaagaatcgtctgagattctgctaaaggagtttttgaagccggagaaatttacaaaggtttgtgaagccctcgaacacggtcacgtggagtggagctctcgtggtccccctaacaagcgattctacgagaaagcagaagaaagcaaactgcccgagattctgaaggagtgcatgaagctcttcagaagtgaagcattgtttctgctgctctctaactttacaggactcaagttgcactttctcgcccccagtgaagaagatgagatgaatgacaagaaggaggccgagaccacagacatcactgaggaggggaccagtcattctcccccagaacccgaaaacaaccagatggcgatctccaacaattcccaacagtctaatgaacaaaccgatcctgaacccgaggaaaatgagaccaagaaagagtcttctgtgcctatgtgccagggggaactcagacattggaagacaggtcattatactcttatccacgatcattctaaagccgagttcgctctggacttgattctgtattgtggttgtgaaggatgggaacccgagtatggcgggttcaccagttatatcgctaagggggaggacgaagaattgctcaccgtcaatcctgaatccaacagccttgctttggtgtatcgcgaccgcgagacattgaaattcgttaagcatatcaatcatcgaagcctggaacagaaaaagacattccccaatcgaaccggtttttgggatttctctttcatctattacgagtag

SEQ ID NO: 197310 - DNA, 1629 bp, Artificial Sequence
  derived and/or modified sequence
atgaacggcaagcggcccgccgagcccggccccgcccgggtgggcaagaaaggtaagaaggaggtcatggccgagttttcagacgcggtgactgaagaaacgttgaagaagcaggtagccgaggcttggtccagacgaacccccttctctcatgaggtgatcgtgatggacatggaccctttcctacactgtgtgatccccaacttcattcagagccaggacttcctcgagggattacaaaaggaactcatgaacttagactttcatgaaaagtataatgacttgtataagttccagcagtccgacgacttgaagaaacggagagagcctcacatcagtactttaaggaaaattcttttcgaggactttagaagctggctatccgacatcagcaagattgatctggagtctaccattgatatgtcatgtgcaaagtacgaattcaccgacgctttgctctgccacgacgacgagctggaaggccggcgcatcgcattcattttgtatctggtcccaccttgggaccggtccatgggcggaacacttgacttgtatagtatcgatgagcatttccagccaaagcagattgtgaaaagtttgatcccttcctggaacaaactggtgtttttcgaggtgtcccccgtgtccttccaccaggtgtcagaggttctgtccgaagagaagagcagactgtctatttccggatggttccatgggcccagtctgacccgacctcctaattatttcgaacccccgatccccagaagtcctcatattccacaagatcacgagattctatacgactggattaaccccacctacttagatatggattatcaggtacaaatccaagaggagtttgaggagtcttctgaaattctgctgaaagagttcctgaagcctgaaaaattcacaaaggtgtgtgaggccctggagcacggacacgtcgaatggagttccagaggtcccccaaacaagagattctacgagaaggctgaggagagcaaactaccagaaattctgaaggaatgcatgaagctctttcgatctgaggccttgtttcttctgctcagtaatttcaccgggttaaagctacacttcctcgccccatctgaggaggacgagatgaatgacaaaaaggaggctgagacaaccgacatcaccgaggagggaacgtcccactctcctcctgaaccagagaacaaccagatggctatctccaataattcccagcagtcaaacgagcaaacagacccggagcccgaggagaatgaaacgaaaaaggaatctagtgtgcccatgtgccagggcgagctccggcactggaaaactgggcactataccctcattcacgaccattccaaggctgagttcgcactggacctcattctctattgtgggtgtgaggggtgggagccagagtacggcggtttcactagctatattgcaaagggggaggatgaggagctgctgacagtcaatcctgagagcaacagcctggcgctggtgtatcgcgatcgggagacgttaaagtttgtgaagcacattaatcacagatcccttgagcaaaaaaagacatttcctaaccgaacgggattctgggatttctctttcatatattacgaatag

SEQ ID NO: 197311 - DNA, 1629 bp, Artificial Sequence
  derived and/or modified sequence
atgaacggtaaacgccctgctgagccaggccctgctcgtgtggggaaaaagggcaagaaggaggttatggccgaattttccgatgcagtgacagaagagaccttaaaaaaacaggtggccgaagcctggtcacgcaggacccccttttcacatgaggtgattgtaatggacatggacccgttcctgcattgcgtcattcccaacttcatccagtcgcaagatttcctcgaaggtctacaaaaagaactcatgaacttggactttcacgaaaaatacaacgatctttacaaattccaacagtccgatgatcttaagaaacgacgtgaaccccatattagcactctcagaaagatactgtttgaggactttcggtcctggctgagtgatatttctaaaattgacctggaatccactatcgatatgagctgcgctaagtatgagtttacagacgccttgctatgccatgacgatgaacttgaaggcaggaggattgcattcatactctatctcgtgccgccatgggatcgcagcatgggtggcactctggatctgtacagtattgacgagcactttcagcccaagcaaatcgttaaaagcctgattcccagctggaataaacttgtctttttcgaagtaagcccggtgagcttccatcaggtcagcgaggtgttgagcgaggagaaatcacgtctgtcaattagtggctggttccatggcccatcactaacacgacccccaaattattttgaaccaccaattcctcggagcccccatattccacaggatcacgaaatcttgtacgattggattaatcccacgtacctggacatggactatcaagttcaaattcaggaggaatttgaagagagcagcgagattctattgaaagaatttttgaaacccgagaagttcacaaaagtatgtgaggcccttgagcacggccatgttgaatggtcctcaaggggtcccccaaacaaacgcttctatgaaaaggccgaagaatccaaactacctgaaattcttaaggagtgtatgaagctgttccggagtgaggccctttttctgctattgagtaacttcaccggactgaagctccactttctggccccttcagaagaggacgagatgaatgacaagaaggaggcagagaccacagacatcactgaggaaggcactagccacagtcctcccgaacctgaaaataaccagatggcaatcagcaacaatagccaacaatcaaacgagcagacagatcctgaacccgaagagaatgagactaagaaggagagctcggtcccaatgtgccagggagaactaagacattggaagaccggccattacaccctcatccacgatcacagcaaagccgaatttgctctagacctaatactttactgcggttgtgaaggatgggagccagaatacggtgggttcacttcctatatagccaaaggagaggatgaagaactgcttacagttaacccagaatctaatagcctggccctggtctacagagaccgcgagacccttaagtttgtcaaacatattaaccatcgtagtctcgagcagaaaaaaactttccccaaccgaaccgggttctgggacttctcttttatatattatgaatag

SEQ ID NO: 197312 - DNA, 1629 bp, Artificial Sequence
  derived and/or modified sequence
atgaatggaaagcgtccagccgaaccgggtcctgccagagtgggtaagaaaggtaagaaggaagtgatggccgagttctctgatgccgtgacggaagaaaccctaaagaagcaggttgcggaggcatggtcccggagaactcccttttcccatgaagtgattgttatggacatggacccctttctccattgcgtgatccctaattttatccaatcccaggatttcctggaggggttgcagaaagaactaatgaacctggatttccatgagaaatataacgacttgtacaaattccagcagtctgacgatctaaagaagcggagagagccacacatctccacactgcgaaaaattctgttcgaagactttaggagctggctgtcggatattagcaagatcgacctagaatcaaccatcgacatgtcgtgtgccaaatacgagttcaccgacgctctactgtgtcacgacgacgagctcgaggggagaaggatagcttttatcctatacttagtaccgccatgggacaggtctatgggcggtacgctcgatctgtattctattgacgaacatttccaacccaaacagatagtcaagtccctgatacccagttggaataaattggtgttcttcgaggtgagtccggtgtctttccatcaagtttcagaggtcctttccgaggaaaagagtagactatcaatctccgggtggtttcacggcccatcacttactcgtcctccaaattacttcgagccccctatccctagatcacctcatatcccacaggatcatgagattttgtacgactggatcaaccctacctatctcgatatggattaccaggttcagatacaagaagaatttgaggaatctagcgagatactgttaaaagagtttttgaagccagaaaagttcaccaaggtctgcgaagcactggagcacggtcatgtggaatggtcatccaggggacctccaaacaaaagattttatgagaaagctgaggagagtaagttacctgaaattcttaaggagtgcatgaagctgttccggtccgaagctttgtttttgcttctgtccaacttcactgggttgaagcttcacttcctcgccccatccgaagaagatgagatgaacgataaaaaagaggcggagaccacggatattaccgaggagggcacgtcacatagcccccctgagcccgaaaataaccagatggccatttcaaataattcccagcagagtaacgagcaaacggaccctgaaccggaggaaaatgagactaaaaaggaatcttccgtgccgatgtgccaaggcgagcttcgccattggaagaccggtcattatacactcattcatgaccattctaaagccgaatttgccctggatttgatcctctattgcggttgtgagggctgggaaccagagtacggaggtttcacttcatatatcgccaagggggaggacgaggaactcctaactgtgaacccagaatcaaacagcctggctctggtttacagagacagggaaacactgaagttcgttaaacacatcaaccatagaagcctggagcaaaaaaaaacatttccaaacagaacagggttttgggacttttcatttatatactatgagtag

SEQ ID NO: 197313 - protein, 1150 aa, Artificial Sequence
  derived and/or modified sequence
MAQFGGQKNPPWATQFTATAVSQPAALGVQQPSLLGASPTIYTQQTALAAAGLTTQTPANYQLTQTAALQQQAAAAAAALQQQYSQPQQALYSVQQQLQQPQQTLLTQPAVALPTSLSLSTPQPTAQITVSYPTPRSSQQQTQPQKQRVFTGVVTKLHDTFGFVDEDVFFQLSAVKGKTPQVGDRVLVEATYNPNMPFKWNAQRIQTLPNQNQSQTQPLLKTPPAVLQPIAPQTTFGVQTQPQPQSLLQAQISAASITPLLQTQPQPLLQQPQQKAGLLQPPVRIVSQPQPARRLDPPSRFSGRNDRGDQVPNRKDDRSRERERERRRSRERSPQRKRSRERSPRRERERSPRRVRRVVPRYTVQFSKFSLDCPSCDMMELRRRYQNLYIPSDFFDAQFTWVDAFPLSRPFQLGNYCNFYVMHREVESLEKNMAILDPPDADHLYSAKVMLMASPSMEDLYHKSCALAEDPQELRDGFQHPARLVKFLVGMKGKDEAMAIGGHWSPSLDGPDPEKDPSVLIKTAIRCCKALTGIDLSVCTQWYRFAEIRYHRPEETHKGRTVPAHVETVVLFFPDVWHCLPTRSEWETLSRGYKQQLVEKLQGERKEADGEQDEEEKDDGEAKEISTPTHWSKLDPKTMKVNDLRKELESRALSSKGLKSQLIARLTKQLKVEEQKEEQKELEKSEKEEDEDDDRKSEDDKEEEERKRQEEIERQRRERRYILPDEPAIIVHPNWAAKSGKFDCSIMSLSVLLDYRLEDNKEHSFEVSLFAELFNEMLQRDFGVRIYKSLLSLPEKEDKKEKDKKSKKDERKDKKEERDDETDEPKPKRRKSGDDKDKKEDRDERKKEDKRKDDSKDDDETEEDNNQDEYDPMEAEEAEDEEDDRDEEEMTKRDDKRDINRYCKERPSKDKEKEKTQMITINRDLLMAFVYFDQSHCGYLLEKDLEEILYTLGLHLSRAQVKKLLNKVVLRESCFYRKLTDTSKDEENHEESESLQEDMLGNRLLLPTPTVKQESKDVEENVGLIVYNGAMVDVGSLLQKLEKSEKVRAEVEQKLQLLEEKTDEDEKTILNLENSNKSLSGELREVKKDLSQLQENLKISENMNLQFENQMNKTIRNLSTVMDEIHTVLKKDNVKNEDKDQKSKENGASV

SEQ ID NO: 197314 - protein, 119 aa, Artificial Sequence
  derived and/or modified sequence
MAQFGGQKNPPWATQFTATAVSQPAALGVQQPSLLGASPTIYTQQTALAAAGLTTQTPANYQLTQTAALQQQAAAAAAALQQQYSQPQQALYSVQQQLQQPQQTLLTQPAVALPTSLSL

SEQ ID NO: 197315 - protein, 171 aa, Artificial Sequence
  derived and/or modified sequence
MAQFGGQKNPPWATQFTATAVSQPAALGVQQPSLLGASPTIYTQQTALAAAGLTTQTPANYQLTQTAALQQQAAAAAAALQQQYSQPQQALYSVQQQLQQPQQTLLTQPAVALPTSLSLSTPQPTAQITVSYPTPRSSQQQTQPQKQRVFTGVVTKLHDTFGFVDEDVFFQ

SEQ ID NO: 197316 - protein, 134 aa, Artificial Sequence
  derived and/or modified sequence
MLKKMGEAVARVARKVNETVESGSDTLELHLEGNFLHRLPSEVSALQHLKAIDLSRNQFQDFPEQLTALPALETINLEENEIVDVPVEKLAAMPALRSINLRFNPLNAEVRVIAPPLIKFDMLMSPEGARAPLP

SEQ ID NO: 197317 - DNA, 405 bp, Artificial Sequence
  derived and/or modified sequence
atgctgaagaagatgggcgaggccgtggccagagtggccagaaaggtgaacgagaccgtggagagcggcagcgacaccctggagctgcacctggagggcaacttcctgcacagactgcccagcgaggtgagcgccctgcagcacctgaaggccatcgacctgagcagaaaccagttccaggacttccccgagcagctgaccgccctgcccgccctggagaccatcaacctggaggagaacgagatcgtggacgtgcccgtggagaagctggccgccatgcccgccctgagaagcatcaacctgagattcaaccccctgaacgccgaggtgagagtgatcgccccccccctgatcaagttcgacatgctgatgagccccgagggcgccagagcccccctgccctag

SEQ ID NO: 197318 - DNA, 405 bp, Artificial Sequence
  derived and/or modified sequence
atgttaaagaagatgggagaggcggttgcaagggtggctaggaaagtcaacgaaactgtagaatctggatccgacacactggaacttcaccttgagggaaatttccttcacagactgccctccgaggttagcgccctgcaacatctaaaggccatagatcttagcaggaaccagttccaggacttcccagaacagcttactgcccttccagctttggaaaccatcaacctggaggagaacgagatcgtagatgtaccggtggagaagttggccgcaatgcccgccctcagatccatcaacttacgattcaaccctctcaatgccgaggtgcgcgtcattgcccctccgttgataaagttcgatatgctgatgtcaccggaaggcgcgcgggctcccctcccgtag

SEQ ID NO: 197319 - DNA, 405 bp, Artificial Sequence
  derived and/or modified sequence
atgcttaaaaagatgggtgaggccgtagccagggttgcccggaaggtaaacgagactgtcgaatctggctctgatactctggagctgcacctagaaggcaactttctccatcgtctgcccagcgaggtttccgccttacagcatctgaaagccatcgacctgtcaaggaaccagtttcaggattttcctgaacagctgacagctctgcccgccctggagacaatcaacttggaagagaatgagatcgtggatgtcccagtggagaaactggctgccatgccagcccttagatcgattaacctcaggtttaacccgctcaacgcagaggtccgagttatcgctcctcctctaattaaattcgacatgctgatgtcccccgagggcgccagagccccactcccgtag

SEQ ID NO: 197320 - DNA, 405 bp, Artificial Sequence
  derived and/or modified sequence
atgctgaagaagatgggagaggccgtggcccgggtggccaggaaggtgaatgaaacagtggagagcggcagtgacaccctggagctgcacctggagggcaacttcctgcaccggctgcccagcgaggtgtctgccctgcagcacctgaaggccatcgacctgagcaggaaccagttccaggacttccctgagcagctgacagccctgcctgccctggagaccatcaacctggaggagaatgagatcgtggatgtgcctgtggagaagctggccgccatgcctgccctgcggagcatcaacctgcgcttcaaccccctgaatgctgaggtgcgggtgattgcccctcctctcatcaagtttgacatgctgatgagccctgagggcgcccgggcccccctgccctag

SEQ ID NO: 197321 - DNA, 2924 bp, Artificial Sequence
  derived and/or modified sequence
tcggaactcgcctggggcgccgccggcggcggagggagcgtgactgcgctgcgcagggcgctaggaggcattgtcgccgctcaggcccttttgtgagaagcagaccagcctgggggctggcggcaggacacctgtgtctgcatgctgaagaagatgggtgaggccgtggccagagtagcaaggaaggtcaacgagacggtggagagcggctctgacactctggagctccacctggaggggaacttcctacaccgcctccccagcgaggtcagtgccctgcagcacctcaaggccattgacctgtcccggaaccagttccaggacttccctgagcagcttaccgccctgccggcgctggagaccatcaacctggaggagaacgagatcgtagatgtgcccgtggagaagctggccgccatgccagccttgcgcagcatcaacctccgcttcaacccactcaacgccgaggtgcgcgtgatcgccccgccgctcatcaagtttgacatgctcatgtctccggaaggcgcaagagcccccctaccttaggccaccctcctcatgcccacccagcaaggggcagaggccacaggcctggaaccctggaagggagggaggcccatgggaggccaagcctgggggctgggggcgggtgggccgagcagcacgtggtgggtggggtgcagctggtctggatagatagcttacagcagtagtgggctctggaatgcccaagggaagaggcaaggtggggcctgcagcctggactcggcactcacagctgctgtgcaaactcaggcagatctcctgccctctctgagccttgtcacttgaaaaaaacaggaccctttccctcctttgggctccctggaggtttttaagcagtacgtgcctccaagttacctccagatcagcaggcacaggtgggcattgccaggtattttctgagcccctgcgggtttgaggccttgtttttagtgctgagagccagttgctgccctgagaagagaagacaacctccatctatttattgcttcctgagaactgacctggatgcggccctctgcagggcccagtcttcagtcctgtggtccctggactggtgggaacctgaactaggagtcctgggagagctgtggtgggaatatgggctggcactgctgcagggcaagaacattcatgtaggagcccgaggaccagcaggctgggaatggggagcaagtcacgtcagctctgtcattccccacagttaacaaattggcggggtgggaagtcctgagtgctccgtccctctagcatcactcctgagctgcgggagaggtggcccagagaacagcagagtcagttacacctgcagctcttgtctaaagtgattagatggccaccctcaccactgtccagtccagcagcagcctggctgccttgtcatggcctcctgggggcagaaggcgatgtggaccacgggatttgtagccagccagctcccaggccaacgcccaaagccctgatgacctggttcttctgaggccctcaacctggcatcttagggtatggtcaggcaacagggtgaccagctgtcctggtttcccaggacatggaactttcaatgctaaaactgggacagtacccagcaagtggggatggttggtcccctaccaggagagggcctggggctcttgcttcccgagaacgcctgtggcttgaagaaccttgactgcttggtcctcaggtatctacctcccaccttctcctcatctgtggagcaagccaactcagtgccccagaccccacctgatctgcatctttgtttgcatctccagagacacctgaggccccagagcttgaggcaaagccaggccgtccaaatcctgtgtgccgtggacgagtggccactttactactcctaaggctaagatgttgagagctcagaccactgctcagagcagtaatccctgctcagaatgctcccagttccctcgtccctgcccaggtctcttgtctcttgggaaggaactgataggtcgggccattgttgggccatcactgagcgctcagtatctcaagagactctgttcattctgctcgtatcccaaggcctggttggtcaaactctgggcaaagggttttcaggatgaggaggtcaagacaggatctccagagctaccgagttcatctgtgggtgttgggggcaagtgggggctgaagtcctgtgcaggctgcgctggccccacctgccttgtgccctggagtggggtttctccttgttgaagaagaggcatccttctctgatgtgcacaaacacaatgtatgaccagagccttgcaactcaaagtgtggtctgtggaccagcagcggcagtgacacctgggagcttgttaggaatgcagagtctaggcctcaccctatacctcccgactcagaccctgcattttagcaagacccccagctgattcctataagcactttagagtttgagaagcaaggacctaggctggggatgtcctccgagcagagggtgaagtttctctcagttctctccctgccacttccagggatctgagcctgtgctcagcctcctccctaacccaccctgggagacacttggcctgttagattgttccagagtctgcatggcactcctgaagaagggagtgtgacctgcagtcaccaggagatgagggttaggtgtgcccagccctccagacccggcctttctggttaacccctgcatgccaagctgcctgctgccccaggtcctcacctcaggcctttgaaggggcagcttctggaagttgttttctcctctgcttggagagtttgcccttgtctgtcttggaaagtgtgggcagccacagatgcccccaaatcagagctcacagtgagtgagcccctaagcttcagtctgcaataaagaatgcattggtttc

SEQ ID NO: 197322 - DNA, 3008 bp, Artificial Sequence
  derived and/or modified sequence
gcttgcacacatggctccggaggctccggttgcccatccgagcccctgccaggctctaacgttcccaactgacaacaccagtaactaaatataggagcagatggtggggacgggctgtcgcagcggctcctttgcagaggtctccggactgcagataaggctcaggcccttttgtgagaagcagaccagcctgggggctggcggcaggacacctgtgtctgcatgctgaagaagatgggtgaggccgtggccagagtagcaaggaaggtcaacgagacggtggagagcggctctgacactctggagctccacctggaggggaacttcctacaccgcctccccagcgaggtcagtgccctgcagcacctcaaggccattgacctgtcccggaaccagttccaggacttccctgagcagcttaccgccctgccggcgctggagaccatcaacctggaggagaacgagatcgtagatgtgcccgtggagaagctggccgccatgccagccttgcgcagcatcaacctccgcttcaacccactcaacgccgaggtgcgcgtgatcgccccgccgctcatcaagtttgacatgctcatgtctccggaaggcgcaagagcccccctaccttaggccaccctcctcatgcccacccagcaaggggcagaggccacaggcctggaaccctggaagggagggaggcccatgggaggccaagcctgggggctgggggcgggtgggccgagcagcacgtggtgggtggggtgcagctggtctggatagatagcttacagcagtagtgggctctggaatgcccaagggaagaggcaaggtggggcctgcagcctggactcggcactcacagctgctgtgcaaactcaggcagatctcctgccctctctgagccttgtcacttgaaaaaaacaggaccctttccctcctttgggctccctggaggtttttaagcagtacgtgcctccaagttacctccagatcagcaggcacaggtgggcattgccaggtattttctgagcccctgcgggtttgaggccttgtttttagtgctgagagccagttgctgccctgagaagagaagacaacctccatctatttattgcttcctgagaactgacctggatgcggccctctgcagggcccagtcttcagtcctgtggtccctggactggtgggaacctgaactaggagtcctgggagagctgtggtgggaatatgggctggcactgctgcagggcaagaacattcatgtaggagcccgaggaccagcaggctgggaatggggagcaagtcacgtcagctctgtcattccccacagttaacaaattggcggggtgggaagtcctgagtgctccgtccctctagcatcactcctgagctgcgggagaggtggcccagagaacagcagagtcagttacacctgcagctcttgtctaaagtgattagatggccaccctcaccactgtccagtccagcagcagcctggctgccttgtcatggcctcctgggggcagaaggcgatgtggaccacgggatttgtagccagccagctcccaggccaacgcccaaagccctgatgacctggttcttctgaggccctcaacctggcatcttagggtatggtcaggcaacagggtgaccagctgtcctggtttcccaggacatggaactttcaatgctaaaactgggacagtacccagcaagtggggatggttggtcccctaccaggagagggcctggggctcttgcttcccgagaacgcctgtggcttgaagaaccttgactgcttggtcctcaggtatctacctcccaccttctcctcatctgtggagcaagccaactcagtgccccagaccccacctgatctgcatctttgtttgcatctccagagacacctgaggccccagagcttgaggcaaagccaggccgtccaaatcctgtgtgccgtggacgagtggccactttactactcctaaggctaagatgttgagagctcagaccactgctcagagcagtaatccctgctcagaatgctcccagttccctcgtccctgcccaggtctcttgtctcttgggaaggaactgataggtcgggccattgttgggccatcactgagcgctcagtatctcaagagactctgttcattctgctcgtatcccaaggcctggttggtcaaactctgggcaaagggttttcaggatgaggaggtcaagacaggatctccagagctaccgagttcatctgtgggtgttgggggcaagtgggggctgaagtcctgtgcaggctgcgctggccccacctgccttgtgccctggagtggggtttctccttgttgaagaagaggcatccttctctgatgtgcacaaacacaatgtatgaccagagccttgcaactcaaagtgtggtctgtggaccagcagcggcagtgacacctgggagcttgttaggaatgcagagtctaggcctcaccctatacctcccgactcagaccctgcattttagcaagacccccagctgattcctataagcactttagagtttgagaagcaaggacctaggctggggatgtcctccgagcagagggtgaagtttctctcagttctctccctgccacttccagggatctgagcctgtgctcagcctcctccctaacccaccctgggagacacttggcctgttagattgttccagagtctgcatggcactcctgaagaagggagtgtgacctgcagtcaccaggagatgagggttaggtgtgcccagccctccagacccggcctttctggttaacccctgcatgccaagctgcctgctgccccaggtcctcacctcaggcctttgaaggggcagcttctggaagttgttttctcctctgcttggagagtttgcccttgtctgtcttggaaagtgtgggcagccacagatgcccccaaatcagagctcacagtgagtgagcccctaagcttcagtctgcaataaagaatgcattggtttcatc

SEQ ID NO: 197323 - DNA, 405 bp, Artificial Sequence
  derived and/or modified sequence
atgctgaagaagatgggcgaggccgtggcccgggtggcccggaaggtgaatgaaacggtagagagtggcagtgacaccctcgagttgcatttggaaggtaactttctgcacagattaccgtccgaggtgtccgctctgcagcacctgaaggcgatagatcttagtagaaaccaattccaggatttccccgagcagcttacagccttaccagcccttgaaaccatcaatctcgaggaaaacgaaatcgtggacgttcccgtggaaaaattggcggcgatgcccgcactgcggagcatcaacctgcgattcaaccccctgaatgccgaagtacgagtcattgcgcctccactaattaaatttgacatgctgatgtctcccgagggagcccgggctccactgccatag

SEQ ID NO: 197324 - DNA, 405 bp, Artificial Sequence
  derived and/or modified sequence
atgctgaagaagatgggcgaggccgtggcccgggtggcccggaaggtgaatgaaacggtagagtccggatcggataccttggaactccacttggaagggaacttcttgcataggctcccctcagaggtctctgcgttgcagcatctcaaagcgattgatttgagccgcaaccagtttcaggatttccctgaacagttaaccgcccttccggccctggaaacaattaatcttgaggagaatgaaattgtcgacgtgccggtggagaagttagctgccatgcccgcacttaggtcaatcaaccttagattcaaccccctgaatgccgaagttcgggtcatcgcaccccctctgatcaagtttgacatgctcatgtcacctgaaggagctcgcgctcccctaccgtag

SEQ ID NO: 197325 - DNA, 405 bp, Artificial Sequence
  derived and/or modified sequence
atgcttaagaagatgggggaggcggtggcaagagtggcgcgaaaggttaatgaaacagtggaatccggctccgataccctggagctgcatcttgagggaaacttccttcacagactgccctctgaagtgtccgccctccagcatctcaaggccattgatctcagtcggaaccagttccaagactttcctgaacagctcaccgcgctgcctgccctggaaacaatcaatctggaggaaaatgaaatcgtggacgtgccagtagagaagcttgctgctatgcccgctttgcgatctattaacctgagattcaatccactgaatgccgaggtgagggtgattgctcctcctctgattaagtttgacatgttaatgtccccggaaggcgcacgagcgcctctcccatag

SEQ ID NO: 197326 - DNA, 405 bp, Artificial Sequence
  derived and/or modified sequence
atgctgaagaaaatgggcgaagccgttgcacgcgttgcaagaaaggtgaatgaaacagtggaatccggatccgacactcttgagttgcacctggaaggaaattttctgcacagattgcctagcgaagtcagtgccttacagcacttgaaggcgatagacctgtcccgaaatcaattccaggattttcccgagcagcttaccgccctgcccgcattggaaactataaatctggaagaaaacgagattgtcgatgtgcccgttgaaaagcttgcggcaatgcctgccctgcggtcaattaaccttagattcaaccccctgaacgcagaggtgcgcgtgattgcgccacccctgattaaatttgacatgctaatgtcacctgaaggtgcaagagcccctctgccttag

SEQ ID NO: 197327 - protein, 757 aa, Artificial Sequence
  derived and/or modified sequence
MLSLLVWILTLSDTFSQGTQTRFSQEPADQTVVAGQRAVLPCVLLNYSGIVQWTKDGLALGMGQGLKAWPRYRVVGSADAGQYNLEITDAELSDDASYECQATEAALRSRRAKLTVLIPPEDTRIDGGPVILLQAGTPHNLTCRAFNAKPAATIIWFRDGTQQEGAVASTELLKDGKRETTVSQLLINPTDLDIGRVFTCRSMNEAIPSGKETSIELDVHHPPTVTLSIEPQTVQEGERVVFTCQATANPEILGYRWAKGGFLIEDAHESRYETNVDYSFFTEPVSCEVHNKVGSTNVSTLVNVHFAPRIVVDPKPTTTDIGSDVTLTCVWVGNPPLTLTWTKKDSNMVLSNSNQLLLKSVTQADAGTYTCRAIVPRIGVAEREVPLYVNGPPIISSEAVQYAVRGDGGKVECFIGSTPPPDRIAWAWKENFLEVGTLERYTVERTNSGSGVLSTLTINNVMEADFQTHYNCTAWNSFGPGTAIIQLEEREVLPVGIIAGATIGASILLIFFFIALVFFLYRRRKGSRKDVTLRKLDIKVETVNREPLTMHSDREDDTASVSTATRVMKAIYSSFKDDVDLKQDLRCDTIDTREEYEMKDPTNGYYNVRAHEDRPSSRAVLYADYRAPGPARFDGRPSSRLSHSSGYAQLNTYSRGPASDYGPEPTPPGPAAPAGTDTTSQLSYENYEKFNSHPFPGAAGYPTYRLGYPQAPPSGLERTPYEAYDPIGKYATATRFSYTSQHSDYGQRFQQRMQTHV

SEQ ID NO: 197328 - protein, 593 aa, Artificial Sequence
  derived and/or modified sequence
MGQGLKAWPRYRVVGSADAGQYNLEITDAELSDDASYECQATEAALRSRRAKLTVLNPPTVTLSIEPQTVQEGERVVFTCQATANPEILGYRWAKGGFLIEDAHESRYETNVDYSFFTEPVSCEVHNKVGSTNVSTLVNVHFAPRIVVDPKPTTTDIGSDVTLTCVWVGNPPLTLTWTKKDSNMVLSNSNQLLLKSVTQADAGTYTCRAIVPRIGVAEREVPLYVNGPPIISSEAVQYAVRGDGGKVECFIGSTPPPDRIAWAWKENFLEVGTLERYTVERTNSGSGVLSTLTINNVMEADFQTHYNCTAWNSFGPGTAIIQLEEREVLPVGIIAGATIGASILLIFFFIALVFFLYRRRKGSRKDVTLRKLDIKVETVNREPLTMHSDREDDTASVSTATRVMKAIYSSFKDDVDLKQDLRCDTIDTREEYEMKDPTNGYYNVRAHEDRPSSRAVLYADYRAPGPARFDGRPSSRLSHSSGYAQLNTYSRGPASDYGPEPTPPGPAAPAGTDTTSQLSYENYEKFNSHPFPGAAGYPTYRLGYPQAPPSGLERTPYEAYDPIGKYATATRFSYTSQHSDYGQRFQQRMQTHV

SEQ ID NO: 197329 - DNA, 2274 bp, Artificial Sequence
  derived and/or modified sequence
atgctgagcctgctggtgtggatcctgaccctgagcgacaccttcagccagggcacccagaccagattcagccaggagcccgccgaccagaccgtggtggccggccagagagccgtgctgccctgcgtgctgctgaactacagcggcatcgtgcagtggaccaaggacggcctggccctgggcatgggccagggcctgaaggcctggcccagatacagagtggtgggcagcgccgacgccggccagtacaacctggagatcaccgacgccgagctgagcgacgacgccagctacgagtgccaggccaccgaggccgccctgagaagcagaagagccaagctgaccgtgctgatcccccccgaggacaccagaatcgacggcggccccgtgatcctgctgcaggccggcaccccccacaacctgacctgcagagccttcaacgccaagcccgccgccaccatcatctggttcagagacggcacccagcaggagggcgccgtggccagcaccgagctgctgaaggacggcaagagagagaccaccgtgagccagctgctgatcaaccccaccgacctggacatcggcagagtgttcacctgcagaagcatgaacgaggccatccccagcggcaaggagaccagcatcgagctggacgtgcaccacccccccaccgtgaccctgagcatcgagccccagaccgtgcaggagggcgagagagtggtgttcacctgccaggccaccgccaaccccgagatcctgggctacagatgggccaagggcggcttcctgatcgaggacgcccacgagagcagatacgagaccaacgtggactacagcttcttcaccgagcccgtgagctgcgaggtgcacaacaaggtgggcagcaccaacgtgagcaccctggtgaacgtgcacttcgcccccagaatcgtggtggaccccaagcccaccaccaccgacatcggcagcgacgtgaccctgacctgcgtgtgggtgggcaacccccccctgaccctgacctggaccaagaaggacagcaacatggtgctgagcaacagcaaccagctgctgctgaagagcgtgacccaggccgacgccggcacctacacctgcagagccatcgtgcccagaatcggcgtggccgagagagaggtgcccctgtacgtgaacggcccccccatcatcagcagcgaggccgtgcagtacgccgtgagaggcgacggcggcaaggtggagtgcttcatcggcagcacccccccccccgacagaatcgcctgggcctggaaggagaacttcctggaggtgggcaccctggagagatacaccgtggagagaaccaacagcggcagcggcgtgctgagcaccctgaccatcaacaacgtgatggaggccgacttccagacccactacaactgcaccgcctggaacagcttcggccccggcaccgccatcatccagctggaggagagagaggtgctgcccgtgggcatcatcgccggcgccaccatcggcgccagcatcctgctgatcttcttcttcatcgccctggtgttcttcctgtacagaagaagaaagggcagcagaaaggacgtgaccctgagaaagctggacatcaaggtggagaccgtgaacagagagcccctgaccatgcacagcgacagagaggacgacaccgccagcgtgagcaccgccaccagagtgatgaaggccatctacagcagcttcaaggacgacgtggacctgaagcaggacctgagatgcgacaccatcgacaccagagaggagtacgagatgaaggaccccaccaacggctactacaacgtgagagcccacgaggacagacccagcagcagagccgtgctgtacgccgactacagagcccccggccccgccagattcgacggcagacccagcagcagactgagccacagcagcggctacgcccagctgaacacctacagcagaggccccgccagcgactacggccccgagcccaccccccccggccccgccgcccccgccggcaccgacaccaccagccagctgagctacgagaactacgagaagttcaacagccaccccttccccggcgccgccggctaccccacctacagactgggctacccccaggccccccccagcggcctggagagaaccccctacgaggcctacgaccccatcggcaagtacgccaccgccaccagattcagctacaccagccagcacagcgactacggccagagattccagcagagaatgcagacccacgtgtag

SEQ ID NO: 197330 - DNA, 2274 bp, Artificial Sequence
  derived and/or modified sequence
atgctttcccttttagtctggatcctcacactctcagatactttttcccaaggcacccaaactaggttcagccaggaacccgctgatcagaccgtggtcgcaggccagagagccgtcctgccctgcgtgctgcttaattatagcggtatcgtccagtggaccaaggacgggctggcgttgggcatgggtcagggcctgaaggcctggccccgctaccgcgtggttgggagcgctgatgctggtcaatacaacctggaaatcaccgacgcagagctgagtgacgacgcgagttacgaatgtcaggccacagaggcagccctccggagccggcgcgcaaaattgactgtgttgatcccaccagaggacacacgcatagacggcgggccagtgatcttgctgcaggctggcacgccgcataatttgacttgccgagctttcaacgcaaaacccgccgcaacgataatttggttccgtgatgggacccagcaagagggtgcggtggccagtactgagctgctaaaagatggcaaacgagagacaaccgtcagtcagttactgattaatcccactgacctggacatcggtagggtttttacatgcagatccatgaacgaagcaatacctagcgggaaggaaacaagcattgaactggatgtgcaccaccctcccactgtgacgctttctatcgaaccacagactgtgcaggagggggagagggttgtttttacatgccaggccactgccaacccggaaatccttggttaccgatgggcgaaaggaggcttccttatagaggacgcccacgagtccaggtacgaaactaatgtggactactctttcttcacagagcccgtcagctgcgaggtccacaataaggtggggtctactaatgttagcaccctggtgaatgtgcactttgcccctcgcatagtggtagaccctaagccaactaccacagacattgggagcgacgtgactctgacctgtgtgtgggtgggcaaccctccactgactctgacatggacgaaaaaagacagcaatatggtcctgtcaaactctaaccagctcctcctcaaaagcgtgacccaggccgatgccgggacatacacgtgcagggccatcgtcccaagaatcggggtcgctgaacgagaggttcctctgtatgtaaatgggcctccgatcattagttccgaagcggtccaatacgccgtgcgtggcgacgggggcaaagtggaatgcttcattggtagcaccccccctcccgatagaatagcctgggcatggaaggagaacttcctggaggtgggcacactggagcgctataccgtggaacggactaactccggcagtggcgtactaagtactctgacgatcaataacgtgatggaagctgatttccagacacattataactgtaccgcctggaactccttcgggcccggaacggccattattcagctcgaagagcgcgaggtcctgcctgttggcatcattgctggcgccaccattggagcttcaattctcttgatcttcttttttatcgctctagtttttttcctgtaccgaaggcgtaaagggtctagaaaagatgtgactctgcggaagctggatataaaagtcgagactgtgaacagagagcctctcaccatgcattcggatcgggaggacgacacggccagtgtgtctaccgctacgcgtgtaatgaaggccatttattcttcgttcaaggacgatgtcgatctgaagcaggatttgcggtgcgacaccattgatacaagggaagagtatgagatgaaagatcccactaacggctactacaatgttcgggctcatgaggacagacccagctctagggcagttctttatgctgattatcgcgccccaggtccagcccgattcgatggaagaccctcttccaggctctcgcatagtagtgggtacgcccagctgaacacctacagtcgcggccccgcgtctgactacggaccggagcctacaccaccaggccccgccgcaccagccgggactgataccacatctcagctcagctatgagaattacgagaaattcaacagtcacccttttcccggcgctgcaggctacccaacctaccgccttggctatcctcaagctccccctagtggcttagagagaactccttacgaagcctacgacccaatcggtaaatacgccaccgccaccagatttagttacacaagccagcactctgattacggccagcgatttcaacagaggatgcaaacccatgtttag

SEQ ID NO: 197331 - DNA, 2874 bp, Artificial Sequence
  derived and/or modified sequence
ccgctcctctggctcgctcgccaactccgggccccagccgcgggcgggcgcacggcgggcggacagcatgctgagcctcctcgtctggatcctcactctctccgatactttctcccaagggacccagacccgcttcagccaggagccagctgaccagacggtggtggctggacagcgggccgtgctcccctgtgtgctgctcaactactctggaattgtgcaatggaccaaggacgggctggccctgggcatgggccagggcctcaaagcctggccacggtaccgggttgtgggctccgcagacgctgggcagtacaacctggagatcacagatgctgagctctctgacgacgcctcttacgagtgccaggccacggaggccgccctgcgctctcggcgggccaaactcaccgtgctcatccccccagaggacaccaggattgacggaggccctgtgattctactgcaggcaggcaccccccacaacctcacatgccgggccttcaatgcgaagcctgctgccaccatcatctggttccgggacgggacgcagcaggagggcgctgtggccagcacggaattgctgaaggatgggaagagggagaccaccgtgagccaactgcttattaaccccacggacctggacatagggcgtgtcttcacttgccgaagcatgaacgaagccatccctagtggcaaggagacttccatcgagctggatgtgcaccaccctcctacagtgaccctgtccattgagccacagacggtgcaggagggtgagcgtgttgtctttacctgccaggccacagccaaccccgagatcttgggctacaggtgggccaaagggggtttcttgattgaagacgcccacgagagtcgctatgagacaaatgtggattattcctttttcacggagcctgtgtcttgtgaggttcacaacaaagtgggaagcaccaatgtcagcactttagtaaatgtccactttgctccccggattgtagttgaccccaaacccacaaccacagacattggctctgatgtgacccttacctgtgtctgggttgggaatccccccctcactctcacctggaccaaaaaggactcaaatatggtcctgagtaacagcaaccagctgctgctgaagtcggtgactcaggcagacgctggcacctacacctgccgggccatcgtgcctcgaatcggagtggctgagcgggaggtgccgctctatgtgaacgggccccccatcatctccagtgaggcagtgcagtatgctgtgaggggtgacggtggcaaggtggagtgtttcattgggagcacaccacccccagaccgcatagcatgggcctggaaggagaacttcttggaggtggggaccctggaacgctatacagtggagaggaccaactcaggcagtggggtgctatccacgctcaccatcaacaatgtcatggaggccgactttcagactcactacaactgcaccgcctggaacagcttcgggccaggcacagccatcatccagctggaagagcgagaggtgttacctgtgggcatcatagctggggccaccatcggcgcgagcatcctgctcatcttcttcttcatcgccttggtattcttcctctaccggcgccgcaaaggcagtcgcaaagacgtgaccctgaggaagctggatatcaaggtggagacagtgaaccgagagccacttacgatgcattctgaccgggaggatgacaccgccagcgtctccacagcaacccgggtcatgaaggccatctactcgtcgtttaaggatgatgtggatctgaagcaggacctgcgctgcgacaccatcgacacccgggaggagtatgagatgaaggaccccaccaatggctactacaacgtgcgtgcccatgaagaccgcccgtcttccagggcagtgctctatgctgactaccgtgcccctggccctgcccgcttcgacggccgcccctcatcccgtctctcccactccagcggctatgcccagctcaacacctatagccggggccctgcctctgactatggccctgagcccacaccccctggccctgctgccccagctggcactgacacaaccagccagctgtcctacgagaactatgagaagttcaactcccatcccttccctggggcagctgggtaccccacctaccgactgggctacccccaggccccaccctctggcctggagcggaccccatatgaggcgtatgaccccattggcaagtacgccacagccactcgattctcctacacctcccagcactcggactacggccagcgattccagcagcgcatgcagactcacgtgtaggggccagagcctggctggggcatctctgcggggcagaggagaaggctttcacagctgttccctgatattcaggggcattgctcattgctcccttctcggaccagccttcttcctcccaccatggcaggtggggagcaggtctcccagaaacaccccgtcccgaggatggtgctctgtgcatgccccagcctcctgggcctgcccttccctcttcttcgggaggatgtgtctcttctgacctgcactcttgcctgaccctagaatggggacagggaaagtgaaggttagggaaagcagaggggggcactttttagcattccctttctatcccacccctctgatctcccataagtggaaatgggggtacccagggatgggcaggctttggcctagggacatgaagtatgggagtgggtggctgtggcacagacaggtggaaaacgggatagcctggccagtccctctgttgtctgcattcgtgccctgggtgcctctctccttcctcagggtactgcagaagggagcgaacaggg

SEQ ID NO: 197332 - DNA, 2274 bp, Artificial Sequence
  derived and/or modified sequence
atgctgagcctgctggtgtggatcctgaccctgagtgacaccttcagccagggcacccagacccgcttcagccaggagcctgctgaccagacagtggtggccggccagagagctgtgctgccctgtgtgctgctgaactacagcggcatcgtgcagtggaccaaggatggcctggccctgggcatgggccagggcctgaaggcctggccccgctacagagtggtgggcagcgcagatgctggccagtacaacctggagatcacagatgctgagctgagtgatgatgccagctatgagtgccaggccacagaagctgccctgcggagccggcgggccaagctgactgtgctgatccccccagaggacaccagaattgatggcggccctgtgatcctgctgcaggccggcaccccccacaacctgacctgccgggccttcaatgccaagccagctgccaccatcatctggttcagagatggcacccagcaggagggcgctgtggccagcacagagctgctgaaggatggcaagcgggagaccaccgtgtcccagctgctgatcaaccccacagacctggacatcggccgggtcttcacctgccgctccatgaatgaggccatccccagcggcaaggagaccagcattgagctggatgtgcaccacccccccaccgtgaccctgagcattgagccccagacagtgcaggagggggagcgggtggtgttcacctgccaggccacagccaaccctgagatcctgggctaccgctgggccaagggcggcttcctgattgaagatgcccacgagagccgctatgagaccaacgtggactacagcttcttcacagagcctgtgtcctgtgaggtgcacaacaaggtgggcagcaccaacgtgtccaccctggtgaatgtgcactttgccccccgcatcgtggtggaccccaagcccaccaccacagacattggaagtgatgtgaccctgacctgtgtgtgggtgggcaacccccccctgaccctgacctggaccaagaaggacagcaacatggtgctgagcaacagcaaccagctgctgctgaagtctgtgacccaggctgatgctggcacctacacctgccgggccatcgtgccccgcatcggcgtggccgagcgggaggtgcccctgtatgtgaatggcccccccatcatcagcagcgaggccgtgcagtatgctgtgagaggagatggcggcaaggtggagtgcttcatcggcagcaccccacctccagaccgcatcgcctgggcctggaaggagaacttcctggaggtgggcaccctggagcgctacacagtggagaggaccaacagcggcagcggcgtgctgagcaccctgaccatcaacaacgtgatggaggccgacttccagacccactacaactgcacagcctggaacagctttggacctggaacagccatcatccagctggaggagcgggaggtgctgcctgtgggcatcatcgccggggccaccatcggggccagcatcctgctgatcttcttcttcatcgccctggtgttcttcctgtacagaagaaggaagggcagcaggaaggatgtgaccctgaggaagctggacatcaaggtggagaccgtgaaccgggagcccctgaccatgcacagcgacagagaagatgacacagcctctgtgtccacagccaccagggtgatgaaggccatctacagcagcttcaaggatgatgtggacctgaagcaggacctgcgctgtgacaccatcgacacccgggaggagtatgagatgaaggaccccaccaacggctactacaacgtgcgggcccacgaggaccggcccagcagcagagctgtgctgtatgctgactaccgggcccctggccctgccaggtttgatggccggcccagcagccggctgagccacagcagcggctacgcccagctgaacacctacagccggggccctgccagtgactatggccctgagcccaccccacctggccctgctgccccagctggaacagacaccaccagccagctgtcctatgaaaattatgagaagttcaacagccaccccttccctggagctgctggctaccccacctaccgcctgggctacccccaggccccacccagcggcctggagaggaccccctatgaggcctatgaccccatcggcaagtatgccacagccacccgcttctcctacaccagccagcacagcgactatggccagcgcttccagcagaggatgcagacccacgtgtag

SEQ ID NO: 197333 - DNA, 2274 bp, Artificial Sequence
  derived and/or modified sequence
atgctgagcctgctggtgtggatcctgaccctgagcgacaccttcagccagggaacacagacacggttctcccaggaaccagccgaccagaccgtggtcgctggccagcgggccgtgttgccgtgtgtcctgttaaactacagcggaattgtgcagtggactaaggacgggttggctctgggaatgggtcagggactgaaggcctggccacggtatagagttgtggggagtgctgatgcaggacaatacaatctcgagattacagacgcagagctgtctgatgatgcttcgtacgaatgccaagcaaccgaggctgctctgagatctcggagagcaaagttgactgttcttattcctcccgaggacacccgaatcgatggaggacccgtgattctgctgcaggcaggcacaccgcacaacttgacgtgccgtgctttcaatgcgaagcccgcagcaacaatcatctggttcagagacggcactcagcaggagggcgctgtcgcatcgacagaactgctcaaagatggcaaacgagaaaccacagtgagccagctcctcatcaaccctaccgacctggatatcggtcgcgtgttcacttgccgctcaatgaacgaagcaattccttccggtaaggagacgtccatagagctcgatgtgcatcatccacccactgtgacgctgtccatcgagccgcaaaccgtccaggaaggagagcgtgtcgttttcacctgccaagcgaccgccaaccccgaaattcttggatataggtgggctaaaggtggctttctgattgaggacgctcacgaatctcggtatgaaacaaatgtggactattcttttttcactgaacccgtgagttgtgaagtccataacaaggtgggttcaactaatgtgtcgactctcgttaacgtgcattttgcccctaggattgtagtggatccgaaaccaacaacgactgacatcgggagtgacgtcacactgacttgtgtgtgggtaggcaacccgcccctcacactaacttggactaagaaagattcaaacatggtgctgtcaaattccaaccagctgctgctcaagagtgttacacaggccgatgccggaacatatacttgtagggctatcgtaccccgcatcggcgtcgcagagcgggaagtccctctgtacgtcaatggtcctcccataataagtagtgaggccgtacagtatgcggttagaggcgatggaggcaaggtggagtgtttcatagggagcactcccccccctgacagaatcgcttgggcttggaaggagaatttccttgaggttggcactcttgagcgatataccgtggaaagaacgaactccggctcaggggtactctcgacgctcactataaataacgtcatggaggccgattttcaaactcactataactgcaccgcctggaactcattcggccccgggacagcaatcattcaattagaggaaagagaagttctccctgtgggcataattgccggtgctacgattggggcgtcaatccttctgatcttcttctttattgctctggtctttttcttatacaggcgtcggaaaggctctcgcaaagatgtgaccctgcgtaagctggatatcaaggtggaaactgtaaacagggagccccttacaatgcacagcgacagggaggacgacacagcgtccgtcagcactgccacccgggtcatgaaggccatttacagcagtttcaaggacgacgtcgatttgaagcaggacttgcggtgcgatacaattgatactcgagaagagtatgaaatgaaggatcctacaaacgggtattacaatgtgcgggcacacgaagaccgccctagcagccgagctgtgctgtacgcggactatagagcccctgggccggccaggttcgacggccgccccagcagccgtctaagccatagctccggctacgcccagctgaacacgtattcaagggggccagcatctgattacggccccgagcccacacctcctggacccgcggccccagcaggcaccgataccacctctcagctgtcttatgagaattacgaaaagttcaactcccacccatttcccggtgcagccggctacccgacataccggttgggctatccgcaggctcctcccagcggactcgaaagaacgccttacgaggcctacgaccccatcggaaaatacgctaccgcaacacggttctcctacacaagtcagcactctgattatggacagcggtttcagcaacggatgcagacccatgtctag

SEQ ID NO: 197334 - DNA, 2274 bp, Artificial Sequence
  derived and/or modified sequence
atgctgagtctgctggtgtggattctgacactatctgatactttctcacaggggactcagactcgtttctcacaggaacctgcagatcagaccgttgtcgcaggacaacgggctgtactgccttgtgtactcctgaactattcaggcatcgtccagtggaccaaggacggactggcactgggaatggggcagggcctcaaggcctggcccagataccgggtggtgggttccgcggatgccggacagtacaacctcgaaattacagacgccgagttgagcgacgacgcttcctacgaatgtcaggcgaccgaggccgctctgaggagcaggagggccaagttaactgtgctaatccccccagaagatacccgtattgatggcggtcccgtaatcctgcttcaagccggaacaccacacaacttgacctgcagggcctttaatgcaaaaccagctgcgaccatcatctggttccgagacggtacacagcaggagggagctgtcgcaagcactgagttgctgaaagatggtaagcgtgaaactacagtttcccaacttctgatcaaccctactgacttggacatcgggcgtgtgtttacatgtcgctcaatgaacgaagcgatcccctccggcaaggagacatccatcgagttagatgtgcatcacccaccaactgttacccttagtatagagccccaaaccgtgcaggaaggggaaagggtcgtatttacgtgccaagccactgctaatccagagattctcggttaccggtgggcaaagggcggtttcctgattgaggatgctcacgaatcacgttatgagaccaacgtggactacagttttttcaccgagcccgtctcatgtgaggtgcataacaaggtggggtccaccaatgtaagcacactcgttaacgtgcatttcgccccaagaatcgtcgtggaccccaaacccactacaactgacatcggcagtgacgtgactctgacctgcgtatgggttggcaacccacctcttacattgacgtggactaagaaggactccaatatggtattatcaaatagcaatcaactattgctgaagtccgtaactcaggccgatgcgggaacctacacatgccgggctatcgttcctcgaatcggagtggcagagagggaagttccattatatgtcaatggtccacccatcatatcctcggaagctgtgcagtatgccgtgcgaggggacgggggtaaggtagagtgcttcatcggcagcacgccaccccctgaccggatcgcctgggcatggaaggagaatttcctggaggtcggaaccctggagagatacacggtggagcgtacgaatagtggctcaggcgtgctgagtacgttaactattaacaatgtgatggaggcagattttcagacccactataattgtaccgcttggaattcttttggacctggaaccgccataattcagctggaggagcgagaagttttgccagtggggatcatcgccggtgctaccattggcgcttccatcctgttgatcttctttttcattgcactggtgttcttcctctacagaagacggaagggttcacggaaggatgtgactctccgcaagttagatattaaggtggaaacagttaaccgggagcccctgacaatgcactccgaccgggaggatgataccgccagcgtcagtacagcaaccagggttatgaaagctatctacagctccttcaaggatgatgtcgatttgaaacaggacctgcgatgtgataccatcgatacccgtgaggaatatgaaatgaaggaccccacaaacgggtactacaatgtgcgcgcacacgaggaccggccatcgtccagagccgtgctgtacgctgattatcgggctcccggtccagccaggtttgatggacgacccagtagcaggttatctcactctagtggttacgcacagcttaatacctatagccggggtccagcctccgattacggccctgagccaacccctcccggacctgctgctcctgctggtaccgatactaccagccagctgtcctatgagaattacgaaaagttcaattctcaccccttccccggagcagccggatatcctacctatcgcttgggttatccccaggcaccgccttctgggctggagagaaccccctatgaagcatatgatccaataggcaagtacgctacagccaccagattttcttacacatcccagcactcagactatgggcagcggttccagcagcggatgcagactcacgtttag

SEQ ID NO: 197335 - protein, 438 aa, Artificial Sequence
  derived and/or modified sequence
MPCTCTWRNWRQWIRPLVAVIYLVSIVVAVPLCVWELQKLEVGIHTKAWFIAGIFLLLTIPISLWVILQHLVHYTQPELQKPIIRILWMVPIYSLDSWIALKYPGIAIYVDTCRECYEAYVIYNFMGFLTNYLTNRYPNLVLILEAKDQQKHFPPLCCCPPWAMGEVLLFRCKLGVLQYTVVRPFTTIVALICELLGIYDEGNFSFSNAWTYLVIINNMSQLFAMYCLLLFYKVLKEELSPIQPVGKFLCVKLVVFVSFWQAVVIALLVKVGVISEKHTWEWQTVEAVATGLQDFIICIEMFLAAIAHHYTFSYKPYVQEAEEGSCFDSFLAMWDVSDIRDDISEQVRHVGRTVRGHPRKKLFPEDQDQNEHTSLLSSSSQDAISIASSMPPSPMGHYQGFGHTVTPQTTPTTAKISDEILSDTIGEKKEPSDKSVDS

SEQ ID NO: 197336 - DNA, 1317 bp, Artificial Sequence
  derived and/or modified sequence
atgccctgcacctgcacctggagaaactggagacagtggatcagacccctggtggccgtgatctacctggtgagcatcgtggtggccgtgcccctgtgcgtgtgggagctgcagaagctggaggtgggcatccacaccaaggcctggttcatcgccggcatcttcctgctgctgaccatccccatcagcctgtgggtgatcctgcagcacctggtgcactacacccagcccgagctgcagaagcccatcatcagaatcctgtggatggtgcccatctacagcctggacagctggatcgccctgaagtaccccggcatcgccatctacgtggacacctgcagagagtgctacgaggcctacgtgatctacaacttcatgggcttcctgaccaactacctgaccaacagataccccaacctggtgctgatcctggaggccaaggaccagcagaagcacttcccccccctgtgctgctgccccccctgggccatgggcgaggtgctgctgttcagatgcaagctgggcgtgctgcagtacaccgtggtgagacccttcaccaccatcgtggccctgatctgcgagctgctgggcatctacgacgagggcaacttcagcttcagcaacgcctggacctacctggtgatcatcaacaacatgagccagctgttcgccatgtactgcctgctgctgttctacaaggtgctgaaggaggagctgagccccatccagcccgtgggcaagttcctgtgcgtgaagctggtggtgttcgtgagcttctggcaggccgtggtgatcgccctgctggtgaaggtgggcgtgatcagcgagaagcacacctgggagtggcagaccgtggaggccgtggccaccggcctgcaggacttcatcatctgcatcgagatgttcctggccgccatcgcccaccactacaccttcagctacaagccctacgtgcaggaggccgaggagggcagctgcttcgacagcttcctggccatgtgggacgtgagcgacatcagagacgacatcagcgagcaggtgagacacgtgggcagaaccgtgagaggccaccccagaaagaagctgttccccgaggaccaggaccagaacgagcacaccagcctgctgagcagcagcagccaggacgccatcagcatcgccagcagcatgccccccagccccatgggccactaccagggcttcggccacaccgtgaccccccagaccacccccaccaccgccaagatcagcgacgagatcctgagcgacaccatcggcgagaagaaggagcccagcgacaagagcgtggacagctag

SEQ ID NO: 197337 - DNA, 1317 bp, Artificial Sequence
  derived and/or modified sequence
atgccctgtacctgcacttggcgcaactggcgccagtggatacggcctcttgtggcagtgatctatttggtgtccatcgtggtggccgtgccgctctgtgtgtgggagctccaaaaactggaggtgggcattcataccaaggcatggttcatcgcaggcattttcttgctgttgaccatccccatctcactgtgggtgatcctccaacacctggttcattatacacaacctgaactccaaaagcctatcatcaggatactctggatggtgccaatctactctttagattcatggattgcgttaaaatacccggggattgctatctatgtggacacttgtcgagaatgctacgaggcttatgttatttacaatttcatgggcttcctcaccaactacctgaccaacaggtacccaaacctggtcctcatcctggaggccaaggatcagcagaagcactttccccccttgtgctgctgccctccatgggccatgggcgaagtgctgctgttcagatgcaaactgggggtgcttcaatataccgtggtgcggcccttcacaacaatagtggctctaatctgcgagctgctgggtatctatgacgagggcaacttctcattctcgaacgcctggacatatctggtgattataaataacatgagccagttatttgccatgtactgtctgttactgttctataaagtactgaaggaggagctctctccaatccaaccagtggggaaatttctgtgtgttaagctagtcgtcttcgttagcttttggcaggcagtggtcatcgcactgctggtgaaagtgggtgtcattagcgagaagcatacgtgggagtggcagactgtggaggctgtggcgacaggactgcaagattttattatctgcatagagatgttcttagctgcaatcgctcaccactatacttttagctataagccctacgtgcaggaggctgaggagggttcgtgttttgattcctttctagccatgtgggacgtgtccgatatcagggatgacatcagtgagcaggtccggcatgtggggcgaaccgtgcgcggacatccccggaagaaactgtttcctgaggaccaggatcagaatgaacatacttcgctactcagctcctctagccaggacgcgatttctattgcttcctctatgcctccttcacctatggggcattaccagggcttcggacacactgttacaccccagacaacgcctacgaccgccaaaatttctgatgagatcctaagcgataccatcggtgagaagaaagagccatcagataagagcgtcgacagctag

SEQ ID NO: 197338 - DNA, 1317 bp, Artificial Sequence
  derived and/or modified sequence
atgccctgcacctgcacctggaggaactggaggcagtggatccggcccctggtggccgtcatctacctggtgtccatcgtggtggccgtgcccctgtgtgtgtgggagctgcagaagctggaggtgggcatccacaccaaggcctggttcatcgccggcatcttcctgctgctgaccatccccatcagcctgtgggtgatcctgcagcacctggtgcactacacccagcctgagctgcagaagcccatcatccgcatcctgtggatggtgcccatctacagcctggacagctggatcgccctgaagtacccaggcatcgccatctacgtggacacctgcagagaatgttatgaggcctacgtgatctacaacttcatgggcttcctgaccaactacctgaccaaccgctaccccaacctggtgctgatcctggaggccaaggaccagcagaagcacttcccccccctgtgctgctgccccccctgggccatgggagaggtgctgctcttccgctgcaagctgggcgtgctgcagtacacagtggtgcggcccttcaccaccatcgtggccctgatctgtgagctgctgggcatctatgatgagggcaacttctccttcagcaatgcctggacctacctggtgatcatcaacaacatgagccagctgtttgccatgtactgcctgctgctcttctacaaggtgctgaaggaggagctgagccccatccagcctgtgggcaagttcctgtgtgtgaagctggtggtgtttgtgtccttctggcaggccgtggtgattgccctgctggtgaaggtgggcgtcatcagcgagaagcacacctgggagtggcagacagtggaggccgtggccaccggcctgcaggacttcatcatctgcatcgagatgttcctggccgccatcgcccaccactacaccttctcctacaagccctacgtgcaggaggccgaggagggcagctgctttgacagcttcctggccatgtgggatgtgtctgacatcagagatgacatcagcgagcaggtgagacatgtgggccgcacagtgcggggccaccccaggaagaagctgtttcctgaggaccaggaccagaatgagcacaccagcctgctgagcagcagcagccaggatgccatcagcatcgccagctccatgccacccagccccatgggccactaccagggcttcggccacacagtgaccccccagaccacccccaccacagccaagatcagtgatgagatcctgagtgacaccatcggggagaagaaggagcccagcgacaagtctgtggacagctag

SEQ ID NO: 197339 - DNA, 1317 bp, Artificial Sequence
  derived and/or modified sequence
atgccctgcacctgcacctggcggaactggcggcagtggatccggccactggtggctgtgatttaccttgtgagcatcgtggtggccgtaccactctgtgtctgggaacttcagaaactggaagttgggatccacactaaggcttggttcatagctggcatctttttgctcctgacaatcccaattagcctttgggtcatcctgcagcacttggtccactacactcagccggaactccaaaaacccatcattcgcatcctctggatggttccgatttactcgctggatagctggattgcccttaaatacccagggatcgctatttatgtggacacttgccgggagtgctacgaggcctatgtaatatataattttatggggttcctgaccaactaccttacaaatcgctaccctaacctggtactcattcttgaggcaaaggaccagcagaagcactttccaccactgtgctgctgcccgccgtgggccatgggtgaagtcctgctgttcagatgcaagctgggagttttgcagtacactgtcgtgagacctttcaccaccattgtggcacttatctgcgaactcctgggaatttatgacgagggcaacttcagcttttccaacgcgtggacatatctagtaataataaacaatatgtctcagctgtttgccatgtattgtttgctgttattctataaggtgctgaaagaagaattatctcccattcaacctgtcggcaagttcctctgcgtgaagttggtcgtgtttgtttccttttggcaggccgtggtgatcgcccttctggtgaaagtgggggtgatcagcgagaaacatacctgggaatggcagacggtggaagccgtagctaccgggctgcaagacttcatcatatgcatcgagatgtttctggccgcgattgcacatcactacacctttagctacaagccctatgtgcaggaggcagaggagggcagctgcttcgatagcttcttggctatgtgggacgtgagtgatattagggacgacattagcgaacaagtgcgccatgtgggcaggactgtgcgaggccacccccgcaagaagcttttcccggaggaccaagatcagaatgaacacaccagcctgctgagttcctcatcccaagacgctatttcgatcgcctcatcgatgccccctagtcctatgggtcactaccagggtttcggacacacagtgacgccacagacaactccaacaacggccaagatttcagacgagatcctttccgataccatcggggagaagaaggaaccttcagacaaaagtgtagactcctag

SEQ ID NO: 197340 - DNA, 1317 bp, Artificial Sequence
  derived and/or modified sequence
atgccctgtacgtgtacatggcgaaactggcgccaatggataagacccctggtcgccgtgatctacctcgtgtctatcgtcgtggctgtgcccctctgcgtctgggagctgcagaaactcgaggtcggtatccataccaaggcatggttcattgccggaatcttccttctgctgaccatccctatcagcctatgggtcatcttgcagcatttagtccactacacacagccggaactgcaaaaacccatcatcaggatcctctggatggtgccgatctacagcttagacagctggatcgcccttaagtacccgggtattgccatctacgtggatacgtgtagagagtgctacgaggcttatgtcatttacaacttcatgggcttcttgaccaactacttgacaaaccgttatcccaaccttgtgctaattctggaggccaaggatcagcagaaacacttccccccattgtgttgctgtccaccctgggcaatgggggaagttctactgttcagatgcaagctcggcgtgctgcagtatacagttgtccgcccattcaccacaatagtagccctgatctgtgaacttctggggatttatgatgaaggcaatttttcttttagcaacgcttggacttatctcgttatcatcaacaacatgagtcagcttttcgctatgtactgccttcttcttttttacaaggttctcaaggaggagttaagccctattcagcctgtaggaaaatttctatgcgtgaaactcgtagtctttgtgtctttctggcaggctgttgtgatagctctcctcgttaaggtgggtgttatatccgagaagcacacgtgggagtggcagacggtcgaagcagttgcaacgggacttcaggatttcattatttgcatcgagatgtttttggccgctattgcccaccactatactttctcttataaaccctacgtgcaggaagccgaagaagggtcgtgtttcgactccttcctggccatgtgggacgtgagtgacattagagatgacatcagcgagcaggttaggcacgtcggacggaccgtgcgcggacaccccagaaaaaaactattcccagaggaccaggaccagaacgaacatacgtcactgctcagtagttctagccaagacgcaatctccattgcctctagcatgccccctagcccaatggggcattaccagggctttggtcacactgtaacacctcagactacaccaactacagccaaaatttcagacgaaattctgagtgatacaataggcgaaaaaaaagaacccagcgataaatctgtcgactcatag

SEQ ID NO: 197341 - DNA, 4178 bp, Artificial Sequence
  derived and/or modified sequence
gagctgaaagtcttggtttggccttgggttccgctgtaggggaggtcccgtgcgaaagaatgaggagatcctggggccttacctactagcggaatcgactgaagagacgcctgccagtgcgggaggtaggaagctcgatccccaaagaaaagagcgagtgggcaggcagctgcgagacagaaccggagtgtgcagggtccctagaggccggttcctggtctgtgctgctctcctggaagccatggtacaggcagagctcagggcgatccccaggtgagggcagcggctctgcctgggattccaccgcagtacaaccgggtagatgcggggtggagaagaaaggatgttgcctgcactgctcgccaatagcaccctgagaggctacatttgcagaagcagcagcagcagaagacacagcgccggtccaggaggcggctcgagctgttcgtaaagtcgcccgacagctttttctccgtagtatgcgagttgacaaaacagccagagaacagggctccccattacaatcttttcgagatcttttcccttgctaaccggatctgatttgtgcgaaaacatgccttgcacttgtacctggaggaactggagacagtggattcgacctttagtagcggtcatctacctggtgtcaatagtggttgcggttcccctatgcgtgtgggaattacagaaactggaggttggaatacacaccaaggcttggtttattgctggaatctttttgctgttgactattcctatatcactgtgggtgatattgcaacacttagtgcattatacacaacctgaactacaaaaaccaataataaggattctttggatggtacctatttacagtttagatagttggatagctttgaaatatcccggaattgcaatatatgtggatacctgcagagaatgctatgaagcttatgtaatttacaactttatgggattccttaccaattatctaactaaccggtatccaaatctggtattaatccttgaagccaaagatcaacagaaacatttccctcctttatgttgctgtccaccatgggctatgggagaagtattgctgtttaggtgcaaactaggtgtattacagtacacagttgtcagacctttcaccaccatcgttgctttaatctgtgagctgcttggtatatatgacgaagggaactttagcttttcaaatgcttggacttatttggttataataaacaacatgtcacagttgtttgccatgtattgtctcctgctcttttataaagtactaaaagaagaactgagcccaatccaacctgttggcaaatttctttgtgtaaagctggtggtttttgtttctttttggcaagcagtagttattgctttgttggtaaaagttggcgttatttctgaaaagcatacgtgggaatggcaaactgtagaagctgtggccaccggactccaggattttattatctgtattgagatgttcctcgctgccattgctcatcattacacattctcatataaaccatatgtccaagaagcagaagagggctcatgctttgattcctttcttgccatgtgggatgtctcagatattagagatgatatttctgaacaagtaaggcatgttggacggacagtcaggggacatcccaggaaaaaattgtttcccgaggatcaagatcaaaatgaacatacaagtttattatcatcatcatcacaagatgcaatttccattgcttcttctatgccaccttcacccatgggtcactaccaagggtttggacacactgtgactccccagactacacctaccacagctaagatatctgatgaaatccttagtgatactataggagagaaaaaagaaccttcagataaatccgtggattcctgaacagtatggaaaagcaaactgtgcaactactacattatatcattacctggtatcccatggattttgtgcttgggacagaccataaatgatggaaaatgtcaacacaaaaatagctgaaagccaggtacaactactgcatttatatatgtaagttttgtatatcaaaaataattggtctaaatttcctagacttagacttgatttcttaacattagggtatcgcatactcaaatggtagacaatgaccccaactaaatcttcctgatgttacactgctttatcaagaggatggacttttttttttttgagacagacagagtcttgctctgtcacccaggctggagtgcagtggcgcaatctcgggtcactgcaagctctgcctcccaagttcatgccattctcctgcctcagcctcccaagtagctgggactacaggcacctgccaccatgcccagctaattttttttttttcagtagagacagggtctcaccatgttagccaggatggtcttgatctgacctcgtgatccgccgacctcggcctcccaaagtgctggaattacaggcgtgagccactgcgcctggccaagaatggacattttttaaaaaaacatcagtacttcctaccactgctgcatgagtataatgctccggaattatcagaaagcataatgcagaaatacgaattagtggaacttaatcatgtgccatataagcttacctaacaaacagttatatccctattcctcaactgaatgtctttcaataaataagaatttatcatttattttctgcaacttttttatgtctcattctttaaacattaaaaacccttaatattttaacaaaaatttcttgattagaggcacagtgaaaaagaagtcaaaaaaaaaagttctacttttcatcagtgctattaaaggtggcagcaaatgtaaatcttggctgaatggtcttaattactcattaaaccacagtcagaaagacatataggtgctatttgggaaaactttttattacctaggatggggtttctctaattgctaatcacaaccccactgggtcatgtttgacattttataatgaaaataaaacagaaagtgccatagtatgttacagaaagcaaagatgagtattgtttctcaaagcctttgctttatgtatttatacacatactcattcatatctatctatatatatagagagagatagtggttcacagtaatcatacaaagtctttattccatccactattataaacatttctattaaaactaaaactgggctctatgtaaaaaccccaaagatacacacacaaaaaaaatctgtttgttagaactcaagtgaattcagtaaagttgcagaatacaaaatcaacatacaaaaagcattagcatttttatacataaataatgaaaataatgacctaactgaaaaattaagatgccatttatgatagcataaaaaaaatacttacttaggaataaatttaacaccaaggcagtaaaagatctgtatgtacactgaaaactatgaaacactgatgaaagaaagacacaaataaatggaaaggtatcccgtgctcatggatcagaataatactgttaaaatggtcacactacccaaagcaattcagaatcaatgcaatcctatcaaaattccaatggcattatttacacaaacagaaaaaaatcctaaaattcatatgtaacgataaaagaccctgaataggcaaaagaatactgaggaaaaaatgttggagacatcacatttcctaattataaattatactacaaaactatagtaatcaagacagtatggtactggtataaaaacacatacacaggccagtgggacagaagaaagagtccagatataaatccaaacatacacagtcaactaatttttgacaaagacaccaagaagacacatcggggaaagaacagtcttcattaagtgttcttaatgaagatgctgggaaaactgcacttccacatgcaaaacaatgaaatcagacccttatcttagacctacacaacaatcaattcaaaatggataaaagacctaaatgtaagaccagaaactatagaagagaacataggagaaaagttcctggacactgacccttggcaatgattttttggatatcacaccaaaagctcagtcaacaaaaacaaaaacaaatgtgactacatcaaaccaaaaagcttctgacagtaaaagaaacagtcaacaaaatgaaacagtagcctacagattgagtaaaaaatatttgtaaggcatatat

SEQ ID NO: 197342 - protein, 570 aa, Artificial Sequence
  derived and/or modified sequence
MEAPEEPAPVRGGPEATLEVRGSRCLRLSAFREELRALLVLAGPAFLVQLMVFLISFISSVFCGHLGKLELDAVTLAIAVINVTGVSVGFGLSSACDTLISQTYGSQNLKHVGVILQRSALVLLLCCFPCWALFLNTQHILLLFRQDPDVSRLTQTYVTIFIPALPATFLYMLQVKYLLNQGIVLPQIVTGVAANLVNALANYLFLHQLHLGVIGSALANLISQYTLALLLFLYILGKKLHQATWGGWSLECLQDWASFLRLAIPSMLMLCMEWWAYEVGSFLSGILGMVELGAQSIVYELAIIVYMVPAGFSVAASVRVGNALGAGDMEQARKSSTVSLLITVLFAVAFSVLLLSCKDHVGYIFTTDRDIINLVAQVVPIYAVSHLFEALACTSGGVLRGSGNQKVGAIVNTIGYYVVGLPIGIALMFATTLGVMGLWSGIIICTVFQAVCFLGFIIQLNWKKACQQAQVHANLKVNNVPRSGNSALPQDPLHPGCPENLEGILTNDVGKTGEPQSDQQMRQEEPLPEHPQDGAKLSRKQLVLRRGLLLLGVFLILLVGILVRFYVRIQ

SEQ ID NO: 197343 - protein, 586 aa, Artificial Sequence
  derived and/or modified sequence
MEAPEEPAPVRGGPEATLEVRGSRCLRLSAFREELRALLVLAGPAFLVQLMVFLISFISSVFCGHLGKLELDAVTLAIAVINVTGVSVGFGLSSACDTLISQTYGSQNLKHVGVILQRSALVLLLCCFPCWALFLNTQHILLLFRQDPDVSRLTQTYVTIFIPALPATFLYMLQVKYLLNQGIVLPQIVTGVAANLVNALANYLFLHQLHLGVIGSALANLISQYTLALLLFLYILGKKLHQATWGGWSLECLQDWASFLRLAIPSMLMLCMEWWAYEVGSFLSGILGMVELGAQSIVYELAIIVYMVPAGFSVAASVRVGNALGAGDMEQARKSSTVSLLITVLFAVAFSVLLLSCKDHVGYIFTTDRDIINLVAQVVPIYAVSHLFEALACTSGGVLRGSGNQKVGAIVNTIGYYVVGLPIGIALMFATTLGVMGLWSGIIICTVFQAVCFLGFIIQLNWKKACQQAQVHANLKVNNVPRSGNSALPQDPLHPGCPENLEGILTNDVGKTGEPQSDQQMRQEEPLPEHPQDGAKLSRKQLVLRRGLLLLGVFLILLAGVRWCDHSSLQPRTLGLQAILLCQPPE

SEQ ID NO: 197344 - protein, 282 aa, Artificial Sequence
  derived and/or modified sequence
MVELGAQSIVYELAIIVYMVPAGFSVAASVRVGNALGAGDMEQARKSSTVSLLITVLFAVAFSVLLLSCKDHVGYIFTTDRDIINLVAQVVPIYAVSHLFEALACTSGGVLRGSGNQKVGAIVNTIGYYVVGLPIGIALMFATTLGVMGLWSGIIICTVFQAVCFLGFIIQLNWKKACQQAQVHANLKVNNVPRSGNSALPQDPLHPGCPENLEGILTNDVGKTGEPQSDQQMRQEEPLPEHPQDGAKLSRKQLVLRRGLLLLGVFLILLVGILVRFYVRIQ

SEQ ID NO: 197345 - protein, 443 aa, Artificial Sequence
  derived and/or modified sequence
MEAPEEPAPVRGGPEATLEVRGSRCLRLSAFREELRALLVLAGPAFLVQLMVFLISFISSVFCGHLGKLELDAVTLAIATYGSQNLKHVGVILQRSALVLLLCCFPCWALFLNTQHILLLFRQDPDVSRLTQTYVTIFIPALPATFLYMLQVKYLLNQGIVLPQIVTGVAANLVNALANYLFLHQLHLGVIGSALANLISQYTLALLLFLYILGKKLHQATWGGWSLECLQDWASFLRLAIPSMLMLCMEWWAYEVGSFLSGILGMVELGAQSIVYELAIIVYMVPAGFSVAASVRVGNALGAGDMEQARKSSTVSLLITVLFAVAFSVLLLSCKDHVGYIFTTDRDIINLVAQVVPIYAVSHLFEALACTSGGVLRGSGNQKVGAIVNTIGYYVVGLPIGIALMFATTLGVMGSGTRQFESKQRASEWEFCSPSGSASPRVP

SEQ ID NO: 197346 - protein, 245 aa, Artificial Sequence
  derived and/or modified sequence
MLMLCMEWWAYEVGSFLSGILGMVELGAQSIVYELAIIVYMVPAGFSVAASVRVGNALGAGDMEQARKSSTVSLLITVLFAVAFSVLLLSCKDHVGYIFTTDRDIINLVAQVVPIYAVSHLFEALACTSGGVLRGSGNQKVGAIVNTIGYYVVGLPIGIALMFATTLGVMGCPENLEGILTNDVGKTGEPQSDQQMRQEEPLPEHPQDGAKLSRKQLVLRRGLLLLGVFLILLVGILVRFYVRIQ

SEQ ID NO: 197347 - protein, 244 aa, Artificial Sequence
  derived and/or modified sequence
MEAPEEPAPVRGGPEATLEVRGSRCLRLSAFREELRALLVLAGPAFLVQLMVFLISFISSVFCGHLGKLELDAVTLAIAVINVTGVSVGFGLSSACDTLISQTYGSQNLKHVGVILQRSALVLLLCCFPCWALFLNTQHILLLFRQDPDVSRLTQTYVTIFIPALPATFLYMLQVKYLLNQRLCTGKLDFPVHPGSTPLSLHPREKTASSYMGRLVPRVPAGLGLLPPPGHPQHAHAVHGVVGL

SEQ ID NO: 197348 - DNA, 1713 bp, Artificial Sequence
  derived and/or modified sequence
atggaggcccccgaggagcccgcccccgtgagaggcggccccgaggccaccctggaggtgagaggcagcagatgcctgagactgagcgccttcagagaggagctgagagccctgctggtgctggccggccccgccttcctggtgcagctgatggtgttcctgatcagcttcatcagcagcgtgttctgcggccacctgggcaagctggagctggacgccgtgaccctggccatcgccgtgatcaacgtgaccggcgtgagcgtgggcttcggcctgagcagcgcctgcgacaccctgatcagccagacctacggcagccagaacctgaagcacgtgggcgtgatcctgcagagaagcgccctggtgctgctgctgtgctgcttcccctgctgggccctgttcctgaacacccagcacatcctgctgctgttcagacaggaccccgacgtgagcagactgacccagacctacgtgaccatcttcatccccgccctgcccgccaccttcctgtacatgctgcaggtgaagtacctgctgaaccagggcatcgtgctgccccagatcgtgaccggcgtggccgccaacctggtgaacgccctggccaactacctgttcctgcaccagctgcacctgggcgtgatcggcagcgccctggccaacctgatcagccagtacaccctggccctgctgctgttcctgtacatcctgggcaagaagctgcaccaggccacctggggcggctggagcctggagtgcctgcaggactgggccagcttcctgagactggccatccccagcatgctgatgctgtgcatggagtggtgggcctacgaggtgggcagcttcctgagcggcatcctgggcatggtggagctgggcgcccagagcatcgtgtacgagctggccatcatcgtgtacatggtgcccgccggcttcagcgtggccgccagcgtgagagtgggcaacgccctgggcgccggcgacatggagcaggccagaaagagcagcaccgtgagcctgctgatcaccgtgctgttcgccgtggccttcagcgtgctgctgctgagctgcaaggaccacgtgggctacatcttcaccaccgacagagacatcatcaacctggtggcccaggtggtgcccatctacgccgtgagccacctgttcgaggccctggcctgcaccagcggcggcgtgctgagaggcagcggcaaccagaaggtgggcgccatcgtgaacaccatcggctactacgtggtgggcctgcccatcggcatcgccctgatgttcgccaccaccctgggcgtgatgggcctgtggagcggcatcatcatctgcaccgtgttccaggccgtgtgcttcctgggcttcatcatccagctgaactggaagaaggcctgccagcaggcccaggtgcacgccaacctgaaggtgaacaacgtgcccagaagcggcaacagcgccctgccccaggaccccctgcaccccggctgccccgagaacctggagggcatcctgaccaacgacgtgggcaagaccggcgagccccagagcgaccagcagatgagacaggaggagcccctgcccgagcacccccaggacggcgccaagctgagcagaaagcagctggtgctgagaagaggcctgctgctgctgggcgtgttcctgatcctgctggtgggcatcctggtgagattctacgtgagaatccagtag

SEQ ID NO: 197349 - DNA, 1761 bp, Artificial Sequence
  derived and/or modified sequence
atggaggcccccgaggagcccgcccccgtgagaggcggccccgaggccaccctggaggtgagaggcagcagatgcctgagactgagcgccttcagagaggagctgagagccctgctggtgctggccggccccgccttcctggtgcagctgatggtgttcctgatcagcttcatcagcagcgtgttctgcggccacctgggcaagctggagctggacgccgtgaccctggccatcgccgtgatcaacgtgaccggcgtgagcgtgggcttcggcctgagcagcgcctgcgacaccctgatcagccagacctacggcagccagaacctgaagcacgtgggcgtgatcctgcagagaagcgccctggtgctgctgctgtgctgcttcccctgctgggccctgttcctgaacacccagcacatcctgctgctgttcagacaggaccccgacgtgagcagactgacccagacctacgtgaccatcttcatccccgccctgcccgccaccttcctgtacatgctgcaggtgaagtacctgctgaaccagggcatcgtgctgccccagatcgtgaccggcgtggccgccaacctggtgaacgccctggccaactacctgttcctgcaccagctgcacctgggcgtgatcggcagcgccctggccaacctgatcagccagtacaccctggccctgctgctgttcctgtacatcctgggcaagaagctgcaccaggccacctggggcggctggagcctggagtgcctgcaggactgggccagcttcctgagactggccatccccagcatgctgatgctgtgcatggagtggtgggcctacgaggtgggcagcttcctgagcggcatcctgggcatggtggagctgggcgcccagagcatcgtgtacgagctggccatcatcgtgtacatggtgcccgccggcttcagcgtggccgccagcgtgagagtgggcaacgccctgggcgccggcgacatggagcaggccagaaagagcagcaccgtgagcctgctgatcaccgtgctgttcgccgtggccttcagcgtgctgctgctgagctgcaaggaccacgtgggctacatcttcaccaccgacagagacatcatcaacctggtggcccaggtggtgcccatctacgccgtgagccacctgttcgaggccctggcctgcaccagcggcggcgtgctgagaggcagcggcaaccagaaggtgggcgccatcgtgaacaccatcggctactacgtggtgggcctgcccatcggcatcgccctgatgttcgccaccaccctgggcgtgatgggcctgtggagcggcatcatcatctgcaccgtgttccaggccgtgtgcttcctgggcttcatcatccagctgaactggaagaaggcctgccagcaggcccaggtgcacgccaacctgaaggtgaacaacgtgcccagaagcggcaacagcgccctgccccaggaccccctgcaccccggctgccccgagaacctggagggcatcctgaccaacgacgtgggcaagaccggcgagccccagagcgaccagcagatgagacaggaggagcccctgcccgagcacccccaggacggcgccaagctgagcagaaagcagctggtgctgagaagaggcctgctgctgctgggcgtgttcctgatcctgctggccggcgtgagatggtgcgaccacagcagcctgcagcccagaaccctgggcctgcaggccatcctgctgtgccagccccccgagtag

SEQ ID NO: 197350 - DNA, 849 bp, Artificial Sequence
  derived and/or modified sequence
atggtggagctgggcgcccagagcatcgtgtacgagctggccatcatcgtgtacatggtgcccgccggcttcagcgtggccgccagcgtgagagtgggcaacgccctgggcgccggcgacatggagcaggccagaaagagcagcaccgtgagcctgctgatcaccgtgctgttcgccgtggccttcagcgtgctgctgctgagctgcaaggaccacgtgggctacatcttcaccaccgacagagacatcatcaacctggtggcccaggtggtgcccatctacgccgtgagccacctgttcgaggccctggcctgcaccagcggcggcgtgctgagaggcagcggcaaccagaaggtgggcgccatcgtgaacaccatcggctactacgtggtgggcctgcccatcggcatcgccctgatgttcgccaccaccctgggcgtgatgggcctgtggagcggcatcatcatctgcaccgtgttccaggccgtgtgcttcctgggcttcatcatccagctgaactggaagaaggcctgccagcaggcccaggtgcacgccaacctgaaggtgaacaacgtgcccagaagcggcaacagcgccctgccccaggaccccctgcaccccggctgccccgagaacctggagggcatcctgaccaacgacgtgggcaagaccggcgagccccagagcgaccagcagatgagacaggaggagcccctgcccgagcacccccaggacggcgccaagctgagcagaaagcagctggtgctgagaagaggcctgctgctgctgggcgtgttcctgatcctgctggtgggcatcctggtgagattctacgtgagaatccagtag

SEQ ID NO: 197351 - DNA, 1332 bp, Artificial Sequence
  derived and/or modified sequence
atggaggcccccgaggagcccgcccccgtgagaggcggccccgaggccaccctggaggtgagaggcagcagatgcctgagactgagcgccttcagagaggagctgagagccctgctggtgctggccggccccgccttcctggtgcagctgatggtgttcctgatcagcttcatcagcagcgtgttctgcggccacctgggcaagctggagctggacgccgtgaccctggccatcgccacctacggcagccagaacctgaagcacgtgggcgtgatcctgcagagaagcgccctggtgctgctgctgtgctgcttcccctgctgggccctgttcctgaacacccagcacatcctgctgctgttcagacaggaccccgacgtgagcagactgacccagacctacgtgaccatcttcatccccgccctgcccgccaccttcctgtacatgctgcaggtgaagtacctgctgaaccagggcatcgtgctgccccagatcgtgaccggcgtggccgccaacctggtgaacgccctggccaactacctgttcctgcaccagctgcacctgggcgtgatcggcagcgccctggccaacctgatcagccagtacaccctggccctgctgctgttcctgtacatcctgggcaagaagctgcaccaggccacctggggcggctggagcctggagtgcctgcaggactgggccagcttcctgagactggccatccccagcatgctgatgctgtgcatggagtggtgggcctacgaggtgggcagcttcctgagcggcatcctgggcatggtggagctgggcgcccagagcatcgtgtacgagctggccatcatcgtgtacatggtgcccgccggcttcagcgtggccgccagcgtgagagtgggcaacgccctgggcgccggcgacatggagcaggccagaaagagcagcaccgtgagcctgctgatcaccgtgctgttcgccgtggccttcagcgtgctgctgctgagctgcaaggaccacgtgggctacatcttcaccaccgacagagacatcatcaacctggtggcccaggtggtgcccatctacgccgtgagccacctgttcgaggccctggcctgcaccagcggcggcgtgctgagaggcagcggcaaccagaaggtgggcgccatcgtgaacaccatcggctactacgtggtgggcctgcccatcggcatcgccctgatgttcgccaccaccctgggcgtgatgggcagcggcaccagacagttcgagagcaagcagagagccagcgagtgggagttctgcagccccagcggcagcgccagccccagagtgccctag

SEQ ID NO: 197352 - DNA, 738 bp, Artificial Sequence
  derived and/or modified sequence
atgctgatgctgtgcatggagtggtgggcctacgaggtgggcagcttcctgagcggcatcctgggcatggtggagctgggcgcccagagcatcgtgtacgagctggccatcatcgtgtacatggtgcccgccggcttcagcgtggccgccagcgtgagagtgggcaacgccctgggcgccggcgacatggagcaggccagaaagagcagcaccgtgagcctgctgatcaccgtgctgttcgccgtggccttcagcgtgctgctgctgagctgcaaggaccacgtgggctacatcttcaccaccgacagagacatcatcaacctggtggcccaggtggtgcccatctacgccgtgagccacctgttcgaggccctggcctgcaccagcggcggcgtgctgagaggcagcggcaaccagaaggtgggcgccatcgtgaacaccatcggctactacgtggtgggcctgcccatcggcatcgccctgatgttcgccaccaccctgggcgtgatgggctgccccgagaacctggagggcatcctgaccaacgacgtgggcaagaccggcgagccccagagcgaccagcagatgagacaggaggagcccctgcccgagcacccccaggacggcgccaagctgagcagaaagcagctggtgctgagaagaggcctgctgctgctgggcgtgttcctgatcctgctggtgggcatcctggtgagattctacgtgagaatccagtag

SEQ ID NO: 197353 - DNA, 735 bp, Artificial Sequence
  derived and/or modified sequence
atggaggcccccgaggagcccgcccccgtgagaggcggccccgaggccaccctggaggtgagaggcagcagatgcctgagactgagcgccttcagagaggagctgagagccctgctggtgctggccggccccgccttcctggtgcagctgatggtgttcctgatcagcttcatcagcagcgtgttctgcggccacctgggcaagctggagctggacgccgtgaccctggccatcgccgtgatcaacgtgaccggcgtgagcgtgggcttcggcctgagcagcgcctgcgacaccctgatcagccagacctacggcagccagaacctgaagcacgtgggcgtgatcctgcagagaagcgccctggtgctgctgctgtgctgcttcccctgctgggccctgttcctgaacacccagcacatcctgctgctgttcagacaggaccccgacgtgagcagactgacccagacctacgtgaccatcttcatccccgccctgcccgccaccttcctgtacatgctgcaggtgaagtacctgctgaaccagagactgtgcaccggcaagctggacttccccgtgcaccccggcagcacccccctgagcctgcaccccagagagaagaccgccagcagctacatgggcagactggtgcccagagtgcccgccggcctgggcctgctgcccccccccggccacccccagcacgcccacgccgtgcacggcgtggtgggcctgtag

SEQ ID NO: 197354 - DNA, 1713 bp, Artificial Sequence
  derived and/or modified sequence
atggaggctcccgaggagcccgctcctgttcgcggtggccctgaagccacgctggaagtgcgcgggtctcgctgtctgcgcttaagcgccttcagagaggagctcagagccctgttagtgttggcaggccccgcattcctggtacagctgatggtgtttctgatctcgtttattagcagcgttttttgtggccacctgggaaaactcgagctagacgccgtgaccctggctattgccgtcatcaacgtgaccggagtctctgtagggttcggtctgagttccgcttgtgacacgctgatctctcaaacttacggatcacagaacttaaaacatgtgggcgtgatactccagcggtccgcactcgtattgctgctctgttgtttcccatgctgggcgctctttctcaatacacaacatattcttctactcttccggcaggaccctgatgtgtccaggctgacccaaacttacgtcactatattcatccccgcactccctgccacctttctgtatatgctgcaagtgaaatatctactgaaccaggggatcgtcctcccccagatagtcactggcgttgccgccaaccttgtgaatgctctggccaactacctctttctgcatcagcttcacctgggtgtgattggaagcgcacttgcaaaccttatcagccagtacacactggcactgctgctcttcctctacattctgggcaaaaagctacaccaggccacgtggggcgggtggtccttagaatgtctgcaggattgggccagcttcctgaggcttgctatcccatctatgttgatgttatgtatggagtggtgggcatacgaagtgggaagcttcctgtcaggcatattgggcatggtcgaactgggggcgcaaagtatcgtttatgaattagcgatcatagtctacatggttcctgctggcttcagcgtggcggcatccgtgagagtggggaatgcgctgggggctggggacatggaacaggctagaaaatccagtacagtctcccttctcattaccgtcctcttcgccgtggcattcagtgttctgctcctctcctgcaaagaccatgtgggctatatctttacgacggatagggatatcatcaaccttgtggcccaggttgtgcccatatacgccgtctcacatctgtttgaagccctggcctgcacctccggaggggttttaagaggatctggcaatcagaaagttggggctatcgtcaatacaattgggtactacgtcgttggcttacccatcggcattgctcttatgttcgctactaccctcggagtgatgggcctctggtccggcatcatcatctgcacagtgtttcaggcggtgtgcttccttggctttatcatacagcttaattggaagaaggcatgccagcaggcacaggtgcacgcaaatttgaaagtgaacaacgtaccccggagcggaaattcagccctaccccaggacccgttacacccggggtgtcctgaaaacctggagggcattcttacaaatgacgtcggtaagaccggggagccacagtctgatcagcagatgcgtcaggaagagcctctgcctgagcatccgcaggatggcgcgaagctgtccagaaagcagctggtcctgcgccgggggctgttgctgctcggggtatttctcattctactggtgggtatcttagtgcggttctatgtgcgcattcagtag

SEQ ID NO: 197355 - DNA, 1761 bp, Artificial Sequence
  derived and/or modified sequence
atggaagctccagaggagcccgccccagtgcgcggtggtccagaggcgactttagaggtgaggggatctagatgtctgagactcagtgccttccgcgaggagctgcgggccctcttggtgctcgcgggccctgcctttctggttcagttaatggtgtttttgatatcgttcatatccagtgtgttctgtggccacttgggcaagctcgagctcgacgccgtgacactggcaattgccgtgatcaatgtaacaggcgtgagcgtcggtttcgggctgagcagcgcatgtgacacattgatttctcaaacatacggatcccagaatctcaagcacgtaggggtcatccttcaacgcagtgctttagtcctcctcctttgttgttttccatgttgggcgctattcttgaatacacaacacatcctgcttctcttcaggcaggacccagacgtatctaggcttactcagacatatgtgacgatcttcattcctgctctccctgcaacgtttctgtacatgctccaggtgaaatacctgctaaaccagggcatcgtcctcccacaaattgtgacgggggtagcagcaaacctagtaaacgcacttgccaattacctgttcttgcaccagctccatctaggtgtgattggtagtgccctggccaacttaatcagtcagtatacactggccctgctgctgttcctgtacatccttgggaagaagctccaccaagccacatggggaggctggtcactggagtgcctgcaggattgggcctcctttttgcgtctggccatcccaagcatgctcatgttgtgcatggaatggtgggcctatgaggtgggttctttcctgtccgggatacttggtatggtggagttaggagcacagagtatagtgtacgaactggccataattgtgtatatggtgcccgcaggctttagtgtcgcggcaagtgtgcgcgtaggcaacgcactcggggcgggagacatggagcaggcacgcaaaagcagcacggtttcactgctgatcacagtactgtttgccgtcgcctttagcgtcctgttactatcctgtaaggaccatgtcggatatatttttacgaccgatagggacatcatcaaccttgtcgctcaggttgtgcccatttacgctgtgagccatctcttcgaagctttggcttgcacaagcggcggagtgcttagggggagcggcaatcaaaaggtgggcgctattgtgaataccatcggttattatgtggtcggactccccattggcattgcactgatgtttgccactacgctgggcgtgatgggcctgtggagtgggatcattatatgtaccgtgtttcaggccgtgtgctttttgggctttatcattcaactgaattggaaaaaggcctgccagcaggctcaagtgcatgccaatctcaaggtcaataatgtgcctcggagtggaaacagcgctctcccccaggatccactccaccccgggtgccccgaaaatcttgagggaatcctcacaaacgacgtggggaaaacaggcgagcctcaatcagatcagcagatgcggcaggaggagcccttacccgagcacccacaggacggagcaaaactctccagaaaacagctagtgttgcggcgtggcttgttactgttgggagttttcctgattctgctcgctggggtacggtggtgtgatcattccagcctccaaccccgtaccttgggcctgcaggctatcttattgtgccagcctcccgaatag

SEQ ID NO: 197356 - DNA, 849 bp, Artificial Sequence
  derived and/or modified sequence
atggtggaactcggggctcaatctattgtatatgagttagccattatcgtgtacatggtgcccgccgggttctccgtcgcagccagcgtgcgcgtcggtaatgctttaggcgctggcgatatggagcaagcacggaagtcgagcaccgtgtctctgctgataacagtcttgttcgccgttgcgttctcggtgctgttgttgtcgtgtaaggaccacgttggttatatattcactacagatcgggacattatcaatctggtcgcccaggtggttcctatatacgcagtgtcacacctgttcgaggctctcgcatgcaccagtggtggcgtcttgaggggtagtggcaaccagaaagtaggagctatagtaaatactattggttattacgtggtcggcctgcctattgggattgccctcatgtttgcgaccacgttaggagttatgggtctgtggtcgggtataataatttgcaccgtcttccaggctgtctgctttctgggcttcatcattcagttgaattggaaaaaggcatgccaacaggcccaggtacacgctaatctgaaagtcaacaatgtgcccaggtctgggaactctgctcttccgcaggatccgcttcatcccggctgtcccgagaacctggagggcattttaactaacgacgtgggcaaaaccggtgaaccccagagcgatcagcagatgcggcaggaggaacctctgccggaacaccctcaggacggggcgaagctcagccgtaagcagctggtgctccgacgcggcttgttgttgctgggtgtatttctgattctgctggttgggattctggttcgcttctatgttagaatccaatag

SEQ ID NO: 197357 - DNA, 1332 bp, Artificial Sequence
  derived and/or modified sequence
atggaggctccggaggaacctgcacctgtcaggggtggacctgaggcgacgctggaggtacgtggctctcgatgtctcaggctgtcagcttttagagaagagctgcgtgccctgttggtcttggcaggcccagcctttctggttcagctgatggtgtttctgataagcttcatcagtagcgtgttttgtggacacctgggcaagctcgaattggatgcagtgactctggcaatagctacctatgggtcccagaacctgaagcacgtcggtgtgatcttgcagcggagtgcattggtactcctgctctgttgtttcccatgctgggccctgttcctgaatacccaacacatactgctgctttttcggcaagacccagacgtgagtaggctgactcagacttatgtaaccatcttcattccagcactcccagcaaccttcttgtatatgttacaggtcaagtacctgctgaaccagggtatcgtcctaccccaaatcgtgactggcgtggccgccaacctggtcaacgctttggccaactacttattcctgcaccaattacacctgggagttattggatctgcgctggctaatctcatctctcagtacaccttagcgttactgctctttttgtacattttggggaaaaagttacatcaggcaacgtggggagggtggtcccttgaatgtctacaagactgggcttctttcctgcgtctggccatcccatctatgcttatgctctgtatggagtggtgggcttacgaggtcggatcttttctttcggggatactgggaatggtcgagttgggagcccagtcgatagtgtacgagctggccatcatcgtgtacatggtgccagccggattttccgtggcagcatcagtgcgggtagggaacgctttgggggcaggtgacatggagcaagcccggaagagctcgacggtgagcctgttaattacagtgctattcgcggtcgcctttagcgtgctgctgttgtcatgtaaggaccacgtgggatatatttttacaacagacagggatatcattaatctcgtggcacaagtggttcccatttatgcggtctcacacctttttgaggctctcgcttgcaccagcggtggagtgctgcggggaagcggcaatcagaaggttggcgcgatcgtgaacacaattggctattatgtggtgggcctgccaatagggatcgcccttatgttcgcgacgacgctgggtgttatgggctctggcacccggcaatttgagtctaaacaaagagctagcgagtgggaattctgttcgccttctggctccgcttctccgcgcgtgccttag

SEQ ID NO: 197358 - DNA, 738 bp, Artificial Sequence
  derived and/or modified sequence
atgctgatgttgtgtatggaatggtgggcatatgaggtgggttccttcctcagcgggattctcgggatggtggagctgggagcccagtccatagtgtatgaattggccattatagtgtacatggttcccgccgggttttctgtcgccgcgtccgtgcgagtcgggaacgccctgggcgccggtgatatggagcaggctcgaaagtcttcaacagtgtctttgttgatcactgtgctgtttgcagtggccttctctgttttgttgttgtcttgcaaagaccacgttggctatatatttactactgacagggatatcattaatctggtcgcacaggtggtgcctatttatgccgtttcacatctcttcgaggcacttgcttgtacttccggaggtgtgctccgtggcagtggaaaccaaaaagtgggcgccatcgtgaacactatcggctactacgtggtagggctgcctattgggatcgccctcatgttcgcaacaaccctgggcgtgatgggctgccctgagaatctggagggaatcctcacgaacgatgtcggcaaaaccggcgaaccacagtcagatcagcagatgagacaggaggagcccctgcctgaacatccccaggatggagcgaaactgagtaggaaacagttggtgcttcggcggggcctgctgctccttggcgtctttctgatacttctcgttggaatcctggtccgtttttacgttaggatccagtag

SEQ ID NO: 197359 - DNA, 1761 bp, Artificial Sequence
  derived and/or modified sequence
atggaggcgcctgaggaacctgcccccgtgcggggtggccccgaggcaactcttgaggttagaggatctaggtgccttcgtctgagtgctttcagggaggagctacgtgctctgcttgtgcttgccggcccagccttcctggtgcagctgatggttttccttatcagctttattagctcagtgttctgcggacaccttgggaagttagagctcgatgcagtcacgctggccatcgcggtgattaatgtgaccggtgtctctgtcggcttcggcctgtctagtgcctgtgacaccctgatcagccagacctacgggtcacaaaacctgaagcatgttggggtgatactgcagaggagcgccctcgttctactcctctgttgtttcccctgctgggcccttttcctgaatacacaacacattctgctgctgttcagacaggaccccgacgtatcaaggcttacacagacttacgtcacaattttcatacccgccctgccagccactttcctttatatgctccaagttaagtacctcctgaatcaaggcatcgtcttgcctcaaatcgtaactggagtggcagccaacctggtcaacgccttagctaactatttattccttcaccaactccatctcggcgttatcggctccgcccttgccaacttgatctctcaatatacactcgcccttctgctttttctgtatatccttggcaaaaagcttcaccaagccacatgggggggttggagtctggaatgtctacaggactgggcctcctttctgcggttggcaatcccaagcatgctaatgttgtgcatggagtggtgggcctatgaagttggttcattcctttccggcattctgggaatggtggagcttggagcacagagtatcgtgtacgagttagccattatcgtgtacatggtaccggctggatttagtgttgctgcttccgtacgggtcggcaacgcactgggagctggagacatggagcaggctagaaagagcagcactgtaagtctcctcattaccgtattgtttgctgtggcattctcggtcctgctgcttagctgtaaagaccatgtcgggtacatatttactacagaccgcgacataatcaatttggtggcccaggtggttcctatctatgctgtgagtcacctgttcgaggccttagcttgtacctccgggggggtgcttcggggcagtgggaaccaaaaagtcggggccatcgtgaatactatagggtactacgtggttgggttacctatcggcatcgccctgatgtttgccactacactgggcgtgatggggctgtggtccgggattattatttgtaccgtattccaggcagtgtgcttcctgggcttcattatccagttgaactggaagaaagcttgtcagcaggctcaggtgcacgccaacctcaaggttaacaatgtgcctagatcgggaaacagcgctctccctcaggaccccctgcaccctggatgtcctgagaatctggagggcatcctcaccaacgacgtgggcaagacaggggagccacaatcagaccagcagatgcggcaggaggagcccctgcccgagcatccccaggacggcgccaagttaagccgtaagcagctcgttctgaggagggggttgctgctcttaggagttttcctgattcttctcgccggggtcagatggtgtgaccactcctccctccagccaaggacattaggactgcaggctatcctgctatgtcagccaccagagtag

SEQ ID NO: 197360 - DNA, 735 bp, Artificial Sequence
  derived and/or modified sequence
atggaggcacctgaagaacccgctcccgttaggggcggtcccgaagccacccttgaggttcgcggcagccggtgtctcaggctaagcgcgttcagagaagagctgcgggccttgctcgtgttagctggacctgccttcctggtgcagctcatggtcttcctcatctcattcatatcctccgttttctgcggacatctgggcaagctcgagctcgatgctgttaccctggctattgcggttatcaacgttactggagttagtgtaggattcgggctgagctcagcttgcgacactctgatctctcagacttacggctcacagaacctgaagcacgtgggcgtgatcttacagaggtcagccctggtcctgcttctctgctgtttcccttgttgggccctctttctgaacacgcagcacattctactgctgttccgtcaggatccagatgtttcgcgtttaacccaaacgtatgttacgatcttcatccccgcgctgccagctacctttctgtatatgctgcaggtcaagtacctgttgaaccagcgcctgtgtacaggaaagctggattttccagtgcatcctggcagcacccctctctccctgcacccgagggagaagactgccagtagctacatgggccggttggtgcccagagttccagcagggttgggcctcctcccgcctcctggccatccccaacatgcgcacgccgtgcacggtgtcgtggggttatag

SEQ ID NO: 197361 - DNA, 1713 bp, Artificial Sequence
  derived and/or modified sequence
atggaggcccctgaggagcccgcccctgtgcggggcggccctgaggccaccctggaggtgcggggcagccgctgcctgcggctgagcgccttccgggaggagctgcgggccctgctggtgctggccggccctgccttcctggtgcagctgatggtgttcctgatctccttcatcagcagcgtcttctgtggccacctgggcaagctggagctggatgctgtgaccctggccatcgctgtgatcaacgtgactggagtgtctgtgggcttcggcctgagcagcgcctgtgacaccctcatcagccagacctacggcagccagaacctgaagcacgtgggcgtcatcctgcagaggtctgccctggtgctgctgctgtgctgcttcccctgctgggccctcttcctgaacacccagcacatcctgctgctcttccggcaggaccctgatgtgtcccggctgacccagacctacgtgaccatcttcatcccagccctgcctgccaccttcctgtacatgctgcaggtgaagtacctgctgaaccagggcatcgtgctgccccagatcgtgactggagtggccgccaacctggtgaatgccctggccaactacctgttcctgcaccagctgcacctgggcgtcatcggcagcgccctggccaacctgatcagccagtacaccctggccctgctgctcttcctgtacatcctgggcaagaagctgcaccaggccacctggggcggctggagcctggagtgcctgcaggactgggccagcttcctgcggctggccatccccagcatgctgatgctgtgcatggagtggtgggcctatgaggtgggcagcttcctgagcggcatcctgggcatggtggagctgggcgcccagagcatcgtgtatgagctggccatcatcgtgtacatggtgcctgctggcttctctgtggccgcctctgtgcgggtgggcaatgccctgggcgctggggacatggagcaggccaggaagagcagcacagtgtccctgctgatcaccgtgctgtttgctgtggccttctctgtgctgctgctgagctgcaaggaccacgtgggctacatcttcaccacagaccgggacatcatcaacctggtggcccaggtggtgcccatctatgctgtgagccacctgtttgaggccctggcctgcaccagcggaggagtgctgcggggcagcggcaaccagaaggtgggcgccatcgtgaacaccatcggctactacgtggtgggcctgcccatcggcatcgccctgatgtttgccaccaccctgggcgtgatgggcctgtggagcggcatcatcatctgcaccgtcttccaggccgtgtgcttcctgggcttcatcatccagctgaactggaagaaggcctgccagcaggcccaggtgcacgccaacctgaaggtgaacaacgtgcccaggagcggcaacagcgccctgccccaggaccccctgcaccctggctgcccagagaacctggagggcatcctgaccaatgatgtgggcaagacaggagagccccagagcgaccagcagatgaggcaggaggagcccctgcctgagcacccccaggatggagccaagctgagcaggaagcagctggtgctgcggcggggcctgctgctgctgggcgtcttcctgatcctgctggtgggcatcctggtgcgcttctacgtgcgcatccagtag

SEQ ID NO: 197362 - DNA, 1761 bp, Artificial Sequence
  derived and/or modified sequence
atggaggcccctgaggagcccgcccctgtgcggggcggccctgaggccaccctggaggtgcggggcagccgctgcctgcggctgagcgccttccgggaggagctgcgggccctgctggtgctggccggccctgccttcctggtgcagctgatggtgttcctgatctccttcatcagcagcgtcttctgtggccacctgggcaagctggagctggatgctgtgaccctggccatcgctgtgatcaacgtgactggagtgtctgtgggcttcggcctgagcagcgcctgtgacaccctcatcagccagacctacggcagccagaacctgaagcacgtgggcgtcatcctgcagaggtctgccctggtgctgctgctgtgctgcttcccctgctgggccctcttcctgaacacccagcacatcctgctgctcttccggcaggaccctgatgtgtcccggctgacccagacctacgtgaccatcttcatcccagccctgcctgccaccttcctgtacatgctgcaggtgaagtacctgctgaaccagggcatcgtgctgccccagatcgtgactggagtggccgccaacctggtgaatgccctggccaactacctgttcctgcaccagctgcacctgggcgtcatcggcagcgccctggccaacctgatcagccagtacaccctggccctgctgctcttcctgtacatcctgggcaagaagctgcaccaggccacctggggcggctggagcctggagtgcctgcaggactgggccagcttcctgcggctggccatccccagcatgctgatgctgtgcatggagtggtgggcctatgaggtgggcagcttcctgagcggcatcctgggcatggtggagctgggcgcccagagcatcgtgtatgagctggccatcatcgtgtacatggtgcctgctggcttctctgtggccgcctctgtgcgggtgggcaatgccctgggcgctggggacatggagcaggccaggaagagcagcacagtgtccctgctgatcaccgtgctgtttgctgtggccttctctgtgctgctgctgagctgcaaggaccacgtgggctacatcttcaccacagaccgggacatcatcaacctggtggcccaggtggtgcccatctatgctgtgagccacctgtttgaggccctggcctgcaccagcggaggagtgctgcggggcagcggcaaccagaaggtgggcgccatcgtgaacaccatcggctactacgtggtgggcctgcccatcggcatcgccctgatgtttgccaccaccctgggcgtgatgggcctgtggagcggcatcatcatctgcaccgtcttccaggccgtgtgcttcctgggcttcatcatccagctgaactggaagaaggcctgccagcaggcccaggtgcacgccaacctgaaggtgaacaacgtgcccaggagcggcaacagcgccctgccccaggaccccctgcaccctggctgcccagagaacctggagggcatcctgaccaatgatgtgggcaagacaggagagccccagagcgaccagcagatgaggcaggaggagcccctgcctgagcacccccaggatggagccaagctgagcaggaagcagctggtgctgcggcggggcctgctgctgctgggcgtcttcctgatcctgctggccggcgtgcgctggtgtgaccacagcagcctgcagcccaggaccctgggcctgcaggccatcctgctgtgccagcccccagagtag

SEQ ID NO: 197363 - DNA, 849 bp, Artificial Sequence
  derived and/or modified sequence
atggtggagctgggcgcccagagcatcgtgtatgagctggccatcatcgtgtacatggtgcctgctggcttctctgtggccgcctctgtgcgggtgggcaatgccctgggcgctggggacatggagcaggccaggaagagcagcacagtgtccctgctgatcaccgtgctgtttgctgtggccttctctgtgctgctgctgagctgcaaggaccacgtgggctacatcttcaccacagaccgggacatcatcaacctggtggcccaggtggtgcccatctatgctgtgagccacctgtttgaggccctggcctgcaccagcggaggagtgctgcggggcagcggcaaccagaaggtgggcgccatcgtgaacaccatcggctactacgtggtgggcctgcccatcggcatcgccctgatgtttgccaccaccctgggcgtgatgggcctgtggagcggcatcatcatctgcaccgtcttccaggccgtgtgcttcctgggcttcatcatccagctgaactggaagaaggcctgccagcaggcccaggtgcacgccaacctgaaggtgaacaacgtgcccaggagcggcaacagcgccctgccccaggaccccctgcaccctggctgcccagagaacctggagggcatcctgaccaatgatgtgggcaagacaggagagccccagagcgaccagcagatgaggcaggaggagcccctgcctgagcacccccaggatggagccaagctgagcaggaagcagctggtgctgcggcggggcctgctgctgctgggcgtcttcctgatcctgctggtgggcatcctggtgcgcttctacgtgcgcatccagtag

SEQ ID NO: 197364 - DNA, 1332 bp, Artificial Sequence
  derived and/or modified sequence
atggaggcccctgaggagcccgcccctgtgcggggcggccctgaggccaccctggaggtgcggggcagccgctgcctgcggctgagcgccttccgggaggagctgcgggccctgctggtgctggccggccctgccttcctggtgcagctgatggtgttcctgatctccttcatcagcagcgtcttctgtggccacctgggcaagctggagctggatgctgtgaccctggccatcgccacctacggcagccagaacctgaagcacgtgggcgtcatcctgcagaggtctgccctggtgctgctgctgtgctgcttcccctgctgggccctcttcctgaacacccagcacatcctgctgctcttccggcaggaccctgatgtgtcccggctgacccagacctacgtgaccatcttcatcccagccctgcctgccaccttcctgtacatgctgcaggtgaagtacctgctgaaccagggcatcgtgctgccccagatcgtgactggagtggccgccaacctggtgaatgccctggccaactacctgttcctgcaccagctgcacctgggcgtgattggcagcgccctggccaacctgatcagccagtacaccctggccctgctgctcttcctgtacatcctgggcaagaagctgcaccaggccacctggggcggctggagcctggagtgcctgcaggactgggccagcttcctgcggctggccatccccagcatgctgatgctgtgcatggagtggtgggcctatgaggtgggcagcttcctgagcggcatcctgggcatggtggagctgggcgcccagagcatcgtgtatgagctggccatcatcgtgtacatggtgcctgctggcttctctgtggccgcctctgtgcgggtgggcaatgccctgggcgctggggacatggagcaggccaggaagagcagcacagtgtccctgctgatcaccgtgctgtttgctgtggccttctctgtgctgctgctgagctgcaaggaccacgtgggctacatcttcaccacagaccgggacatcatcaacctggtggcccaggtggtgcccatctatgctgtgagccacctgtttgaggccctggcctgcaccagcggcggcgtgctgcggggcagcggcaaccagaaggtgggcgccatcgtgaacaccatcggctactacgtggtgggcctgcccatcggcatcgccctgatgtttgccaccaccctgggcgtgatgggcagcggcacccggcagtttgagagcaagcagagggccagcgagtgggagttctgcagccccagcggcagcgccagcccccgggtgccctag

SEQ ID NO: 197365 - DNA, 738 bp, Artificial Sequence
  derived and/or modified sequence
atgctgatgctgtgcatggagtggtgggcctatgaggtgggcagcttcctgagcggcatcctgggcatggtggagctgggcgcccagagcatcgtgtatgagctggccatcatcgtgtacatggtgcctgctggcttctctgtggccgcctctgtgcgggtgggcaatgccctgggcgctggggacatggagcaggccaggaagagcagcacagtgtccctgctgatcaccgtgctgtttgctgtggccttctctgtgctgctgctgagctgcaaggaccacgtgggctacatcttcaccacagaccgggacatcatcaacctggtggcccaggtggtgcccatctatgctgtgagccacctgtttgaggccctggcctgcaccagcggaggagtgctgcggggcagcggcaaccagaaggtgggcgccatcgtgaacaccatcggctactacgtggtgggcctgcccatcggcatcgccctgatgtttgccaccaccctgggcgtgatgggctgcccagagaacctggagggcatcctgaccaatgatgtgggcaagacaggagagccccagagcgaccagcagatgaggcaggaggagcccctgcctgagcacccccaggatggagccaagctgagcaggaagcagctggtgctgcggcggggcctgctgctgctgggcgtcttcctgatcctgctggtgggcatcctggtgcgcttctacgtgcgcatccagtag

SEQ ID NO: 197366 - DNA, 735 bp, Artificial Sequence
  derived and/or modified sequence
atggaggcccctgaggagcccgcccctgtgcggggcggccctgaggccaccctggaggtgcggggcagccgctgcctgcggctgagcgccttccgggaggagctgcgggccctgctggtgctggccggccctgccttcctggtgcagctgatggtgttcctgatctccttcatcagcagcgtcttctgtggccacctgggcaagctggagctggatgctgtgaccctggccatcgctgtgatcaacgtgactggagtgtctgtgggcttcggcctgagcagcgcctgtgacaccctcatcagccagacctacggcagccagaacctgaagcacgtgggcgtcatcctgcagaggtctgccctggtgctgctgctgtgctgcttcccctgctgggccctcttcctgaacacccagcacatcctgctgctcttccggcaggaccctgatgtgtcccggctgacccagacctacgtgaccatcttcatcccagccctgcctgccaccttcctgtacatgctgcaggtgaagtacctgctgaaccagaggctgtgcaccgggaagctggacttccctgtgcaccctggcagcacccccctgagcctgcacccccgggagaagacagccagcagctacatgggccgcctggtgccccgggtgcctgctggcctgggcctgctgcccccacctggccacccccagcacgcccatgctgtgcatggagtggtgggcctgtag

SEQ ID NO: 197367 - DNA, 1713 bp, Artificial Sequence
  derived and/or modified sequence
atggaggcccccgaggagcccgcccccgtgcggggcggccccgaggctacgcttgaagttaggggatcccgttgcttaaggttgtctgccttcagggaagaactgcgggctcttctggttttggccgggcctgcatttttagtgcagcttatggtcttcctcatctcatttatctcaagcgttttctgcggacatctgggcaagttggagctggatgcagtcacactcgcgattgccgtaattaacgtcactggtgtgtcagttggcttcgggttgagttcagcttgtgatacactgattagccagacgtacgggtcgcaaaacctgaaacatgtgggggtcatcctgcagaggagtgccttggttctgctcttatgttgctttccgtgttgggccttatttttaaacacccagcatatcctgttactttttcgccaggaccctgacgtgtcacggctgacccagacctacgtgacaatctttatccctgccttaccagctacatttctctacatgctccaagtaaaataccttttgaaccaggggattgtcctcccccagatcgtgacgggtgttgctgccaatcttgttaacgcccttgccaactatctgtttcttcatcagcttcacctgggcgtgattggcagtgcccttgctaatctcattagccaatacacgcttgctctccttctctttctatatattttaggtaagaaactacatcaggcaacctggggaggctggagcctggagtgcctccaagactgggccagtttcctcaggttagccattccgtcaatgctcatgctgtgcatggaatggtgggcatatgaagttggatcttttctgtctggaatacttggaatggttgagttaggagcacagtcaatcgtgtatgaactggccataatcgtttatatggtgccagccggcttttctgtggccgcgtctgttcgggtgggcaacgccctcggggctggcgacatggagcaagctcggaaatctagcaccgtttccctcctgatcacggtcctgttcgctgtggcattcagcgtactgctgctttcctgtaaggatcatgtaggatacattttcaccacagatcgcgatattatcaacctagtggcccaggtggttcccatctacgcagtatctcatttgttcgaggccctggcttgcacatctgggggtgttttgcggggatccggtaatcagaaagtgggcgccatagtcaatacaatcggatattacgttgtcggcttacccattgggattgcgctcatgtttgcaaccacactaggtgtaatgggcctgtggagcgggatcatcatctgtaccgtattccaggccgtgtgtttcttaggcttcatcattcagttgaactggaaaaaggcctgccagcaggcacaagtccatgctaacctgaaagttaacaatgtacccaggtccggcaactctgcactgccacaggacccacttcatcccggatgcccagaaaacctcgaggggatattgactaatgatgtcgggaaaacgggggagccacaaagcgaccaacagatgagacaagaggagccactgcccgaacatcctcaagacggcgctaaactcagccggaagcagctggtgctaagaagaggcctgctgctgctcggcgtatttttaatccttctggtgggtattctcgttcgcttttacgtccgtatccagtag

SEQ ID NO: 197368 - DNA, 1761 bp, Artificial Sequence
  derived and/or modified sequence
atggaggcccccgaggagcccgcccccgtgcggggcggccccgaggccaccctggaggtgagaggctcccggtgcctccgcctcagcgcctttagagaggaactgagggctctattagtgctcgcgggccccgcatttctggtgcaactgatggtcttcttgattagctttatctcttctgttttctgcggccatctggggaaattggaactcgatgccgtgaccttagccattgcagtgatcaatgtgacaggtgtatctgttggatttggactgagttcggcatgcgacaccctgattagtcagacctacggctcccagaacctaaaacacgtgggcgtgatcttacagcgaagtgcacttgtgttgcttttgtgttgttttccctgttgggcattatttttgaacactcagcacatcctcttgctgttccgccaggatcctgatgtctcccgcctgactcaaacttacgtcacgatttttattcccgcgctgccagcaaccttcctatatatgttgcaggtgaaatatctgttaaatcagggaatagtgttaccccaaattgtaacaggagtggccgccaatctcgtcaatgcacttgcaaactacttgttcctacaccagttacatcttggcgtcattgggtccgctttggccaacctgatctctcagtatacacttgccctgcttttgttcctctatatcctgggaaagaaactgcaccaagcaacttgggggggctggagtctggagtgtctgcaggactgggctagctttctgcgactggcgatccccagcatgctgatgctgtgtatggagtggtgggcatacgaggtcggcagctttctcagtggtattctgggcatggtagagttgggtgcacaatccatagtctacgaactcgcaattattgtttatatggtacccgccggcttctctgtggctgcatctgtgagggtcggcaacgcgctaggggccggagacatggagcaggcacgcaagtctagcacagtgagcttgctgattacagtcttgttcgcagtagcatttagtgtgctgctgttatcatgtaaagaccatgtgggctatatttttactacagatcgagacataataaacctcgttgcccaggtggtccccatctatgctgtgagtcacctgttcgaagctctggcctgcacatccggcggagtcctccgcggatctggaaatcagaaggttggtgcaatcgtgaacacaatcggctattatgtcgtggggcttcccatcgggattgcgttaatgttcgctacaaccctgggcgtaatgggcctatggagtggtataatcatatgcacagttttccaggcagtgtgcttcttggggtttataatccagctgaactggaagaaggcatgccagcaggcccaagtccacgctaacctgaaggtgaataacgttcccagatcaggtaattcagcattacctcaggatcccctgcatcccggttgcccggagaatcttgagggcatcctgaccaatgatgtgggcaagactggagagccgcagtccgatcagcagatgagacaggaggaacctttacctgagcacccgcaggacggcgcaaagctctcacgcaagcagctggtcctgcggcggggattgctactgctgggtgtgtttctgattctcctcgcaggagtgcgctggtgcgatcattcttccctgcaaccccgaaccttgggactacaagccatcttactgtgccaaccccctgagtag

SEQ ID NO: 197369 - DNA, 849 bp, Artificial Sequence
  derived and/or modified sequence
atggtggagctgggcgcccagagcatcgtgtacgagctggccatcattgtgtacatggtgcctgccgggttttccgtggcggcaagcgtgcgggtaggtaatgctctaggagctggtgacatggagcaggcgcgcaaatcttccacagttagcctcttgatcaccgtgctattcgccgtggccttcagcgtgttgttgctttcctgtaaggaccatgtgggttatatttttactactgaccgggatatcattaatctggtcgctcaagtagtgcccatatacgcggtgtcacatctgtttgaagccctggcttgcacctccggaggcgtccttcgcggcagtggaaaccagaaggtcggtgctatcgtgaatactattggttactatgtagtaggactccccatcggaatcgccttgatgtttgcgaccacactaggagtcatggggctctggagcgggataattatctgcaccgtatttcaggcagtctgctttctgggattcattatacaacttaattggaaaaaggcttgccagcaggcccaggtgcacgcgaatttgaaggtgaacaatgtgcctagatcaggcaattccgctctgccccaggacccgctccatcctggatgcccagaaaatttggaggggatcctgaccaatgatgttgggaaaaccggtgaacctcagagtgaccagcaaatgcgtcaagaagaacctctacctgagcatccacaagacggagccaagctgagtaggaagcagctagtgctgagaaggggattgctattgttaggggttttccttatcctactggtcggcatcctggtgcggttctatgtcagaattcaatag

SEQ ID NO: 197370 - DNA, 1332 bp, Artificial Sequence
  derived and/or modified sequence
atggaggcccccgaggagcccgcccccgtgcggggcggccccgaggctacattagaggtgagaggcagcaggtgcttgcggctgtctgctttccgggaggaattgcgcgcgctcctggttctcgccggacccgctttcttggtccaactaatggtgttccttatcagcttcatttcttcagtgttttgtggccacctggggaagctggagctcgacgcagtgaccctggctatagctacctatggcagtcagaatttaaagcatgtcggcgttatcttacaacgcagtgcactggtgctcttgctttgttgcttcccatgttgggcactttttttaaacactcaacacatcttactgctgttccgacaagatcccgatgtctcaaggctgacccagacgtacgttacgatctttattccagctctgcccgccacgttcctgtatatgctccaagtgaaatacctgttaaatcaaggtatcgttctcccgcagatcgtcacaggagtggctgccaatttggtaaacgcactggccaactatctgtttctacatcagctgcatctaggcgtcattgggtcagccctggcgaaccttatcagccaatacaccctcgcattgctcctgtttctgtatatcctgggcaaaaaactccaccaagcgacttgggggggctggtctttggagtgtctgcaggactgggcatcttttctgaggctcgccattcccagtatgctgatgctttgcatggaatggtgggcatacgaagttgggtcctttctgtccgggatcctggggatggtagagctgggcgcccagtccatcgtttacgagctggcaatcatcgtctacatggtgcccgcggggttcagcgtggccgcatcggtacgcgttgggaatgctttaggggccggcgatatggaacaggcacgaaaatccagcacggtaagcctgctcataactgtgctgtttgctgtggcattttctgttttactgttgtcctgcaaggaccatgtggggtacatctttacgacagaccgtgacatcattaacctggtggcccaggtggtccccatttatgcggttagccacctgtttgaggcacttgcttgtacatcagggggggtgttacgcggtagtggtaaccagaaggtcggggccatcgtgaatacaattggctactatgtggtaggcctgccaatcggcatagctctcatgtttgctaccactttgggtgtgatgggctccgggacacggcagttcgaaagtaagcaacgtgcgtcagagtgggaattctgttcaccctctggaagcgctagcccccgcgtaccgtag

SEQ ID NO: 197371 - DNA, 738 bp, Artificial Sequence
  derived and/or modified sequence
atgctgatgctgtgcatggagtggtgggcctacgaggtgggcagcttcctttctggaatcctgggcatggtggagttgggagcccagagcatcgtttatgaactcgccatcattgtctatatggtcccagcaggattttctgtggctgccagcgtccgtgtaggtaacgctctgggagctggggatatggaacaggcccgcaagtccagcaccgtaagcctcttaattaccgtgctcttcgccgtcgctttttcagtattgttgctgtcttgtaaggaccacgtgggctacattttcaccactgatagagatatcatcaacctcgtcgcccaagtggtcccgatctatgccgtgtcccatctgttcgaggcccttgcgtgcacgtccggcggtgtcctccgtgggtctggaaaccagaaggtgggagccattgtaaacacaatcggttattatgtcgtgggactgcctatcgggatcgccctgatgtttgccactaccctcggggttatgggatgtcccgaaaatctcgaggggattctgacaaacgatgtgggaaaaacaggcgaacctcagtctgatcagcagatgaggcaggaggaacctctgcccgaacacccccaagatggagcaaagctgagccgcaagcagctggttttgcgacgtggcctgctgctactgggggtctttctgatcctactggtgggaatccttgtgaggttttatgtgcggatccagtag

SEQ ID NO: 197372 - DNA, 1761 bp, Artificial Sequence
  derived and/or modified sequence
atggaggcccccgaggagcccgcccccgtgcggggcggccccgaggcgactctggaagtgcgtggctcccggtgtctgagattgtccgctttcagggaagagctgcgggcactcctcgtgctcgctgggccagctttcttagtacaattgatggtattcctcatcagcttcataagcagcgtgttctgcggtcacctcggtaagttggaacttgacgcggtcactttagccatcgcggtgattaacgtgaccggcgtttctgtaggttttggcctttcatccgcgtgcgacaccctgatctcgcagacatatggcagccagaacttgaagcacgtgggggtcatattgcagcgctctgccttagtgctgctgctgtgctgcttcccgtgttgggcattgtttcttaatacgcagcacatcctgttgctttttaggcaggaccccgatgtgtcacgactcacccagacttacgtgacaattttcattcctgcactgcctgccaccttcctgtatatgttgcaagtgaagtacctattaaaccaggggatcgtcctgcctcagatcgtgacgggcgtagcagccaacctggtaaatgcgctggccaattatttatttctacaccagctgcacctgggagtcatcggtagtgcactggcaaacctcatctcccagtataccttggctcttctactctttctttatattctcggaaagaagctgcaccaggcaacctgggggggttggagcctggaatgccttcaggactgggccagctttctgcggctagctatcccttccatgctcatgctttgcatggagtggtgggcctatgaagtaggttccttcctcagtgggattttaggtatggtggagcttggcgcccagagcattgtctatgagctggctatcattgtttacatggtgcctgccggcttctcagtggccgcaagcgttagggtgggaaacgccctgggcgctggcgacatggagcaagccaggaagtctagcacggtgagtctgttaatcactgttctgtttgcggtcgcttttagcgtcctgctactcagttgcaaagaccacgttgggtatatttttacgaccgatagagacattataaacttggtggcgcaggtggtacccatttatgcggtttctcacctttttgaggccctcgcatgcacttccgggggagtcctgcgagggagcggcaatcagaaagttggagctatcgtcaacacgataggttactacgtcgtaggccttcccataggcattgcactgatgttcgccaccaccctcggggttatgggactttggtctgggatcatcatttgcacagtttttcaggccgtctgtttcctggggtttatcatccagctgaactggaagaaggcctgccagcaagcacaagtgcacgctaacttgaaagtcaataacgtgcctcgaagcggcaacagtgcactgccccaagatcccctacatccaggatgccctgaaaacctggaggggatactcacgaatgacgtgggcaaaacgggagaacctcaatctgaccagcagatgagacaggaggaacctctgccagagcatcctcaggacggcgcaaagctctcacggaagcagctggtgctgcgtcggggtttactgttgctgggcgtatttctgatcctccttgcgggggtacggtggtgcgaccatagctctctgcagccaagaactctcggacttcaggctattttactctgccagcctccagagtag

SEQ ID NO: 197373 - DNA, 735 bp, Artificial Sequence
  derived and/or modified sequence
atggaggcccccgaggagcccgcccccgtgcggggcggccccgaggccacgcttgaagtgcggggatccaggtgcctgaggctgtcagccttccgtgaagagctaagagcactgctcgttctggcagggccagctttcctcgtgcagctcatggtctttctgatctcattcatcagctccgtattctgcgggcatttggggaagctagaactggatgccgtcactctggccattgcagtaatcaacgtgacaggagtgtctgtaggttttggactgtcttctgcctgcgatactttgatttcacagacctatggatcacagaacttaaagcacgtaggcgtgatcctccagcgctccgcactcgtgttacttctctgttgcttcccttgctgggctctgttcctcaacacccagcacatactgctgctcttcaggcaggacccagacgttagccgtctgacgcagacatatgttaccatcttcatccccgcccttcccgccacattcctgtacatgctgcaggtgaaatacttgcttaatcagcgtctgtgcactggaaaactggactttccagttcatccaggcagcactccccttagcctgcacccacgcgagaagaccgcctcctcctatatgggaagattggtgccccgggtgccagctgggcttggccttttacccccgcctggccacccacaacacgcccacgccgtgcatggtgtggtcggattgtag

SEQ ID NO: 197374 - DNA, 1713 bp, Artificial Sequence
  derived and/or modified sequence
atggaagcccctgaggaacccgctcctgtgcgcggaggcccagaggccaccctagaggtccgtgggagcaggtgcctgcgcttgtcagctttcagggaggagttgcgagcacttctcgtgctagcaggcccagcattcttagtgcaactgatggtgtttctgattagtttcatttcaagtgttttttgcggccatttggggaagctggagctggatgcggtaaccctcgctatcgcggttatcaatgttacaggagtttctgtgggattcggcctgtcaagtgcctgtgataccctgatatcccagacctacgggagccaaaatctgaagcacgttggagtgatccttcagcgctcagcactcgtgctgctgctgtgctgctttccgtgttgggccctgtttctgaacacgcagcacatcctgctgctatttcggcaagaccccgatgtctcacggctaacacaaacgtacgttaccattttcattccggcactgcccgcaacttttctgtatatgctccaggtgaaatatctcctaaatcagggcatagtgctgccccagatcgtaacaggcgtggctgcaaacctggttaatgcgctggcgaattacctctttcttcatcaacttcatctgggcgtgatcgggagtgctctagctaatctgataagtcagtacacactagccctgttacttttcctgtacatccttggcaaaaagctgcaccaggcaacatggggcggttggtcgctcgaatgtttgcaggattgggctagcttcctgagacttgctatccccagcatgttaatgctgtgcatggaatggtgggcctacgaagtgggcagcttcttaagcggcatcctgggaatggtcgagctcggcgcacagtcaatcgtctacgaactggctattatcgtctacatggtccctgctgggttctccgtcgccgcttcggtcagagtaggaaacgctttaggggcaggcgatatggaacaagcaagaaaatcctcgacggtgtcccttttgattaccgtgctctttgccgtggcattctccgtacttcttctaagttgtaaggatcatgtcggttacatattcacgactgatagggatattataaatctagtggcacaggtcgtgccgatatatgctgtgtcccacctgtttgaggcccttgcttgtacaagcgggggtgtgctgcgcggtagtgggaaccaaaaggtcggcgctattgtgaataccattggctactacgttgttgggctgccaatcggaattgcgctgatgtttgcaacgactctgggagtcatgggattatggtctggaataattatatgtactgtgtttcaagcagtgtgcttccttggctttattatccagctaaactggaaaaaagcatgccagcaggctcaggtgcacgccaacttgaaggttaacaacgtcccaagatctggtaattccgcccttccacaggaccctttgcaccccggttgtcccgagaacctggaaggaatcctcaccaatgatgtcggcaaaaccggagaacctcagagcgaccaacagatgcgtcaagaagagcccctgcctgagcatccgcaggacggggcaaagctttccagaaagcaactcgttcttcggagaggcctgctgctgctgggagtgtttttgattctgttggttggtatcttggtccgcttctacgtccggattcagtag

SEQ ID NO: 197375 - DNA, 1761 bp, Artificial Sequence
  derived and/or modified sequence
atggaagctcccgaggagcctgccccagtccgcggagggccagaagccaccctggaggtgcgcggtagcaggtgcctccgacttagcgctttcagggaagagctgcgtgccttacttgtgctggccggacctgcattccttgtgcagttgatggtgtttctcattagctttatctcctcagtgttttgcgggcacttgggaaaactggagttggatgccgttacattagccatcgccgtgattaatgtgacgggcgtcagtgtgggcttcggcctgtcgagcgcttgtgacacgctaatttcccaaacctacggatcgcagaacctgaagcacgtcggggtgattttgcaaagaagtgccctcgtcctgctattgtgctgcttcccctgttgggccctgtttcttaacactcagcacattctactgctctttagacaggatccagatgtgagtaggctcacccaaacttacgttacgatctttatccctgccctgccagccactttcctgtacatgctacaggttaagtatctcttgaaccaggggatcgtcctgccacagatcgtcactggcgtcgcagccaaccttgtgaacgcgctggccaactacctgtttctgcaccaacttcaccttggggtaattggctctgccctggctaacctcatttctcagtacacgctggccctgctgctgttcttgtacatcctgggaaaaaagctccatcaggcaacttggggcggatggagtctcgagtgcctgcaggattgggcatcgttcctgcggctggccatcccttcaatgctgatgctatgcatggagtggtgggcttatgaggtcgggtccttcctcagtggaatccttggcatggtagaattgggggctcagtcaattgtatacgagcttgctataattgtctacatggtgccagccggtttttctgtcgctgcatccgtgcgggttggcaacgcactgggggctggggatatggagcaggcaagaaagtcttcaacagtgagtttactgattaccgtcttgttcgccgtagctttcagcgtcttgttgctaagctgcaaagaccacgttggttacatcttcactactgatcgagatataataaatctagttgctcaggtggtcccgatttatgccgtcagccatcttttcgaagccttggcctgcacatccgggggagtgttacggggaagcggcaatcaaaaagtgggagctattgtgaatactattgggtactacgttgtaggcctgcctatcggaatagccctgatgtttgccacgacactcggagtaatggggctgtggtccgggatcataatttgtaccgtcttccaggctgtctgctttcttggatttatcattcagctgaactggaaaaaagcttgccagcaggcccaggttcacgccaacctaaaggttaacaatgtgcctcgttccggaaattcagccctgccccaggatcccctccatccgggatgccccgagaacctggaggggattctaacaaacgatgtcgggaagacaggagagcctcagtctgaccaacaaatgcgacaggaagagccccttccagagcacccacaggatggggctaaactgtctcgcaagcagctggtgttaagaagggggctgctcctgctcggagttttcctcatactgttagcaggggttagatggtgtgaccactcctctctgcagcctagaacactgggcctccaggcaatcttactatgccagccccctgagtag

SEQ ID NO: 197376 - DNA, 849 bp, Artificial Sequence
  derived and/or modified sequence
atggtcgagctaggtgcccagtcgattgtgtacgagctcgccatcatagtttacatggttcctgccggtttttctgttgctgcatccgtgcgggtaggcaatgcactcggtgctggtgacatggagcaggccaggaagagctccaccgtctctcttcttattaccgtgctgttcgccgtggcattttccgtgcttctactgtcctgtaaggaccatgtaggttatatctttacaactgaccgggatattatcaacctcgtggcccaggtagtaccaatttatgctgtctcccacctgttcgaagccttagcttgcacctctggcggtgtgctcaggggctcagggaaccaaaaggtcggtgcaattgtgaatactattggttattatgtcgttggtcttcccataggcattgcgctgatgttcgccaccacactgggcgttatgggcttgtggtcaggtattatcatctgcaccgtttttcaggctgtgtgcttcctaggctttattatccaactcaattggaaaaaggcatgccaacaggcccaagtccacgctaaccttaaagtgaataatgtcccacgaagtggcaattctgcgctgccccaggaccccctacacccaggatgcccggaaaatctggagggtatcttaaccaacgatgtcgggaagactggggagccccagtctgatcagcagatgagacaggaagagcccttaccagaacatccccaggatggtgcaaagctttcacggaagcaactcgtcctgcgtaggggcctactcttgctgggggtgtttctgatcctactagtcggaattctcgtgcgattttatgtgcgcattcaatag

SEQ ID NO: 197377 - DNA, 1332 bp, Artificial Sequence
  derived and/or modified sequence
atggaggcccctgaagaacctgctccagtgagaggtggtcccgaggcaaccttggaggtgcggggaagccggtgcctccgactgtctgcattcagagaagagcttagagccttactcgtgttggcgggtcctgcctttctagtccagctgatggtgttcttgatctcattcatcagcagcgttttctgcggacaccttgggaagctggagctggacgccgtgaccttggcaattgccacatacgggagccaaaacctcaaacacgtgggggtgattctgcaaagatcggcactcgtgttgttgctgtgctgcttcccttgctgggcactctttctgaatacacagcacattttattgttattccgccaagacccggatgtaagcaggctcacacagacctacgtgaccatatttatccccgcattgcctgctacctttctctacatgctccaggtaaaatatcttttgaatcagggcatcgtcctgcctcagatagtcacaggcgtggccgcaaacctggtaaatgccttggctaattacttatttttacaccagttacatttgggggtgattggatcagccctcgcgaacctgatctctcaatataccttagcgctgctgctgtttctgtacattttgggtaagaagctgcaccaagccacatggggcggatggtcattggagtgtctgcaggactgggcctctttcttacgattagccatacccagcatgcttatgctgtgcatggaatggtgggcgtacgaagtgggctcttttctgagcggaattctcggtatggtagaacttggcgctcaaagtattgtctatgagctggctattatcgtttacatggtcccagcgggattcagcgtcgccgctagtgtccgcgtgggtaacgcactgggagcaggagacatggagcaggccaggaagagtagcaccgtatccctcctgattacagtgctgttcgctgtagcattctctgtgctgctcctgagttgtaaagatcacgtgggttatatatttaccaccgatagagatatcatcaacctggtggcacaggttgtgccaatatatgcagtcagccacctgttcgaggcccttgcttgtactagtggcggagttctcaggggctccggcaaccagaaggtgggggcaatcgtaaatactatcggctactatgtggttggtctgcccatcggcattgctctgatgttcgccaccaccctgggcgtgatggggtccgggacacgccagtttgagtcaaagcagcgcgcaagcgaatgggagttttgttccccctcgggctctgctagcccccgtgtaccctag

SEQ ID NO: 197378 - DNA, 738 bp, Artificial Sequence
  derived and/or modified sequence
atgctcatgctgtgcatggagtggtgggcttatgaagtcggctcattcctgagcggtatactggggatggtcgagcttggggctcaatccatcgtgtacgaattagctatcatagtatacatggttccggctggtttctccgtcgcagcttctgtcagggtcggaaatgctttaggcgcaggcgacatggagcaggcgaggaaatcttctactgtaagtcttttgattaccgtgctgtttgccgtggcattttcagtgcttcttctctcctgcaaggaccatgtgggttacatctttacaacggacagagatatcattaatcttgtcgcccaagtggtgcccatttacgcagtgtcccacctgtttgaagccctggcatgtacaagcggcggtgttcttcggggatcagggaatcaaaaagttggcgctatcgttaatacaattggctactatgtcgtcggcctaccaatcgggatagcactgatgtttgcgacgacactcggtgtcatggggtgccctgagaatctggaggggatcttaaccaatgatgtgggaaaaactggggagccccagtctgatcagcagatgaggcaggaagaacccctgccagaacaccctcaggatggcgcaaagttgtcacggaaacaattggtgctaagacggggactcttgctgcttggcgttttcctcatcctgttggtcggaattctggtgcggttctacgtaaggatccagtag

SEQ ID NO: 197379 - DNA, 1761 bp, Artificial Sequence
  derived and/or modified sequence
atggaggccccagaagaacctgctcccgtccggggaggaccagaagccactcttgaggtgcgtgggtctaggtgtttacgtctgtccgcattcagggaggagttgcgagctctgctagtgctggccggacccgctttccttgtgcagctcatggtctttctaatctcattcattagcagtgttttttgcggccacctgggcaaactcgagctcgatgcggtgactttggctatcgccgtgatcaacgtaactggggtttccgtgggctttggattgtctagtgcatgcgacacgctaatcagtcagacttacgggtcccagaatttaaagcacgtgggcgtgattcttcagaggagcgcgcttgtgctcttattatgttgctttccttgttgggcgctctttttgaacacccagcacatattgttattgtttcgacaggaccccgacgtctcccgccttacccagacttatgtgacaatcttcatcccagccctaccggcaacatttctgtacatgctgcaggtgaaatacctactcaaccagggaatcgtgttaccccagatcgtgaccggggtcgcagcgaatctggtgaatgctttggcaaattatctcttcctgcatcagttacatttgggagtcatcggaagcgctctagccaacctgatatctcaatatacgttagctctgttgttgtttctctacatcctgggcaagaaacttcaccaagcaacctggggagggtggagtctggagtgcctgcaggattgggcctcttttctccggctcgctattccttctatgctgatgctatgcatggaatggtgggcttatgaggtgggtagctttctgagtggtattcttggcatggtggagctgggtgcccaatccatcgtgtatgagctggccattatcgtctatatggtgcccgctggcttttccgtcgccgcttcagttcgcgttgggaacgcattgggcgctggtgacatggagcaagccaggaagtcgagtactgtaagcctgctcatcactgtcctgttcgctgtggcctttagcgtgctcttgctgtcctgcaaggatcacgtaggttatattttcactaccgaccgggatattattaacctcgtggcccaggtagtgccaatctacgcagtgagccacctttttgaggccctggcatgtacaagcgggggagtcttgagaggctcggggaaccaaaaagtgggcgcaatcgtcaacaccatcgggtattacgttgtcgggctgcctatcggaatcgccctgatgttcgcaactaccctgggcgtgatggggctgtggtccgggatcattatctgtactgtcttccaggctgtctgctttctgggcttcattatacagttaaactggaagaaggcttgtcagcaggctcaggttcatgcgaatctgaaggtgaataacgttcctcggagcggcaatagcgcattgccgcaagatcctctgcaccccggttgtcccgagaatctagaggggattctgacaaatgatgtgggaaagaccggggaaccacagagtgatcagcagatgaggcaggaggagcctcttccagagcacccacaagatggggcaaagctgtcccggaaacagctcgtgcttcggagaggattgctattgctcggtgtgttcctgatcttactggctggcgtacggtggtgtgatcacagctcgctgcagcctcgcaccctggggctgcaggccattcttctgtgtcagcccccagagtag

SEQ ID NO: 197380 - DNA, 735 bp, Artificial Sequence
  derived and/or modified sequence
atggaggcacccgaggagccagcgcctgtgcgtgggggacccgaggcaacgctcgaagtgcgtggctcccgatgcctgcggttaagcgcatttagagaggagctgcgtgcgctcctggtcttggctggtcctgctttcctggtacagctgatggtgttcctaatttcctttatctccagcgtattctgtggccacctgggtaagctcgagttggatgcagtcacgctggccatcgcagtgatcaacgttaccggagtcagcgtgggatttgggctcagcagcgcctgcgacactttgatatctcagacctacggctcacaaaatctgaaacacgtgggagtcatcttgcaaaggtctgccctcgttctgttactgtgttgcttcccttgctgggcgctgtttctaaacacacaacacatcctgctgctctttcggcaggaccccgatgtttctaggcttacccagacttatgtgaccatatttattccggctttaccagctacattcctgtacatgctacaggtgaagtatctactcaaccagcggctctgcaccggcaaattagatttccctgtccacccaggctcgacgcctctctctcttcatccaagggagaagactgcctccagctacatgggcaggctcgtgcccagagtgcctgcgggactcggcctgctgcccccaccaggacaccctcagcacgcccacgcggttcacggagttgttggcctttag

SEQ ID NO: 197381 - DNA, 3280 bp, Artificial Sequence
  derived and/or modified sequence
actgccggcctgcgcggtactcactgccggcctccgcggtacccactgccggcctccgcgctacccggccgcagcgcgcgagtcacatggaagctcctgaggagcccgcgccagtgcgcggaggcccggaggccacccttgaggtccgtgggtcgcgctgcttgcggctgtccgccttccgagaagagctgcgggcgctcttggtcctggctggccccgcgttcttggttcagctgatggtgttcctgatcagcttcataagctccgtgttctgtggccacctgggcaagctggagctggatgcagtcacgctggcaatcgcggttatcaatgtcactggtgtctcagtgggattcggcttatcttctgcctgtgacaccctcatctcccagacgtacgggagccagaacctgaagcacgtgggcgtgatcctgcagcggagtgcgctcgtcctgctcctctgctgcttcccctgctgggcgctctttctcaacacccagcacatcctgctgctcttcaggcaggacccagatgtgtccaggcttacccagacctatgtcacgatcttcattccagctcttcctgcaacctttctttatatgttacaagttaaatatttgctcaaccagggaattgtactgccccagatcgtaactggagttgcagccaaccttgtcaatgccctcgccaactatctgtttctccatcaactgcatcttggggtgataggctctgcactggcaaacttgatttcccagtacaccctggctctactcctctttctctacatcctcgggaaaaaactgcatcaagctacatggggaggctggtccctcgagtgcctgcaggactgggcctccttcctccgcctggccatccccagcatgctcatgctgtgcatggagtggtgggcctatgaggtcgggagcttcctcagtggcatcctcggcatggtggagctgggcgctcagtccatcgtgtatgaactggccatcattgtgtacatggtccctgcaggcttcagtgtggctgccagtgtccgggtaggaaacgctctgggtgctggagacatggagcaggcacggaagtcctctaccgtttccctgctgattacagtgctctttgctgtagccttcagtgtcctgctgttaagctgtaaggatcacgtggggtacatttttactaccgaccgagacatcattaatctggtggctcaggtggttccaatttatgctgtttcccacctctttgaagctcttgcttgcacgagtggtggtgttctgagggggagtggaaatcagaaggttggagccattgtgaataccattgggtactatgtggttggcctccccatcgggatcgcgctgatgtttgcaaccacacttggagtgatgggtctgtggtcagggatcatcatctgtacagtctttcaagctgtgtgttttctaggctttattattcagctaaattggaaaaaagcctgtcagcaggctcaggtacacgccaatttgaaagtaaacaacgtgcctcggagtgggaattctgctctccctcaggatccgcttcacccagggtgccctgaaaaccttgaaggaattttaacgaacgatgttggaaagacaggcgagcctcagtcagatcagcagatgcgccaagaagaacctttgccggaacatccacaggacggcgctaaattgtccaggaaacagctggtgctgcggcgagggcttctgctcctgggggtcttcttaatcttgctggtggggattttagtgagattctatgtcagaattcagtgacgtggtaggaaagaaagtcaggtcaagtgatgcttttgagcttacacacaattcacaggcccaccagtgacaatttactgtgagttaatgtcattcaggtgtgcccatggattttgagggctggaaatgcaaagacacatttttctataaaaagaaaaagcaactaaggttaaaagctatattgtggcccaagacactgtctgaaagatgacatgagtagtaattcaccactatctgaaccaagcaaggatcaatgtgctgactgcattggccaatggctttgatacttctgctatttttttagacacaaacccataaactaactgcttaagaattcatactgcttgaattatgtaaaatatattttacagtatatctttccttgggccttagattactattcactgggcaaatggtatttgtttttgttttaattttttttttaatagacggaagtcttgctctgtcatgcaggctggagtgcggtggtgcgatcatagctcactgcagcctcgaactcttgggcttcaagcaatcctcctgtgtcagccaccagagtagctgagactacaggggtatgccaccatgcccagctggcatttgttaatcttcatttgaggtctagatctaggcactgtggacactgaaaaacagttgggaaatctttcgagctgtggaaatccaaacaaagactgataattcctggtaggggtgtgtgcgtgacgtactgcagcctcaacctcctgggctcaagtgatcctcccacctcagcctcctgagtagctgagaccacaggcgtgtgccaccacgcctagctaattttttataccagggtctaccctttgtttcccaggctggtcttgaattcctgggatcaagcaatccttccaccttgccctcccaaagtgttgggattataggcatgagccaccacgactggccagaggacaaaattttaataaaggtcttagcttaagcagtaatcctacttcattaagccttcctggggtgcggtacacaccgttaattcagcaaccctcagtacatactaagtatgctcagtgctgtgaaagtggattacaccaaattaagtcattcttatcacacccaatcaaaagtcaagaagccagggataaaagcacctcaggcacataacattaatctagtaatgtaattctctgcacatccagctggtgaaactgcgtgctgtaagctgggaccagctttgtccataactgctgagagaacttgctgaagctctaggaataattttgcctgcccggttgctcaccagttgtagcttgccagctcccaacacccttcctggtgccaataaactttctcaaagagcaatactgacatttcttttgataaaacctccagccttctctgtgttgttccgacataccgaggaccaactggtctacatggatgccctgaacatgcaattctttcttccaaaataaaacattaaatagaga

SEQ ID NO: 197382 - DNA, 1998 bp, Artificial Sequence
  derived and/or modified sequence
ccggcctccgcggtacccactgccggcctccgcgctacccggccgcagcgcgcgagtcacatggaagctcctgaggagcccgcgccagtgcgcggaggcccggaggccacccttgaggtccgtgggtcgcgctgcttgcggctgtccgccttccgagaagagctgcgggcgctcttggtcctggctggccccgcgttcttggttcagctgatggtgttcctgatcagcttcataagctccgtgttctgtggccacctgggcaagctggagctggatgcagtcacgctggcaatcgcggttatcaatgtcactggtgtctcagtgggattcggcttatcttctgcctgtgacaccctcatctcccagacgtacgggagccagaacctgaagcacgtgggcgtgatcctgcagcggagtgcgctcgtcctgctcctctgctgcttcccctgctgggcgctctttctcaacacccagcacatcctgctgctcttcaggcaggacccagatgtgtccaggcttacccagacctatgtcacgatcttcattccagctcttcctgcaacctttctttatatgttacaagttaaatatttgctcaaccagggaattgtactgccccagatcgtaactggagttgcagccaaccttgtcaatgccctcgccaactatctgtttctccatcaactgcatcttggggtgataggctctgcactggcaaacttgatttcccagtacaccctggctctactcctctttctctacatcctcgggaaaaaactgcatcaagctacatggggaggctggtccctcgagtgcctgcaggactgggcctccttcctccgcctggccatccccagcatgctcatgctgtgcatggagtggtgggcctatgaggtcgggagcttcctcagtggcatcctcggcatggtggagctgggcgctcagtccatcgtgtatgaactggccatcattgtgtacatggtccctgcaggcttcagtgtggctgccagtgtccgggtaggaaacgctctgggtgctggagacatggagcaggcacggaagtcctctaccgtttccctgctgattacagtgctctttgctgtagccttcagtgtcctgctgttaagctgtaaggatcacgtggggtacatttttactaccgaccgagacatcattaatctggtggctcaggtggttccaatttatgctgtttcccacctctttgaagctcttgcttgcacgagtggtggtgttctgagggggagtggaaatcagaaggttggagccattgtgaataccattgggtactatgtggttggcctccccatcgggatcgcgctgatgtttgcaaccacacttggagtgatgggtctgtggtcagggatcatcatctgtacagtctttcaagctgtgtgttttctaggctttattattcagctaaattggaaaaaagcctgtcagcaggctcaggtacacgccaatttgaaagtaaacaacgtgcctcggagtgggaattctgctctccctcaggatccgcttcacccagggtgccctgaaaaccttgaaggaattttaacgaacgatgttggaaagacaggcgagcctcagtcagatcagcagatgcgccaagaagaacctttgccggaacatccacaggacggcgctaaattgtccaggaaacagctggtgctgcggcgagggcttctgctcctgggggtcttcttaatcttgctggctggagtgcggtggtgcgatcatagctcactgcagcctcgaactcttgggcttcaagcaatcctcctgtgtcagccaccagagtagctgagactacagggctggtgaaactgcgtgctgtaagctgggaccagctttgtccataactgctgagagaacttgctgaagctctaggaataattttgcctgcccggttgctcaccagttgtagcttgccagctcccaacacccttcctggtgccaataaactttctcaaagagcaa

SEQ ID NO: 197383 - DNA, 1362 bp, Artificial Sequence
  derived and/or modified sequence
attgggactgttctttccagaggctctgcactggcaaacttgatttcccagtacaccctggctctactcctctttctctacatcctcgggaaaaaactgcatcaagctacatggggaggcatcctcggcatggtggagctgggcgctcagtccatcgtgtatgaactggccatcattgtgtacatggtccctgcaggcttcagtgtggctgccagtgtccgggtaggaaacgctctgggtgctggagacatggagcaggcacggaagtcctctaccgtttccctgctgattacagtgctctttgctgtagccttcagtgtcctgctgttaagctgtaaggatcacgtggggtacatttttactaccgaccgagacatcattaatctggtggctcaggtggttccaatttatgctgtttcccacctctttgaagctcttgcttgcacgagtggtggtgttctgagggggagtggaaatcagaaggttggagccattgtgaataccattgggtactatgtggttggcctccccatcgggatcgcgctgatgtttgcaaccacacttggagtgatgggtctgtggtcagggatcatcatctgtacagtctttcaagctgtgtgttttctaggctttattattcagctaaattggaaaaaagcctgtcagcaggctcaggtacacgccaatttgaaagtaaacaacgtgcctcggagtgggaattctgctctccctcaggatccgcttcacccagggtgccctgaaaaccttgaaggaattttaacgaacgatgttggaaagacaggcgagcctcagtcagatcagcagatgcgccaagaagaacctttgccggaacatccacaggacggcgctaaattgtccaggaaacagctggtgctgcggcgagggcttctgctcctgggggtcttcttaatcttgctggtggggattttagtgagattctatgtcagaattcagtgacgtggtaggaaagaaagtcaggtcaagtgatgcttttgagcttacacacaattcacaggcccaccagtgacaatttactgtgagttaatgtcattcaggtgtgcccatggattttgagggctggaaatgcaaagacacatttttctataaaaagaaaaagcaactaaggttaaaagctatattgtggcccaagacactgtctgaaagatgacatgagtagtaattcaccactatctgaaccaagcaaggatcaatgtgctgactgcattggccaatggctttgatacttctgctatttttttagacacaaacccataaactaactgcttaagaattcatactgcttgaattatgtaaaatatattttacagtatatctttcctt

SEQ ID NO: 197384 - DNA, 1719 bp, Artificial Sequence
  derived and/or modified sequence
agagcaggctgcactgcgcggtacccactgccggcctgcgcggtactcactgccggcctccgcggtacccactgccggcctccgcgctacccggccgcagcgcgcgagtcacatggaagctcctgaggagcccgcgccagtgcgcggaggcccggaggccacccttgaggtccgtgggtcgcgctgcttgcggctgtccgccttccgagaagagctgcgggcgctcttggtcctggctggccccgcgttcttggttcagctgatggtgttcctgatcagcttcataagctccgtgttctgtggccacctgggcaagctggagctggatgcagtcacgctggcaatcgcgacgtacgggagccagaacctgaagcacgtgggcgtgatcctgcagcggagtgcgctcgtcctgctcctctgctgcttcccctgctgggcgctctttctcaacacccagcacatcctgctgctcttcaggcaggacccagatgtgtccaggcttacccagacctatgtcacgatcttcattccagctcttcctgcaacctttctttatatgttacaagttaaatatttgctcaaccagggaattgtactgccccagatcgtaactggagttgcagccaaccttgtcaatgccctcgccaactatctgtttctccatcaactgcatcttggggtgataggctctgcactggcaaacttgatttcccagtacaccctggctctactcctctttctctacatcctcgggaaaaaactgcatcaagctacatggggaggctggtccctcgagtgcctgcaggactgggcctccttcctccgcctggccatccccagcatgctcatgctgtgcatggagtggtgggcctatgaggtcgggagcttcctcagtggcatcctcggcatggtggagctgggcgctcagtccatcgtgtatgaactggccatcattgtgtacatggtccctgcaggcttcagtgtggctgccagtgtccgggtaggaaacgctctgggtgctggagacatggagcaggcacggaagtcctctaccgtttccctgctgattacagtgctctttgctgtagccttcagtgtcctgctgttaagctgtaaggatcacgtggggtacatttttactaccgaccgagacatcattaatctggtggctcaggtggttccaatttatgctgtttcccacctctttgaagctcttgcttgcacgagtggtggtgttctgagggggagtggaaatcagaaggttggagccattgtgaataccattgggtactatgtggttggcctccccatcgggatcgcgctgatgtttgcaaccacacttggagtgatgggctcaggtacacgccaatttgaaagtaaacaacgtgcctcggagtgggaattctgctctccctcaggatccgcttcacccagggtgccctgaaaaccttgaaggaattttaacgaacgatgttggaaagacaggcgagcctcagtcagatcagcagatgcgccaagaagaacctttgccggaacatccacaggacggcgctaaattgtccaggaaacagctggtgctgcggcgagggcttctgctcctgggggtcttcttaatcttgctggtggggattttagtgagattctatgtcagaattcagtgacgtggtaggaaagaaagtcaggtcaagtgatgcttttgagcttacacacaattcacag

SEQ ID NO: 197385 - DNA, 1002 bp, Artificial Sequence
  derived and/or modified sequence
attgggactgttctttccagaggctctgcactggcaaacttgatttcccagtacaccctggctctactcctctttctctacatcctcgggaaaaaactgcatcaagctacatggggaggctggtccctcgagtgcctgcaggactgggcctccttcctccgcctggccatccccagcatgctcatgctgtgcatggagtggtgggcctatgaggtcgggagcttcctcagtggcatcctcggcatggtggagctgggcgctcagtccatcgtgtatgaactggccatcattgtgtacatggtccctgcaggcttcagtgtggctgccagtgtccgggtaggaaacgctctgggtgctggagacatggagcaggcacggaagtcctctaccgtttccctgctgattacagtgctctttgctgtagccttcagtgtcctgctgttaagctgtaaggatcacgtggggtacatttttactaccgaccgagacatcattaatctggtggctcaggtggttccaatttatgctgtttcccacctctttgaagctcttgcttgcacgagtggtggtgttctgagggggagtggaaatcagaaggttggagccattgtgaataccattgggtactatgtggttggcctccccatcgggatcgcgctgatgtttgcaaccacacttggagtgatggggtgccctgaaaaccttgaaggaattttaacgaacgatgttggaaagacaggcgagcctcagtcagatcagcagatgcgccaagaagaacctttgccggaacatccacaggacggcgctaaattgtccaggaaacagctggtgctgcggcgagggcttctgctcctgggggtcttcttaatcttgctggtggggattttagtgagattctatgtcagaattcagtgacgtggtaggaaagaaagtcaggtcaagtgatgcttttgagcttacacacaattcacaggcccaccagtgacaatttactgtgagtta

SEQ ID NO: 197386 - DNA, 1847 bp, Artificial Sequence
  derived and/or modified sequence
actgccggcctgcgcggtactcactgccggcctccgcggtacccactgccggcctccgcgctacccggccgcagcgcgcgagtcacatggaagctcctgaggagcccgcgccagtgcgcggaggcccggaggccacccttgaggtccgtgggtcgcgctgcttgcggctgtccgccttccgagaagagctgcgggcgctcttggtcctggctggccccgcgttcttggttcagctgatggtgttcctgatcagcttcataagctccgtgttctgtggccacctgggcaagctggagctggatgcagtcacgctggcaatcgcggttatcaatgtcactggtgtctcagtgggattcggcttatcttctgcctgtgacaccctcatctcccagacgtacgggagccagaacctgaagcacgtgggcgtgatcctgcagcggagtgcgctcgtcctgctcctctgctgcttcccctgctgggcgctctttctcaacacccagcacatcctgctgctcttcaggcaggacccagatgtgtccaggcttacccagacctatgtcacgatcttcattccagctcttcctgcaacctttctttatatgttacaagttaaatatttgctcaaccagggaattgtactgccccagatcgtaactggagttgcagccaaccttgtcaatgccctcgccaactatctgtttctccatcaactgcatcttggggtgataggctctgcactggcaaacttgatttcccagtacaccctggctctactcctctttctctacatcctcgggaaaaaactgcatcaagctacatggggaggctggtccctcgagtgcctgcaggactgggcctccttcctccgcctggccatccccagcatgctcatgctgtgcatggagtggtgggcctatgaggtcgggagcttcctcagtggcatcctcggcatggtggagctgggcgctcagtccatcgtgtatgaactggccatcattgtgtacatggtccctgcaggcttcagtgtggctgccagtgtccgggtaggaaacgctctgggtgctggagacatggagcaggcacggaagtcctctaccgtttccctgctgattacagtgctctttgctgtagccttcagtgtcctgctgttaagctgtaaggatcacgtggggtacatttttactaccgaccgagacatcattaatctggtggctcaggtggttccaatttatgctgtttcccacctctttgaagctcttgcttgcacgagtggtggtgttctgagggggagtggaaatcagaaggttggagccattgtgaataccattgggtactatgtggttggcctccccatcgggatcgcgctgatgtttgcaaccacacttggagtgatgggtctgtggtcagggatcatcatctgtacagtctttcaagctgtgtgttttctaggctttattattcagctaaattggaaaaaagcctgtcagcaggctcaggtacacgccaatttgaaagtaaacaacgtgcctcggagtgggaattctgctctccctcaggatccgcttcacccagggtgccctgaaaaccttgaaggaattttaacgaacgatgttggaaagacaggcgagcctcagtcagatcagcagatgcgccaagaagaacctttgccggaacatccacaggacggcgctaaattgtccaggaaacagctggtgctgcggcgagggcttctgctcctgggggtcttcttaatcttgctggctggagtgcggtggtgcgatcatagctcactgcagcctcgaactcttgggcttcaagcaatcctcctgtgtcagccaccagagtag

SEQ ID NO: 197387 - DNA, 974 bp, Artificial Sequence
  derived and/or modified sequence
actgccggcctgcgcggtactcactgccggcctccgcggtacccactgccggcctccgcgctacccggccgcagcgcgcgagtcacatggaagctcctgaggagcccgcgccagtgcgcggaggcccggaggccacccttgaggtccgtgggtcgcgctgcttgcggctgtccgccttccgagaagagctgcgggcgctcttggtcctggctggccccgcgttcttggttcagctgatggtgttcctgatcagcttcataagctccgtgttctgtggccacctgggcaagctggagctggatgcagtcacgctggcaatcgcggttatcaatgtcactggtgtctcagtgggattcggcttatcttctgcctgtgacaccctcatctcccagacgtacgggagccagaacctgaagcacgtgggcgtgatcctgcagcggagtgcgctcgtcctgctcctctgctgcttcccctgctgggcgctctttctcaacacccagcacatcctgctgctcttcaggcaggacccagatgtgtccaggcttacccagacctatgtcacgatcttcattccagctcttcctgcaacctttctttatatgttacaagttaaatatttgctcaaccagaggctctgcactggcaaacttgatttcccagtacaccctggctctactcctctttctctacatcctcgggaaaaaactgcatcaagctacatggggaggctggtccctcgagtgcctgcaggactgggcctccttcctccgcctggccatccccagcatgctcatgctgtgcatggagtggtgggcctatgaggtcgggagcttcctcagtggcatcctcggcatggtggagctgggcgctcagtccatcgtgtatgaactggccatcattgtgtacatggtccctgcaggcttcagtgtggctgccagtgtccgggtaggaaacgctctgggtgctggagacat

SEQ ID NO: 197388 - protein, 429 aa, Artificial Sequence
  derived and/or modified sequence
MAVAVGRPSNEELRNLSLSGHVGFDSLPDQLVNKSTSQGFCFNILCVGETGIGKSTLMDTLFNTKFESDPATHNEPGVRLKARSYELQESNVRLKLTIVDTVGFGDQINKDDSYKPIVEYIDAQFEAYLQEELKIKRSLFNYHDTRIHACLYFIAPTGHSLKSLDLVTMKKLDSKVNIIPIIAKADTIAKNELHKFKSKIMSELVSNGVQIYQFPTDEETVAEINATMSVHLPFAVVGSTEEVKIGNKMAKARQYPWGVVQVENENHCDFVKLREMLIRVNMEDLREQTHTRHYELYRRCKLEEMGFKDTDPDSKPFSLQETYEAKRNEFLGELQKKEEEMRQMFVMRVKEKEAELKEAEKELHEKFDLLKRTHQEEKKKVEDKKKELEEEVNNFQKKKAAAQLLQSQAQQSGAQQTKKDKDKKNASFT

SEQ ID NO: 197389 - protein, 425 aa, Artificial Sequence
  derived and/or modified sequence
MAVAVGRPSNEELRNLSLSGHVGFDSLPDQLVNKSTSQGFCFNILCVGETGIGKSTLMDTLFNTKFESDPATHNEPGVRLKARSYELQESNVRLKLTIVDTVGFGDQINKDDSYKPIVEYIDAQFEAYLQEELKIKRSLFNYHDTRIHACLYFIAPTGHSLKSLDLVTMKKLDSKVNIIPIIAKADTIAKNELHKFKSKIMSELVSNGVQIYQFPTDEETVAEINATMSVHLPFAVVGSTEEVKIGNKMAKARQYPWGVVQVENENHCDFVKLREMLIRVNMEDLREQTHTRHYELYRRCKLEEMGFKDTDPDSKPFSLQETYEAKRNEFLGELQKKEEEMRQMFVMRVKEKEAELKEAEKELHEKFDLLKRTHQEEKKKVEDKKKELEEEVNNFQKKKAAAQLLQSQAQQSGAQQTKKDKDKKK

SEQ ID NO: 197390 - DNA, 1290 bp, Artificial Sequence
  derived and/or modified sequence
atggcagtcgccgtcggaagaccctcgaacgaagagttgcggaatctctcactttctggccacgtaggctttgactccttacccgaccagttggtgaacaaatctacgtctcaaggtttctgtttcaatatcctctgcgtgggcgaaacaggcatcgggaagtctactctgatggacaccctgttcaacacaaaattcgagagcgacccggctacccataacgaacctggcgtcaggctaaaagcaagaagctacgagctgcaagagtctaatgtgagactgaagttgacaatagtcgataccgtaggttttggggatcagatcaataaagacgatagctataaacctatcgtcgagtatatcgacgcacagttcgaggcatacttgcaggaagaactgaagatcaaaaggtccttgtttaactatcatgataccagaatccacgcttgcttatacttcatagcccctactgggcattcattgaagtcactggatctagtcactatgaaaaagctcgacagtaaagtgaacatcatacctataatcgctaaggctgatactatcgcgaagaatgaattacacaagttcaagtccaaaattatgagtgaacttgtgtccaatggagtgcagatttatcaatttccaaccgacgaggaaacagtcgctgagattaacgcgacaatgtcggtacatttgccttttgcagtcgtaggatcaacggaagaagttaagatcgggaacaagatggcaaaggctaggcagtacccatggggggttgtgcaggttgagaacgaaaaccactgtgactttgtcaagttgagagagatgcttatccgagtcaacatggaagatctccgggaacaaactcacaccaggcattatgaactctatcgcaggtgcaagctggaggagatgggcttcaaggacactgatcccgacagtaaacctttttcgctgcaggagacttatgaggctaagagaaacgagtttctcggggagctgcagaaaaaggaagaggagatgagacaaatgtttgtcatgagagtgaaggaaaaagaggccgaactgaaagaggctgagaaggagttgcatgagaaattcgatctgctgaaaaggactcatcaagaggagaagaagaaagttgaagataaaaagaaggagcttgaagaggaagttaataactttcaaaaaaagaaagccgcagcgcagctgcttcagagccaggcacagcaatctggggcacagcagactaagaaagataaagacaagaagaacgccagcttcacttag

SEQ ID NO: 197391 - DNA, 1278 bp, Artificial Sequence
  derived and/or modified sequence
atggcggtggcagtggggaggccctcaaatgaggagctgcgcaatttaagcctttccgggcacgtcggctttgattcactgcctgaccagctcgtaaacaagagtacttcccaagggttttgtttcaacattctgtgcgtaggagaaaccggaatagggaagtcaactctgatggataccttgttcaataccaagttcgaatccgatcctgccactcataatgaaccaggcgttcgactgaaagcaagatcctacgagcttcaggagagtaatgtgaggctgaagctcactattgtggataccgtaggattcggtgaccagattaacaaggatgacagctacaaaccaatcgtcgagtatattgacgcccagtttgaggcttatctgcaggaagagctcaagatcaagagaagcctttttaactatcacgatacacgtatacatgcctgtctgtactttattgcccccactgggcactctctgaaatctctggacctagtcactatgaagaagctggactccaaggttaatattatacccatcattgcgaaagcagacacaattgccaaaaatgagttgcataaattcaaatcaaaaatcatgtctgagctcgtttcaaacggtgtccagatctatcaattcccgaccgacgaggagacagtggcagagataaatgcgacgatgagcgtgcatctcccattcgctgtcgtggggtccaccgaagaagtgaagataggcaataagatggcgaaagcacgacagtacccttggggagtagtacaggtggagaacgaaaatcactgtgactttgtgaagctgcgggagatgttgattagggtgaatatggaagacctcagagagcagacacacaccagacattatgaactttaccggagatgtaagctggaggaaatgggttttaaggacacagacccagactctaaaccattttctcttcaagagacatatgaagcgaaacgcaacgagtttttgggagagctgcagaagaaagaggaggaaatgcgacagatgtttgtgatgcgagtcaaggaaaaagaggcagaacttaaggaggcggagaaagagctgcatgaaaagttcgacttgctaaagcgcactcaccaagaagagaaaaagaaggtagaggacaagaagaaggagctcgaagaagaagtcaacaatttccaaaaaaaaaaggctgcagcacagctgcttcagtcccaggcccagcagagcggagcccagcagacaaagaaagacaaagataagaagaaatag

SEQ ID NO: 197392 - DNA, 1290 bp, Artificial Sequence
  derived and/or modified sequence
atggctgtggccgtgggccggcccagcaatgaggagctgaggaacctgagcctgagcggccacgtgggctttgacagcctgcctgaccagctggtgaacaagagcaccagccagggcttctgcttcaacatcctgtgtgtgggggagaccggcatcggcaagagcaccctgatggacaccctcttcaacaccaagtttgaaagtgaccctgccacccacaatgagcccggggtgcggctgaaggcccggagctatgagctgcaggagagcaatgtgcggctgaagctgaccatcgtggacacagtgggctttggagaccagatcaacaaggatgacagctacaagcccatcgtggagtacattgatgcccagtttgaggcctacctgcaggaggagctgaagatcaagaggagcctcttcaactaccatgacacccgcatccacgcctgcctgtacttcatcgcccccaccggccacagcctgaagagcctggacctggtgaccatgaagaagctggacagcaaggtgaacatcatccccatcatcgccaaggctgacaccatcgccaagaatgagctgcacaagttcaagagcaagatcatgtctgagctggtgtccaatggagtgcagatctaccagttccccacagatgaggagaccgtggccgagatcaatgccaccatgtctgtgcacctgccctttgctgtggtgggcagcacagaggaggtgaagattggcaacaagatggccaaggcccggcagtacccctggggcgtggtgcaggtggagaatgaaaaccactgtgactttgtgaagctgcgggagatgctgatccgggtgaacatggaggacctgcgggagcagacccacaccaggcactatgagctgtaccgccgctgcaagctggaggagatgggcttcaaggacacagatcctgacagcaagcccttcagcctgcaggagacctatgaggccaagagaaatgagttcctgggggagctgcagaagaaggaggaggagatgaggcagatgtttgtgatgagggtgaaggagaaggaggccgagctgaaggaggccgagaaggagctgcacgagaagtttgacctgctgaagaggacccaccaggaggagaagaagaaggtggaggacaagaagaaggagctggaggaggaggtgaacaacttccagaagaagaaggctgctgcccagctgctgcagagccaggcccagcagagcggggcccagcagaccaagaaggacaaggacaagaagaatgccagcttcacctag

SEQ ID NO: 197393 - DNA, 1278 bp, Artificial Sequence
  derived and/or modified sequence
atggctgtggccgtgggccggcccagcaatgaggagctgaggaacctgagcctgagcggccacgtgggctttgacagcctgcctgaccagctggtgaacaagagcaccagccagggcttctgcttcaacatcctgtgtgtgggggagaccggcatcggcaagagcaccctgatggacaccctcttcaacaccaagtttgaaagtgaccctgccacccacaatgagcccggggtgcggctgaaggcccggagctatgagctgcaggagagcaatgtgcggctgaagctgaccatcgtggacacagtgggctttggagaccagatcaacaaggatgacagctacaagcccatcgtggagtacattgatgcccagtttgaggcctacctgcaggaggagctgaagatcaagaggagcctcttcaactaccatgacacccgcatccacgcctgcctgtacttcatcgcccccaccggccacagcctgaagagcctggacctggtgaccatgaagaagctggacagcaaggtgaacatcatccccatcatcgccaaggctgacaccatcgccaagaatgagctgcacaagttcaagagcaagatcatgtctgagctggtgtccaatggagtgcagatctaccagttccccacagatgaggagaccgtggccgagatcaatgccaccatgtctgtgcacctgccctttgctgtggtgggcagcacagaggaggtgaagattggcaacaagatggccaaggcccggcagtacccctggggcgtggtgcaggtggagaatgaaaaccactgtgactttgtgaagctgcgggagatgctgatccgggtgaacatggaggacctgcgggagcagacccacaccaggcactatgagctgtaccgccgctgcaagctggaggagatgggcttcaaggacacagatcctgacagcaagcccttcagcctgcaggagacctatgaggccaagagaaatgagttcctgggggagctgcagaagaaggaggaggagatgaggcagatgtttgtgatgagggtgaaggagaaggaggccgagctgaaggaggccgagaaggagctgcacgagaagtttgacctgctgaagaggacccaccaggaggagaagaagaaggtggaggacaagaagaaggagctggaggaggaggtgaacaacttccagaagaagaaggctgctgcccagctgctgcagagccaggcccagcagagcggggcccagcagaccaagaaggacaaggacaagaagaagtag

SEQ ID NO: 197394 - DNA, 1290 bp, Artificial Sequence
  derived and/or modified sequence
atggccgtggccgtgggccggcccagcaacgaggagctgcggaacctgagcctgtccggccatgttggattcgactccttgccagatcagttggtgaataaatcgacaagccagggcttttgttttaacattctgtgtgtcggagagaccgggataggtaagagcacactgatggatactctcttcaatacaaaattcgagtccgatcctgctacacacaacgagccaggcgtccgactgaaggcaagatcgtatgagctgcaggagagtaatgtgcgcctgaagttaactatagtggacacagttgggttcggcgaccagattaacaaagatgactcatacaaacctattgtggaatacattgatgctcagttcgaagcctacctgcaagaggagttaaagattaaaagaagcctgtttaattatcatgacacacgcatccacgcttgcctgtattttatcgctcccacaggtcactctttgaaatcacttgatcttgtgactatgaaaaagctggattccaaagtcaatattatccctataatcgccaaggccgacacaattgccaaaaacgaactacacaaattcaagagcaaaatcatgtctgagctggtatccaatggggtgcagatctatcaatttcctaccgacgaggagacagtcgccgagatcaacgcaaccatgtccgtgcacctgccttttgcagtggtgggatcgaccgaagaagttaagataggaaataaaatggccaaggccaggcagtatccatggggcgtcgttcaggttgaaaatgagaatcattgtgattttgtgaagctccgagaaatgctgattagggtcaacatggaggatctgcgggagcagacacacactaggcattacgaactgtacaggcgctgcaagcttgaagagatgggctttaaagacactgacccagacagcaaaccattttcactccaggaaacatacgaggcgaaacgaaatgaattcctgggagaactgcagaagaaagaagaagagatgcgtcagatgttcgtgatgcgggtcaaggagaaggaggctgagctgaaagaagccgaaaaggagctgcacgaaaagtttgatctacttaagagaacccatcaggaagaaaagaaaaaggttgaagataaaaagaaagaactggaggaggaagtcaataactttcagaagaagaaagcagccgcacagctgctacagtcacaggcgcagcagtccggggcccagcagaccaaaaaggacaaagacaagaagaatgcttcttttacctag

SEQ ID NO: 197395 - DNA, 1278 bp, Artificial Sequence
  derived and/or modified sequence
atggccgtggccgtgggccggcccagcaacgaggagctgcggaacctcagcctctccggacacgtcggctttgacagcctgcccgaccaactggtgaataaatccacgtctcagggcttctgttttaacatactttgcgtaggagagactggtattgggaaatctacactgatggacacactattcaacactaagttcgagagcgatcctgccacccacaacgagcctggagtccgattgaaagctaggtcgtatgagctccaggaatccaacgtgcgcctcaaacttacaattgtggatacggtcggattcggagatcagatcaataaagatgacagttataagcccattgtggagtatatcgacgcacagttcgaggcttatcttcaggaggaattgaagattaagcgcagtctgttcaattaccatgacacgcgcatccatgcctgtttatatttcatcgccccgacgggtcattcactgaagagtctggacctagtcactatgaagaaactcgacagtaaagtcaacatcattccaattatcgccaaagctgatacaatcgccaagaacgagctgcacaagtttaagtcaaagatcatgagcgaattggtgagcaatggggtgcagatatatcagttcccgaccgatgaggaaacagtagccgagatcaacgcgacaatgtcagtccacctcccttttgctgttgtcggcagtactgaggaagtcaagattggcaataagatggctaaagcccgacaatatccctggggcgtggtccaggtggaaaacgagaaccattgtgattttgtaaaattgcgggaaatgctgattcgcgtgaacatggaggatctcagggagcaaacacatacccgacactatgagctttaccgaagatgtaagctagaggaaatgggatttaaggacacagaccctgattctaagcccttctcacttcaagagacctatgaagccaaaaggaatgaattcctcggcgagttgcagaaaaaagaggaggaaatgcgccaaatgtttgtgatgagagtcaaagagaaggaggcagaacttaaggaggcagagaaagagctgcacgagaagttcgatctgctgaagagaacccaccaagaggaaaaaaaaaaggtggaggataagaagaaggaattggaagaagaggtcaacaacttccagaaaaaaaaggcagcagcacagctgctccaatcacaggcacagcagtcaggcgcacaacagaccaagaaagacaaggacaagaagaagtag

SEQ ID NO: 197396 - DNA, 1290 bp, Artificial Sequence
  derived and/or modified sequence
atggctgtcgcggtcggcaggcctagcaatgaggagttgcgtaatctctctctaagtggccatgttggttttgactcactgccagatcagctggtgaataagtcaacatcccagggcttttgcttcaacattctatgcgtcggagagaccggcatcggaaaatctaccctgatggataccctttttaacacgaaatttgagtccgacccggcaacacacaatgaacccggagtgcggctcaaggccaggtcctacgaactgcaggaaagcaacgttcgtttaaagctgacaatcgtcgatactgtcgggttcggcgatcaaataaacaaggacgacagttacaagcctatcgtcgagtacattgatgctcagtttgaagcgtacctgcaggaggaactgaagatcaagcgttctctttttaattatcacgacacccgaatccacgcttgcctgtattttatagcacctacagggcattctttaaaaagtctggatctcgtgacaatgaaaaaattggattcgaaagttaacatcattcccatcatcgctaaggcagacacaatcgctaaaaacgagctccacaagtttaagagtaagatcatgtccgagctcgtgagcaatggcgtgcagatataccaattccccactgacgaagagactgttgctgaaattaacgccactatgagtgtccaccttcccttcgcagtcgtgggatccaccgaggaggtgaagatcggcaacaagatggccaaggcaaggcagtacccctggggcgttgtgcaggtagagaacgaaaatcactgtgacttcgtgaagctaagagaaatgctgatcagggtcaatatggaggatctgcgggagcaaactcatacacgccactacgagctgtatcgcagatgtaagttggaagagatgggttttaaagatacagacccagattctaaacctttctctctgcaagaaacgtatgaggccaagagaaatgagtttctgggagagctacagaagaaggaggaagagatgaggcagatgttcgtcatgcgagtcaaggagaaagaggctgagctgaaggaggccgaaaaggagctgcacgagaagttcgatctattaaagagaactcatcaggaagaaaagaagaaagtcgaggacaaaaagaaggagcttgaagaggaggtgaataattttcagaaaaaaaaggcggctgctcagctgctgcaatctcaggcacagcaaagcggggctcagcagacaaagaaggacaaggataagaaaaacgcttcctttacctag

SEQ ID NO: 197397 - DNA, 1278 bp, Artificial Sequence
  derived and/or modified sequence
atggccgtggcagtgggacggccaagcaatgaggagcttaggaacctatcactctcgggtcacgtgggctttgactctttacctgatcagctagtaaataaatccacctcgcaagggttctgcttcaacattctttgtgttggcgaaaccgggatcggcaaatccacactcatggacactctttttaacaccaagttcgaatcggatcccgctactcacaacgagccaggggtgcgcttgaaagctcgaagctacgagttgcaggagagcaatgtccgtctcaagctgacgatcgtcgatactgttggattcggtgatcagattaacaaggacgactcctataaacccatcgtagagtacatcgacgcacagtttgaggcctacctacaagaggagctcaaaatcaaacgaagcttattcaattaccatgatactcggatccatgcctgcctgtattttattgctccaacaggtcattccctcaaaagtctggacttggtgacaatgaagaagctggactcaaaagtgaatatcatcccaattattgctaaagccgatacgatcgccaagaacgagctccacaagtttaagagcaagatcatgtcagagctggtgtcgaatggggtccagatctatcagtttcctacagatgaggagactgtggccgagatcaacgccactatgagcgtccacctgccctttgcggtagtggggtcaactgaagaggttaagattggcaataaaatggctaaggctcgtcagtacccttggggcgttgtgcaagtggaaaatgagaaccactgtgattttgtcaaacttcgcgagatgctaatccgcgtgaatatggaagatttacgcgagcagacacatacacgccattacgagctgtatcggcgatgtaagctcgaggaaatggggttcaaggacactgatccggactccaagccgttctccctgcaagagacctatgaagccaaacggaacgaattcttgggagagctgcagaaaaaagaagaggaaatgcggcaaatgttcgttatgcgcgtcaaggaaaaagaagccgagctgaaagaggcggaaaaggagcttcacgagaaatttgacctactgaaacgaacacaccaggaagaaaagaaaaaagtcgaggacaaaaagaaggaacttgaagaagaggtaaacaactttcaaaaaaagaaggcagcagctcagctgctccagtctcaggcacagcagtcgggggcacaacagactaagaaagacaaggataaaaagaaatag

SEQ ID NO: 197398 - DNA, 5593 bp, Artificial Sequence
  derived and/or modified sequence
cgggtggccatgttgctctaataaagcgggaggggcggcggcgtggggggagcagatgccgctggctgccagcgggacgccggcgagcagagcgcagccgcgagggaggcgcgagggaggcgagccggagcccgagcactagcagcagccggagtcggcgtaaagcacccgggcgcagccggagccggtgccgcagctgcgatggccgtggccgtggggagaccgtctaatgaagagcttcgaaacttgtctttgtctggccatgtgggatttgacagcctccctgaccagctggtcaacaagtctacttctcaaggattctgtttcaacatcctttgtgttggtgagacaggcattggcaaatccacgttaatggacactttgttcaacaccaaatttgaaagtgacccagctactcacaatgaaccaggtgttcggttaaaagccagaagttatgagcttcaggaaagcaatgtacggctgaagttaaccattgttgacaccgtgggatttggagaccagataaataaagatgacagctataagccgatagtagaatatattgatgcccagttcgaggcctacctgcaagaggaattgaagattaaacgttctctcttcaactaccatgacacgaggatccatgcctgcctctactttattgcccctactggacattcactaaagtccctggatctggtcaccatgaaaaagctggacagtaaggtgaacatcattccaataattgcaaaagctgacaccattgccaagaatgaactgcacaaattcaagagtaagatcatgagtgaactggtcagcaatggggtccagatatatcagtttcccactgatgaagaaacggtggcagagattaacgcaacaatgagtgtccatctcccatttgcagtggttggcagcaccgaagaggtgaagattggcaacaagatggcaaaggccaggcagtacccctggggtgtggtgcaggttgagaatgaaaatcattgcgattttgtgaaacttcgagagatgctgatccgcgtgaacatggaggacttgcgagagcagactcacacccgccactatgaattgtaccgacgctgtaagcttgaagagatggggttcaaggacactgaccctgacagcaaacccttcagtcttcaggagacatatgaagcaaaaaggaatgaattcctgggagaactgcagaagaaagaagaagaaatgagacaaatgtttgttatgagagtgaaggagaaagaagctgaacttaaggaggcagagaaagagcttcacgagaagtttgaccttctaaagcggacacaccaagaagaaaagaagaaagtggaagacaagaagaaggagcttgaggaggaggtgaacaacttccagaagaagaaagcagcggctcagttactacagtcccaggcccagcaatctggggcccagcaaaccaagaaagacaaggataagaaaaatgcaagcttcacataaagcctggcaagccaaggatgttcccgcattcacctgcttttgcagtaatatcgtatctctgccatgtgtgttctttagttttattttattttattttatttttttacccttcctcaaacaccagtaactattattaactcgttttgctgaatgttgttgggtggtagaaaatgatagaacaagggaataaccgcgaatgctctgtgcagctggactctgtttccggaaagtaaatgatttgctttttatgcctgttctgaatggcagcacgaagcaggcctgttacttgtatgtcgctttggacagaggaaagtggggtaaaatgctacctgtacgtctgacatgaaaacttctcaccgcctcagcagctgaactaaaaacctgaatagccatgacaagagtttgcattttcttgatgattcatctccatgagtgcacaatccctgaactcactgtcttttctccacacttgtcctaagccaaggtagatttgtacgtagacagactggtgagcaagcattatattttatttttacccttgcatgacattttcattttaatcaataacattatttggcctgagcttgtgggtctgttcagactgtctcctctcatggtttgaaactgcatctgaatgcctgccttcaatcctggccaagttggagtagactggtatgagaaaactatgattagttcacatttactggtgcatccttgatcctctcacagatagaggtcttaaaggttggatcatgtaacattgcttagtagaagaatcttcttctaaggatgatgggctttctacagcctgcttaccactaacagtaaggaatctttcataaacacacctcagtttgttcccagtgggcttagagggaggacctgatgactgattccaggatacttgtacttctaataacatttttcatgaatcatgagaaaatttccacagatacttcccttagaaaatttgctataaactctgtatcattggtagcacaaatttgagcgaggccttgtcaattttaaggtggaaataggaaggaccacaacatgacccgtaagtcaagaaggtagacatttcatatccagcttccttgcttagtctcctttcagtatttggcaataaaagaaagaagaaatagaacagctgaagtctcaaatcattgtctggaattttcctcaccttggctagctccacctgctctttgtctaaggcccttgcctcatcagggattagaactggcccatatgccagaacctgtactaaatgcctaatttgtatggaagagtgcatatttaatctcttttctatactgctcctttctgatgcttatcctttcatctgtgtgattgttttttcccctctactaacaagatcctcccagctttctctctacatgtagaaaggataacatttctcatgaacccactgcccctctgcattttcctcactggttagagattaagtaaataggatagaatatgctgcgtctcccctgacacacactttcttttttgaatgagcaagtctccattttgatttcagcaaagattttttctccttttctttgtcctcaaccatacttagaggaaagaaggaatggtcttccatgaactgattatgcttaattaagcaaagtaaggaaattagtttcatggaagcctaaacaaagctggaatagaaactacacactagacacagcagtagtcatagtcttcacaggtttaggagctactggaccaacattcttgtttttgcttttgtttttttaaataattctagtctggagctaactgtggagcagccaaatagtagctggcatgttgattcaaaccatgggctgaatttgctcataggctgtgcatcagacaaaagcttgaatatttgtgttgtatgcttgttccaaccaccgcttgtgtgagcatttttgtggcttgtacagaaagtacacttttaaattgtctcttgcatcactaaaatttttttaaaatgagcataacaacgaaaggcatccagctgactttttgattccaagattattgattggattgacttttttgcattaaatttttcccagcaaaataaatcatatggcgagtcagggaataaaaagtcaaaagaaacaaatagaagcttttttttttaaaaaatgtattgcttctgaacttttttctgccactgctccctagccctgtttagtttgttattgctgcttttcttttttctttctgtatctatgcctttttttcacagtagtccttggctctgcacggaataaatgataccctcaaatctaattggatgtgctttcgcctttgcatgtaagtacggtagtaagaaacctttgagatctttctgacttttcaaaattagagaaagcaaatgggatggatagattttttttttcttttcaaggggggcaggaaggtaatggtttgagtagcctttgtttaaaaaaaagactaaatatatttaaaaggccacatttatatttttttcacaagaaccacataataaattccacttcttgacctgaatttggaaatccgaaattactaatccaggccaggtgtggtggctcatgcctgtaatcccagcactttgagaggccgaggtgggcagatcacttgaggcctggagttcaagaccaccttggcgaacacggtgaaaccccgtctctacaaaaaatacaaaaattagccaggcgtggtggcacgtgcctgtagtcccagctacttgggaggctaagtcaggagaattgcttgaacttgggagatggaggttgcagtgagccaagattgcaccactgcattccaacctgggtgatgaagtgagactctccaaaaaaaaaaaagaaattattaatccctgcctgtgctctacatagcctcatgggcatcattggatagctcagagggcccttgattctggcaaggcaaataaagccagaatgagaaattaccatcttctactagagaaaaccaagagaaaaatttttatgctaggatgcctttatgaccacttaattttttaatcttagtttaatggtctctccctggtgctaactgctgacagtggccacctcttttttggggattgaggggcctacataactagctggccttaccccatatcttttgttcaaacataataccatctttttgcttcttctgaactttagatctccataacacatgtactgtagaatgtgatggaaaagcattgatgagaatttattggcagttcagattgtgttttcccaacttaggctctttattaattggttaaggttttctccaaaaagggcatttcaacaatgggaattatttaatgtaacagtgggcacagattacttatcttccttctctgctttgtgactcaccagcagtaacacacacaatccacatcttgtgcacctcaaatgaacagacttggtttccttgctttcttgacatttccatgactgtttcacatacaaactattgggtgaggtttttcagctgttaccgacccacgtcctgctgtctctgtgtggtcctacaaaaactgtccattcccacccctttgctttgccatttgcaagagtctggaattgtcaggtctcagcttcgaaaagtcctggttccactgacaggacacattctttagtgggaattaagacctacaaagtctagtttgtatgtaggtatgaagggaattttttaaataaattgaaaagctgtgaacagcattagaactttgtctatttcttaattttaaaatatgctgatatgccttaaactgtagttgtagatccttgtcattttgctgtttgaaaataaccaatgtgttttctaaaactgtcgtgtaatctactttcattgttaatgcagaattgtcatatatgtaagctgcatgttagacatttgtcttttttaaactaaagtaattgtattgatgtgaagcatatcattttttcaaatatgaaagtgatcacttagcaacatgcttggtaatttggcatctgttaaggtaggagagtggtgaacagataatctatgcatatatcactagtgccaagacataaagcgggggaaaatatatttttacccaaacatt

SEQ ID NO: 197399 - DNA, 2615 bp, Artificial Sequence
  derived and/or modified sequence
ggagcagatgccgctggctgccagcgggacgccggcgagcagagcgcagccgcgagggaggcgcgagggaggcgagccggagcccgagcactagcagcagccggagtcggcgtaaagcacccgggcgcagccggagccggtgccgcagctgcgatggccgtggccgtggggagaccgtctaatgaagagcttcgaaacttgtctttgtctggccatgtgggatttgacagcctccctgaccagctggtcaacaagtctacttctcaaggattctgtttcaacatcctttgtgttggtgagacaggcattggcaaatccacgttaatggacactttgttcaacaccaaatttgaaagtgacccagctactcacaatgaaccaggtgttcggttaaaagccagaagttatgagcttcaggaaagcaatgtacggctgaagttaaccattgttgacaccgtgggatttggagaccagataaataaagatgacagctataagccgatagtagaatatattgatgcccagttcgaggcctacctgcaagaggaattgaagattaaacgttctctcttcaactaccatgacacgaggatccatgcctgcctctactttattgcccctactggacattcactaaagtccctggatctggtcaccatgaaaaagctggacagtaaggtgaacatcattccaataattgcaaaagctgacaccattgccaagaatgaactgcacaaattcaagagtaagatcatgagtgaactggtcagcaatggggtccagatatatcagtttcccactgatgaagaaacggtggcagagattaacgcaacaatgagtgtccatctcccatttgcagtggttggcagcaccgaagaggtgaagattggcaacaagatggcaaaggccaggcagtacccctggggtgtggtgcaggttgagaatgaaaatcattgcgattttgtgaaacttcgagagatgctgatccgcgtgaacatggaggacttgcgagagcagactcacacccgccactatgaattgtaccgacgctgtaagcttgaagagatggggttcaaggacactgaccctgacagcaaacccttcagtcttcaggagacatatgaagcaaaaaggaatgaattcctgggagaactgcagaagaaagaagaagaaatgagacaaatgtttgttatgagagtgaaggagaaagaagctgaacttaaggaggcagagaaagagcttcacgagaagtttgaccttctaaagcggacacaccaagaagaaaagaagaaagtggaagacaagaagaaggagcttgaggaggaggtgaacaacttccagaagaagaaagcagcggctcagttactacagtcccaggcccagcaatctggggcccagcaaaccaagaaagacaaggataagaaaaagtaagcaggtgtcacccccctgtatcggggacctctaacaatttattcctcttgcatgtctctacttttcccatttacagactggaaactggtcctttaccagaaagataaaagcaagtattttctctacagtgcagggaagatgatgaaggtttttaaatttttttaaaaggtacacaaagattaatttataaaactttaccacaattgaccaagcaatcaggcctggaggaacctgttgtctccagtagcatcttccacaccaacactaggagtctcaaagaagacaggttgatgtctcttcagcaccctctgaagacaattctcatgactcttgatagagagcatcctaaaatcacaattgttaaaattattttcctattctgtgttgtaagacttcgtaagccagtcactgaaattctcgttcccaaaatgaaacatttggaagagctgctagtggccactagtttcctcaaaattcaatatgatgaattgttttattgtgaaatgggatccaaatgcctatccagttgacacctctgccaacctcaagccaaacctaaacccattcataaaaggttttttttaaatagggtcttaatgtcatgtgccaaagggtcagattctgctcttgagttggtcacttcctgtgatactccagtagcagctgcctgaaaccagtgggagatttaggcctcccttgacattctcctgtgatttgaagctctcctttgaatcatcataaagcctagttttatgtcaatgctatcggttttgacaggaagcacgatggtaagaataccactaacgaaaacctttgtggtgtctcaatgacaaatatgcagatgccaccctcctttgtctaatgtacggtgctttagggcagctatttaatataaagcaactcagaacttgtttcaggaagtgttgctctttcgccttacatgccaaggttctagggaaaaagctgaccatatgtaaaaacattgatgctcaagcacataaagaattacattctttaaacatagagtacataggatcaagtctctgcacaataattgagatgtgttatagggaaaagtgagcacagtgctattgtccacttagtcttggtgaatgtgcagtaggctcacccctaaggaatctcatgttgcctgcagtaaaaataaaaatggactgctacaatga

SEQ ID NO: 197400 - DNA, 1290 bp, Artificial Sequence
  derived and/or modified sequence
atggccgtggccgtgggcagacccagcaacgaggagctgagaaacctgagcctgagcggccacgtgggcttcgacagcctgcccgaccagctggtgaacaagagcaccagccagggcttctgcttcaacatcctgtgcgtgggcgagaccggcatcggcaagagcaccctgatggacaccctgttcaacaccaagttcgagagcgaccccgccacccacaacgagcccggcgtgagactgaaggccagaagctacgagctgcaggagagcaacgtgagactgaagctgaccatcgtggacaccgtgggcttcggcgaccagatcaacaaggacgacagctacaagcccatcgtggagtacatcgacgcccagttcgaggcctacctgcaggaggagctgaagatcaagagaagcctgttcaactaccacgacaccagaatccacgcctgcctgtacttcatcgcccccaccggccacagcctgaagagcctggacctggtgaccatgaagaagctggacagcaaggtgaacatcatccccatcatcgccaaggccgacaccatcgccaagaacgagctgcacaagttcaagagcaagatcatgagcgagctggtgagcaacggcgtgcagatctaccagttccccaccgacgaggagaccgtggccgagatcaacgccaccatgagcgtgcacctgcccttcgccgtggtgggcagcaccgaggaggtgaagatcggcaacaagatggccaaggccagacagtacccctggggcgtggtgcaggtggagaacgagaaccactgcgacttcgtgaagctgagagagatgctgatcagagtgaacatggaggacctgagagagcagacccacaccagacactacgagctgtacagaagatgcaagctggaggagatgggcttcaaggacaccgaccccgacagcaagcccttcagcctgcaggagacctacgaggccaagagaaacgagttcctgggcgagctgcagaagaaggaggaggagatgagacagatgttcgtgatgagagtgaaggagaaggaggccgagctgaaggaggccgagaaggagctgcacgagaagttcgacctgctgaagagaacccaccaggaggagaagaagaaggtggaggacaagaagaaggagctggaggaggaggtgaacaacttccagaagaagaaggccgccgcccagctgctgcagagccaggcccagcagagcggcgcccagcagaccaagaaggacaaggacaagaagaacgccagcttcacctag

SEQ ID NO: 197401 - DNA, 1278 bp, Artificial Sequence
  derived and/or modified sequence
atggccgtggccgtgggcagacccagcaacgaggagctgagaaacctgagcctgagcggccacgtgggcttcgacagcctgcccgaccagctggtgaacaagagcaccagccagggcttctgcttcaacatcctgtgcgtgggcgagaccggcatcggcaagagcaccctgatggacaccctgttcaacaccaagttcgagagcgaccccgccacccacaacgagcccggcgtgagactgaaggccagaagctacgagctgcaggagagcaacgtgagactgaagctgaccatcgtggacaccgtgggcttcggcgaccagatcaacaaggacgacagctacaagcccatcgtggagtacatcgacgcccagttcgaggcctacctgcaggaggagctgaagatcaagagaagcctgttcaactaccacgacaccagaatccacgcctgcctgtacttcatcgcccccaccggccacagcctgaagagcctggacctggtgaccatgaagaagctggacagcaaggtgaacatcatccccatcatcgccaaggccgacaccatcgccaagaacgagctgcacaagttcaagagcaagatcatgagcgagctggtgagcaacggcgtgcagatctaccagttccccaccgacgaggagaccgtggccgagatcaacgccaccatgagcgtgcacctgcccttcgccgtggtgggcagcaccgaggaggtgaagatcggcaacaagatggccaaggccagacagtacccctggggcgtggtgcaggtggagaacgagaaccactgcgacttcgtgaagctgagagagatgctgatcagagtgaacatggaggacctgagagagcagacccacaccagacactacgagctgtacagaagatgcaagctggaggagatgggcttcaaggacaccgaccccgacagcaagcccttcagcctgcaggagacctacgaggccaagagaaacgagttcctgggcgagctgcagaagaaggaggaggagatgagacagatgttcgtgatgagagtgaaggagaaggaggccgagctgaaggaggccgagaaggagctgcacgagaagttcgacctgctgaagagaacccaccaggaggagaagaagaaggtggaggacaagaagaaggagctggaggaggaggtgaacaacttccagaagaagaaggccgccgcccagctgctgcagagccaggcccagcagagcggcgcccagcagaccaagaaggacaaggacaagaagaagtag

SEQ ID NO: 197402 - protein, 272 aa, Artificial Sequence
  derived and/or modified sequence
MALLVRVLRNQTSISQWVPVCSRLIPVSPTQGQGDRALSRTSQWPQMSQSRACGGSEQIPGIDIQLNRKYHTTRKLSTTKDSPQPVEEKVGAFTKIIEAMGFTGPLKYRCQMPDTFNSWFLITLLHVWMCLVRMKQEGRSGKYMCRIIVHFMWEDVQQRGRVMGVNPYILKKNMILMTNHFYAAILGYDEGILSDDHGLAAALWRTFFNRKCEDPRHLELLVEYVRKQIQYLDSMNGEDLLLTGEVSWRPLVEKNPQSILKPHSPTYNDEGL

SEQ ID NO: 197403 - protein, 299 aa, Artificial Sequence
  derived and/or modified sequence
MALLVRVLRNQTSISQWVPVCSRLIPVSPTQGQGDRALSRTSQWPQMSQSRACGGSEQIPGIDIQLNRKYHTTRKLSTTKDSPQPVEEKVGAFTKIIEAMGFTGPLKYSKWKIKIAALRMYTSCVEKTDFEEFFLRCQMPDTFNSWFLITLLHVWMCLVRMKQEGRSGKYMCRIIVHFMWEDVQQRGRVMGVNPYILKKNMILMTNHFYAAILGYDEGILSDDHGLAAALWRTFFNRKCEDPRHLELLVEYVRKQIQYLDSMNGEDLLLTGEVSWRPLVEKNPQSILKPHSPTYNDEGL

SEQ ID NO: 197404 - protein, 148 aa, Artificial Sequence
  derived and/or modified sequence
MALLVRVLRNQTSISQWVPVCSRLIPVSPTQGQGDRALSRTSQWPQMSQSRACGGSEQIPGIDIQLNRKYHTTRKLSTTKDSPQPVEEKVGAFTKIIEAMGFTGPLKYSKWDVSSPNEAGRPEWEVHVSYHSSFYVGGCSAARQSHGG

SEQ ID NO: 197405 - DNA, 819 bp, Artificial Sequence
  derived and/or modified sequence
atggccctgctggtgagagtgctgagaaaccagaccagcatcagccagtgggtgcccgtgtgcagcagactgatccccgtgagccccacccagggccagggcgacagagccctgagcagaaccagccagtggccccagatgagccagagcagagcctgcggcggcagcgagcagatccccggcatcgacatccagctgaacagaaagtaccacaccaccagaaagctgagcaccaccaaggacagcccccagcccgtggaggagaaggtgggcgccttcaccaagatcatcgaggccatgggcttcaccggccccctgaagtacagatgccagatgcccgacaccttcaacagctggttcctgatcaccctgctgcacgtgtggatgtgcctggtgagaatgaagcaggagggcagaagcggcaagtacatgtgcagaatcatcgtgcacttcatgtgggaggacgtgcagcagagaggcagagtgatgggcgtgaacccctacatcctgaagaagaacatgatcctgatgaccaaccacttctacgccgccatcctgggctacgacgagggcatcctgagcgacgaccacggcctggccgccgccctgtggagaaccttcttcaacagaaagtgcgaggaccccagacacctggagctgctggtggagtacgtgagaaagcagatccagtacctggacagcatgaacggcgaggacctgctgctgaccggcgaggtgagctggagacccctggtggagaagaacccccagagcatcctgaagccccacagccccacctacaacgacgagggcctgtag

SEQ ID NO: 197406 - DNA, 900 bp, Artificial Sequence
  derived and/or modified sequence
atggccctgctggtgagagtgctgagaaaccagaccagcatcagccagtgggtgcccgtgtgcagcagactgatccccgtgagccccacccagggccagggcgacagagccctgagcagaaccagccagtggccccagatgagccagagcagagcctgcggcggcagcgagcagatccccggcatcgacatccagctgaacagaaagtaccacaccaccagaaagctgagcaccaccaaggacagcccccagcccgtggaggagaaggtgggcgccttcaccaagatcatcgaggccatgggcttcaccggccccctgaagtacagcaagtggaagatcaagatcgccgccctgagaatgtacaccagctgcgtggagaagaccgacttcgaggagttcttcctgagatgccagatgcccgacaccttcaacagctggttcctgatcaccctgctgcacgtgtggatgtgcctggtgagaatgaagcaggagggcagaagcggcaagtacatgtgcagaatcatcgtgcacttcatgtgggaggacgtgcagcagagaggcagagtgatgggcgtgaacccctacatcctgaagaagaacatgatcctgatgaccaaccacttctacgccgccatcctgggctacgacgagggcatcctgagcgacgaccacggcctggccgccgccctgtggagaaccttcttcaacagaaagtgcgaggaccccagacacctggagctgctggtggagtacgtgagaaagcagatccagtacctggacagcatgaacggcgaggacctgctgctgaccggcgaggtgagctggagacccctggtggagaagaacccccagagcatcctgaagccccacagccccacctacaacgacgagggcctgtag

SEQ ID NO: 197407 - DNA, 819 bp, Artificial Sequence
  derived and/or modified sequence
atggccctgttagttcgcgtactgagaaatcaaacttcgatatcacaatgggttcccgtgtgtagccgtctcatccccgtgtcccctacgcagggccagggagatagagccttaagccgcacttctcagtggccacagatgtctcagtcgagagcctgcggtgggtccgagcagattcctgggattgacatccagctgaataggaagtaccataccacaagaaaactgtctaccacgaaggattcccctcagcccgtcgaggagaaggtgggtgcttttactaagattatagaggccatggggtttaccggccccttgaaatacagatgtcaaatgccagatacctttaatagctggttcctgattacactgttgcatgtgtggatgtgtttagtaagaatgaaacaggaaggacggtctgggaaatacatgtgcaggattatagtgcactttatgtgggaggacgtccagcagcgcggacgagttatgggggtgaacccttatatcctgaagaagaacatgattctcatgaccaatcatttttacgccgccattctcggatatgacgaggggatcttgagcgacgatcacgggctggcagcggcactgtggagaacattcttcaatcggaagtgcgaggacccccggcacctggagctcctggtggaatatgttcgcaagcaaattcagtatctggattcgatgaacggtgaggacttgctactaacgggcgaagtcagctggcgcccgctggtcgaaaaaaatccgcagagcatcctcaaaccacattcgcccacatacaacgatgaggggctgtag

SEQ ID NO: 197408 - DNA, 900 bp, Artificial Sequence
  derived and/or modified sequence
atggctctgctcgttcgagtcctgcgtaatcagacgtcgatcagccagtgggtgcccgtgtgctccagactgattcctgtctctcccacccagggccaaggagaccgcgccctgtcaagaacgagtcaatggccgcagatgagccaatcccgtgcctgcgggggttctgagcaaattccaggcatcgacatccagctaaaccgcaagtaccacacaactcgtaagctttccaccaccaaagactctccccagccagtggaggaaaaggtgggagccttcacaaaaatcatagaggctatgggctttactgggcccctgaaatactcaaaatggaaaatcaagatcgcagcactgaggatgtacacaagttgtgtggaaaaaacggacttcgaggaatttttcctgcggtgtcagatgccggacacctttaactcctggtttttgattacattactgcacgtatggatgtgcttggtgagaatgaaacaggaaggaagatcaggcaaatacatgtgccggataatcgtgcactttatgtgggaggatgttcaacagcgcgggagagtgatgggcgtcaatccgtatatactaaagaaaaatatgattctgatgactaatcatttctacgctgctatcctgggctacgacgaagggatattgtccgacgatcacggcctggccgcagccttgtggcggaccttctttaatcgaaaatgcgaggaccctcgccatctggaactgctggttgagtatgtgcggaagcagatacagtatctagactcaatgaatggagaggacctacttttgaccggagaggtgagttggcgccccttggtggaaaaaaatcctcaatctattctgaaaccacatagtccaacctacaacgacgaaggcctttag

SEQ ID NO: 197409 - DNA, 819 bp, Artificial Sequence
  derived and/or modified sequence
atggccctgctggtgcgggtgctgaggaaccagaccagcatcagccagtgggtgcctgtgtgcagccgcctcatccctgtgagccccacccagggccagggcgaccgggccctgagcaggaccagccagtggccccagatgagccagagccgggcctgtggcggcagcgagcagatccctggcatcgacatccagctgaacaggaagtaccacaccaccaggaagctgagcaccaccaaggacagcccccagcctgtggaggagaaggtgggcgccttcaccaagatcatcgaggccatgggcttcaccggccccctgaagtaccgctgccagatgccagacaccttcaacagctggttcctgatcaccctgctgcacgtgtggatgtgcctggtgaggatgaagcaggagggccgcagcggcaagtacatgtgccgcatcatcgtgcacttcatgtgggaggatgtgcagcagaggggccgggtgatgggcgtgaacccctacatcctgaagaagaacatgatcctgatgaccaaccacttctatgctgccatcctgggctatgatgagggcatcctgagtgatgaccacggcctggccgccgccctgtggaggaccttcttcaacagaaaatgtgaggaccccaggcacctggagctgctggtggagtatgtgaggaagcagatccagtacctggacagcatgaatggagaggacctgctgctgactggagaggtgtcctggaggcccctggtggagaagaacccccagagcatcctgaagccccacagccccacctacaatgatgagggcctgtag

SEQ ID NO: 197410 - DNA, 900 bp, Artificial Sequence
  derived and/or modified sequence
atggccctgctggtgcgggtgctgaggaaccagaccagcatcagccagtgggtgcctgtgtgcagccgcctcatccctgtgagccccacccagggccagggcgaccgggccctgagcaggaccagccagtggccccagatgagccagagccgggcctgtggcggcagcgagcagatccctggcatcgacatccagctgaacaggaagtaccacaccaccaggaagctgagcaccaccaaggacagcccccagcctgtggaggagaaggtgggcgccttcaccaagatcatcgaggccatgggcttcaccggccccctgaagtacagcaagtggaagatcaagattgctgccctgaggatgtacaccagctgtgtggagaagacagactttgaggagttcttcctgcgctgccagatgccagacaccttcaacagctggttcctgatcaccctgctgcacgtgtggatgtgcctggtgaggatgaagcaggagggccgcagcggcaagtacatgtgccgcatcatcgtgcacttcatgtgggaggatgtgcagcagaggggccgggtgatgggcgtgaacccctacatcctgaagaagaacatgatcctgatgaccaaccacttctacgccgccatcctgggctatgatgagggcatcctgagtgatgaccacggcctggccgccgccctgtggaggaccttcttcaacagaaaatgtgaggaccccaggcacctggagctgctggtggagtatgtgaggaagcagatccagtacctggacagcatgaatggagaggacctgctgctgaccggggaggtgtcctggaggcccctggtggagaagaacccccagagcatcctgaagccccacagccccacctacaatgatgagggcctgtag

SEQ ID NO: 197411 - DNA, 819 bp, Artificial Sequence
  derived and/or modified sequence
atggccctgctggtgcgggtgctgcggaaccagaccagcatcagccagtgggtccctgtatgcagccgcctcatccctgtgagccctactcaggggcagggggatcgagctctgagcagaacttcccagtggcctcagatgtcccaatctagagcctgcggaggatccgaacagatcccaggtatagatatccaattgaatcgaaagtaccataccacccggaagttatcaaccaccaaggacagtcctcagcccgtggaagaaaaggtcggggccttcacaaagattattgaggctatgggcttcaccggccccctgaagtaccgctgccagatgccagatacctttaacagctggttcctgatcactttactgcacgtgtggatgtgcctggtgagaatgaagcaggaagggcggtctggcaaatatatgtgccgaatcatcgtgcactttatgtgggaagacgttcaacaaaggggccgggtcatgggggtgaacccatacatattgaagaagaatatgatcttgatgactaaccacttttatgccgccattctcgggtatgatgaaggcattttgtctgatgaccacggtctggcagccgctctgtggcgaacatttttcaatcggaaatgtgaggatcctagacaccttgagttgcttgtggaatacgttcgcaaacagattcaatacttggactccatgaacggtgaggatctccttctcacgggtgaggtgtcctggcgccctctggtggaaaagaatccgcagtccattttgaagccgcatagcccaacctacaacgacgagggcttgtag

SEQ ID NO: 197412 - DNA, 900 bp, Artificial Sequence
  derived and/or modified sequence
atggccctgctggtgcgggtgctgcggaaccagaccagcatcagccagtgggttcccgtgtgctctcgacttatccccgtgagccctacacagggtcaaggtgatcgagctctctccaggacctcacagtggccccagatgagtcagtcacgtgcttgtggaggctcagagcaaatcccgggtattgatatccaactaaatcgaaaataccacactacacgaaagttgtcgacaacaaaggattccccccagcccgtggaagagaaggtgggcgcgtttacaaagataatcgaggctatgggtttcacggggcccctcaaatactctaagtggaagattaaaatcgctgcccttagaatgtacacaagttgcgtggagaagaccgatttcgaagaattcttcctcagatgtcagatgcctgacactttcaacagctggttcttgatcacactgctgcacgtgtggatgtgcctcgtcaggatgaagcaggaaggtcggtctgggaaatacatgtgcaggatcattgtgcatttcatgtgggaagacgtgcagcagcggggcagagtgatgggtgtcaacccatatatccttaaaaaaaacatgatactaatgaccaatcacttctatgctgcaatcctggggtacgatgagggtatcctgagcgacgatcatgggctcgcagccgccctctggagaacattctttaacagaaaatgcgaagaccccagacacctggagctccttgtcgagtacgtgagaaagcaaatccagtacctagattccatgaacggggaagacctcctcctgaccggggaagtcagttggcggcctctcgtggaaaaaaatcctcagagcattctaaagccgcactcacctacctacaatgacgaaggcctgtag

SEQ ID NO: 197413 - DNA, 819 bp, Artificial Sequence
  derived and/or modified sequence
atggctttgctggtccgcgtgcttcgaaatcagacttctatcagtcagtgggtccctgtgtgctccagactgatccccgtgagccccactcagggccagggcgaccgcgctctgtcccggacttcccagtggccacaaatgagccaaagtcgcgcatgcggaggcagtgaacaaatcccaggcatcgatattcagttgaaccgcaagtaccatactactaggaaactgtctacgactaaagattccccccagccggtggaggagaaagtgggagcctttactaagatcatagaggctatgggctttaccgggccattgaagtacagatgccagatgcctgatacgtttaactcatggttcctcataaccctcctccatgtgtggatgtgcctcgttaggatgaagcaggagggtagaagtggtaaatatatgtgccgaatcattgtacattttatgtgggaagacgtgcagcaaagaggacgagtgatgggcgtcaacccttatatcctaaagaagaatatgattctgatgaccaaccatttctatgccgcaattctcggctatgacgaaggcatcctctcggacgatcacgggctcgccgctgccctgtggagaactttttttaacagaaaatgtgaagaccccagacacctagaactgctggttgagtatgtccgaaaacagatccaatatttggacagcatgaatggggaggacctcctgctaactggcgaggtgagttggagacctctcgtggagaaaaacccgcagtccattctgaaaccccatagcccaacctacaacgacgaagggctctag

SEQ ID NO: 197414 - DNA, 900 bp, Artificial Sequence
  derived and/or modified sequence
atggcactgttggtcagggtccttcgcaaccagacatccatctctcaatgggtcccggtctgcagtaggctcattcccgtgagtcctacccaggggcagggggatcgcgcactctctcgcacaagccagtggcctcaaatgtcacagtccagagcctgtgggggttcagagcagatacctggcattgatattcagttgaaccgcaagtaccacacaaccaggaagctatccaccactaaggacagccctcagcctgtggaggagaaggtgggggcattcaccaagataatagaagccatgggtttcaccggtcctcttaaatactcaaagtggaaaattaagattgctgcactgcgaatgtacaccagctgcgttgagaagaccgattttgaggagtttttcctccgatgtcagatgccagacacatttaatagctggtttttaatcacccttctgcatgtttggatgtgtctggttcgaatgaaacaggaaggaagaagtggaaaatacatgtgcaggatcattgtgcactttatgtgggaggatgtgcaacaacggggacgcgtgatgggggtgaacccttacatcctgaagaaaaatatgattcttatgactaatcatttctacgccgcaatcttgggctacgatgagggaatcttgagcgatgaccatgggctcgctgccgctctttggagaacttttttcaatcgcaaatgcgaggacccgcgtcaccttgaactcctggtggagtatgtacgcaaacagatacagtatcttgactccatgaatggggaggacctgcttctgaccggtgaggtcagctggcgccctctcgtggagaaaaacccacagagcattctaaaaccccactctcctacctataatgatgagggactctag

SEQ ID NO: 197415 - DNA, 2188 bp, Artificial Sequence
  derived and/or modified sequence
atggcgttgctggtgcgagtccttaggaaccagactagcatttctcagtgggttccagtatgcagccgattgatacctgtgtctcctacccaaggacagggggacagggctctgtctcgcacttcccagtggccccagatgagccagtcccgagcatgtggtggatcagaacagattcctggaatagacatacagctgaataggaagtatcacaccacacgtaagctttctactaccaaagattccccacagcctgttgaggagaaggttggtgctttcacaaagataatagaagccatgggattcacgggacctttgaaatacaggtgtcagatgcctgatacattcaattcatggtttcttataaccctactccacgtctggatgtgtctagtccgaatgaagcaggaaggccggagtgggaagtacatgtgtcgtatcatagttcattttatgtgggaggatgttcagcagcgcggcagagtcatgggggttaatccctatatcctgaagaagaacatgatcctcatgacaaatcatttctatgcagcgatcttgggatatgatgaggggatcctttcagatgatcatgggctggccgctgccctctggagaaccttcttcaaccggaaatgtgaagaccctcgacatcttgaattgctggtagagtatgtgaggaaacagatacagtacctggactccatgaacggggaggatctgcttctgacaggggaggtgagctggcgccctctagtggagaagaatcctcagagcatcctgaagccccattctccgacttacaacgacgagggactttgatgggctgggccctccgcacggcccgccagctggcttcgaggaacctccaggagagaagtgcctgttggtccaggaccctgcagaaagtggcctgaactgacctctgaacagcatctgtcaaatacctggccccatttgtgttgagtttcctcttagtgtgcccaggagtctgatctgctggggtacagggctgggagaacccctagctctcccggggtgtcctctcccttaggggaagccccgagtgagagtcccccagcacacactccccaaccccctccagcaactacatgtgactgatagcttttcccaaaggccaaggaagggatggtgtaggttcaaaagggaaaccccccagggcctgctgtggcctaggagcagattgtaatgctgccgagtccggtcggtgaccacgcgttgtccctcggctttcagccatggggttgagttggccattaaaagaaacagagacttctctctgccatggcccttctttattccagggacttagaaacttgcctgagatggtggacgcagtaatgagggcaccgcgcagctcagttagagacggagaaagggaagaggctgggatggtctctgctgctcttgcctctagttcatggagatgtgtctctgttcaggccaagatacagccagccaggcctgtcgtctgggacccaggaggcctctgatgaccaagggctttcacatcctaagtcatttggaaggaggccttgagaacaaagtcacctttgtcactcccagtgaactgaatgaggaacatgctgtctcctgtcttggcctcccctttcatgagatactggggagaagagaacattcctcctggcttagttgtagcagacccagacctgtgcccagctttggtcccccttcccaacttctgaagcacgtgctgcagagccaccttggtctgagcacctgaggaccagcccctcctccctcagtgcgggtcatctcttgggggattttcttaaagtgaagaaagggggtggggaaccatattgcccctccctcccccatcaaacttccttcatttaacttgctataaaatgagtcatataaagaaactctatatgggtgaggtatatcccacttctgtgaaaacattacaaatcaaaccgcttctctcagtttatttaagatgcttttgttgcgagcggagctctagagtgaagcctcctgtgtgtgtgtgagataataacaccttgtaactcattacagctgggcactatttacataaaccagagctgagccaggcaggaatttgctgattaatttatttttaatggagtgaagtataccatgcaccaaaataaactttactgtgtgtacctaactgctcctggaa

SEQ ID NO: 197416 - DNA, 2447 bp, Artificial Sequence
  derived and/or modified sequence
cagggagagcgtgcccgggcacgacagcctggtgcacagccgagaaaacaacagcgcgtgcgcgtagcgacctctttgcgcctgcgccccccttgccagtctttcgccggcaaaaggaggacgtagaaaaggggacaccggaaactcactcttcacccggaaatggttattgaggaacatggcgttgctggtgcgagtccttaggaaccagactagcatttctcagtgggttccagtatgcagccgattgatacctgtgtctcctacccaaggacagggggacagggctctgtctcgcacttcccagtggccccagatgagccagtcccgagcatgtggtggatcagaacagattcctggaatagacatacagctgaataggaagtatcacaccacacgtaagctttctactaccaaagattccccacagcctgttgaggagaaggttggtgctttcacaaagataatagaagccatgggattcacgggacctttgaaatacagtaaatggaagattaagattgcggccctgcgcatgtatactagctgtgtggagaaaactgacttcgaggaattctttctaaggtgtcagatgcctgatacattcaattcatggtttcttataaccctactccacgtctggatgtgtctagtccgaatgaagcaggaaggccggagtgggaagtacatgtgtcgtatcatagttcattttatgtgggaggatgttcagcagcgcggcagagtcatgggggttaatccctatatcctgaagaagaacatgatcctcatgacaaatcatttctatgcagcgatcttgggatatgatgaggggatcctttcagatgatcatgggctggccgctgccctctggagaaccttcttcaaccggaaatgtgaagaccctcgacatcttgaattgctggtagagtatgtgaggaaacagatacagtacctggactccatgaacggggaggatctgcttctgacaggggaggtgagctggcgccctctagtggagaagaatcctcagagcatcctgaagccccattctccgacttacaacgacgagggactttgatgggctgggccctccgcacggcccgccagctggcttcgaggaacctccaggagagaagtgcctgttggtccaggaccctgcagaaagtggcctgaactgacctctgaacagcatctgtcaaatacctggccccatttgtgttgagtttcctcttagtgtgcccaggagtctgatctgctggggtacagggctgggagaacccctagctctcccggggtgtcctctcccttaggggaagccccgagtgagagtcccccagcacacactccccaaccccctccagcaactacatgtgactgatagcttttcccaaaggccaaggaagggatggtgtaggttcaaaagggaaaccccccagggcctgctgtggcctaggagcagattgtaatgctgccgagtccggtcggtgaccacgcgttgtccctcggctttcagccatggggttgagttggccattaaaagaaacagagacttctctctgccatggcccttctttattccagggacttagaaacttgcctgagatggtggacgcagtaatgagggcaccgcgcagctcagttagagacggagaaagggaagaggctgggatggtctctgctgctcttgcctctagttcatggagatgtgtctctgttcaggccaagatacagccagccaggcctgtcgtctgggacccaggaggcctctgatgaccaagggctttcacatcctaagtcatttggaaggaggccttgagaacaaagtcacctttgtcactcccagtgaactgaatgaggaacatgctgtctcctgtcttggcctcccctttcatgagatactggggagaagagaacattcctcctggcttagttgtagcagacccagacctgtgcccagctttggtcccccttcccaacttctgaagcacgtgctgcagagccaccttggtctgagcacctgaggaccagcccctcctccctcagtgcgggtcatctcttgggggattttcttaaagtgaagaaagggggtggggaaccatattgcccctccctcccccatcaaacttccttcatttaacttgctataaaatgagtcatataaagaaactctatatgggtgaggtatatcccacttctgtgaaaacattacaaatcaaaccgcttctctcagtttatttaagatgcttttgttgcgagcggagctctagagtgaagcctcctgtgtgtgtgtgagataataacaccttgtaactcattacagctgggcactatttacataaaccagagctgagccaggcaggaatttgctgattaatttatttttaatggagtgaagtataccatgcaccaaaataaactttactgtgtgtacctaactgctcctggaa

SEQ ID NO: 197417 - protein, 1010 aa, Artificial Sequence
  derived and/or modified sequence
MSQLRLLPSRLGVQAARLLAAHDVPVFGWRSRSSGPPATFPSSKGGGGSSYMEEMYFAWLENPQSVHKSWDSFFREASEEAFSGSAQPRPPSVVHESRSAVSSRTKTSKLVEDHLAVQSLIRAYQIRGHHVAQLDPLGILDADLDSFVPSDLITTIDKLAFYDLQEADLDKEFQLPTTTFIGGSENTLSLREIIRRLENTYCQHIGLEFMFINDVEQCQWIRQKFETPGVMQFSSEEKRTLLARLVRSMRFEDFLARKWSSEKRFGLEGCEVMIPALKTIIDKSSEMGIENVILGMPHRGRLNVLANVIRKDLEQIFCQFDPKLEAADEGSGDVKYHLGMYHERINRVTNRNITLSLVANPSHLEAVDPVVQGKTKAEQFYRGDAQGKKVMSILVHGDAAFAGQGVVYETFHLSDLPSYTTNGTVHVVVNNQIGFTTDPRMARSSPYPTDVARVVNAPIFHVNADDPEAVIYVCSVAAEWRNTFNKDVVVDLVCYRRRGHNEMDEPMFTQPLMYKQIHRQVPVLKKYADKLIAEGTVTLQEFEEEIAKYDRICEEAYGRSKDKKILHIKHWLDSPWPGFFNVDGEPKSMTCPATGIPEDMLTHIGSVASSVPLEDFKIHTGLSRILRGRADMTKNRTVDWALAEYMAFGSLLKEGIHVRLSGQDVERGTFSHRHHVLHDQEVDRRTCVPMNHLWPDQAPYTVCNSSLSEYGVLGFELGYAMASPNALVLWEAQFGDFHNTAQCIIDQFISTGQAKWVRHNGIVLLLPHGMEGMGPEHSSARPERFLQMSNDDSDAYPAFTKDFEVSQLYDCNWIVVNCSTPANYFHVLRRQILLPFRKPLIIFTPKSLLRHPEAKSSFDQMVSGTSFQRVIPEDGAAARAPEQVQRLIFCTGKVYYDLVKERSSQDLEEKVAITRLEQISPFPFDLIKQEAEKYPGAELAWCQEEHKNMGYYDYISPRFMTILRRARPIWYVGRDPAAAPATGNRNTHLVSLKKFLDTAFNLQAFEGKTF

SEQ ID NO: 197418 - protein, 801 aa, Artificial Sequence
  derived and/or modified sequence
MFINDVEQCQWIRQKFETPGVMQFSSEEKRTLLARLVRSMRFEDFLARKWSSEKRFGLEGCEVMIPALKTIIDKSSEMGIENVILGMPHRGRLNVLANVIRKDLEQIFCQFDPKLEAADEGSGDVKYHLGMYHERINRVTNRNITLSLVANPSHLEAVDPVVQGKTKAEQFYRGDAQGKKVMSILVHGDAAFAGQGVVYETFHLSDLPSYTTNGTVHVVVNNQIGFTTDPRMARSSPYPTDVARVVNAPIFHVNADDPEAVIYVCSVAAEWRNTFNKDVVVDLVCYRRRGHNEMDEPMFTQPLMYKQIHRQVPVLKKYADKLIAEGTVTLQEFEEEIAKYDRICEEAYGRSKDKKILHIKHWLDSPWPGFFNVDGEPKSMTCPATGIPEDMLTHIGSVASSVPLEDFKIHTGLSRILRGRADMTKNRTVDWALAEYMAFGSLLKEGIHVRLSGQDVERGTFSHRHHVLHDQEVDRRTCVPMNHLWPDQAPYTVCNSSLSEYGVLGFELGYAMASPNALVLWEAQFGDFHNTAQCIIDQFISTGQAKWVRHNGIVLLLPHGMEGMGPEHSSARPERFLQMSNDDSDAYPAFTKDFEVSQLYDCNWIVVNCSTPANYFHVLRRQILLPFRKPLIIFTPKSLLRHPEAKSSFDQMVSGTSFQRVIPEDGAAARAPEQVQRLIFCTGKVYYDLVKERSSQDLEEKVAITRLEQISPFPFDLIKQEAEKYPGAELAWCQEEHKNMGYYDYISPRFMTILRRARPIWYVGRDPAAAPATGNRNTHLVSLKKFLDTAFNLQAFEGKTF

SEQ ID NO: 197419 - DNA, 3033 bp, Artificial Sequence
  derived and/or modified sequence
atgagccagctgagactgctgcccagcagactgggcgtgcaggccgccagactgctggccgcccacgacgtgcccgtgttcggctggagaagcagaagcagcggcccccccgccaccttccccagcagcaagggcggcggcggcagcagctacatggaggagatgtacttcgcctggctggagaacccccagagcgtgcacaagagctgggacagcttcttcagagaggccagcgaggaggccttcagcggcagcgcccagcccagaccccccagcgtggtgcacgagagcagaagcgccgtgagcagcagaaccaagaccagcaagctggtggaggaccacctggccgtgcagagcctgatcagagcctaccagatcagaggccaccacgtggcccagctggaccccctgggcatcctggacgccgacctggacagcttcgtgcccagcgacctgatcaccaccatcgacaagctggccttctacgacctgcaggaggccgacctggacaaggagttccagctgcccaccaccaccttcatcggcggcagcgagaacaccctgagcctgagagagatcatcagaagactggagaacacctactgccagcacatcggcctggagttcatgttcatcaacgacgtggagcagtgccagtggatcagacagaagttcgagacccccggcgtgatgcagttcagcagcgaggagaagagaaccctgctggccagactggtgagaagcatgagattcgaggacttcctggccagaaagtggagcagcgagaagagattcggcctggagggctgcgaggtgatgatccccgccctgaagaccatcatcgacaagagcagcgagatgggcatcgagaacgtgatcctgggcatgccccacagaggcagactgaacgtgctggccaacgtgatcagaaaggacctggagcagatcttctgccagttcgaccccaagctggaggccgccgacgagggcagcggcgacgtgaagtaccacctgggcatgtaccacgagagaatcaacagagtgaccaacagaaacatcaccctgagcctggtggccaaccccagccacctggaggccgtggaccccgtggtgcagggcaagaccaaggccgagcagttctacagaggcgacgcccagggcaagaaggtgatgagcatcctggtgcacggcgacgccgccttcgccggccagggcgtggtgtacgagaccttccacctgagcgacctgcccagctacaccaccaacggcaccgtgcacgtggtggtgaacaaccagatcggcttcaccaccgaccccagaatggccagaagcagcccctaccccaccgacgtggccagagtggtgaacgcccccatcttccacgtgaacgccgacgaccccgaggccgtgatctacgtgtgcagcgtggccgccgagtggagaaacaccttcaacaaggacgtggtggtggacctggtgtgctacagaagaagaggccacaacgagatggacgagcccatgttcacccagcccctgatgtacaagcagatccacagacaggtgcccgtgctgaagaagtacgccgacaagctgatcgccgagggcaccgtgaccctgcaggagttcgaggaggagatcgccaagtacgacagaatctgcgaggaggcctacggcagaagcaaggacaagaagatcctgcacatcaagcactggctggacagcccctggcccggcttcttcaacgtggacggcgagcccaagagcatgacctgccccgccaccggcatccccgaggacatgctgacccacatcggcagcgtggccagcagcgtgcccctggaggacttcaagatccacaccggcctgagcagaatcctgagaggcagagccgacatgaccaagaacagaaccgtggactgggccctggccgagtacatggccttcggcagcctgctgaaggagggcatccacgtgagactgagcggccaggacgtggagagaggcaccttcagccacagacaccacgtgctgcacgaccaggaggtggacagaagaacctgcgtgcccatgaaccacctgtggcccgaccaggccccctacaccgtgtgcaacagcagcctgagcgagtacggcgtgctgggcttcgagctgggctacgccatggccagccccaacgccctggtgctgtgggaggcccagttcggcgacttccacaacaccgcccagtgcatcatcgaccagttcatcagcaccggccaggccaagtgggtgagacacaacggcatcgtgctgctgctgccccacggcatggagggcatgggccccgagcacagcagcgccagacccgagagattcctgcagatgagcaacgacgacagcgacgcctaccccgccttcaccaaggacttcgaggtgagccagctgtacgactgcaactggatcgtggtgaactgcagcacccccgccaactacttccacgtgctgagaagacagatcctgctgcccttcagaaagcccctgatcatcttcacccccaagagcctgctgagacaccccgaggccaagagcagcttcgaccagatggtgagcggcaccagcttccagagagtgatccccgaggacggcgccgccgccagagcccccgagcaggtgcagagactgatcttctgcaccggcaaggtgtactacgacctggtgaaggagagaagcagccaggacctggaggagaaggtggccatcaccagactggagcagatcagccccttccccttcgacctgatcaagcaggaggccgagaagtaccccggcgccgagctggcctggtgccaggaggagcacaagaacatgggctactacgactacatcagccccagattcatgaccatcctgagaagagccagacccatctggtacgtgggcagagaccccgccgccgcccccgccaccggcaacagaaacacccacctggtgagcctgaagaagttcctggacaccgccttcaacctgcaggccttcgagggcaagaccttctag

SEQ ID NO: 197420 - DNA, 2406 bp, Artificial Sequence
  derived and/or modified sequence
atgttcatcaacgacgtggagcagtgccagtggatcagacagaagttcgagacccccggcgtgatgcagttcagcagcgaggagaagagaaccctgctggccagactggtgagaagcatgagattcgaggacttcctggccagaaagtggagcagcgagaagagattcggcctggagggctgcgaggtgatgatccccgccctgaagaccatcatcgacaagagcagcgagatgggcatcgagaacgtgatcctgggcatgccccacagaggcagactgaacgtgctggccaacgtgatcagaaaggacctggagcagatcttctgccagttcgaccccaagctggaggccgccgacgagggcagcggcgacgtgaagtaccacctgggcatgtaccacgagagaatcaacagagtgaccaacagaaacatcaccctgagcctggtggccaaccccagccacctggaggccgtggaccccgtggtgcagggcaagaccaaggccgagcagttctacagaggcgacgcccagggcaagaaggtgatgagcatcctggtgcacggcgacgccgccttcgccggccagggcgtggtgtacgagaccttccacctgagcgacctgcccagctacaccaccaacggcaccgtgcacgtggtggtgaacaaccagatcggcttcaccaccgaccccagaatggccagaagcagcccctaccccaccgacgtggccagagtggtgaacgcccccatcttccacgtgaacgccgacgaccccgaggccgtgatctacgtgtgcagcgtggccgccgagtggagaaacaccttcaacaaggacgtggtggtggacctggtgtgctacagaagaagaggccacaacgagatggacgagcccatgttcacccagcccctgatgtacaagcagatccacagacaggtgcccgtgctgaagaagtacgccgacaagctgatcgccgagggcaccgtgaccctgcaggagttcgaggaggagatcgccaagtacgacagaatctgcgaggaggcctacggcagaagcaaggacaagaagatcctgcacatcaagcactggctggacagcccctggcccggcttcttcaacgtggacggcgagcccaagagcatgacctgccccgccaccggcatccccgaggacatgctgacccacatcggcagcgtggccagcagcgtgcccctggaggacttcaagatccacaccggcctgagcagaatcctgagaggcagagccgacatgaccaagaacagaaccgtggactgggccctggccgagtacatggccttcggcagcctgctgaaggagggcatccacgtgagactgagcggccaggacgtggagagaggcaccttcagccacagacaccacgtgctgcacgaccaggaggtggacagaagaacctgcgtgcccatgaaccacctgtggcccgaccaggccccctacaccgtgtgcaacagcagcctgagcgagtacggcgtgctgggcttcgagctgggctacgccatggccagccccaacgccctggtgctgtgggaggcccagttcggcgacttccacaacaccgcccagtgcatcatcgaccagttcatcagcaccggccaggccaagtgggtgagacacaacggcatcgtgctgctgctgccccacggcatggagggcatgggccccgagcacagcagcgccagacccgagagattcctgcagatgagcaacgacgacagcgacgcctaccccgccttcaccaaggacttcgaggtgagccagctgtacgactgcaactggatcgtggtgaactgcagcacccccgccaactacttccacgtgctgagaagacagatcctgctgcccttcagaaagcccctgatcatcttcacccccaagagcctgctgagacaccccgaggccaagagcagcttcgaccagatggtgagcggcaccagcttccagagagtgatccccgaggacggcgccgccgccagagcccccgagcaggtgcagagactgatcttctgcaccggcaaggtgtactacgacctggtgaaggagagaagcagccaggacctggaggagaaggtggccatcaccagactggagcagatcagccccttccccttcgacctgatcaagcaggaggccgagaagtaccccggcgccgagctggcctggtgccaggaggagcacaagaacatgggctactacgactacatcagccccagattcatgaccatcctgagaagagccagacccatctggtacgtgggcagagaccccgccgccgcccccgccaccggcaacagaaacacccacctggtgagcctgaagaagttcctggacaccgccttcaacctgcaggccttcgagggcaagaccttctag

SEQ ID NO: 197421 - DNA, 3033 bp, Artificial Sequence
  derived and/or modified sequence
atgtcccagcttaggctgcttccctcacgactcggcgtccaagccgctcggttactcgctgctcatgacgtccccgtctttgggtggcggagtcgctcctctggcccacctgcgacattccccagttccaagggggggggcgggtcttcatacatggaggaaatgtactttgcctggctagagaacccacagtctgtccacaaaagctgggattccttcttccgggaagcatcagaggaagctttttctggctccgcccaacctcggccaccttcagtggtgcatgagtctcgctctgctgtttcctctcggaccaaaaccagtaagctcgtggaggaccacttggccgtgcaatcactcatccgcgcttaccagataagggggcaccacgtcgcacagctggatccactgggaattctggacgctgacctcgattcatttgtcccatccgaccttataaccactattgataagctggcattttatgatctccaagaggctgacctggacaaagaatttcaacttcctactacgacattcattggaggctcagaaaatacgctgtctctccgcgagatcatccggcgactcgaaaatacctactgtcagcatataggcctcgaattcatgttcattaatgatgtggagcagtgtcagtggatccgacagaaatttgagacacctggtgttatgcagttttcttctgaggagaaaagaactctactggcccgcctggtacgatctatgcgcttcgaggatttcttagctcgcaagtggtccagtgagaagcggtttggcttggaggggtgtgaagtcatgattccagctctgaaaaccatcatagacaagagcagtgaaatgggcatcgaaaatgtgatactgggcatgccccaccgcggaagactcaatgtgctggcgaacgttattcgcaaggatcttgagcagattttttgtcaatttgacccaaaactggaagccgctgacgagggctctggcgatgtgaaatatcacctggggatgtatcatgaacgcattaatcgtgttaccaacagaaacataacccttagcttggtggcaaatccaagtcacctggaagcggttgacccagttgtccagggcaaaacaaaggctgagcaattctatcgaggcgacgctcaagggaagaaggtaatgagtatactggtgcatggagacgccgccttcgccggccagggcgttgtatacgagacattccacttgtccgacctgccctcttatacaacgaatgggaccgtgcacgtcgtggtcaataaccagataggattcaccaccgaccccagaatggccaggagcagcccatacccgaccgacgtagcaagggtcgtgaacgctccaatcttccacgtgaatgccgacgacccggaggccgtaatttacgtgtgttcagtggcagctgagtggcgaaacacgtttaataaagatgtggttgtggatctggtgtgttatcggcgaagaggccacaacgagatggacgaaccgatgttcacacaacccctaatgtacaaacagatacaccgccaggtgcctgttctgaagaagtacgcagataagctgattgccgaaggcaccgtgacgctgcaggagttcgaagaagaaattgccaagtacgatagaatctgcgaggaggcctatggacgcagcaaagataaaaaaatactccacatcaagcactggctagactccccatggccagggttcttcaatgttgatggcgagcctaagagcatgacgtgtccagccactggcatcccagaggatatgttaactcatataggttccgtagcctcatcggtccccctggaggactttaagatccacacggggttgtcgcgaattctgagaggccgcgctgacatgaccaagaataggacagtggactgggcgctggccgagtacatggccttcgggtccctgctgaaggaaggtatccacgtgcgcctgagcggtcaagatgtggagagagggaccttttcacaccggcaccacgtgttgcatgaccaggaagttgatagacgcacatgcgttccgatgaatcatctctggcctgaccaggcaccatacaccgtgtgcaactcatccctctcggagtatggagtgctgggcttcgaactaggatacgctatggcctcacccaacgccttagtcctgtgggaggctcagttcggagacttccacaacactgcccaatgcatcatcgatcaatttatttctacagggcaagctaagtgggtgcggcataatggcatcgtcctgctgctgcctcacggaatggaggggatgggacccgaacactcctctgctagaccagagcgctttctgcaaatgtccaatgacgattctgatgcatacccagcctttacaaaagattttgaggtgtcacagttgtacgactgtaactggatagtggttaactgttcaacccctgcaaactattttcacgttctgagacgccagatcctcctccctttcaggaaacccttaattatattcacacctaaaagtctccttagacatcctgaggccaaatcatcattcgatcagatggtatctgggaccagtttccaaagggttatacccgaggatggggcggcagctcgtgccccagagcaggttcagaggcttattttctgcacaggcaaggtgtattacgacctcgtgaaagagcgatcaagtcaggatcttgaagagaaagttgctattacgcggttagaacagatctcccccttcccttttgatctcatcaagcaggaagcagaaaaatacccaggtgccgaactggcttggtgccaggaggaacataagaatatgggttactatgactacatatcaccccggttcatgactattcttcgccgggcgcggccgatttggtacgtcgggagagatccagccgccgctcctgctaccggcaacaggaacacccatctcgtatctctgaaaaagtttttagatacagccttcaatttgcaagcattcgagggaaagacattctag

SEQ ID NO: 197422 - DNA, 2406 bp, Artificial Sequence
  derived and/or modified sequence
atgtttattaatgacgtggaacagtgtcagtggataaggcaaaagttcgagacacccggggttatgcagtttagcagtgaggaaaagcggacgcttctggctagactggtacggagcatgagattcgaagatttcctcgctcgtaagtggtcctccgaaaagcgatttggtttggaaggatgtgaggtcatgatcccagcgctgaaaaccatcatagataagagttccgaaatggggattgagaacgtgatattaggtatgccgcaccgcgggcggctgaatgtgctagcaaacgtcataaggaaagatctagagcagatattctgccagttcgaccccaaactcgaggcagcagatgaaggcagcggcgatgtgaagtaccacctgggtatgtaccatgagagaatcaacagggttacaaataggaatattacactctctcttgtcgccaatccctcacaccttgaagcagtcgatcccgtcgtccagggaaagacaaaggccgagcaattttataggggggacgcgcaggggaaaaaggtgatgtctatcctggtgcatggcgatgctgcctttgcaggacaaggtgttgtctacgaaacatttcacctctccgatttgccttcctataccacaaacggaactgtccacgtggtcgttaataaccaaattggctttactacggaccccaggatggcccggagctcgccatatccaactgatgtagctcgtgtagtgaatgcgccaatctttcacgttaacgcagatgatccagaagcagtaatctacgtttgtagcgtggctgcagagtggcgtaacacttttaataaggacgtagtcgtcgacctcgtgtgttaccgacggcgcggacacaacgagatggatgagcccatgttcacacagcccttgatgtataagcagatccaccgacaggttcctgttctgaagaaatatgctgacaagctgatcgcggaggggacagtgacgctccaggagttcgaggaagagatagctaagtatgacaggatctgcgaagaagcttacggcagatcgaaggacaagaaaatcctgcatatcaagcattggctggacagcccttggcctgggttttttaatgtcgatggagagcccaagagcatgacatgccctgccacaggtattccagaggatatgttaacccatattggatccgtggcctcatctgtgcctctagaggattttaagattcatactggactgtccaggattctgaggggacgcgcagatatgactaagaacaggaccgttgattgggccctggcagagtatatggctttcgggtctctgttgaaggagggtatacacgtcagactctcagggcaggacgtagaacggggcactttcagccaccgacatcatgtgctacatgaccaagaagtagatcggagaacctgtgtccccatgaatcacctttggcctgaccaagccccgtatacagtctgcaactctagcttgagcgagtacggagtgctgggcttcgagttagggtacgccatggccagtcccaacgctctagtgctgtgggaggcccagttcggcgattttcataatacagcccagtgtatcattgaccagttcatcagtaccggccaagccaagtgggtgcgccataatggcattgttctactactgccccatggtatggaggggatgggccctgagcactccagcgcccgcccagaaagattccttcagatgtccaacgacgatagtgacgcttacccagctttcaccaaagactttgaggtgtctcagctgtatgattgcaactggatcgtcgtgaactgttcaaccccggcgaactacttccatgtgctcagacgccagatcttgctcccatttcgcaaaccacttattattttcactcccaagtcactcctgcgacaccctgaggctaaatcttctttcgaccagatggtgtccggcacatcttttcagcgcgtaatcccagaagatggcgcagccgcaagagcccctgaacaggtccaacgactgatcttctgcaccggcaaagtgtactatgacctcgtgaaggagcgatccagccaggacctcgaggagaaggttgcaatcacaagattagagcagatctccccctttcccttcgatcttatcaaacaggaggcagaaaaatacccgggagctgagctggcatggtgccaggaggagcataaaaacatggggtattacgactatataagtccgagatttatgacaatcttacgacgggcacggcccatttggtacgtggggagggacccagccgcagcacccgctaccggcaataggaacactcatttagtgagtttgaaaaagttcctagacaccgcctttaatctccaggcatttgaaggcaaaactttttag

SEQ ID NO: 197423 - DNA, 3033 bp, Artificial Sequence
  derived and/or modified sequence
atgagccagctgcggctgctgcccagccggctgggcgtgcaggccgcccggctgctggccgcccatgatgtgcctgtgtttggctggaggagccgcagcagcggccccccagccaccttccccagcagcaagggcggcggcggcagcagctacatggaggagatgtactttgcctggctggagaacccccagagcgtgcacaagtcctgggacagcttcttccgggaggccagcgaggaggccttcagcggcagcgcccagccccggccccccagcgtggtgcatgagagccgctctgctgtgagcagcaggaccaagaccagcaagctggtggaggaccacctggccgtgcagagcctcatccgggcctaccagatccggggccaccacgtggcccagctggaccccctgggcatcctggatgctgacctggacagctttgtgcccagcgacctgatcaccaccatcgacaagctggccttctatgacctgcaggaggccgacctggacaaggagttccagctgcccaccaccaccttcatcggcggcagcgagaacaccctgagcctgcgggagatcatccggcggctggagaacacctactgccagcacatcggcctggagttcatgttcatcaatgatgtggagcagtgccagtggatccggcagaagtttgagaccccaggagtgatgcagttcagcagcgaggagaagaggaccctgctggcccggctggtgcgctccatgagatttgaggacttcctggccaggaagtggagcagcgagaagagatttggcctggagggctgtgaggtgatgatcccagccctgaagaccatcatcgacaagagcagcgagatgggcattgaaaatgtcatcctgggcatgccccaccggggccgcctgaatgtgctggccaacgtcatcaggaaggacctggagcagatcttctgccagtttgaccccaagctggaggccgcagatgagggcagcggagatgtgaagtaccacctgggcatgtaccacgagcgcatcaacagagtgaccaacagaaacatcaccctgagcctggtggccaaccccagccacctggaggccgtggaccctgtggtgcagggcaagaccaaggccgagcagttctacagaggagatgcccagggcaagaaggtgatgagcatcctggtgcatggagatgctgcctttgctggccagggcgtggtgtatgagaccttccacctgagtgacctgcccagctacaccaccaacggcaccgtgcacgtggtggtgaacaaccagatcggcttcaccacagaccccaggatggcccggagcagcccctaccccacagatgtggcccgggtggtgaatgcccccatcttccacgtgaatgctgatgatcctgaggccgtcatctacgtgtgcagcgtggccgctgagtggaggaacaccttcaacaaggatgtggtggtggacctggtgtgctacagaagaagaggccacaatgagatggatgagcccatgttcacccagcccctgatgtacaagcagatccaccggcaggtgcctgtgctgaagaagtatgctgacaagctgattgctgagggcaccgtgaccctgcaggagtttgaggaggagatcgccaagtatgaccgcatctgtgaggaggcctacggccgcagcaaggacaagaagatcctgcacatcaagcactggctggacagcccctggccaggcttcttcaacgtggatggagagcccaagtccatgacctgcccagccaccggcatccctgaggacatgctgacccacatcggctctgtggccagctctgtgcccctggaggacttcaagatccacacaggcctgagccgcatcctgcggggccgggctgacatgaccaagaacagaacagtggactgggccctggccgagtacatggccttcggcagcctgctgaaggagggcatccacgtgcggctgagcggccaggatgtggagcggggcaccttcagccaccgccaccacgtgctgcatgaccaggaggtggacaggaggacctgtgtgcccatgaaccacctgtggccagaccaggccccctacacagtgtgcaacagcagcctgtctgaatatggagtgctgggctttgagctgggctacgccatggccagccccaatgccctggtgctgtgggaggcccagtttggagacttccacaacacagcccagtgcatcatcgaccagttcatcagcacaggccaggccaagtgggtgcgccacaacggcatcgtgctgctgctgccccacggcatggagggcatgggccctgagcacagcagcgcccggcctgagcgcttcctgcagatgagcaatgatgacagtgatgcctacccagccttcaccaaggactttgaggtgtcccagctgtatgactgcaactggatcgtggtgaactgcagcaccccagccaactacttccacgtgctgcggcggcagatcctgctgcccttcaggaagcccctcatcatcttcacccccaagagcctgctgcggcaccctgaggccaagagcagctttgaccagatggtgtctggcaccagcttccagagggtcatcccagaagatggagctgctgcccgggcccctgagcaggtgcagaggctcatcttctgcaccgggaaggtgtactatgacctggtgaaggagaggagcagccaggacctggaggagaaggtggccatcacccggctggagcagatcagccccttcccctttgacctgatcaagcaggaggccgagaagtacccaggagctgagctggcctggtgccaggaggagcacaagaacatgggctactatgactacatcagcccccgcttcatgaccatcctgcggcgggcccggcccatctggtacgtgggccgggaccctgctgctgccccagccaccggcaacagaaacacccacctggtgtccctgaagaagttcctggacacagccttcaacctgcaggcctttgagggcaagaccttctag

SEQ ID NO: 197424 - DNA, 2406 bp, Artificial Sequence
  derived and/or modified sequence
atgttcatcaatgatgtggagcagtgccagtggatccggcagaagtttgagaccccaggagtgatgcagttcagcagcgaggagaagaggaccctgctggcccggctggtgcgctccatgagatttgaggacttcctggccaggaagtggagcagcgagaagcgcttcggcctggagggctgtgaggtgatgatcccagccctgaagaccatcatcgacaagagcagcgagatgggcattgaaaatgtcatcctgggcatgccccaccggggccgcctgaatgtgctggccaacgtcatcaggaaggacctggagcagatcttctgccagtttgaccccaagctggaggccgcagatgagggcagcggagatgtgaagtaccacctgggcatgtaccacgagcgcatcaacagagtgaccaacagaaacatcaccctgagcctggtggccaaccccagccacctggaggccgtggaccctgtggtgcagggcaagaccaaggccgagcagttctacagaggagatgcccagggcaagaaggtgatgagcatcctggtgcatggagatgctgcctttgctggccagggcgtggtgtatgagaccttccacctgagtgacctgcccagctacaccaccaatggaacagtgcacgtggtggtgaacaaccagatcggcttcaccacagaccccaggatggcccggagcagcccctaccccacagatgtggcccgggtggtgaatgcccccatcttccacgtgaatgctgatgatcctgaggccgtcatctacgtgtgcagcgtggccgctgagtggaggaacaccttcaacaaggatgtggtggtggacctggtgtgctacagaagaagaggccacaatgagatggatgagcccatgttcacccagcccctgatgtacaagcagatccaccggcaggtgcctgtgctgaagaagtatgctgacaagctgattgctgagggcaccgtgaccctgcaggagtttgaggaggagatcgccaagtatgaccgcatctgtgaggaggcctacggccgcagcaaggacaagaagatcctgcacatcaagcactggctggacagcccctggccaggcttcttcaacgtggatggagagcccaagtccatgacctgcccagccaccggcatccctgaggacatgctgacccacatcggctctgtggccagctctgtgcccctggaggacttcaagatccacacaggcctgagccgcatcctgcggggccgggctgacatgaccaagaacagaacagtggactgggccctggccgagtacatggccttcggcagcctgctgaaggagggcatccacgtgcggctgagcggccaggatgtggagcggggcaccttcagccaccgccaccacgtgctgcatgaccaggaggtggacaggaggacctgtgtgcccatgaaccacctgtggccagaccaggccccctacacagtgtgcaacagcagcctgtctgaatatggagtgctgggctttgagctgggctacgccatggccagccccaatgccctggtgctgtgggaggcccagtttggagacttccacaacacagcccagtgcatcatcgaccagttcatcagcacaggccaggccaagtgggtgcgccacaatggaattgtgctgctgctgccccacggcatggagggcatgggccctgagcacagcagcgcccggcctgagcgcttcctgcagatgagcaatgatgacagtgatgcctacccagccttcaccaaggactttgaggtgtcccagctgtatgactgcaactggatcgtggtgaactgcagcaccccagccaactacttccacgtgctgcggcggcagatcctgctgcccttcaggaagcccctcatcatcttcacccccaagagcctgctgcggcaccctgaggccaagagcagctttgaccagatggtgtctggcaccagcttccagagggtcatcccagaagatggagctgctgcccgggcccctgagcaggtgcagaggctcatcttctgcaccgggaaggtgtactatgacctggtgaaggagaggagcagccaggacctggaggagaaggtggccatcacccggctggagcagatcagccccttcccctttgacctgatcaagcaggaggccgagaagtacccaggagctgagctggcctggtgccaggaggagcacaagaacatgggctactatgactacatcagcccccgcttcatgaccatcctgcggcgggcccggcccatctggtacgtgggccgggaccctgctgctgccccagccactggaaacagaaacacccacctggtgtccctgaagaagttcctggacacagccttcaacctgcaggcctttgagggcaagaccttctag

SEQ ID NO: 197425 - DNA, 3033 bp, Artificial Sequence
  derived and/or modified sequence
atgagccagctgcggctgctgcccagccggctgggcgtgcaggccgcgcgcctgctggcggcacacgacgtgccagtgtttggctggcggtctagaagtagcggtccacctgccacctttccctccagtaaaggaggcggaggatccagttacatggaggagatgtactttgcctggctcgaaaatccccagtccgttcacaaatcatgggatagtttttttagggaggccagtgaggaagccttttcgggcagcgcccaaccccgcccacctagcgtggttcatgagtcaaggagcgcggtgtccagccggaccaaaacatccaaattggtagaagatcacttggctgtgcagagtttgattagagcataccagatcagggggcatcatgtcgcacagctggatccactgggaatcctcgatgccgatctcgactccttcgtgccgtctgacttaatcaccaccattgacaagctggcattttacgacctgcaggaagccgatttagacaaggagttccagctccccaccactactttcattggcggatctgaaaacacactaagtcttcgcgaaattatacgcagactggagaacacatactgccagcacattggcctggagtttatgtttattaacgatgtggagcagtgtcagtggatccggcagaagtttgaaacccccggcgtaatgcagttctcatccgaagagaaaaggacattgcttgctcggctagtgcggtccatgcggtttgaggatttcctggcacgtaagtggtcctccgagaagcggttcggactggagggatgcgaggtgatgatacccgcactgaagacaattatagataaatcgagcgaaatgggaatcgaaaatgtgattctcggcatgccacatagggggcgactgaatgtgctggcaaatgtcattagaaaagatcttgaacaaatcttctgtcaattcgacccgaagcttgaggcagcagatgagggtagtggggacgtcaagtaccacctgggtatgtaccacgagcggattaaccgagttacgaaccgcaacatcaccctctctctcgtggccaacccttctcaccttgaagcagtagatcccgtcgtgcagggcaagactaaagcagaacaattttacagaggcgacgcccaaggcaaaaaagtcatgtccattttggtgcatggggatgccgcctttgcgggccagggcgttgtctatgagacatttcacctgagtgatctaccctcttatactactaacggaacagtacatgtggtggtaaacaatcaaatcggctttacgaccgacccacgaatggcccgatcctctccctaccccaccgatgtggcgagagttgtaaacgcccctatttttcatgtcaatgccgatgatccagaagcagtgatttatgtctgctctgtcgctgcagagtggaggaataccttcaacaaggacgtggtggtggatctagtctgctatcgccggcgcggccataacgaaatggacgagcccatgtttacccagccactgatgtataagcagatccatcggcaggtgcccgtcctcaagaagtacgccgataagctgatcgctgaaggaaccgtgacactgcaagagtttgaagaggaaatcgcaaagtacgatcgcatctgcgaggaagcctatgggagatccaaagacaagaaaatcctgcatattaagcattggctggactccccctggccagggttctttaatgtggacggagaaccaaaatcaatgacatgtcctgccacagggattcctgaagatatgctgactcatattgggtccgtcgccagctcagtccccctggaagatttcaaaatacacaccggacttagccgaatactcagaggtcgggcggatatgaccaaaaatcggacagtggattgggctctcgcggaatacatggcatttggctcattactcaaagaaggaattcatgtccgattgtctgggcaggatgttgagcgcggcacctttagccaccggcaccatgtcttacatgatcaggaagtggatcggcgcacctgcgtaccaatgaatcatctctggcccgaccaggcaccttacactgtgtgcaatagctctctgagcgagtacggcgtgttggggttcgagctggggtatgcgatggccagccccaacgctctcgtgctgtgggaggctcaatttggggactttcataatacggcccaatgtattatcgaccagtttattagcactggtcaagccaagtgggtaaggcacaacggaatcgttcttctcttaccgcatggcatggaggggatggggcccgaacactcttcggccagacctgagcgttttctgcagatgtctaacgacgactccgacgcctacccagctttcaccaaggatttcgaggtgagccagttgtacgactgtaattggatcgtggttaactgttctactccggctaactattttcacgtgcttcgacgccagatactgcttccatttaggaaaccgttgattattttcactccaaaaagcctgttgcgccaccctgaagcaaagagcagtttcgaccaaatggtgtctggtacaagcttccaaagggtcatacccgaggacggcgctgccgcacgcgcacctgagcaggtgcagaggcttattttctgcactggaaaagtgtattacgacctcgtgaaagagaggagttcgcaggatctggaagagaaggtggctatcacaaggctggagcagataagtccatttccctttgacttgatcaagcaagaggcggagaagtaccctggcgcagaacttgcatggtgtcaggaagaacataaaaatatgggctattatgattatatttctccacggttcatgactatcctgcgccgcgctaggcctatttggtatgtgggtcgcgatcctgcggccgccccggccacaggcaacagaaacactcacctagtgagcctgaaaaagtttttggatactgcctttaacctccaagcttttgaaggaaaaactttctag

SEQ ID NO: 197426 - DNA, 2406 bp, Artificial Sequence
  derived and/or modified sequence
atgttcatcaacgacgtggagcagtgccagtggatccggcagaagttcgagactccaggagtgatgcagttctcttctgaggaaaaacggactttgctagccagactcgtgcgctcaatgcgttttgaggatttccttgcacgcaaatggtcgtccgagaagcgctttggcctcgagggttgtgaggtaatgatacccgctttaaagaccattatcgacaagagctccgagatggggatcgagaatgtgatcctgggaatgccccataggggccgactgaatgtcctggctaacgttatccgaaaagatctggaacagattttttgccagttcgatcctaagctggaggctgctgacgagggctctggcgatgtgaaataccacctcgggatgtaccatgaaagaatcaaccgagtgactaacagaaacattactttgagcctggtcgcaaacccatctcatctggaagctgtggaccctgtcgtgcagggaaagacaaaggctgagcagttctatcggggtgatgctcaggggaaaaaggtcatgtccatactagtccatggggacgctgccttcgctggacagggagtggtgtacgagacctttcacctcagtgatctgccctcctacaccacaaatggaaccgttcacgttgtggttaacaaccagatcggtttcactaccgatccacggatggccaggtcttccccatacccaacagatgttgccagagtcgttaatgctcctatctttcatgtgaatgctgatgatcccgaggctgttatttacgtgtgttcagttgccgcggaatggcggaatacatttaataaggacgttgtcgtagaccttgtatgttacagaagaagaggtcacaacgagatggacgagcccatgttcacccagccgctgatgtacaagcagattcatagacaggtcccagtattgaaaaagtatgcagacaagctgatcgccgagggaacagtaacattgcaagagtttgaggaggagattgctaagtacgaccgaatttgcgaggaagcatacggccgatctaaagacaaaaagattctccacattaaacattggctggactcaccatggcccggatttttcaatgttgacggtgaacccaaatcaatgacctgcccagcaaccggcattcccgaggacatgttgacacatataggatctgtggcctcctcagtgcctttggaagacttcaaaattcacactggcctgagccgaatcctacgcgggagagccgatatgactaaaaatcggacagtggattgggccttagccgagtatatggcctttggaagcttgctgaaggaaggaatccatgtcaggctgagcggccaggacgtcgagcgcggcaccttttcccatcggcatcacgtattgcatgaccaagaggtggacaggaggacgtgcgtccctatgaatcatttatggccagaccaggccccttatacggtctgtaacagctcactttccgagtatggagtgctcgggttcgaattgggctacgcgatggcctcccccaatgccctggtgctctgggaggctcagttcggagactttcacaacaccgcccagtgcatcatcgatcaatttattagcaccgggcaggcaaagtgggtacgccacaatggaatcgtgctgctgttgccacatggaatggagggaatggggccggagcacagcagcgcgcgccccgagaggttcctgcagatgtctaatgatgatagcgacgcctaccccgcatttacgaaggacttcgaagtgtcacagttatatgactgcaactggatcgttgtcaactgcagcacgcccgcaaattattttcatgtcctgcgccggcagattctcttgccctttcgcaaaccactcataatcttcaccccaaagtctctcctgaggcaccccgaagccaaatcgtcttttgatcaaatggtctccggcacatcatttcagcgcgtgattcccgaagacggcgctgcggcccgtgctccagagcaggtgcagcgactcattttctgtacaggaaaggtgtattacgacttggtgaaggagcgttcctcgcaggacctcgaagagaaagtcgctataactaggctcgaacagatttctcccttccccttcgatctgataaagcaggaggctgaaaaatacccaggtgccgagctggcatggtgtcaggaagagcacaagaacatgggatattacgactacatctccccgaggtttatgactattcttcgcagggccaggccgatctggtacgtgggccgggatcccgccgcagcaccggctactggaaaccgaaatacccaccttgtatccttaaaaaaattcctcgatactgcctttaatctccaagctttcgagggcaaaacattctag

SEQ ID NO: 197427 - DNA, 3704 bp, Artificial Sequence
  derived and/or modified sequence
acggcgcgcgcgcaccccttccgcgcagccccctgacctgcagcctccggacctcgctgcagcgcggacccggcccgcccgcccgaatgagtcagctgaggctgctgccgtcccgtcttggggtacaggctgcgaggctcctggctgcacatgacgtcccggtgtttggctggcgcagcaggtcctccgggccaccggccaccttcccaagcagcaaaggtggaggcggctccagttacatggaggagatgtacttcgcctggttggaaaacccccagagtgtccacaagtcctgggacagcttcttcagggaagccagcgaggaagccttttctggctctgctcagccacggcccccttctgttgtccatgagagcaggtctgcagtctcaagtcggaccaagaccagcaaattggtggaggaccacctggctgtgcagtccctgatccgggcctaccagatccggggtcaccatgtggcccagctggaccccctgggcattctggatgcagacctggactcctttgtgccctcagacttgatcacaaccattgataaactggccttctatgaccttcaggaggctgaccttgataaggagttccagctgccgacaaccaccttcattgggggctctgaaaacaccctctctctgcgggagatcattcggcgcctggagaacacctactgccagcacattggcctggagttcatgttcatcaacgatgtggagcagtgccagtggatccggcagaagtttgagacccctggtgtgatgcagttctccagcgaggagaagcggaccctgctggcccggctagtgcgctccatgaggtttgaagacttcctggcccggaaatggtcctcagagaagcggtttggcctggagggctgtgaagtgatgattcctgccctcaagaccatcatcgacaaatccagcgagatggggattgagaatgtcatcttggggatgccacacaggggaaggctgaacgtgctggccaacgtgatccgcaaggacctggagcagatcttctgccagtttgaccccaagctggaggcggcggacgagggctccggggatgtcaagtaccacctgggcatgtaccatgagaggatcaaccgcgtcaccaaccggaacatcactctgtcgctggttgccaacccctcccacctggaggcagtggaccctgtggtgcaggggaagacaaaggcagagcagttctaccgtggagatgcccagggcaagaaggtcatgtccatcctggttcatggggacgccgcctttgctggccagggcgtggtatatgagaccttccacctgagcgacctgccctcctacacgaccaatggtaccgtgcacgtcgtcgtcaacaaccagattggattcaccacagacccccgaatggcccgctcctcaccatacccgaccgacgtggcccgggtggtcaatgcgcctatcttccatgtgaatgccgatgacccagaggctgtgatatatgtgtgcagtgtggcagccgaatggagaaacactttcaacaaagatgttgtcgtggacctggtctgttaccgccggcgtggccacaatgagatggacgagcccatgttcacccagccgctcatgtacaagcagatccacagacaggtgcctgtgctgaagaagtacgcagacaagctgattgccgagggcacagtcaccctgcaggagtttgaggaagaaattgccaaatacgaccggatctgtgaggaggcttatggcaggtccaaggataaaaagattctgcatataaagcactggttggactccccctggcctggcttcttcaacgtagatggggagcccaagagcatgacatgcccagccacggggatccctgaggacatgctcacccacatcggcagtgtggccagctctgtgcccctggaggactttaagatccacactggcctctctcgcattctgcggggccgtgcggacatgaccaagaaccggacggtggactgggcgttggcagagtacatggcctttggctccctgctgaaggaaggcatccacgtgcggctcagcgggcaggatgtggagaggggcacattcagtcaccggcaccatgttctccatgaccaggaggttgaccgcaggacgtgtgtgcctatgaatcatctctggcctgaccaggccccgtacaccgtgtgcaacagctccctctcggagtacggagtcctgggctttgagctgggctatgccatggccagccccaatgccctggtcctctgggaggcccagtttggggacttccacaacacggcccagtgcatcatcgaccagttcatcagcaccggccaggccaagtgggtgcggcataatggcattgtgctgctgctgccccatggcatggaaggcatgggcccagagcactcgtcagcgaggcccgaaaggttcctgcagatgagcaatgatgactcggatgcctaccctgcattcaccaaggacttcgaggtgagccagctctatgactgcaactggatcgtggtcaactgctccacaccggccaactacttccacgtgctgcgccggcagatcctgctgcccttccgcaagccgctgattatcttcacacctaaatctctgctgaggcacccagaggccaagtccagctttgaccaaatggtatccgggaccagcttccagcgggtgattcctgaagatggggccgcagcacgggcccctgagcaggtgcagcggctcatcttctgcacgggaaaggtgtactatgacctggtgaaggagcggagcagccaggacctggaggagaaagtggccatcacgcgcctggagcagatctctccattccccttcgacctgatcaagcaggaggcagagaagtacccaggtgcggagctggcctggtgtcaggaggagcacaagaacatgggctactatgactacatcagcccacgcttcatgaccatcctgaggcgcgcacggcccatatggtatgttggccgggacccagcggctgcaccagccacaggaaacaggaacactcacctggtgtcactgaagaagtttctggatactgccttcaatctccaggcctttgagggcaagacattttagagctgggcaaaacctgtgtaggtctcgctgtgggtttgctggggaccaagggggtgatgaaaaggggaggggcggagctcctgcccaggagaggggctgtggggccccaggataaaacagacacagtgacagggccaagagccagcactgctggccttggtgtcatgccagaatctaccaggactgagggagccagaggagtcctataggcaggctactgtgctggagcatcccccagctgctcccatcttgctggaatttcttgggcggcttctccacctgtatctcaagacagacacccgggggcctgtgtctgtggccgctcccatcccggcagccctggctgctgctcgccccaccctcgcttatctgtagattcaaagcgatgttctcttctgtgctcttagaagtagggagttcagcagtaacagccaggtgaagcgaacctgctgggtgatttgtttgcgctctgttttatggggcattcctgcgagatgtgtcagcttctgtgtgaaatgcagccacagctcatgtgtaccaaagtagaaaaccaaatcacagagaaataaaaacatgcttcagaga

SEQ ID NO: 197428 - DNA, 3383 bp, Artificial Sequence
  derived and/or modified sequence
gagtctcaggggcgcgcgcccgtgggcggctgcgtcacgtgacccaggtaattggcacggcgcgcgcgcaccccttccgcgcagccccctgacctgcagcctccggacctcgctgcagcgcggacccggcccgcccgcccgatccggggtcaccatgtggcccagctggaccccctgggcattctggatgcagacctggactcctttgtgccctcagacttgatcacaaccattgataaactggccttctatgaccttcaggaggctgaccttgataaggagttccagctgccgacaaccaccttcattgggggctctgaaaacaccctctctctgcgggagatcattcggcgcctggagaacacctactgccagcacattggcctggagttcatgttcatcaacgatgtggagcagtgccagtggatccggcagaagtttgagacccctggtgtgatgcagttctccagcgaggagaagcggaccctgctggcccggctagtgcgctccatgaggtttgaagacttcctggcccggaaatggtcctcagagaagcggtttggcctggagggctgtgaagtgatgattcctgccctcaagaccatcatcgacaaatccagcgagatggggattgagaatgtcatcttggggatgccacacaggggaaggctgaacgtgctggccaacgtgatccgcaaggacctggagcagatcttctgccagtttgaccccaagctggaggcggcggacgagggctccggggatgtcaagtaccacctgggcatgtaccatgagaggatcaaccgcgtcaccaaccggaacatcactctgtcgctggttgccaacccctcccacctggaggcagtggaccctgtggtgcaggggaagacaaaggcagagcagttctaccgtggagatgcccagggcaagaaggtcatgtccatcctggttcatggggacgccgcctttgctggccagggcgtggtatatgagaccttccacctgagcgacctgccctcctacacgaccaatggtaccgtgcacgtcgtcgtcaacaaccagattggattcaccacagacccccgaatggcccgctcctcaccatacccgaccgacgtggcccgggtggtcaatgcgcctatcttccatgtgaatgccgatgacccagaggctgtgatatatgtgtgcagtgtggcagccgaatggagaaacactttcaacaaagatgttgtcgtggacctggtctgttaccgccggcgtggccacaatgagatggacgagcccatgttcacccagccgctcatgtacaagcagatccacagacaggtgcctgtgctgaagaagtacgcagacaagctgattgccgagggcacagtcaccctgcaggagtttgaggaagaaattgccaaatacgaccggatctgtgaggaggcttatggcaggtccaaggataaaaagattctgcatataaagcactggttggactccccctggcctggcttcttcaacgtagatggggagcccaagagcatgacatgcccagccacggggatccctgaggacatgctcacccacatcggcagtgtggccagctctgtgcccctggaggactttaagatccacactggcctctctcgcattctgcggggccgtgcggacatgaccaagaaccggacggtggactgggcgttggcagagtacatggcctttggctccctgctgaaggaaggcatccacgtgcggctcagcgggcaggatgtggagaggggcacattcagtcaccggcaccatgttctccatgaccaggaggttgaccgcaggacgtgtgtgcctatgaatcatctctggcctgaccaggccccgtacaccgtgtgcaacagctccctctcggagtacggagtcctgggctttgagctgggctatgccatggccagccccaatgccctggtcctctgggaggcccagtttggggacttccacaacacggcccagtgcatcatcgaccagttcatcagcaccggccaggccaagtgggtgcggcataatggcattgtgctgctgctgccccatggcatggaaggcatgggcccagagcactcgtcagcgaggcccgaaaggttcctgcagatgagcaatgatgactcggatgcctaccctgcattcaccaaggacttcgaggtgagccagctctatgactgcaactggatcgtggtcaactgctccacaccggccaactacttccacgtgctgcgccggcagatcctgctgcccttccgcaagccgctgattatcttcacacctaaatctctgctgaggcacccagaggccaagtccagctttgaccaaatggtatccgggaccagcttccagcgggtgattcctgaagatggggccgcagcacgggcccctgagcaggtgcagcggctcatcttctgcacgggaaaggtgtactatgacctggtgaaggagcggagcagccaggacctggaggagaaagtggccatcacgcgcctggagcagatctctccattccccttcgacctgatcaagcaggaggcagagaagtacccaggtgcggagctggcctggtgtcaggaggagcacaagaacatgggctactatgactacatcagcccacgcttcatgaccatcctgaggcgcgcacggcccatatggtatgttggccgggacccagcggctgcaccagccacaggaaacaggaacactcacctggtgtcactgaagaagtttctggatactgccttcaatctccaggcctttgagggcaagacattttagagctgggcaaaacctgtgtaggtctcgctgtgggtttgctggggaccaagggggtgatgaaaaggggaggggcggagctcctgcccaggagaggggctgtggggccccaggataaaacagacacagtgacagggccaagagccagcactgctggccttggtgtcatgccagaatctaccaggactgagggagccagaggagtcctataggcaggctactgtgctggagcatcccccagctgctcccatcttgctggaatttcttgggcggcttctccacctgtatctcaagacagacacccgggggcctgtgtctgtggccgctcccatcccggcagccctggctgctgctcgccccaccctcgcttatctgtagattcaaagcgatgttctcttctgtgctcttagaagtagggagttcagcagtaacagccaggtgaagcgaacctgctgggtgatttgtttgcgctctgttttatggggcattcctgcgagatgtgtcagcttctgtgtgaaatgcagccacagctcatgtgtaccaaagtagaaaaccaaatcacagagaaataaaaacatgcttcagag

SEQ ID NO: 197429 - DNA, 3033 bp, Artificial Sequence
  derived and/or modified sequence
atgagccagttgcgcctgcttccctcccggcttggggttcaggctgcaagacttctggctgcgcacgatgtgcctgtattcgggtggcgaagtcgcagtagcggacccccagcaacatttccctcaagcaagggcggtggcggttcgtcgtacatggaagagatgtacttcgcctggttagagaaccctcagtctgtgcacaagagctgggatagcttttttcgagaagcttctgaggaggcattctctggttccgcccagcccaggcccccttcagtcgttcatgagtcccgatcagccgtgtcatctcgcaccaaaacctccaaactcgtcgaggatcaccttgcagttcagtccctaattcgggcttatcagataagaggacaccacgttgcgcagcttgaccctcttggcattctggacgcagacctggattcctttgtgcctagtgatctcatcacaaccatagacaagttagctttttatgacctgcaggaggcagatctggacaaggaatttcagcttcctaccacaacttttatcggcggtagtgagaacacgctgtcactgcgcgagattattagacgcctggaaaacacgtattgtcaacacatcgggctggaattcatgttcattaacgatgtagagcaatgtcagtggattagacaaaaatttgaaacaccaggtgttatgcagttctcatccgaggagaagcggactctgttggcacggcttgtcagatccatgcgatttgaggacttcctagccaggaagtggagttctgagaagcggttcggtctggagggatgtgaagtgatgatacctgcccttaagactattatcgacaaatcaagcgaaatggggatcgaaaacgttattctgggtatgccacaccgagggagactgaatgtcctggccaatgtgatacgcaaagatcttgaacagattttttgccaatttgatcccaaattggaagcagccgacgaaggctcgggggatgtcaagtaccatctgggcatgtatcatgagcgaattaaccgagtgaccaatcggaatatcacgctgtcactggttgcaaatccttctcacctggaggcagtggatcccgtggtgcagggaaagacaaaagctgagcagttttacaggggggacgcccagggaaagaaagtgatgagcatattggtgcatggcgatgctgcattcgccggacagggcgtggtatacgaaacttttcatctctctgatctacctagctatactactaacggcactgtacatgtggtcgtcaacaaccaaattggctttaccaccgaccctcggatggcaagatccagcccgtaccccacagatgtggctagagtggtcaacgcgcctatcttccacgtgaacgccgatgatcccgaggccgtcatttatgtatgttccgtggcagccgagtggcgtaatacattcaacaaagatgtcgtggtggatctggtgtgttaccggaggaggggacataatgagatggacgagcctatgtttactcagcctcttatgtacaaacagattcataggcaggtgcccgtactgaagaaatacgcagataagctcatcgccgaggggacagtgaccctgcaagaattcgaagaggagattgcaaagtacgatcgcatctgtgaggaagcttacggccgtagcaaagacaagaaaatccttcatatcaaacactggctggactctccctggccaggcttttttaatgtggatggggagccaaaaagtatgacgtgtcctgcaaccggcattccagaggacatgctgactcatatcggaagcgtagcctcttccgtgcctctagaagattttaagattcacaccggtctgagccggattctgcggggacgcgcagacatgaccaagaacaggactgtcgactgggccctggcagaatacatggcatttggctccctgctcaaggagggcatacatgtgcgcctgtcaggtcaggacgtcgagcggggtacgttctctcataggcatcatgttttgcacgatcaggaggttgatcgacgaacgtgcgttccgatgaaccacctatggcctgaccaagcaccctataccgtgtgtaattcctcactgagcgagtacggagtactcggtttcgaactcggttatgcgatggcctcgcccaatgcactggtgctgtgggaagcccagttcggtgattttcacaacaccgcccagtgcattatcgatcaatttatctcgacaggtcaggctaaatgggtacgacacaacgggatcgtgttgctactgccacacggtatggaaggtatgggaccagaacattcatccgccaggcctgagcggtttctgcagatgtccaatgatgacagcgatgcataccctgcgttcacaaaggactttgaggtgtcccagctatacgactgtaattggattgtcgtgaactgttccaccccagccaactatttccatgtattgagacgtcagatccttctgccatttagaaagcctctgatcatattcacacccaagagcctccttaggcacccagaagccaagtcctcatttgaccagatggtcagcgggacatccttccagagggtgatcccagaagacggagccgcagcaagggcacccgaacaggtgcagagactgatcttctgtactggaaaggtttactacgatctggttaaagagcggtcaagccaggaccttgaagagaaggtggccattacccgcctagagcagatcagcccgttcccttttgatttaatcaaacaggaggccgagaagtatcccggtgccgaactggcctggtgtcaggaggagcacaagaacatgggctattacgattatatctcgccaaggttcatgacaatcttgaggcgggcacgccctatttggtacgttggaagagacccggcagctgctccagcgacaggtaatcggaatacacatttagttagcttgaaaaagtttctcgacacagcattcaatttgcaggccttcgaaggaaagacattttag

SEQ ID NO: 197430 - DNA, 2406 bp, Artificial Sequence
  derived and/or modified sequence
atgtttattaacgacgtggaacagtgtcagtggatcaggcagaaattcgagactcctggggttatgcaattttcttccgaggagaagcgcacacttctagcacgcctggtgcggtcaatgagatttgaggacttcctggccaggaaatggagttctgaaaaacgcttcggacttgaaggctgtgaagttatgatccctgcgctgaagacaataatcgacaagagcagtgagatgggcattgagaatgtgattctcgggatgccacatcgaggaagactcaacgtgcttgctaacgtgattaggaaggacctggagcagattttttgtcagtttgaccctaaactcgaagctgccgatgagggtagcggggatgtgaaataccatttgggaatgtaccacgagagaattaatcgagtcacaaaccggaacatcactctttctctagtggccaatccttcacatctggaggctgtagatccagttgtccagggcaaaaccaaagcagagcagttctatagaggggacgctcaagggaagaaggtcatgagcatcctggtgcacggggacgctgcgttcgcgggacagggcgtggtgtacgaaaccttccaccttagcgacctgccaagctatacaaccaacgggacagtacacgttgtcgttaataatcaaattggcttcacgaccgatccacgtatggctagaagctcaccatatccaactgatgtggcccgagtggttaacgcccctatattccacgtcaatgccgacgatccagaagccgtgatatatgtgtgtagcgtcgctgcagaatggcgtaacacatttaacaaggatgtcgtcgtggacctggtctgctaccggagaaggggccataatgagatggacgagccgatgttcacacaacctttaatgtacaagcaaatacaccggcaggtcccggtactgaagaagtatgccgacaagttaattgccgagggaacggtgactttacaagagttcgaagaggaaatcgcgaaatatgaccgcatttgtgaagaagcctatggcaggtccaaagataagaagatcctccacattaagcactggcttgactcaccttggccgggatttttcaacgtggatggagaaccgaagagtatgacgtgcccggctacaggcattccagaagacatgctcacccacattggctctgtggcttcttccgttccactggaggattttaaaattcacaccggtctcagcagaattttgcgcggacgcgctgatatgaccaaaaatagaactgtcgattgggccctcgccgagtacatggccttcgggtccctgttgaaggagggaatccacgtgcgcctgtctgggcaagacgtcgagaggggtacattcagccacagacaccacgtcctgcacgatcaagaggtagacaggcgcacttgtgtgccgatgaaccatctgtggcctgatcaggcaccctataccgtttgcaacagctccctgagtgagtatggggtactgggctttgagctgggctacgccatggctagtccaaacgctttggtactatgggaagcccagttcggggatttccacaacacagcacagtgcattatcgatcagtttataagcaccggtcaggcgaagtgggttagacacaacggaatcgtgcttctcctgccacacggtatggagggcatgggacctgagcacagctctgccagacctgagaggtttctccagatgagtaacgacgatagcgatgcataccccgcatttaccaaggacttcgaggtttcccagctgtatgattgtaactggatcgtggttaactgtagcacaccagcaaactacttccacgtgttgcgcagacagatactcctgcctttcagaaaacccttgataatttttactcctaaatcgctccttcgccaccctgaagccaaatcctcctttgatcagatggtgtccggaaccagctttcagagagtaattccagaggatggagcagcagctcgcgctccagaacaagtgcaacgcctgatattttgtacagggaaagtgtactatgatctggtcaaggaacggtcctctcaagatctggaggagaaggtggccattacccggctggagcagatctccccctttccctttgacctcataaaacaggaagccgagaaataccccggtgccgagctggcttggtgccaagaggaacacaagaacatgggatattacgattatatctctcctaggttcatgactatcttacgaagggcccgtcctatctggtacgtgggccgtgaccccgctgctgctccggcaacaggtaacagaaacacccacctggtgagcctgaagaaattcctcgatacagcctttaacctgcaggcgttcgagggcaaaacattctag

SEQ ID NO: 197431 - protein, 361 aa, Artificial Sequence
  derived and/or modified sequence
MAMNYNAKDEVDGGPPCAPGGTAKTRRPDNTAFKQQRLPAWQPILTAGTVLPIFFIIGLIFIPIGIGIFVTSNNIREIEIDYTGTEPSSPCNKCLSPDVTPCFCTINFTLEKSFEGNVFMYYGLSNFYQNHRRYVKSRDDSQLNGDSSALLNPSKECEPYRRNEDKPIAPCGAIANSMFNDTLELFLIGNDSYPIPIALKKKGIAWWTDKNVKFRNPPGGDNLEERFKGTTKPVNWLKPVYMLDSDPDNNGFINEDFIVWMRTAALPTFRKLYRLIERKSDLHPTLPAGRYSLNVTYNYPVHYFDGRKRMILSTISWMGGKNPFLGIAYIAVGSISFLLGVVLLVINHKYRNSSNTADITI

SEQ ID NO: 197432 - protein, 242 aa, Artificial Sequence
  derived and/or modified sequence
MYYGLSNFYQNHRRYVKSRDDSQLNGDSSALLNPSKECEPYRRNEDKPIAPCGAIANSMFNDTLELFLIGNDSYPIPIALKKKGIAWWTDKNVKFRNPPGGDNLEERFKGTTKPVNWLKPVYMLDSDPDNNGFINEDFIVWMRTAALPTFRKLYRLIERKSDLHPTLPAGRYSLNVTYNYPVHYFDGRKRMILSTISWMGGKNPFLGIAYIAVGSISFLLGVVLLVINHKYRNSSNTADITI

SEQ ID NO: 197433 - protein, 345 aa, Artificial Sequence [sequence omitted]

SEQ ID NO: 197434 - DNA, 1086 bp, Artificial Sequence
  derived and/or modified sequence
atggccatgaactacaacgccaaggacgaggtggacggcggccccccctgcgcccccggcggcaccgccaagaccagaagacccgacaacaccgccttcaagcagcagagactgcccgcctggcagcccatcctgaccgccggcaccgtgctgcccatcttcttcatcatcggcctgatcttcatccccatcggcatcggcatcttcgtgaccagcaacaacatcagagagatcgagatcgactacaccggcaccgagcccagcagcccctgcaacaagtgcctgagccccgacgtgaccccctgcttctgcaccatcaacttcaccctggagaagagcttcgagggcaacgtgttcatgtactacggcctgagcaacttctaccagaaccacagaagatacgtgaagagcagagacgacagccagctgaacggcgacagcagcgccctgctgaaccccagcaaggagtgcgagccctacagaagaaacgaggacaagcccatcgccccctgcggcgccatcgccaacagcatgttcaacgacaccctggagctgttcctgatcggcaacgacagctaccccatccccatcgccctgaagaagaagggcatcgcctggtggaccgacaagaacgtgaagttcagaaacccccccggcggcgacaacctggaggagagattcaagggcaccaccaagcccgtgaactggctgaagcccgtgtacatgctggacagcgaccccgacaacaacggcttcatcaacgaggacttcatcgtgtggatgagaaccgccgccctgcccaccttcagaaagctgtacagactgatcgagagaaagagcgacctgcaccccaccctgcccgccggcagatacagcctgaacgtgacctacaactaccccgtgcactacttcgacggcagaaagagaatgatcctgagcaccatcagctggatgggcggcaagaaccccttcctgggcatcgcctacatcgccgtgggcagcatcagcttcctgctgggcgtggtgctgctggtgatcaaccacaagtacagaaacagcagcaacaccgccgacatcaccatctag

SEQ ID NO: 197435 - DNA, 1086 bp, Artificial Sequence
  derived and/or modified sequence
atggccatgaactacaacgcaaaagatgaagtggacggtggacccccttgtgctccaggcgggacagctaagactcggagacccgacaacactgcttttaaacagcagcggctgcccgcctggcagcctatactcaccgcgggcacagtgttaccaatcttctttattattggcctgatctttatacctatcggcatcggtatcttcgtaactagtaataacatacgagagatcgagatagattacacaggaaccgagcctagcagcccctgcaacaaatgtctgtccccagacgtgacaccctgtttctgcacgattaactttacactagagaagtctttcgaaggcaacgtatttatgtactacggattatctaatttttaccaaaaccatagacgttatgtgaagtcaagagatgatagccagctgaatggcgattcaagcgcactgctgaacccctcaaaggaatgcgaaccatatcggcgcaatgaagacaagcccatcgctccgtgcggggccattgctaattccatgttcaacgatacactagagctgtttctcattgggaacgactcttatccaataccaattgctcttaaaaaaaaaggaattgcctggtggacagataaaaacgtcaaatttaggaaccctccagggggtgataaccttgaagaaagattcaaagggactactaagcccgtcaactggttaaaacccgtctatatgctggactcggacccagataacaatggcttcatcaacgaagatttcattgtgtggatgcggacagcagctttacccacttttcgcaaactatatcgcctgattgagaggaaaagcgacctccatcctacactgcccgccggcagatactcactgaacgtcacatataattacccagtgcattattttgatggaagaaagcggatgatcctgtccaccatcagctggatgggcggcaagaacccattcctaggaatcgcctacattgcagttgggagtataagttttttactcggtgtggtgctacttgtcatcaatcataagtacaggaacagttccaataccgctgacatcacaatttag

SEQ ID NO: 197436 - DNA, 1086 bp, Artificial Sequence
  derived and/or modified sequence
atggccatgaactacaatgccaaggatgaggtggatggcggccccccctgtgcccctgggggcacagccaagacccggcggccagacaacacagccttcaagcagcagaggctgcctgcctggcagcccatcctgacagctggcaccgtgctgcccatcttcttcatcatcggcctcatcttcatccccatcggcatcggcatctttgtgaccagcaacaacatccgggagattgaaattgactacacaggaacagagcccagcagcccctgcaacaagtgcctgagcccagatgtgaccccctgcttctgcaccatcaacttcaccctggagaagagctttgagggcaatgtgttcatgtactacggcctgagcaacttctaccagaaccaccggcgctacgtgaagagcagagatgacagccagctgaatggagacagcagcgccctgctgaaccccagcaaagaatgtgagccctacagaagaaatgaagacaagcccatcgccccctgtggggccatcgccaacagcatgtttaatgacaccctggagctgttcctgattggaaatgacagctaccccatccccatcgccctgaagaagaagggcatcgcctggtggacagacaagaatgtgaagttcagaaatcctcctggaggagacaacctggaggagcgcttcaagggcaccaccaagcctgtgaactggctgaagcctgtgtacatgctggacagcgaccctgacaacaacggcttcatcaatgaagacttcatcgtgtggatgaggacagctgccctgcccaccttcaggaagctgtaccgcctcatcgagaggaagagtgacctgcaccccaccctgcctgctggccgctacagcctgaatgtgacctacaactaccctgtgcactactttgatggcaggaagaggatgatcctgagcaccatctcctggatgggcggcaagaaccccttcctgggcatcgcctacatcgctgtgggcagcatctccttcctgctgggcgtggtgctgctggtgatcaaccacaagtacagaaacagcagcaacacagctgacatcaccatctag

SEQ ID NO: 197437 - DNA, 1086 bp, Artificial Sequence
  derived and/or modified sequence
atggccatgaactacaacgccaaggacgaggtggacggcggccccccatgtgctcctggcggaactgcaaagacccgcagaccagacaacaccgctttcaagcaacagaggctccctgcatggcagcctatcctgactgcaggcaccgtgctcccaatcttcttcatcatcggactaatattcatccccattggaattggcatctttgtgacctcgaataacatccgggagatcgagatcgactatactggaactgaacctagcagtccatgcaataaatgcctctctcccgacgttaccccatgcttctgcaccattaacttcacactggagaaaagcttcgagggcaacgtgtttatgtactatggtttgtccaacttttatcagaatcataggcgctatgtcaaaagcagggatgactcccagcttaatggcgacagtagcgccttgttaaacccgtcaaaagaatgtgaaccttatagacgaaacgaagacaagcccatagcaccttgtggcgctatcgccaactccatgtttaatgatacacttgagttattcttgataggcaacgactcatatccgatccccattgcattaaagaaaaaggggatcgcctggtggacagacaagaacgtgaagtttcgcaatccacctgggggagataatcttgaggagcgctttaagggaaccaccaagccagttaactggttgaagccagtctatatgctggactctgaccccgacaataatggcttcataaatgaggactttattgtgtggatgcgcaccgctgctctgcccaccttccggaagttgtatcgtttaattgagaggaaatccgacttgcaccccactctccccgccggaagatatagtctgaacgtcacatacaattatccagtgcactattttgatgggcgcaagagaatgatcctgtcaacaattagttggatgggcggaaaaaacccttttctgggtatcgcatacatcgccgttgggtcaatctcatttttactgggagtagtgcttttagtcattaatcacaagtatagaaattcctcaaatacggccgatatcacaatctag

SEQ ID NO: 197438 - DNA, 1086 bp, Artificial Sequence
  derived and/or modified sequence
atggccatgaactataacgcaaaagacgaagtggatggcggacccccttgcgctccaggaggaactgcgaaaaccagacgcccagataacaccgcttttaagcagcagaggctacctgcgtggcagcctatcctgacagccggaactgttttaccgatcttttttataattggcctgatcttcatccccatcggcattggaatattcgtgacttccaacaacattcgagaaatcgagatcgattacacaggtactgagccatcttcaccttgcaacaagtgcttgagtccggatgtaaccccttgcttttgcacaatcaacttcactttggagaaaagcttcgaggggaacgtcttcatgtactatggcctgtccaatttctatcaaaaccaccgcagatacgtgaaatctagggatgactcacagttgaatggggactcatctgccttgctgaatcctagcaaagaatgcgagccataccggaggaacgaggacaagcctattgctccttgcggggcaattgcgaatagtatgtttaatgacactcttgaactgtttctgattggtaatgattcctaccctatcccaatcgccttaaaaaagaaaggaatcgcctggtggactgataaaaatgtgaaattccgtaaccctcccggaggcgataatctggaggagcgttttaaaggcacgacgaagccagtgaattggttgaaacccgtctatatgctggacagtgatcccgataataatgggttcattaacgaagatttcatcgtgtggatgaggactgccgcactccccacatttcgaaaactgtaccgtttgatcgagagaaagtcagacctgcaccccacactgcccgcaggtagatatagcttgaacgtcacctataattacccggtccactacttcgacggacggaagcggatgattttgtcgaccatttcgtggatggggggaaaaaatcccttcctcgggattgcatatattgccgtgggttcgatcagtttcctgctgggggttgtccttctggtgattaatcacaagtacaggaactcctccaacacagctgatataactatttag

SEQ ID NO: 197439 - DNA, 1038 bp, Artificial Sequence
  derived and/or modified sequence
atggccatgaactacaccgccaagaccagaagacccgacaacaccgccttcaagcagcagagactgcccgcctggcagcccatcctgaccgccggcaccgtgctgcccatcttcttcatcatcggcctgatcttcatccccatcggcatcggcatcttcgtgaccagcaacaacatcagagagatcgagatcgactacaccggcaccgagcccagcagcccctgcaacaagtgcctgagccccgacgtgaccccctgcttctgcaccatcaacttcaccctggagaagagcttcgagggcaacgtgttcatgtactacggcctgagcaacttctaccagaaccacagaagatacgtgaagagcagagacgacagccagctgaacggcgacagcagcgccctgctgaaccccagcaaggagtgcgagccctacagaagaaacgaggacaagcccatcgccccctgcggcgccatcgccaacagcatgttcaacgacaccctggagctgttcctgatcggcaacgacagctaccccatccccatcgccctgaagaagaagggcatcgcctggtggaccgacaagaacgtgaagttcagaaacccccccggcggcgacaacctggaggagagattcaagggcaccaccaagcccgtgaactggctgaagcccgtgtacatgctggacagcgaccccgacaacaacggcttcatcaacgaggacttcatcgtgtggatgagaaccgccgccctgcccaccttcagaaagctgtacagactgatcgagagaaagagcgacctgcaccccaccctgcccgccggcagatacagcctgaacgtgacctacaactaccccgtgcactacttcgacggcagaaagagaatgatcctgagcaccatcagctggatgggcggcaagaaccccttcctgggcatcgcctacatcgccgtgggcagcatcagcttcctgctgggcgtggtgctgctggtgatcaaccacaagtacagaaacagcagcaacaccgccgacatcaccatctag

SEQ ID NO: 197440 - DNA, 342 bp, Artificial Sequence
  derived and/or modified sequence
atggaggagagagcccagcactgcctgagcagactgctggacaacagcgccctgaagcagcaggagctgcccatccacagactgtacttcaccgccagaagagtgctgttcgtgttcttcgccaccggcatcttctgcctgtgcatgggcatcatcctgatcctgagcgccagaagcacccaggagatcgagatcaactacaccagaatctgcgccaactgcgccaagctgagagagaacgccagcaacttcgacaaggagtgcacctgcagcatccccttctacctgagcggcaagatgatggtgggcgagatccaggagaccagactgaccctgcactag

SEQ ID NO: 197441 - DNA, 1038 bp, Artificial Sequence
  derived and/or modified sequence
atggccatgaattacactgccaagacgcgtcgtcccgataatactgctttcaagcaacagaggctgccagcttggcagccaattctgacggcaggcacagtgctacctatcttttttatcattggcctcatcttcatccctatcggcatcgggatatttgtcacttcaaacaatatccgggaaatcgaaattgattacaccggcaccgagccatcgtcaccgtgtaataaatgtctgagccccgacgtgacaccatgtttttgcaccattaactttaccctggagaaaagcttcgagggtaatgtcttcatgtactatgggttgagcaatttttaccaaaaccatcgccgatacgtcaagtccagagatgatagccagcttaatggtgattctagcgctctgctgaacccgagcaaggaatgcgagccctataggcgtaacgaggacaaacctatcgccccatgcggagctattgcgaacagcatgtttaatgacacactggagctcttcctgataggtaatgattcctatccaatacccatagccctcaagaaaaaggggatcgcgtggtggacagataagaacgtgaagttccgcaaccctcccggcggggataatctcgaagagcgctttaagggcacaaccaaaccggtcaattggctgaagcctgtgtacatgcttgattccgaccccgacaacaatgggttcattaacgaagacttcatcgtatggatgcgcactgctgctctgcctaccttcaggaaattatacaggttgatcgaaaggaagtccgacttgcaccccactctccctgcagggaggtactcactgaacgtgacctacaactatccagtacactactttgatggcagaaagcggatgatactttccaccatctcctggatgggtggcaagaacccgtttctgggaatcgcctacatcgctgttggatccataagtttcctgctcggcgtcgtccttctagtgattaatcataaatatcggaattcttctaacaccgcagacattacaatttag

SEQ ID NO: 197442 - DNA, 342 bp, Artificial Sequence
  derived and/or modified sequence
atggaggaaagggcgcagcactgcctttcgcgcctattggataatagcgccctgaaacagcaggagttgccaatccatcgcctgtatttcacggcacgtagagtactcttcgtctttttcgccactggcatcttctgtctctgcatgggcattatcttgatcctgtctgctcgctctacacaagaaattgagatcaattacacacggatctgtgcaaactgtgcaaagctccgcgagaatgcatctaactttgataaggaatgtacttgttccattcctttttacttaagcggtaagatgatggtgggagaaatccaagagacgcggctcactctccactag

SEQ ID NO: 197443 - DNA, 1038 bp, Artificial Sequence
  derived and/or modified sequence
atggccatgaactacacagccaagacccggcggccagacaacacagccttcaagcagcagaggctgcctgcctggcagcccatcctgacagctggcaccgtgctgcccatcttcttcatcatcggcctcatcttcatccccatcggcatcggcatctttgtgaccagcaacaacatccgggagattgaaattgactacacaggaacagagcccagcagcccctgcaacaagtgcctgagcccagatgtgaccccctgcttctgcaccatcaacttcaccctggagaagagctttgagggcaatgtgttcatgtactacggcctgagcaacttctaccagaaccaccggcgctacgtgaagagcagagatgacagccagctgaatggagacagcagcgccctgctgaaccccagcaaagaatgtgagccctacagaagaaatgaagacaagcccatcgccccctgtggggccatcgccaacagcatgtttaatgacaccctggagctgttcctgattggaaatgacagctaccccatccccatcgccctgaagaagaagggcatcgcctggtggacagacaagaatgtgaagttcagaaatcctcctggaggagacaacctggaggagcgcttcaagggcaccaccaagcctgtgaactggctgaagcctgtgtacatgctggacagcgaccctgacaacaacggcttcatcaatgaagacttcatcgtgtggatgaggacagctgccctgcccaccttcaggaagctgtaccgcctcatcgagaggaagagtgacctgcaccccaccctgcctgctggccgctacagcctgaatgtgacctacaactaccctgtgcactactttgatggcaggaagaggatgatcctgagcaccatctcctggatgggcggcaagaaccccttcctgggcatcgcctacatcgctgtgggcagcatctccttcctgctgggcgtggtgctgctggtgatcaaccacaagtacagaaacagcagcaacacagctgacatcaccatctag

SEQ ID NO: 197444 - DNA, 342 bp, Artificial Sequence
  derived and/or modified sequence
atggaggagcgggcccagcactgcctgagccggctgctggacaacagcgccctgaagcagcaggagctgcccatccaccggctgtacttcaccgccaggagagtgctgtttgtgttctttgccaccggcatcttctgcctgtgcatgggcatcatcctgatcctgagcgcccggagcacccaggagattgagatcaactacacccgcatctgtgccaactgtgccaagctgagagaaaatgccagcaactttgacaaggaatgtacctgcagcatccccttctacctgagcggcaagatgatggtgggggagatccaggagacccggctgaccctgcactag

SEQ ID NO: 197445 - DNA, 1038 bp, Artificial Sequence
  derived and/or modified sequence
atggccatgaactacaccgccaagacccggcggcccgacaacaccgcatttaagcagcagagattaccagcttggcagcctattttgacagcgggtaccgtgctgccaatattttttattattggactcatttttatccctatcgggatcggcattttcgtgacaagtaacaatatccgggagatcgagatagactataccggtacagaaccatcttccccgtgcaataaatgtctgagccctgatgtgacaccttgtttctgtactattaacttcaccctggagaaatcttttgaagggaatgtctttatgtattacggactttctaacttttaccagaaccaccgaaggtatgtgaaaagcagagatgattcccagctcaatggtgactcttccgccctcctcaatccatcaaaagagtgtgagccctaccgtaggaatgaggacaaacctatagccccatgtggggctatcgcaaatagtatgtttaacgatactctggagctgtttttgattggaaatgactcatatcctatccctattgccctcaaaaagaaaggtattgcctggtggacagacaagaatgtaaagttcaggaaccctccagggggggacaatttggaggaacggttcaagggtaccaccaagcctgtgaactggctgaagcctgtttacatgctggattctgatcctgataacaacggctttatcaacgaggacttcatcgtgtggatgagaactgccgcactgcccacatttagaaagctttatcggctcatcgaacggaaatctgaccttcaccctacactcccagccggccgttacagtttaaatgtgacttataactacccggttcactattttgacgggagaaaaagaatgatattatccaccatctcatggatgggaggcaagaatcccttcttgggcatagcttatattgccgtaggatctatctcattcttattgggcgtggtgctcttagttatcaatcacaagtatcgcaacagtagcaatacggcggacatcaccatttag

SEQ ID NO: 197446 - DNA, 342 bp, Artificial Sequence
  derived and/or modified sequence
atggaggagcgggcccagcactgcctgagccggctgctggacaacagcgctttgaagcaacaagaactgccgatacatcggttatacttcaccgctcgcagggtcctcttcgtcttcttcgccactggtatcttttgtttatgtatgggcattatactcatcctgagcgccaggagcacccaagagatcgagatcaactacacccggatctgcgcgaattgtgcgaaactgcgggaaaatgcctcaaattttgacaaggaatgcacctgttccatccccttttacctgagcggtaagatgatggtgggagagattcaagaaacgagacttaccctgcactag

SEQ ID NO: 197447 - DNA, 1038 bp, Artificial Sequence
  derived and/or modified sequence
atggccatgaattataccgccaagactaggcgccctgacaatacagccttcaagcagcaacgcctccctgcctggcagcccattctcacagcaggaaccgtgctacccatttttttcatcatagggctcatcttcatcccgattggaataggcatattcgtcacaagcaataacattcgcgaaatcgagattgattatacaggaactgaaccctcaagcccatgcaataagtgtctgtcgccggacgttactccctgcttttgcaccatcaacttcaccctcgagaaatccttcgagggaaacgtgtttatgtactatggactgtccaatttctaccagaatcaccgtaggtatgtgaaatcgcgtgatgattctcagttaaacggggattccagtgcactgcttaacccctccaaggagtgcgaaccctacagacgtaacgaggataagcctattgccccttgtggagccatcgctaactcgatgtttaacgatacgctggagctgtttctgatcggcaacgactcataccccattcccattgcactgaagaaaaaaggtatagcttggtggaccgacaagaatgtgaaattcaggaatcccccaggaggggacaacctggaggaaaggtttaagggaaccactaagcctgttaattggcttaaacccgtgtatatgctggattccgacccagataacaatggatttatcaacgaagatttcatcgtttggatgcgcactgcagctctaccaacttttcgcaaactgtaccggctcatcgagaggaagtccgacctgcatcccacgcttccagcagggcgttattccctgaatgtgacttacaattacccggtgcactacttcgacggccgaaagaggatgatcctgtcaacaatctcttggatgggagggaagaaccccttcctcggtattgcgtatattgcagtcggatccatttctttcctcctgggggtagttctgttggtaattaaccacaagtaccggaattcctctaatacagcagacatcaccatctag

SEQ ID NO: 197448 - DNA, 342 bp, Artificial Sequence
  derived and/or modified sequence
atggaagagcgagcacagcattgtctgagccgcttactagacaattccgcacttaagcaacaggaactccccattcaccgactgtattttacagccaggcgcgttctgtttgtgttcttcgcaaccggaatattctgcttatgtatgggaatcatcctgattctaagtgccaggtccacacaggagatcgagataaattatacgcgcatttgtgccaactgcgcaaaactgagggaaaatgccagtaacttcgataaagaatgtacctgcagcattcctttctacctgtccggtaagatgatggtgggcgaaattcaggaaactcgcctcacgttacattag

SEQ ID NO: 197449 - DNA, 4594 bp, Artificial Sequence
  derived and/or modified sequence
cccgtcacaggacagatgatcagggtgcgtccgccttttcgttcccgcttctatcctcctcccctttcccctccccatgtccctccttcttctccctcctccctctctccctccctctggcgtctccagccgactttcgcttcccgtcagcagcctttggcggaagagtgtcccgcctcttccgctctacagcggaggtggctgtggcggtggcgctggtggctgcggcggcggcggcggcagcggcgctcgagcggttcctgtcagggtcagccggcgggccccctgggtggtccacctgcaaatcgcggagcggcgccccagggatcgatggcgatgaactataacgcgaaggatgaagtggacggtgggcccccgtgtgctccggggggcaccgcgaagactcggagaccggataacacggccttcaaacagcaacggctgccagcttggcagcccatccttacggctggcacggtgctacctattttcttcatcatcggtctcatcttcattcccatcggcattggcatttttgtcacctccaacaacatccgcgagatcgagattgattataccggaacagagccttccagtccctgtaataaatgtttatctccggatgtgacaccttgcttttgtaccattaacttcacactggaaaagtcatttgagggcaacgtgtttatgtattatggactgtctaatttctatcaaaaccatcgtcgttacgtgaaatctcgagatgatagtcaactaaatggagattctagtgctttgcttaatcccagtaaggaatgtgaaccttatcgaagaaatgaagacaaaccaattgctccttgtggagctattgccaacagcatgtttaatgatacattagaattgtttctcattggcaatgattcttatcctatacctatcgctttgaaaaagaaaggtattgcttggtggacagataaaaatgtgaaattcagaaatccccctggaggagacaacctggaagaacgatttaaaggtacaacaaagcctgtgaactggcttaaaccagtttacatgctggattctgacccagataataatggattcataaatgaggattttattgtttggatgcgtactgcagcattacctacttttcgcaagttgtatcgtcttatagaaaggaaaagtgatttacatccaacattaccagctggccgatactctttgaatgtcacatacaattaccctgtacattattttgatggacgaaaacggatgatcttgagcactatttcatggatgggaggaaaaaatccatttttggggattgcttacatcgctgttggatccatctccttccttctgggagttgtactgctagtaattaatcataaatatagaaacagtagtaatacagctgacattaccatttaattttatattatgaaagcaaatcatctgcatgtgcatcaaggccagtcctattcaacctagctttcgaatgctgatatctggttagtatgtcattttgaagttggcacataacttttctaaaaaaaagcagtctttgttgtttgcttcttccctacggatgacttctaaaaatatatgacgggtataaaaaaattagctatattgatcatatcaacactgtaactgctgaaatggcattctaatgtttgctttttattcggacaggccacatgatgcatagagcctctttcatgtgacttgtgtctactgcttaaatctttatgctgtgttgatgatattatattgacatatgaagctgtatatgtgtatgtattttgtggagaaagggattacaagatgtatgagtataatgacttgctaacctttcaggattcagagaaagatgaagaaagaccatatctaaataatacacttcatcattttcatgtgtataaatgcttaaagtaccatctttgttgaggtggttcatgtatccagtttatccagtacagttatttgtcaagcttagctttgatttcaaaggacacgcttaccttgtctggcataagaattaatgctcatgtctgcagtggttgggtaggtcctgcttaggagaattaaaaaattcctctttccgtttggttgaatgttgcagtcaggaaccccaactcacttggaatgtttttatatgtaatcatttcccttgaagcttatactttataagggaagaaagaattcaggtgatatgggaaaactgcttggcagaccttcatcttctgcctcaactgtaaaccacatgtaagtgcttaatggagactgttttcattcttgtgatatttaacattcagaaaattacttcagctttggaaatactcaggctgtttttattctgcaggtaagtgttttgacttaagtactaatattccagaaatttttgaaagcagtaaccttaatttcctatgtatttcattccacttttgcatataggtcaaatagcaatgtgtatgcacattctctttagttaaggcaccaattgttttggttggttttcctaagacatactttaaaaagatgttctataaatttcctaattaaattatggggattttggagtatgtacatgataaattataatatgtatatggttgaagttattttattttttactaatgaattattttaatattccttattgaataaatgctgtaacttgtttgctatggaacttattcttaaagttctagttaaaaataatttttccacatgcatgaaaatatgtattaatcagaggtggcttaattacattgaaattgcttttttgttgttgtttttttactgaaataactcatgtttgtgtagaagaatgcctgtttactcagagtttatattttccttcagttatattttaaatcaaaaggtctgggtaatgtatacttttgattaatatatactttttttaaaaaacaaaaaacaatgtaatggttaatagtagaaatgtgccacacttttcaagttttatataacatatgaaattcagttaaaagaatgtgtgtttcataatgacttttaactggtaaaaatattacttgcacgaagtacttgatgtatggttatcctgaaatttcggagtatttggtgtgttctttgtctaaaaatagtctgttttgtcagtccttcagaatattatttattctgaagattgtccctcttgcacttggcagtttattttcggggatacattgttgggggagaggggtttctgccactctttccagattgagtctgtgctgtttaaggaggactaccatcctgcaactctttttctaactggggcacagaggatgtcgctaaagaaaagttgaagagccctttcagcactttctcatctgtggagaagatggaatcttaaaatacatttggagttttatctgttttacaagtccattgatggcctaagttcctcctgttttctgctgtttgatctctaaggaactcctgttgctaaatatgaagagtatggaacattcgtatagtctctgtgaagcatggggggagggaagacatttctttttcttataggctttatgctcaaatgtcatagtctcctttcaaagaattgtgttgcattttaaatgcacccagcttaagtagaagacattgaaggatgcattaattttcaggaactattttgaattatgaaaagattcccaattgaaaaaattattcaacaagtaaaagctaagaaatttcattgaaatcataaggcagtttaagcataaattgataaaaatagctgtgtactactaattaatagaaaatcattcaaccaagagaagagtcaagtgaatatcgtttgtttatttgctagtgagtttctttgtaacgttgattttattaaatgataatatttggttagtatgtcctatgttaataaaaatgaacaaaattaattttgctatgttcaggtgtcttgataaaataacaatgctccagtgttgttgcttacatttagcactaaattttaacacagcgtcagtgagtccaggttttaacttcttcatgcctggatgggataaaatgtaattcattgttaaattaattcatatttgtatttattaatcactgtgacaacattaaccatttgttcttaccaggaagtggtcagattatcatctgagttacagttagactggctaagtttggtattagatcaaggggaatgtccagtaaacagagaggtaagcatgatggaaataatgaagtggggtacacaggaaaaacctgactagtgaggaggagcagctgagagatagggtcagtgaatgcggttcagcctgctacctctcctgtcttcatagaaccattgccttagaattattgtatgacacattttttgttggttaagctgtaaggttttgttctttgtgaacatgggtattttgaggggagggtggagggagtagggaagtggtccttttacaagaattttgatgcataagtgtctattgtagggtttggatgatctagtaaagtgttttagaacccctttttatcccatgcaccattcagtaaacataaaaatcacaattctgctaatgtcatttggaacttcaaaataaatatcttgtctaaaaacaaa

SEQ ID NO: 197450 - DNA, 3775 bp, Artificial Sequence
  derived and/or modified sequence
acactggctaccatgggtttatggagaggaagaacccatctctccctttggtttctgaagtgggaggtggagccctgcatccttccaaaactcacaatggacagttccacaaaacttggaaacaattccagcaattgccagggtaattgtatttttaaaatgagatgatgtgtgttagataatcagtgccatgaagaaaagtcagcatagagacagaggacctctcagaaacgcagtctttactttctgcagaaagggcgctccttgaagatggaacaatggtgagagcacacttgaacaaaggaaaagcaacatatttatcccttatgcatttggatcatccttactgtcgtatcctgcatccattggctggagctggacctcacagttttaaactgatacccgatttgctaataacctaaaactttcctaaatagattgattataccggaacagagccttccagtccctgtaataaatgtttatctccggatgtgacaccttgcttttgtaccattaacttcacactggaaaagtcatttgagggcaacgtgtttatgtattatggactgtctaatttctatcaaaaccatcgtcgttacgtgaaatctcgagatgatagtcaactaaatggagattctagtgctttgcttaatcccagtaaggaatgtgaaccttatcgaagaaatgaagacaaaccaattgctccttgtggagctattgccaacagcatgtttaatgatacattagaattgtttctcattggcaatgattcttatcctatacctatcgctttgaaaaagaaaggtattgcttggtggacagataaaaatgtgaaattcagaaatccccctggaggagacaacctggaagaacgatttaaaggtacaacaaagcctgtgaactggcttaaaccagtttacatgctggattctgacccagataataatggattcataaatgaggattttattgtttggatgcgtactgcagcattacctacttttcgcaagttgtatcgtcttatagaaaggaaaagtgatttacatccaacattaccagctggccgatactctttgaatgtcacatacaattaccctgtacattattttgatggacgaaaacggatgatcttgagcactatttcatggatgggaggaaaaaatccatttttggggattgcttacatcgctgttggatccatctccttccttctgggagttgtactgctagtaattaatcataaatatagaaacagtagtaatacagctgacattaccatttaattttatattatgaaagcaaatcatctgcatgtgcatcaaggccagtcctattcaacctagctttcgaatgctgatatctggttagtatgtcattttgaagttggcacataacttttctaaaaaaaagcagtctttgttgtttgcttcttccctacggatgacttctaaaaatatatgacgggtataaaaaaattagctatattgatcatatcaacactgtaactgctgaaatggcattctaatgtttgctttttattcggacaggccacatgatgcatagagcctctttcatgtgacttgtgtctactgcttaaatctttatgctgtgttgatgatattatattgacatatgaagctgtatatgtgtatgtattttgtggagaaagggattacaagatgtatgagtataatgacttgctaacctttcaggattcagagaaagatgaagaaagaccatatctaaataatacacttcatcattttcatgtgtataaatgcttaaagtaccatctttgttgaggtggttcatgtatccagtttatccagtacagttatttgtcaagcttagctttgatttcaaaggacacgcttaccttgtctggcataagaattaatgctcatgtctgcagtggttgggtaggtcctgcttaggagaattaaaaaattcctctttccgtttggttgaatgttgcagtcaggaaccccaactcacttggaatgtttttatatgtaatcatttcccttgaagcttatactttataagggaagaaagaattcaggtgatatgggaaaactgcttggcagaccttcatcttctgcctcaactgtaaaccacatgtaagtgcttaatggagactgttttcattcttgtgatatttaacattcagaaaattacttcagctttggaaatactcaggctgtttttattctgcaggtaagtgttttgacttaagtactaatattccagaaatttttgaaagcagtaaccttaatttcctatgtatttcattccacttttgcatataggtcaaatagcaatgtgtatgcacattctctttagttaaggcaccaattgttttggttggttttcctaagacatactttaaaaagatgttctataaatttcctaattaaattatggggattttggagtatgtacatgataaattataatatgtatatggttgaagttattttattttttactaatgaattattttaatattccttattgaataaatgctgtaacttgtttgctatggaacttattcttaaagttctagttaaaaataatttttccacatgcatgaaaatatgtattaatcagaggtggcttaattacattgaaattgcttttttgttgttgtttttttactgaaataactcatgtttgtgtagaagaatgcctgtttactcagagtttatattttccttcagttatattttaaatcaaaaggtctgggtaatgtatacttttgattaatatatactttttttaaaaaacaaaaaacaatgtaatggttaatagtagaaatgtgccacacttttcaagttttatataacatatgaaattcagttaaaagaatgtgtgtttcataatgacttttaactggtaaaaatattacttgcacgaagtacttgatgtatggttatcctgaaatttcggagtatttggtgtgttctttgtctaaaaatagtctgttttgtcagtccttcagaatattatttattctgaagattgtccctcttgcacttggcagtttattttcggggatacattgttgggggagaggggtttctgccactctttccagattgagtctgtgctgtttaaggaggactaccatcctgcaactctttttctaactggggcacagaggatgtcgctaaagaaaagttgaagagccctttcagcactttctcatctgtggagaagatggaatcttaaaatacatttggagttttatctgttttacaagtccattgatggcctaagttcctcctgttttctgctgtttgatctctaaggaactcctgttgctaaatatgaagagtatggaacattcgtatagtctctgtgaagcatggggggagggaagacatttctttttcttataggctttatgctcaaatgtcatagtctcctttcaaagaattgtgttgcattttaaatgcacccagcttaagtagaagacattgaaggatgcattaattttcaggaactattttgaattatgaaaagattcccaattgaaaaaattattcaacaagtaaaagctaagaaatttcattgaaatcataaggcagtttaagcataaattgataaaaatagctgtgtactactaattaatagaaaatcattcaaccaagagaagagtcaagtgaatatcgtttgtttatttgctagtgagtttctttgtaacgttgattttattaaatgataatatttggttagtatgtcctatgttaataaaaatgaacaaaattaa

SEQ ID NO: 197451 - DNA, 445 bp, Artificial Sequence
  derived and/or modified sequence
agttgactggctgacctcgcgccgtccaccacccccttccctctgtttctctgttttttctttctctttctgcgggtttcctgaatttgcagattgattataccggaacagagccttccagtccctgtaataaatgtttatctccggatgtgacaccttgcttttgtaccattaacttcacactggaaaagtcatttgagggcaacgtgtttatgtattatggactgtctaatttctatcaaaaccatcgtcgttacgtgaaatctcgagatgatagtcaactaaatggagattctagtgctttgcttaatcccagtaaggaatgtgaaccttatcgaagaaatgaagacaaaccaattgctccttgtggagctattgccaacagcatgtttaatgatacattagaattgtttctcattggcaatgattcttatcctatacctat

SEQ ID NO: 197452 - DNA, 4207 bp, Artificial Sequence
  derived and/or modified sequence
atggcgatgaactataccgcgaagactcggagaccggataacacggccttcaaacagcaacggctgccagcttggcagcccatccttacggctggcacggtgctacctattttcttcatcatcggtctcatcttcattcccatcggcattggcatttttgtcacctccaacaacatccgcgagatcgagattgattataccggaacagagccttccagtccctgtaataaatgtttatctccggatgtgacaccttgcttttgtaccattaacttcacactggaaaagtcatttgagggcaacgtgtttatgtattatggactgtctaatttctatcaaaaccatcgtcgttacgtgaaatctcgagatgatagtcaactaaatggagattctagtgctttgcttaatcccagtaaggaatgtgaaccttatcgaagaaatgaagacaaaccaattgctccttgtggagctattgccaacagcatgtttaatgatacattagaattgtttctcattggcaatgattcttatcctatacctatcgctttgaaaaagaaaggtattgcttggtggacagataaaaatgtgaaattcagaaatccccctggaggagacaacctggaagaacgatttaaaggtacaacaaagcctgtgaactggcttaaaccagtttacatgctggattctgacccagataataatggattcataaatgaggattttattgtttggatgcgtactgcagcattacctacttttcgcaagttgtatcgtcttatagaaaggaaaagtgatttacatccaacattaccagctggccgatactctttgaatgtcacatacaattaccctgtacattattttgatggacgaaaacggatgatcttgagcactatttcatggatgggaggaaaaaatccatttttggggattgcttacatcgctgttggatccatctccttccttctgggagttgtactgctagtaattaatcataaatatagaaacagtagtaatacagctgacattaccatttaattttatattatgaaagcaaatcatctgcatgtgcatcaaggccagtcctattcaacctagctttcgaatgctgatatctggttagtatgtcattttgaagttggcacataacttttctaaaaaaaagcagtctttgttgtttgcttcttccctacggatgacttctaaaaatatatgacgggtataaaaaaattagctatattgatcatatcaacactgtaactgctgaaatggcattctaatgtttgctttttattcggacaggccacatgatgcatagagcctctttcatgtgacttgtgtctactgcttaaatctttatgctgtgttgatgatattatattgacatatgaagctgtatatgtgtatgtattttgtggagaaagggattacaagatgtatgagtataatgacttgctaacctttcaggattcagagaaagatgaagaaagaccatatctaaataatacacttcatcattttcatgtgtataaatgcttaaagtaccatctttgttgaggtggttcatgtatccagtttatccagtacagttatttgtcaagcttagctttgatttcaaaggacacgcttaccttgtctggcataagaattaatgctcatgtctgcagtggttgggtaggtcctgcttaggagaattaaaaaattcctctttccgtttggttgaatgttgcagtcaggaaccccaactcacttggaatgtttttatatgtaatcatttcccttgaagcttatactttataagggaagaaagaattcaggtgatatgggaaaactgcttggcagaccttcatcttctgcctcaactgtaaaccacatgtaagtgcttaatggagactgttttcattcttgtgatatttaacattcagaaaattacttcagctttggaaatactcaggctgtttttattctgcaggtaagtgttttgacttaagtactaatattccagaaatttttgaaagcagtaaccttaatttcctatgtatttcattccacttttgcatataggtcaaatagcaatgtgtatgcacattctctttagttaaggcaccaattgttttggttggttttcctaagacatactttaaaaagatgttctataaatttcctaattaaattatggggattttggagtatgtacatgataaattataatatgtatatggttgaagttattttattttttactaatgaattattttaatattccttattgaataaatgctgtaacttgtttgctatggaacttattcttaaagttctagttaaaaataatttttccacatgcatgaaaatatgtattaatcagaggtggcttaattacattgaaattgcttttttgttgttgtttttttactgaaataactcatgtttgtgtagaagaatgcctgtttactcagagtttatattttccttcagttatattttaaatcaaaaggtctgggtaatgtatacttttgattaatatatactttttttaaaaaacaaaaaacaatgtaatggttaatagtagaaatgtgccacacttttcaagttttatataacatatgaaattcagttaaaagaatgtgtgtttcataatgacttttaactggtaaaaatattacttgcacgaagtacttgatgtatggttatcctgaaatttcggagtatttggtgtgttctttgtctaaaaatagtctgttttgtcagtccttcagaatattatttattctgaagattgtccctcttgcacttggcagtttattttcggggatacattgttgggggagaggggtttctgccactctttccagattgagtctgtgctgtttaaggaggactaccatcctgcaactctttttctaactggggcacagaggatgtcgctaaagaaaagttgaagagccctttcagcactttctcatctgtggagaagatggaatcttaaaatacatttggagttttatctgttttacaagtccattgatggcctaagttcctcctgttttctgctgtttgatctctaaggaactcctgttgctaaatatgaagagtatggaacattcgtatagtctctgtgaagcatggggggagggaagacatttctttttcttataggctttatgctcaaatgtcatagtctcctttcaaagaattgtgttgcattttaaatgcacccagcttaagtagaagacattgaaggatgcattaattttcaggaactattttgaattatgaaaagattcccaattgaaaaaattattcaacaagtaaaagctaagaaatttcattgaaatcataaggcagtttaagcataaattgataaaaatagctgtgtactactaattaatagaaaatcattcaaccaagagaagagtcaagtgaatatcgtttgtttatttgctagtgagtttctttgtaacgttgattttattaaatgataatatttggttagtatgtcctatgttaataaaaatgaacaaaattaattttgctatgttcaggtgtcttgataaaataacaatgctccagtgttgttgcttacatttagcactaaattttaacacagcgtcagtgagtccaggttttaacttcttcatgcctggatgggataaaatgtaattcattgttaaattaattcatatttgtatttattaatcactgtgacaacattaaccatttgttcttaccaggaagtggtcagattatcatctgagttacagttagactggctaagtttggtattagatcaaggggaatgtccagtaaacagagaggtaagcatgatggaaataatgaagtggggtacacaggaaaaacctgactagtgaggaggagcagctgagagatagggtcagtgaatgcggttcagcctgctacctctcctgtcttcatagaaccattgccttagaattattgtatgacacattttttgttggttaagctgtaaggttttgttctttgtgaacatgggtattttgaggggagggtggagggagtagggaagtggtccttttacaagaattttgatgcataagtgtctattgtagggtttggatgatctagtaaagtgttttagaacccctttttatcccatgcaccattcagtaaacataaaaatcacaattctgctaatgtcatttggaacttcaaaataaatatcttgtct

SEQ ID NO: 197453 - DNA, 444 bp, Artificial Sequence
  derived and/or modified sequence
atggaggagagagcacagcactgcctgtccagattactagacaactctgccctgaagcagcaggagttacccatccaccggctatatttcacggccaggagagtcctctttgtctttttcgcaacaggaatattctgcctttgtatgggcatcatccttatattgtctgcaaggagcactcaggaaatagagattaattacacaagaatatgtgcaaattgtgcaaaactgcgagaaaatgcctctaattttgacaaggaatgcacctgctctattcccttttacctttcaggaaaaatgatggtaggtgaaattcaagaaactcggttgactttacactgatctattcctatgtaacacttagcagtaagttcacaatttccatgaaatgctttccaaaactgaaaatatgaaacataaagcaggatggtggtggtgaatccg

SEQ ID NO: 197454 - protein, 605 aa, Artificial Sequence
  derived and/or modified sequence
MVEGPGCTLNGEKIRARVLPGQAVTGVRGSALRSLQGRALRLAASTVVVSPQAAALNNDSSQNVLSLFNGYVYSGVETLGKELFMYFGPKALRIHFGMKGFIMINPLEYKYKNGASPVLEVQLTKDLICFFDSSVELRNSMESQQRIRMMKELDVCSPEFSFLRAESEVKKQKGRMLGDVLMDQNVLPGVGNIIKNEALFDSGLHPAVKVCQLTDEQIHHLMKMIRDFSILFYRCRKAGLALSKHYKVYKRPNCGQCHCRITVCRFGDNNRMTYFCPHCQKENPQHVDICKLPTRNTIISWTSSRVDHVMDSVARKSEEHWTCVVCTLINKPSSKACDACLTSRPIDSVLKSEENSTVFSHLMKYPCNTFGKPHTEVKINRKTAFGTTTLVLTDFSNKSSTLERKTKQNQILDEEFQNSPPASVCLNDIQHPSKKTTNDITQPSSKVNISPTISSESKLFSPAHKKPKTAQYSSPELKSCNPGYSNSELQINMTDGPRTLNPDSPRCSKHNRLCILRVVGKDGENKGRQFYACPLPREAQCGFFEWADLSFPFCNHGKRSTMKTVLKIGPNNGKNFFVCPLGKEKQCNFFQWAENGPGIKIIPGC

SEQ ID NO: 197455 - DNA, 1818 bp, Artificial Sequence
  derived and/or modified sequence
atggtggagggccccggctgcaccctgaacggcgagaagatcagagccagagtgctgcccggccaggccgtgaccggcgtgagaggcagcgccctgagaagcctgcagggcagagccctgagactggccgccagcaccgtggtggtgagcccccaggccgccgccctgaacaacgacagcagccagaacgtgctgagcctgttcaacggctacgtgtacagcggcgtggagaccctgggcaaggagctgttcatgtacttcggccccaaggccctgagaatccacttcggcatgaagggcttcatcatgatcaaccccctggagtacaagtacaagaacggcgccagccccgtgctggaggtgcagctgaccaaggacctgatctgcttcttcgacagcagcgtggagctgagaaacagcatggagagccagcagagaatcagaatgatgaaggagctggacgtgtgcagccccgagttcagcttcctgagagccgagagcgaggtgaagaagcagaagggcagaatgctgggcgacgtgctgatggaccagaacgtgctgcccggcgtgggcaacatcatcaagaacgaggccctgttcgacagcggcctgcaccccgccgtgaaggtgtgccagctgaccgacgagcagatccaccacctgatgaagatgatcagagacttcagcatcctgttctacagatgcagaaaggccggcctggccctgagcaagcactacaaggtgtacaagagacccaactgcggccagtgccactgcagaatcaccgtgtgcagattcggcgacaacaacagaatgacctacttctgcccccactgccagaaggagaacccccagcacgtggacatctgcaagctgcccaccagaaacaccatcatcagctggaccagcagcagagtggaccacgtgatggacagcgtggccagaaagagcgaggagcactggacctgcgtggtgtgcaccctgatcaacaagcccagcagcaaggcctgcgacgcctgcctgaccagcagacccatcgacagcgtgctgaagagcgaggagaacagcaccgtgttcagccacctgatgaagtacccctgcaacaccttcggcaagccccacaccgaggtgaagatcaacagaaagaccgccttcggcaccaccaccctggtgctgaccgacttcagcaacaagagcagcaccctggagagaaagaccaagcagaaccagatcctggacgaggagttccagaacagcccccccgccagcgtgtgcctgaacgacatccagcaccccagcaagaagaccaccaacgacatcacccagcccagcagcaaggtgaacatcagccccaccatcagcagcgagagcaagctgttcagccccgcccacaagaagcccaagaccgcccagtacagcagccccgagctgaagagctgcaaccccggctacagcaacagcgagctgcagatcaacatgaccgacggccccagaaccctgaaccccgacagccccagatgcagcaagcacaacagactgtgcatcctgagagtggtgggcaaggacggcgagaacaagggcagacagttctacgcctgccccctgcccagagaggcccagtgcggcttcttcgagtgggccgacctgagcttccccttctgcaaccacggcaagagaagcaccatgaagaccgtgctgaagatcggccccaacaacggcaagaacttcttcgtgtgccccctgggcaaggagaagcagtgcaacttcttccagtgggccgagaacggccccggcatcaagatcatccccggctgctag

SEQ ID NO: 197456 - DNA, 1818 bp, Artificial Sequence
  derived and/or modified sequence
atggtcgagggaccaggctgtactcttaacggagaaaaaatcagggcccgcgtcttacccggacaagcggtgacaggtgtcagggggtccgccctgcggtctctccagggccgcgctcttagactcgctgctagcactgttgtggtaagtcctcaggccgctgctttaaataatgatagctcacagaacgtactgtctttatttaatggatacgtttactctggcgtggagacattgggtaaggaactcttcatgtatttcggcccgaaagccttgcgaattcattttggcatgaaaggctttatcatgatcaaccccctggaatacaaatacaaaaatggtgcctccccggtgctcgaggtccagctcacgaaagacctgatttgcttttttgattcaagcgtggaattgaggaattccatggaatcacaacagagaattcgtatgatgaaagaattagacgtgtgctctcccgagtttagctttctccgcgcggagtctgaggtcaagaagcagaaaggccgaatgctaggtgatgtcctcatggaccaaaacgtgctcccgggggtgggcaacattatcaaaaatgaagctctgttcgacagcggcctgcaccctgcagttaaggtgtgtcaactgactgatgagcaaattcatcatctgatgaagatgattagagatttctctatacttttttatcggtgtcggaaggccggccttgcattgtcaaagcattataaggtatataaacggcctaattgcggccagtgtcactgtcggattacagtgtgcaggtttggcgataataatcgtatgacatatttctgtcctcactgtcaaaaagagaacccacagcatgttgacatctgcaagctgccaacaaggaacaccatcatcagctggactagcagccgcgtggaccatgtgatggattctgtagcccgcaaatcggaagagcattggacctgtgtcgtgtgtaccctcataaacaagccttcctcaaaggcatgcgatgcgtgcttgacttcaagacctatagacagtgtcttaaaaagcgaggaaaatagcacagtctttagccatcttatgaagtatccgtgcaacacctttggcaagccccatacagaagtcaaaattaatagaaaaactgcctttggcacgacaacactggtgctgaccgatttttccaataaatctagcacactcgagcggaaaaccaaacaaaaccagattcttgacgaggaattccagaattctcctcccgccagtgtgtgtctaaatgacatccagcatccatccaagaagactaccaacgacatcactcagccctcaagcaaggtgaatatatctcccaccataagcagcgaaagtaaattgttttctcctgcacacaaaaagccaaagacagcccagtactcgtcacctgagttgaaaagctgtaatcccggctactccaatagcgagctgcagattaatatgaccgatggcccacgtacgttgaatcctgatagccctcggtgttccaagcataatcgcctgtgtattttaagagttgtgggcaaggatggagagaacaagggtcgacaattctatgcatgtcccctgccccgcgaggctcagtgcggctttttcgagtgggcagacctttccttccctttctgtaaccatggaaaacgttccaccatgaaaaccgtgttgaaaatcgggccaaataacggaaaaaatttcttcgtgtgtccgctgggcaaagagaagcagtgcaatttctttcagtgggctgagaacggccccggcataaagatcatccccggctgctag

SEQ ID NO: 197457 - DNA, 1818 bp, Artificial Sequence
  derived and/or modified sequence
atggtggagggccctggctgcaccctgaatggagagaagatccgggcccgggtgctgcccggccaggccgtgactggagtgcggggcagcgccctgcggagcctgcagggccgggccctgcggctggccgccagcacagtggtggtgagcccccaggccgccgccctgaacaatgacagcagccagaatgtgctgagcctcttcaacggctacgtgtacagcggcgtggagaccctgggcaaggagctgttcatgtacttcggccccaaggccctgcgcatccacttcggcatgaagggcttcatcatgatcaaccccctggagtacaagtacaagaatggagccagccctgtgctggaggtgcagctgaccaaggacctgatctgcttctttgacagctctgtggagctgaggaacagcatggagagccagcagaggatccgcatgatgaaggagctggatgtgtgcagccctgagttctccttcctgcgggcagagagcgaggtgaagaagcagaagggccgcatgctgggagatgtgctgatggaccagaatgtgctgcccggggtgggcaacatcatcaagaatgaggccctgtttgacagcggcctgcaccctgctgtgaaggtgtgccagctgacagatgagcagatccaccacctgatgaagatgatccgggacttcagcatcctcttctaccgctgcaggaaggccggcctggccctgagcaagcactacaaggtgtacaagaggcccaactgtggccagtgccactgccgcatcaccgtgtgccgctttggagacaacaacaggatgacctacttctgcccccactgccagaaggagaacccccagcacgtggacatctgcaagctgcccaccaggaacaccatcatctcctggaccagcagccgggtggaccacgtgatggacagcgtggccaggaagtctgaggagcactggacctgtgtggtgtgcaccctcatcaacaagcccagcagcaaggcctgtgatgcctgcctgaccagccggcccatcgacagcgtgctgaagtctgaggagaacagcacagtgttcagccacctgatgaagtacccctgcaacaccttcggcaagccccacacagaggtgaagatcaacaggaagacagccttcggcaccaccaccctggtgctgacagacttcagcaacaagagcagcaccctggagaggaagaccaagcagaaccagatcctggatgaggagttccagaacagccccccagcctctgtgtgcctgaatgacatccagcaccccagcaagaagaccaccaatgacatcacccagcccagcagcaaggtgaacatcagccccaccatcagcagcgagagcaagctgttcagccctgcccacaagaagcccaagacagcccagtacagcagccctgagctgaagagctgcaaccctggctacagcaacagcgagctgcagatcaacatgacagatggccccaggaccctgaacccagacagcccccgctgcagcaagcacaaccggctgtgcatcctgcgggtggtgggcaaggatggagagaacaagggccggcagttctacgcctgccccctgccccgggaggcccagtgtggcttctttgagtgggccgacctgtccttccccttctgcaaccacggcaagaggagcaccatgaagacagtgctgaagattggccccaacaacgggaagaacttctttgtgtgccccctgggcaaggagaagcagtgcaacttcttccagtgggccgagaatggacctggcatcaagatcatccctggctgctag

SEQ ID NO: 197458 - DNA, 1818 bp, Artificial Sequence
  derived and/or modified sequence
atggtggagggccccggctgcaccctgaacggcgagaagatccgggccagagtactacctgggcaggccgtcaccggcgtcagaggctcagcccttcgatccctgcaggggcgggccctaaggctggcggcctcaactgttgtggtcagtccgcaggctgccgctttaaacaacgactccagccagaacgtacttagcttgttcaacggatatgtgtatagcggagtggagacgctgggcaaggaactcttcatgtacttcgggccaaaagccctgaggatacacttcggtatgaaaggttttattatgattaatccgctggaatacaaatataagaatggagctagccccgtgttggaagtgcagctgacgaaagacctgatttgttttttcgacagctcagtagaattgaggaacagcatggagtcccagcagaggattcgcatgatgaaggagctggacgtatgctctcccgaattctccttcctgagagcagaaagcgaggtcaaaaagcaaaagggcaggatgctgggcgacgttcttatggaccaaaatgttctgcccggagtcggcaatatcattaaaaatgaagcactctttgatagcggactgcatccggccgttaaggtgtgtcaactgacagatgagcagatacaccatctaatgaagatgattagagatttttccatccttttctaccggtgccgaaaggccgggctcgcactttctaaacactacaaggtgtataagagacctaactgtggacaatgccattgccgcatcacagtctgtcgcttcggagataacaacaggatgacctacttctgtccccactgccagaaagagaatccacagcatgtggatatatgtaagttacctacccgcaacacaatcatctcgtggacgagttcccgggtagatcatgtgatggattctgtggccaggaaaagcgaggaacactggacatgtgtggtgtgcacccttattaataagccaagcagcaaagcatgcgatgcatgcctgacatcaagacctatcgactcggtgctcaagtcagaagagaactcaaccgtgttctcccatctgatgaaatatccgtgcaatacatttgggaaacctcacactgaggtcaaaatcaacaggaagacagcgttcgggacgacgacgctcgtgctaacagatttcagtaacaagtcctctaccctcgaaagaaagacaaagcagaatcaaattctcgacgaggagtttcagaattcgccccccgccagtgtgtgcctgaatgatatccaacacccttctaaaaagacaaccaacgacataacgcagccttcctccaaagttaatatcagcccgaccatctccagcgaatctaaactgtttagtcccgctcacaaaaaacctaagactgcacagtactctagtcccgagttgaaaagttgcaatcctggctactctaatagtgagctccagatcaacatgaccgacggcccgagaacattgaatcctgattcacctcgctgctccaaacacaatcggctttgcattctcagggtggtgggtaaagacggggaaaacaaggggagacagttttatgcatgtcccctgcctcgggaggcccagtgtggcttcttcgagtgggcagatctcagttttccattctgcaaccacgggaaaaggtctacaatgaagactgtgctcaaaattgggcctaataatgggaaaaatttcttcgtttgtcctctcggaaaagagaagcagtgtaacttctttcagtgggccgaaaatggtcctggaatcaaaataattcccggatgctag

SEQ ID NO: 197459 - DNA, 2408 bp, Artificial Sequence
  derived and/or modified sequence
agacgcgcgcgagatttgaatttcctctgcgtgcggtcagtgcccgcgcagcgttgagttgcacagcggtattctcaccaggccctgcaatcggtgggccacagtgccggccacagagatggtggaaggaccaggctgtactctgaatggagagaagattcgcgcgcgggtgctcccgggccaggcggtgaccggcgtgcggggaagcgctctgcggagtctgcagggccgcgccttgcggctcgcagcctccacggttgtggtctccccgcaggctgctgcactgaataatgattccagccagaatgtcttgagcctgtttaatggatatgtttacagtggcgtggaaactttggggaaggagctctttatgtactttggaccaaaagctttacggattcatttcggaatgaaaggcttcatcatgattaatccacttgagtataaatataaaaatggagcttctcctgttttggaagtgcagctcaccaaagatttgatttgtttctttgactcatcagtagaactcagaaactcaatggaaagccaacagagaataagaatgatgaaagaattagatgtatgttcacctgaatttagtttcttgagagcagaaagtgaagttaaaaaacagaaaggccggatgctaggtgatgtgctaatggatcagaacgtattgcctggagtagggaacatcatcaaaaatgaagctctctttgacagtggtctccacccagctgttaaagtttgtcaattaacagatgaacagatccatcacctcatgaaaatgatacgtgatttcagcattctcttttacaggtgccgtaaagcaggacttgctctctctaaacactataaggtttacaagcgtcctaattgtggtcagtgccactgcagaataactgtgtgccgctttggggacaataacagaatgacatatttctgtcctcactgtcaaaaagaaaatcctcaacatgttgacatatgcaagctaccgactagaaatactataatcagttggacatctagcagggtggatcatgttatggactccgtggctcggaagtcggaagagcactggacctgtgtggtgtgtactttaatcaataagccctcttctaaggcatgtgatgcttgcttgacctcaaggcctattgattcagtgctcaagagtgaagaaaattctactgtctttagccacttaatgaagtacccgtgtaatacttttggaaaacctcatacagaagtcaagatcaacagaaaaactgcatttggaactacaactcttgtcttgactgattttagcaataaatccagtactttggaaagaaaaacaaagcaaaaccagatactagatgaggagtttcaaaactctcctcctgctagtgtttgtttgaatgatatacagcacccctccaagaagacaacaaacgatataactcaaccatccagcaaagtaaacatatcacctacaatcagttcagaatctaaattatttagtccagcacataaaaaaccgaaaacagcccaatactcatcaccagagcttaaaagctgcaaccctggatattctaacagtgaacttcaaattaatatgacagatggccctcgtaccttaaatcctgacagccctcgctgcagtaaacacaaccgcctctgcattctccgagttgtggggaaggatggggaaaacaagggcaggcagttttatgcctgtcctctacctagagaagcacaatgtggattttttgaatgggcagatttgtccttcccattctgcaaccatggcaagcgttccaccatgaaaacagtattgaagattggacctaacaatggaaagaatttttttgtgtgtcctcttgggaaggaaaaacaatgcaattttttccagtgggcagaaaatgggccaggaataaaaattattcctggatgctaatatctgtagattctctggcatttagtctcttcaaactgtgtataatgtttggtcctcctctgtttcatagaaaagtcatagaatatctatgatacattgaaaagttactgcaatatttgagaactgttctttttttttcttgtgtgtgccatctttccattgttggctacgtcttttcttttgccttgatgaacgttctatgtatttcatcggatatacagcatattccatttaggatgtgtatttaatgcatttagtaatgacgataaagtgtttttagtatgcttttagtctcttgtaactggggagaagcagtgttttttttttaggaaaggattatgcgacacaataaaataagatattctgtctgtagtgaatacatttctcatgtactaacactatttataatatatgattaaagatatttcttgttttattaaataataagaaataagatctcctttatgaacaa

SEQ ID NO: 197460 - DNA, 1818 bp, Artificial Sequence
  derived and/or modified sequence
atggtggaaggccctggctgcactcttaacggcgagaagatccgtgcccgagtcctgccaggccaggctgttacaggagttcgcggaagcgctcttcggtcgctccagggtagagctctgcgactcgcggcatccaccgtggtggtgtctccacaggcggcagcgctgaataatgattctagtcagaatgtgctaagtctgttcaacggatatgtatatagcggcgttgaaaccttgggcaaggagctgttcatgtacttcgggccaaaggcgttgagaatccatttcggcatgaaaggtttcataatgatcaatcccctggaatacaagtataagaatggggcatctcctgtgctggaggtacagctcacaaaggaccttatctgttttttcgacagctctgtagagctgaggaatagcatggagagccaacaaagaattcggatgatgaaggaactcgacgtgtgttctcctgagttcagcttcttaagagccgaatcagaagtgaagaaacaaaaaggccgtatgctgggagacgtactcatggaccaaaatgtcctcccgggtgtcgggaacatcattaaaaacgaggctctgttcgattccggcctgcatcccgctgtgaaggtgtgtcagctgacggatgagcagatccaccacctgatgaagatgattagagactttagtatcctgttctaccgatgtagaaaagccggactggctctgagcaaacattacaaggtttataagaggcccaactgtggtcagtgtcattgcaggatcactgtctgtaggttcggagataataatagaatgacctacttctgtccgcactgccagaaggagaaccctcagcacgtcgacatatgtaagctgccaactaggaacaccattatctcctggactagtagcagggtggatcacgtaatggactccgtagccagaaaatctgaggaacattggacttgtgtggtgtgcactctcattaacaagccttctagtaaggcatgtgatgcctgtctcacatccagaccaatcgatagtgtcctcaagagtgaagaaaattccaccgtgtttagccatctgatgaagtatccctgtaacacctttggcaaaccccacactgaggtgaaaatcaacagaaaaacagccttcggcacaacgacactggtgctaaccgatttttcaaataaatcgagtactctggagcgaaagactaaacaaaaccagattctagatgaggagttccagaattcccccccagcaagcgtgtgtctgaacgacatccagcaccctagcaaaaagaccaccaacgacattactcaacccagctcgaaggtgaacatatcccccacaatcagctccgagtctaagctgtttagccccgcacataaaaagcctaagaccgctcagtactcatctcctgagctcaaaagttgcaatcctggctacagtaacagtgagctccaaattaacatgacagatggacctcgtaccttaaaccctgacagtccaagatgttccaagcacaacaggctgtgcattttaagggtggtcggcaaggatggagagaataaagggaggcagttttatgcatgtcctctccccagagaagcacagtgcggcttttttgagtgggccgatctgagtttccctttctgtaatcacggaaaacgcagtacaatgaagaccgtgttgaagatcggtcccaataacgggaaaaatttttttgtctgccctctcgggaaagaaaagcagtgtaatttctttcagtgggcggaaaacgggcctggtataaaaatcatcccaggttgctag

SEQ ID NO: 197461 - protein, 1893 aa, Artificial Sequence
  derived and/or modified sequence
MMDLVLEEDVTVPGTLSGCSGLVPSVPDDLDGINPNAGLGNGLLPNVSEETVSPTRARNMKDFENQITELKKENFNLKLRIYFLEERMQQEFHGPTEHIYKTNIELKVEVESLKRELQEREQLLIKASKAVESLAEAGGSEIQRVKEDARKKVQQVEDLLTKRILLLEKDVTAAQAELEKAFAGTETEKALRLRLESKLSEMKKMHEGDLAMALVLDEKDRLIEELKLSLKSKEALIQCLKEEKSQMACPDENVSSGELRGLCAAPREEKERETEAAQMEHQKERNSFEERIQALEEDLREKEREIATEKKNSLKRDKAIQGLTMALKSKEKKVEELNSEIEKLSAAFAKAREALQKAQTQEFQGSEDYETALSGKEALSAALRSQNLTKSTENHRLRRSIKKITQELSDLQQERERLEKDLEEAHREKSKGDCTIRDLRNEVEKLRNEVNEREKAMENRYKSLLSESNKKLHNQEQVIKHLTESTNQKDVLLQKFNEKDLEVIQQNCYLMAAEDLELRSEGLITEKCSSQQPPGSKTIFSKEKKQSSDYEELIQVLKKEQDIYTHLVKSLQESDSINNLQAELNKIFALRKQLEQDVLSYQNLRKTLEEQISEIRRREEESFSLYSDQTSYLSICLEENNRFQVEHFSQEELKKKVSDLIQLVKELYTDNQHLKKTIFDLSCMGFQGNGFPDRLASTEQTELLASKEDEDTIKIGEDDEINFLSDQHLQQSNEIMKDLSKGGCKNGYLRHTESKISDCDGAHAPGCLEEGAFINLLAPLFNEKATLLLESRPDLLKVVRELLLGQLFLTEQEVSGEHLDGKTEKTPKQKGELVHFVQTNSFSKPHDELKLSCEAQLVKAGEVPKVGLKDASVQTVATEGDLLRFKHEATREAWEEKPINTALSAEHRPENLHGVPGWQAALLSLPGITNREAKKSRLPILIKPSRSLGNMYRLPATQEVVTQLQSQILELQGELKEFKTCNKQLHQKLILAEAVMEGRPTPDKTLLNAQPPVGAAYQDSPGEQKGIKTTSSVWRDKEMDSDQQRSYEIDSEICPPDDLASLPSCKENPEDVLSPTSVATYLSSKSQPSAKVSVMGTDQSESINTSNETEYLKQKIHDLETELEGYQNFIFQLQKHSQCSEAIITVLCGTEGAQDGLSKPKNGSDGEEMTFSSLHQVRYVKHVKILGPLAPEMIDSRVLENLKQQLEEQEYKLQKEQNLNMQLFSEIHNLQNKFRDLSPPRYDSLVQSQARELSLQRQQIKDGHGICVISRQHMNTMIKAFEELLQASDVDYCVAEGFQEQLNQCAELLEKLEKLFLNGKSVGVEMNTQNELMERIEEDNLTYQHLLPESPEPSASHALSDYETSEKSFFSRDQKQDNETEKTSVMVNSFSQDLLMEHIQEIRTLRKRLEESIKTNEKLRKQLERQGSEFVQGSTSIFASGSELHSSLTSEIHFLRKQNQALNAMLIKGSRDKQKENDKLRESLSRKTVSLEHLQREYASVKEENERLQKEGSEKERHNQQLIQEVRCSGQELSRVQEEVKLRQQLLSQNDKLLQSLRVELKAYEKLDEEHRRLREASGEGWKGQDPFRDLHSLLMEIQALRLQLERSIETSSTLQSRLKEQLARGAEKAQEGALTLAVQAVSIPEVPLQPDKHDGDKYPMESDNSFDLFDSSQAVTPKSVSETPPLSGNDTDSLSCDSGSSATSTPCVSRLVTGHHLWASKNGRHVLGLIEDYEALLKQISQGQRLLAEMDIQTQEAPSSTSQELGTKGPHPAPLSKFVSSVSTAKLTLEEAYRRLKLLWRVSLPEDGQCPLHCEQIGEMKAEVTKLHKKLFEQEKKLQNTMKLLQLSKRQEKVIFDQLVVTHKILRKARGNLELRPGGAHPGTCSPSRPGS

SEQ ID NO: 197462 - protein, 1852 aa, Artificial Sequence
  derived and/or modified sequence
MMDLVLEEDVTVPGTLSGCSGLVPSVPDDLDGINPNAGLGNGLLPNVSEETVSPTRARNMKDFENQITELKKENFNLKLRIYFLEERMQQEFHGPTEHIYKTNIELKVEVESLKRELQEREQLLIKASKAVESLAEAGGSEIQRVKEDARKKVQQVEDLLTKRILLLEKDVTAAQAELEKAFAGTETEKALRLRLESKLSEMKKMHEGDLAMALVLDEKDRLIEELKLSLKSKEALIQCLKEEKSQMACPDENVSSGELRGLCAAPREEKERETEAAQMEHQKERNSFEERIQALEEDLREKEREIATEKKNSLKRDKAIQGLTMALKSKEKKVEELNSEIEKLSAAFAKAREALQKAQTQEFQGSEDYETALSGKEALSAALRSQNLTKSTENHRLRRSIKKITQELSDLQQERERLEKDLEEAHREKSKGDCTIRDLRNEVEKLRNEVNEREKAMENRYKSLLSESNKKLHNQEQVIKHLTESTNQKDVLLQKFNEKDLEVIQQNCYLMAAEDLELRSEGLITEKCSSQQPPGSKTIFSKEKKQSSDYEELIQVLKKEQDIYTHLVKSLQESDSINNLQAELNKIFALRKQLEQDVLSYQNLRKTLEEQISEIRRREEESFSLYSDQTSYLSICLEENNRFQVEHFSQEELKKKVSDLIQLVKELYTDNQHLKKTIFDLSCMGFQGNGFPDRLASTEQTELLASKEDEDTIKIGEDDEINFLSDQHLQQSNEIMKDLSKGGCKNGYLRHTESKISDCDGAHAPGCLEEGAFINLLAPLFNEKATLLLESRPDLLKVVRELLLGQLFLTEQEVSGEHLDGKTEKTPKQKGELVHFVQTNSFSKPHDELKLSCEAQLVKAGEVPKVGLKDASVQTVATEGDLLRFKHEATREAWEEKPINTALSAEHRPENLHGVPGWQAALLSLPGITNREAKKSRLPILIKPSRSLGNMYRLPATQEVVTQLQSQILELQGELKEFKTCNKQLHQKLILAEAVMEGRPTPDKTLLNDSEICPPDDLASLPSCKENPEDVLSPTSVATYLSSKSQPSAKVSVMGTDQSESINTSNETEYLKQKIHDLETELEGYQNFIFQLQKHSQCSEAIITVLCGTEGAQDGLSKPKNGSDGEEMTFSSLHQVRYVKHVKILGPLAPEMIDSRVLENLKQQLEEQEYKLQKEQNLNMQLFSEIHNLQNKFRDLSPPRYDSLVQSQARELSLQRQQIKDGHGICVISRQHMNTMIKAFEELLQASDVDYCVAEGFQEQLNQCAELLEKLEKLFLNGKSVGVEMNTQNELMERIEEDNLTYQHLLPESPEPSASHALSDYETSEKSFFSRDQKQDNETEKTSVMVNSFSQDLLMEHIQEIRTLRKRLEESIKTNEKLRKQLERQGSEFVQGSTSIFASGSELHSSLTSEIHFLRKQNQALNAMLIKGSRDKQKENDKLRESLSRKTVSLEHLQREYASVKEENERLQKEGSEKERHNQQLIQEVRCSGQELSRVQEEVKLRQQLLSQNDKLLQSLRVELKAYEKLDEEHRRLREASGEGWKGQDPFRDLHSLLMEIQALRLQLERSIETSSTLQSRLKEQLARGAEKAQEGALTLAVQAVSIPEVPLQPDKHDGDKYPMESDNSFDLFDSSQAVTPKSVSETPPLSGNDTDSLSCDSGSSATSTPCVSRLVTGHHLWASKNGRHVLGLIEDYEALLKQISQGQRLLAEMDIQTQEAPSSTSQELGTKGPHPAPLSKFVSSVSTAKLTLEEAYRRLKLLWRVSLPEDGQCPLHCEQIGEMKAEVTKLHKKLFEQEKKLQNTMKLLQLSKRQEKVIFDQLVVTHKILRKARGNLELRPGGAHPGTCSPSRPGS

SEQ ID NO: 197463 - DNA, 5682 bp, Artificial Sequence
  derived and/or modified sequence
atgatggacctggttcttgaagaggacgtcacggtgcccggcacactaagcggctgctccggactggtgccttcggtcccggacgacctggacggaatcaacccaaacgctgggctgggaaacggattactgccaaacgttagtgaggagacggtgtcacccacccgtgcaagaaatatgaaggacttcgaaaatcagatcactgaactgaagaaagagaatttcaatttaaaattgaggatctattttttagaggaacggatgcaacaggaatttcatggacccaccgaacatatctataaaacaaacatcgaactcaaggtcgaggtcgagagccttaaacgcgagttacaagaacgcgaacagctgctaattaaagcgtctaaagccgttgaatcacttgctgaggcgggtgggagtgaaatacagagggtcaaggaagacgcccgaaaaaaagtgcagcaagtcgaggatctgcttaccaagcgtattcttttgctggagaaggacgtcacggcagcccaggccgagctggaaaaggcctttgccggaacagagacagaaaaagcattacgtctgcggctcgagtccaagctttctgagatgaagaaaatgcacgagggcgaccttgccatggctctagtgcttgatgagaaggatagattaattgaagagctcaagctttccctcaagtccaaagaggcccttatccagtgcctcaaagaagaaaagagccagatggcttgtccagacgagaatgtgagctccggagaactgaggggactttgtgctgctcctagagaagagaaggaaagggagaccgaggccgcccagatggagcaccagaaggagagaaattcgttcgaagaacggatccaggccctggaggaggatctaagggaaaaagagcgcgaaatcgctacagaaaaaaagaattcactaaaacgcgacaaagctatccaagggttgaccatggctttgaaatctaaagagaagaaagtggaagagctgaactctgaaatagaaaaattgagcgcagcattcgccaaagccagggaggccctgcagaaggcacagacccaagagttccagggatcagaggattacgagacggctctgagcggaaaggaggcattgagcgctgcactgcggagccagaacctgaccaagtctacagaaaatcatcgactcagaagaagtattaaaaaaattacacaagaactgtccgatttacagcaagagagagaacgactagaaaaagacctggaagaagcccatagggagaagtcaaagggagattgcacaatacgcgaccttaggaatgaagtagagaagctgcgaaacgaggtgaacgaacgggagaaggcaatggaaaatcgttataagtcgcttctcagtgagtcaaataaaaagctacataatcaggaacaagtcatcaaacatctgaccgagtccacaaaccagaaggacgtcctcttgcaaaagtttaatgaaaaggatcttgaggtgatccagcaaaactgctacctgatggccgctgaagacctggaactgcgtagtgagggacttataacggagaaatgctccagccagcaaccacctggtagtaaaaccattttttccaaggaaaagaaacagagcagtgattacgaggaactaatccaggtattaaagaaagaacaagacatttatacccacctcgtgaaaagccttcaggaaagtgacagcatcaataatctccaagccgagctgaataagatatttgcccttcgcaagcagcttgaacaggatgtgctgagctaccaaaacctgcgcaagactctggaagagcagatttccgagatacgccgacgcgaagaggagtccttctctttatactctgaccaaacgtcttacctgtctatctgccttgaggagaataacaggttccaggtggaacacttttcccaagaagagcttaaaaagaaggtcagcgaccttatccagctcgtgaaagaactgtatactgacaatcagcacctgaagaagaccatttttgatcttagctgtatgggctttcaggggaacggattccccgaccgactggctagtaccgaacaaacagagctactggcatctaaagaggatgaagatacgatcaagatcggggaagatgacgagataaatttcctgtctgaccagcacctgcaacagagcaatgaaataatgaaagacctctccaaaggtggatgtaagaacggttacttgcgacacacagagtccaagatctccgactgcgatggagcacacgctcctggttgcttagaagaaggagcgtttatcaacctgctcgcccccctatttaatgagaaggcgaccttattgctggagtctcgaccggatctgttgaaggtggtgcgagaactgctgctcggtcagctgtttctcactgagcaggaggtctcaggcgaacacctcgacggaaaaactgaaaagaccccgaaacagaagggtgaactggtgcatttcgtccagactaatagtttttcaaagcctcatgacgagctgaaactgtcctgtgaagcccagctggtgaaggctggcgaggttcccaaagtggggctcaaagatgcctccgtgcagacagtcgccaccgagggagacctattgagatttaagcacgaggcaactcgcgaagcctgggaagaaaagcccatcaacacggctcttagtgcggagcatcgtccagagaacctgcacggtgttcccgggtggcaagccgcgttgctgagcttgccaggcatcacaaaccgggaggcaaaaaagagccgactgcctattcttatcaagccgtcgcgctccctcggcaatatgtatcgtctgcctgctacccaggaggttgtcactcagctgcagagccagattctggagctacagggcgaactcaaagagtttaaaacttgcaataaacaactgcaccagaagctgatccttgcagaggctgtgatggaagggcggcccactcctgacaagacattgttgaatgcccagccaccagtgggggcagcctatcaagactcgcctggcgaacagaaaggcattaaaaccacctcctcagtttggagagataaggaaatggatagcgatcagcagagatcctatgagattgattcagaaatatgcccacccgacgacctcgcctccctgccttcctgcaaggaaaatcccgaagatgtcctgtctccaacgagcgtggccacctatctcagtagcaaatctcagccatccgcaaaggtgtccgtgatggggacagatcagtccgaaagtatcaacacaagcaacgaaactgaatatctaaaacagaaaatccacgatctcgagactgagctcgaggggtatcagaacttcattttccagctgcagaaacattcccaatgcagcgaagcgatcatcacagtgttgtgtggaactgagggggcacaggatggcctctcgaagcctaaaaatggatcagacggagaggaaatgacctttagttctctgcaccaagttagatatgtgaaacacgtaaagatcttaggcccactcgctccagagatgatcgatagccgcgttttagaaaaccttaaacaacaactcgaggagcaggaatataagctgcaaaaggagcagaacctcaacatgcaactattttccgagattcataatctacagaataaattcagggatctgtcaccgcccagatacgattcgctggtccagtcacaagccagggaactgtccttacaaagacagcagattaaggatggacacggcatttgcgttatcagccgccaacacatgaataccatgattaaagccttcgaggaattactgcaagcttccgatgtggattactgtgtcgcagagggcttccaggagcagttaaatcaatgtgcagaactgctggagaagctggagaaactgttcctgaatggcaaaagcgtcggcgtcgagatgaacacccaaaacgaattaatggaacgcattgaggaagataacctgacgtaccagcatctgctgcctgagagccccgagcccagtgctagccatgctctatcagattatgaaacgagcgaaaaatctttcttttcccgtgatcagaagcaggataacgagactgaaaagacctctgtgatggtcaatagctttagccaagacctgctgatggaacatatccaggagatccgtactctcaggaagagattggaggagtctattaagactaacgagaaactgaggaaacagctggaaaggcaggggagtgaatttgttcaaggtagcacatcaatcttcgcatccggctctgaactgcacagctctcttaccagcgagatccacttcttgcgcaagcagaaccaggctttgaacgccatgctcatcaaaggcagccgcgataaacagaaagagaatgataagctgcgggagtctctgtctcgcaaaacagtctctctggagcatttgcagagagaatatgcctctgtcaaagaggaaaatgaaagactgcagaaggaaggatccgagaaagagcgtcacaatcaacaactgatccaagaagtgcggtgttcaggccaggaactgtcaagggtccaggaggaggtgaagctgcgccagcagcttctaagtcagaacgacaaactgctgcaatctcttcgggttgagctgaaggcctatgagaaactcgacgaggaacatagaaggctaagagaggcttcaggagaaggttggaagggccaagaccctttccgggacctgcattccctactgatggagatccaggccctacgcctgcaactagagaggtctattgaaacctcctccaccctgcagagtcggcttaaggagcagttggctcgcggggccgagaaagcccaggagggcgccttgacactcgccgtgcaggccgtgagtattcccgaagttccgttacagccagacaagcacgatggagataagtaccctatggaatctgacaactcattcgacttgtttgactcatctcaggctgttaccccaaaaagcgtgtccgagacaccgcccctgtccgggaacgacacagactctctgtcatgcgactctggctcttctgctacatccaccccttgtgtgtccagacttgtgactggtcatcacctctgggccagcaagaacggccgacacgtactgggtttaatagaagactatgaagctttgttaaagcagatatcccaggggcagcggctccttgcggaaatggatatccagacacaggaggcaccgagctctacgagccaggagctaggcactaagggccctcaccccgccccactatctaaattcgtaagctctgtaagcacagctaagctgactcttgaggaagcctatcgaaggcttaagcttctgtggcgggtgtcgctgccagaggatggacagtgccctctgcattgtgaacagataggcgagatgaaagccgaagtcactaagctccacaaaaagctctttgaacaagaaaagaagctgcagaataccatgaaattactgcaattgagcaagaggcaagagaaggtcatattcgatcagctagtggtgacccataagattctgcgaaaagcgcggggaaacctcgaactgcggcccggcggggcacacccggggacttgtagccctagcaggcccggaagctag

SEQ ID NO: 197464 - DNA, 5559 bp, Artificial Sequence
  derived and/or modified sequence
atgatggatctggtgctcgaggaggacgttaccgtgcccggcacactgtccggctgcagcgggctggttccgtctgtacccgacgatctcgacgggattaacccgaacgccggtcttggcaatggccttctgccaaatgtgagcgaggagaccgttagccctacacgggccagaaacatgaaggattttgagaaccagattactgaattgaagaaagaaaactttaacttgaagctccggatttactttttggaggaaagaatgcaacaggagtttcatggccctactgagcacatttataagactaatatcgagttgaaagtcgaagtggaaagcctcaagcgtgaattgcaagagcgagagcaactgcttatcaaggccagcaaggctgtcgaatccctcgctgaggcgggcggtagcgagattcaaagagtcaaggaggacgctcggaaaaaagttcagcaggtggaagacctcctgacaaagagaattttattactcgagaaggatgtcactgccgcccaggctgagctggaaaaggcctttgccggcaccgagactgaaaaggccttgcgacttaggctagaatctaaactctccgagatgaaaaagatgcacgagggcgacctggcaatggcgctcgttctcgatgagaaagatcggttgatcgaggaactcaagctgagcttaaagtctaaggaggccctgatccaatgtctgaaggaggaaaagtcccagatggcatgtcctgacgaaaatgtctcaagcggcgaacttaggggcctctgtgccgccccaagggaggagaaggagagggagaccgaggctgctcagatggagcaccagaaggaacgcaactcttttgaggagcgtatccaggcactagaggaggacctgcgagaaaaggagagggaaattgcaacagagaagaagaacagcttaaaacgtgacaaggctatacaaggactcactatggcgctgaagtccaaggagaaaaaggtagaggagctcaacagcgagattgagaagctttccgcagccttcgcgaaggcacgagaggcacttcagaaggcacagacccaggaattccagggatctgaggattatgagactgccttaagcggcaaagaagctttatcagcagccctgcgcagtcagaatttaaccaagagcaccgagaaccacagacttcgcagatctattaagaagatcacccaggaactttctgatctgcagcaagagcgggagaggctcgagaaggatctggaagaagcccacagagagaagtccaaaggagactgtacaataagagatcttaggaatgaagtggagaaacttcgaaatgaggtgaacgagagggagaaggccatggaaaacaggtacaagagtttgctgagcgagagtaataagaaacttcataatcaagagcaagttattaagcacctgacagagtccactaatcaaaaagatgtgctccttcagaagttcaacgagaaagatctcgaagtcatacagcaaaactgctatctaatggcagccgaggatctggaactaaggtcagaaggattgatcactgagaaatgcagctcgcaacagcctcctggcagcaaaacaatcttctccaaagaaaagaaacagtcatctgattacgaggaactcatccaagtattgaaaaaggagcaggatatttatacgcacctggtcaaatccctccaggagagcgactccataaataaccttcaggcggaactcaacaagatcttcgccctcagaaagcagctggaacaagatgtcttgtcttaccagaatctccggaagacactggaagaacagatatccgagatacgtcggagggaggaggaatcattctccctctattctgatcaaaccagttacctcagcatttgtctggaagaaaacaacagatttcaggtagaacacttttctcaggaggaactaaagaaaaaagttagtgacttgatccaactcgtaaaggagttatacacagataaccagcacctcaagaagactatcttcgacttgtcttgcatgggttttcaaggcaacggtttccctgatcggctggccagtaccgagcagaccgaactgcttgcgtcaaaagaggatgaagacaccatcaaaataggggaagatgacgaaattaacttcttgtccgaccagcaccttcagcaatcaaacgaaatcatgaaggatctctcaaagggcgggtgcaaaaatggatatttgcgccataccgaatcaaaaatttcggattgtgacggcgctcatgccccggggtgtttggaagaaggggcgttcattaatttactcgctcccttgtttaatgaaaaagccaccctcctcttggaatctcgccctgatctcctgaaggtcgtcagggagctgttgctgggccaattgttcctgactgagcaggaggtgtcgggagaacacctggacgggaaaactgaaaaaaccccaaagcagaaaggcgaactggtccacttcgttcagaccaattctttctcaaagccgcacgacgagctgaaactttcctgcgaagctcaattagtgaaggcgggggaggtgcctaaggtgggcctcaaggacgcatccgtccagactgtcgctacggagggcgatttactcagattcaaacacgaggccactagagaggcatgggaagagaaaccaatcaataccgccctgtccgccgagcaccgcccggagaacctgcatggggtaccaggttggcaagcagccctcctctccctgccagggatcacaaaccgtgaggccaagaagtctcggctgcctatcctgattaagccttctagaagcctgggcaatatgtacagactacctgccactcaggaagtcgtgacacagctgcaatctcagatcctggaactgcagggggagctgaaagagttcaagacttgtaataagcagctgcaccagaagttaatcctggctgaggctgtgatggagggccgccccaccccagataagacactcttgaatgattctgaaatttgcccgcctgacgacttggcatctctgccttcttgcaaagagaacccagaagacgtcctcagcccaacctctgtcgctacttatctttcttccaagagccagccctccgcgaaggtatctgtaatgggtaccgatcagagtgagagcataaatacatcaaacgaaactgaatatctcaagcaaaagatccacgacctggagaccgaacttgaaggctaccaaaacttcatctttcagctccagaagcactcacaatgctccgaagccatcatcactgtactgtgcggaaccgagggcgcccaagatggactgagcaaacctaagaacggcagtgatggtgaagaaatgacattttccagtctgcatcaggtacggtatgtgaaacacgtaaagatcctggggcctctggcacccgagatgatcgacagccgcgtcctggagaatctgaagcagcaactggaagaacaggaatataagctgcagaaggagcagaacctgaatatgcagcttttcagcgagatacacaacctgcaaaacaagttccgggacctatcccctccgcgttacgactctctggtgcagtcccaggccagagaactgtctttgcagcgccagcagattaaggatggtcacgggatctgtgtgatcagtcggcagcatatgaacacaatgattaaagcatttgaggagttgctgcaggcttccgatgtggattactgcgtcgcagagggtttccaggagcaactgaaccagtgtgctgagctgctggagaagcttgaaaaattgtttctcaacggcaagtccgtaggcgtagagatgaacacgcaaaatgagttgatggagaggatcgaggaagataacctgacctatcagcaccttctaccagagtctccagagccatcagcgagccacgcgttgtctgattatgagacttctgaaaagtcatttttctcacgcgatcagaaacaggataatgagactgagaagacaagcgtgatggttaactccttttcacaggacctgctgatggagcatattcaggaaattcgaacacttcgcaagcgcctcgaggagtccattaaaactaacgagaagctgaggaaacagctggaaaggcagggctcggaatttgtacagggaagcaccagcattttcgcttctgggagcgagctgcactcatccctgacctcagaaattcacttcctgcgcaagcagaaccaggcactgaatgccatgttgataaagggaagcagggataagcagaaggagaacgacaagctccgcgaatccctctcaagaaagactgttagcctggaacatctccagcgcgaatacgcgagcgttaaagaagaaaacgagcgcctccaaaaggaggggtctgagaaggagaggcacaaccaacagctaatacaggaagttagatgcagtggacaggaactgagtcgcgtgcaggaggaggtcaagttacgccagcagctgctgagccagaacgacaaactgctgcagagcctcagagtcgaacttaaggcctatgaaaagcttgatgaggaacaccgacgtctccgcgaagcgtccggtgaaggctggaagggtcaggatccttttagggacctgcactccctcctgatggaaattcaagcgctgcgtctccaactcgagaggtcaatcgagacaagctcaacgctccagagtcgccttaaagagcagctggctaggggggctgagaaggcacaagagggagccttaaccctggctgttcaggcagtctcaatccctgaagtgccgttgcagcccgataagcacgatggggacaagtatcccatggagtcagataattcattcgaccttttcgattcttctcaggcagtgacacccaagagtgtgtctgagacacctcccctcagcgggaatgataccgacagcctgtcttgcgacagcgggtcaagcgccacctccactccatgtgtttcacgcctcgtgactggacatcatctgtgggcctctaaaaatggtcgccacgtgctcgggttgatcgaggattacgaagcgttgctcaagcaaatctctcaggggcagaggctcctagcagagatggacattcaaactcaggaagcgccaagtagcacaagccaggagctggggacaaaagggccgcacccggctccgctgtctaagtttgtgagcagcgtgagtacagccaagctgactctggaggaggcctataggcgcttaaagctgctgtggcgggtaagtctgcctgaggatggccagtgtccgctgcactgtgagcagataggtgagatgaaagccgaggtcacgaaattgcacaagaagctgtttgagcaggagaagaagttacagaataccatgaagcttctgcagctgagtaaacgacaggagaaagttatcttcgatcagttagtggtcactcacaagattctgaggaaagccaggggtaatctggagctacggcctggaggcgcccaccctggcacatgctccccgtcacggccagggagttag

SEQ ID NO: 197465 - DNA, 5682 bp, Artificial Sequence
  derived and/or modified sequence
atgatggacctggtgctggaggaggatgtgacagtgcccggcaccctgagcggctgcagcggcctggtgcccagcgtgcctgatgacctggatggcatcaaccccaatgccggcctgggcaatggcctgctgcccaacgtgtctgaggagaccgtgagccccacccgggccaggaacatgaaggactttgagaaccagatcacagagctgaagaaggagaacttcaacctgaagctgcgcatctacttcctggaggagaggatgcagcaggagttccacggccccacagagcacatctacaagaccaacatcgagctgaaggtggaggtggagagcctgaagcgggagctgcaggagcgggagcagctgctgatcaaggccagcaaggctgtggagagcctggccgaggccggcggcagcgagatccagagggtgaaggaggatgccaggaagaaggtgcagcaggtggaggacctgctgaccaagaggatcctgctgctggagaaggatgtgacagctgcccaggccgagctggagaaggcctttgctggaacagaaacagagaaggccctgcggctgcggctggagagcaagctgtctgagatgaagaagatgcatgaaggagacctggccatggccctggtgctggatgagaaggaccggctgattgaggagctgaagctgagcctgaagagcaaggaggccctgatccagtgcctgaaggaggagaagagccagatggcctgcccagatgaaaatgtgagcagcggggagctgcggggcctgtgtgccgccccccgggaggagaaggagcgggagacagaggccgcccagatggagcaccagaaggagagaaattcctttgaggagcgcatccaggccctggaggaggacctgcgggagaaggagcgggagatcgccacagagaagaagaacagcctgaagagggacaaggccatccagggcctgaccatggccctgaagagcaaggagaagaaggtggaggagctgaacagcgagattgagaagctgtctgctgcctttgccaaggcccgggaggccctgcagaaggcccagacccaggagttccagggctctgaagattatgaaacagccctgagcggcaaggaggccctgtctgctgccctgcggagccagaacctgaccaagagcacagagaaccaccggctgcggcgcagcatcaagaagatcacccaggagctgagtgacctgcagcaggagcgggagcggctggagaaggacctggaggaggcccaccgggagaagagcaaaggagactgcaccatccgggacctgagaaatgaggtggagaagctgagaaatgaggtgaatgaaagagagaaggccatggagaaccgctacaagagcctgctgtctgagagcaacaagaagctgcacaaccaggagcaggtgatcaagcacctgacagagagcaccaaccagaaggatgtgctgctgcagaagttcaatgagaaggacctggaggtgatccagcagaactgctacctgatggctgctgaggacctggagctgcggtctgagggcctcatcacagagaagtgcagcagccagcagcccccaggcagcaagaccatcttcagcaaggagaagaagcagagcagtgactatgaggagctgatccaggtgctgaagaaggagcaggacatctacacccacctggtgaagagcctgcaggagagtgacagcatcaacaacctgcaggccgagctgaacaagatctttgccctgaggaagcagctggagcaggatgtgctgagctaccagaacctgaggaagaccctggaggagcagatcagcgagatcagaagaagagaggaggagagcttcagcctgtacagcgaccagaccagctacctgagcatctgcctggaggagaacaaccgcttccaggtggagcacttcagccaggaggagctgaagaagaaggtgtctgacctgatccagctggtgaaggagctgtacacagacaaccagcacctgaagaagaccatctttgacctgagctgcatgggcttccagggcaatggcttcccagaccggctggccagcacagagcagacagagctgctggccagcaaggaggatgaggacaccatcaagattggagaagatgatgagatcaacttcctgagtgaccagcacctgcagcagagcaatgagatcatgaaggacctgagcaaaggaggctgcaagaatggctacctgcggcacacagagagcaagatcagtgactgtgatggagcccacgcccctggctgcctggaggagggcgccttcatcaacctgctggcccccctcttcaatgagaaggccaccctgctgctggagagcaggccagacctgctgaaggtggtgcgggagctgctgctgggccagctgttcctgacagagcaggaggtgtctggagagcacctggatggcaagacagagaagacccccaagcagaagggggagctggtgcactttgtgcagaccaacagcttcagcaagccccatgatgagctgaagctgagctgtgaggcccagctggtgaaggccggggaggtgcccaaggtgggcctgaaggatgcctctgtgcagacagtggccacagaaggagacctgctgcgcttcaagcatgaggccacccgggaggcctgggaggagaagcccatcaacacagccctgtctgctgagcacaggcctgagaacctgcatggagtgcccggctggcaggccgccctgctgagcctgcccggcatcaccaaccgggaggccaagaagagccggctgcccatcctgatcaagcccagccgcagcctgggcaacatgtaccgcctgcctgccacccaggaggtggtgacccagctgcagagccagatcctggagctgcagggcgagctgaaggagttcaagacctgcaacaagcagctgcaccagaagctgatcctggccgaggccgtgatggagggccggcccaccccagacaagaccctgctgaatgcccagccccctgtgggcgccgcctaccaggacagccctggagagcagaagggcatcaagaccaccagctctgtgtggagggacaaggagatggacagcgaccagcagaggagctatgaaattgattctgagatctgccccccagatgacctggccagcctgcccagctgcaaggaaaatccagaagatgtgctgagccccacctctgtggccacctacctgagcagcaagagccagcccagcgccaaggtgtctgtgatgggcacagaccagagcgagagcatcaacaccagcaatgaaacagagtacctgaagcagaagatccatgacctggagacagagctggagggctaccagaacttcatcttccagctgcagaagcacagccagtgcagcgaggccatcatcaccgtgctgtgtggcacagagggcgcccaggacggcctgagcaagcccaagaatggaagtgatggagaggagatgaccttcagcagcctgcaccaggtgcgctacgtgaagcacgtgaagatcctgggccccctggcccctgagatgattgacagccgggtgctggagaacctgaagcagcagctggaggagcaggagtacaagctgcagaaggagcagaacctgaacatgcagctgttcagcgagatccacaacctgcagaacaagttccgggacctgagccccccaagatatgacagcctggtgcagagccaggcccgggagctgagcctgcagaggcagcagatcaaggatggccacggcatctgtgtgatcagccggcagcacatgaacaccatgatcaaggcctttgaggagctgctgcaggccagtgatgtggactactgtgtggccgagggcttccaggagcagctgaaccagtgtgccgagctgctggagaagctggagaagctgttcctgaatggcaagtctgtgggcgtggagatgaacacccagaatgagctgatggagcgcatcgaggaggacaacctgacctaccagcacctgctgcctgagagccctgagcccagcgccagccacgccctgagtgactatgagaccagcgagaagagcttcttcagccgggaccagaagcaggacaatgaaacagagaagacctctgtgatggtgaacagcttcagccaggacctgctgatggagcacatccaggagatccgcaccctgaggaagaggctggaggagagcatcaagaccaatgagaagctgaggaagcagctggagcggcagggcagcgagtttgtgcagggcagcaccagcatctttgccagcggcagcgagctgcacagcagcctgaccagcgagatccacttcctgaggaagcagaaccaggccctgaatgccatgctgatcaagggcagccgggacaagcagaaggaaaatgacaagctgcgggagagcctgagcaggaagacagtgtccctggagcacctgcagcgggagtatgcctctgtgaaggaggagaatgaaaggctgcagaaggagggcagcgagaaggagcggcacaaccagcagctgatccaggaggtgcgctgcagcggccaggagctgagccgggtgcaggaggaggtgaagctgcggcagcagctgctgagccagaatgacaagctgctgcagagcctgcgggtggagctgaaggcctatgagaagctggatgaggagcaccggcggctgcgggaggccagcggggagggctggaagggccaggaccccttccgggacctgcacagcctgctgatggagatccaggccctgcggctgcagctggagaggagcattgagaccagcagcaccctgcagagccggctgaaggagcagctggcccggggagctgagaaggcccaggagggcgccctgaccctggccgtgcaggccgtgtccatccctgaggtgcccctgcagcctgacaagcatgatggagacaagtaccccatggagagtgacaacagctttgacctgtttgacagcagccaggccgtgacccccaagtctgtgtctgagaccccacccctgtctggaaatgacacagacagcctgagctgtgacagcggcagcagcgccaccagcaccccctgtgtgtcccggctggtgacaggccaccacctgtgggccagcaagaatggccgccacgtgctgggcctgattgaggactatgaggccctgctgaagcagatcagccagggccagaggctgctggccgagatggacatccagacccaggaggcccccagcagcaccagccaggagctgggcaccaagggcccccacccagcccccctgagcaagtttgtgtcctctgtgtccacagccaagctgaccctggaggaggcctacagaaggctgaagctgctgtggagggtgtccctgcctgaagatggccagtgccccctgcactgtgagcagatcggggagatgaaggccgaggtgaccaagctgcacaagaagctgtttgagcaggagaagaagctgcagaacaccatgaagctgctgcagctgagcaagaggcaggagaaggtgatctttgaccagctggtggtgacccacaagatcctgaggaaggcccggggcaacctggagctgcggcctgggggcgcccaccctggcacctgcagccccagcaggcctggcagctag

SEQ ID NO: 197466 - DNA, 5559 bp, Artificial Sequence
  derived and/or modified sequence
atgatggacctggtgctggaggaggatgtgacagtgcccggcaccctgagcggctgcagcggcctggtgcccagcgtgcctgatgacctggatggcatcaaccccaatgccggcctgggcaatggcctgctgcccaacgtgtctgaggagaccgtgagccccacccgggccaggaacatgaaggactttgagaaccagatcacagagctgaagaaggagaacttcaacctgaagctgcgcatctacttcctggaggagaggatgcagcaggagttccacggccccacagagcacatctacaagaccaacatcgagctgaaggtggaggtggagagcctgaagcgggagctgcaggagcgggagcagctgctgatcaaggccagcaaggctgtggagagcctggccgaggccggcggcagcgagatccagagggtgaaggaggatgccaggaagaaggtgcagcaggtggaggacctgctgaccaagaggatcctgctgctggagaaggatgtgacagctgcccaggccgagctggagaaggcctttgctggaacagaaacagagaaggccctgcggctgcggctggagagcaagctgtctgagatgaagaagatgcatgaaggagacctggccatggccctggtgctggatgagaaggaccggctgattgaggagctgaagctgagcctgaagagcaaggaggccctgatccagtgcctgaaggaggagaagagccagatggcctgcccagatgaaaatgtgagcagcggggagctgcggggcctgtgtgccgccccccgggaggagaaggagcgggagacagaggccgcccagatggagcaccagaaggagagaaattcctttgaggagcgcatccaggccctggaggaggacctgcgggagaaggagcgggagatcgccacagagaagaagaacagcctgaagagggacaaggccatccagggcctgaccatggccctgaagagcaaggagaagaaggtggaggagctgaacagcgagattgagaagctgtctgctgcctttgccaaggcccgggaggccctgcagaaggcccagacccaggagttccagggctctgaagattatgaaacagccctgagcggcaaggaggccctgtctgctgccctgcggagccagaacctgaccaagagcacagagaaccaccggctgcggcgcagcatcaagaagatcacccaggagctgagtgacctgcagcaggagcgggagcggctggagaaggacctggaggaggcccaccgggagaagagcaaaggagactgcaccatccgggacctgagaaatgaggtggagaagctgagaaatgaggtgaatgaaagagagaaggccatggagaaccgctacaagagcctgctgtctgagagcaacaagaagctgcacaaccaggagcaggtgatcaagcacctgacagagagcaccaaccagaaggatgtgctgctgcagaagttcaatgagaaggacctggaggtgatccagcagaactgctacctgatggctgctgaggacctggagctgcggtctgagggcctcatcacagagaagtgcagcagccagcagcccccaggcagcaagaccatcttcagcaaggagaagaagcagagcagtgactatgaggagctgatccaggtgctgaagaaggagcaggacatctacacccacctggtgaagagcctgcaggagagtgacagcatcaacaacctgcaggccgagctgaacaagatctttgccctgaggaagcagctggagcaggatgtgctgagctaccagaacctgaggaagaccctggaggagcagatcagcgagatcagaagaagagaggaggagagcttcagcctgtacagcgaccagaccagctacctgagcatctgcctggaggagaacaaccgcttccaggtggagcacttcagccaggaggagctgaagaagaaggtgtctgacctgatccagctggtgaaggagctgtacacagacaaccagcacctgaagaagaccatctttgacctgagctgcatgggcttccagggcaatggcttcccagaccggctggccagcacagagcagacagagctgctggccagcaaggaggatgaggacaccatcaagattggagaagatgatgagatcaacttcctgagtgaccagcacctgcagcagagcaatgagatcatgaaggacctgagcaaaggaggctgcaagaatggctacctgcggcacacagagagcaagatcagtgactgtgatggagcccacgcccctggctgcctggaggagggcgccttcatcaacctgctggcccccctcttcaatgagaaggccaccctgctgctggagagcaggccagacctgctgaaggtggtgcgggagctgctgctgggccagctgttcctgacagagcaggaggtgtctggagagcacctggatggcaagacagagaagacccccaagcagaagggggagctggtgcactttgtgcagaccaacagcttcagcaagccccatgatgagctgaagctgagctgtgaggcccagctggtgaaggccggggaggtgcccaaggtgggcctgaaggatgcctctgtgcagacagtggccacagaaggagacctgctgcgcttcaagcatgaggccacccgggaggcctgggaggagaagcccatcaacacagccctgtctgctgagcacaggcctgagaacctgcatggagtgcccggctggcaggccgccctgctgagcctgcccggcatcaccaaccgggaggccaagaagagccggctgcccatcctgatcaagcccagccgcagcctgggcaacatgtaccgcctgcctgccacccaggaggtggtgacccagctgcagagccagatcctggagctgcagggcgagctgaaggagttcaagacctgcaacaagcagctgcaccagaagctgatcctggccgaggccgtgatggagggccggcccaccccagacaagaccctgctgaatgacagcgagatctgccccccagatgacctggccagcctgcccagctgcaaggagaacccagaagatgtgctgagccccacctctgtggccacctacctgagcagcaagagccagcccagcgccaaggtgtctgtgatgggcacagaccagagcgagagcatcaacaccagcaatgaaacagagtacctgaagcagaagatccatgacctggagacagagctggagggctaccagaacttcatcttccagctgcagaagcacagccagtgcagcgaggccatcatcaccgtgctgtgtggcacagaaggagcccaggacggcctgagcaagcccaagaatggaagtgatggagaggagatgaccttcagcagcctgcaccaggtgcgctacgtgaagcacgtgaagatcctgggccccctggcccctgagatgattgacagccgggtgctggagaacctgaagcagcagctggaggagcaggagtacaagctgcagaaggagcagaacctgaacatgcagctgttcagcgagatccacaacctgcagaacaagttccgggacctgagcccccccaggtatgacagcctggtgcagagccaggcccgggagctgagcctgcagaggcagcagatcaaggatggccacggcatctgtgtgatcagccggcagcacatgaacaccatgatcaaggcctttgaggagctgctgcaggccagtgatgtggactactgtgtggccgagggcttccaggagcagctgaaccagtgtgccgagctgctggagaagctggagaagctgttcctgaatggcaagtctgtgggcgtggagatgaacacccagaatgagctgatggagagaattgaggaggacaacctgacctaccagcacctgctgcctgagagccctgagcccagcgccagccacgccctgagtgactatgagaccagcgagaagagcttcttcagccgggaccagaagcaggacaatgaaacagagaagacctctgtgatggtgaacagcttcagccaggacctgctgatggagcacatccaggagatccgcaccctgaggaagaggctggaggagagcatcaagaccaatgagaagctgaggaagcagctggagcggcagggcagcgagtttgtgcagggcagcaccagcatctttgccagcggcagcgagctgcacagcagcctgaccagcgagatccacttcctgaggaagcagaaccaggccctgaatgccatgctgatcaagggcagccgggacaagcagaaggaaaatgacaagctgcgggagagcctgagcaggaagacagtgtccctggagcacctgcagcgggagtatgcctctgtgaaggaggagaatgaaaggctgcagaaggagggcagcgagaaggagcggcacaaccagcagctgatccaggaggtgcgctgcagcggccaggagctgagccgggtgcaggaggaggtgaagctgcggcagcagctgctgagccagaatgacaagctgctgcagagcctgcgggtggagctgaaggcctatgagaagctggatgaggagcaccggcggctgcgggaggccagcggggagggctggaagggccaggaccccttccgggacctgcacagcctgctgatggagatccaggccctgcggctgcagctggagaggagcattgagaccagcagcaccctgcagagccggctgaaggagcagctggcccggggagctgagaaggcccaggagggcgccctgaccctggccgtgcaggccgtgtccatccctgaggtgcccctgcagcctgacaagcatgatggagacaagtaccccatggagagtgacaacagctttgacctgtttgacagcagccaggccgtgacccccaagtctgtgtctgagaccccacccctgtctggaaatgacacagacagcctgagctgtgacagcggcagcagcgccaccagcaccccctgtgtgtcccggctggtgacaggccaccacctgtgggccagcaagaatggaagacatgtgctgggcctgattgaagattatgaggccctgctgaagcagatcagccagggccagaggctgctggccgagatggacatccagacccaggaggcccccagcagcaccagccaggagctgggcaccaagggcccccacccagcccccctgagcaagtttgtgtcctctgtgtccacagccaagctgaccctggaggaggcctaccgccgcctgaagctgctgtggagggtgtccctgcctgaagatggccagtgccccctgcactgtgagcagattggagagatgaaggccgaggtgaccaagctgcacaagaagctgtttgagcaggagaagaagctgcagaacaccatgaagctgctgcagctgagcaagaggcaggagaaggtgatctttgaccagctggtggtgacccacaagatcctgaggaaggcccggggcaacctggagctgcggcctggaggagcccaccctggcacctgcagccccagccggcccggcagctag

SEQ ID NO: 197467 - DNA, 5682 bp, Artificial Sequence
  derived and/or modified sequence
atgatggacctggtgctggaggaggacgtgaccgtgcccggcaccctctcagggtgtagtgggttagtgccttctgttcctgacgatctcgatggcattaatcctaacgcaggtctgggaaatgggctactgcccaatgtaagcgaggagacggtgtcccccacacgggctagaaacatgaaggactttgaaaaccaaatcacagaactcaagaaagaaaactttaatctcaagctgaggatctatttccttgaagaacggatgcaacaggaatttcatggcccgaccgagcatatctataagactaacatcgaattgaaagtggaggtagagtctcttaaacgagagctgcaggaaagggaacagctgttgatcaaagctagtaaggccgtggagagcctcgccgaggccggagggtctgaaattcagcgggtcaaggaggacgctcgtaaaaaggtgcagcaggtagaagatcttctgacaaagagaattctgcttctggagaaggatgttaccgctgctcaggcagagctggagaaagcttttgcgggcaccgaaacggagaaagccttacgcttaagactggagtctaaacttagcgaaatgaaaaaaatgcacgaaggggacctggctatggctcttgtcttggacgagaaagatcgtttaatcgaggaactcaagttaagcttgaaaagcaaggaagcccttatccaatgtctaaaggaagagaaatcccagatggcttgtcctgatgaaaacgtgtcttccggcgagctgcgcggactgtgcgccgcaccgcgtgaagagaaggagagggaaacagaagcagcccagatggaacatcaaaaagagcgcaactctttcgaagagcgtattcaggcattggaagaagacctgagggaaaaggaaagggaaatcgcaactgagaagaagaactcactcaaacgcgataaagccatccaggggttaactatggccctgaaaagtaaagagaagaaagtggaggagttgaacagcgagatcgagaaactaagtgcggcttttgccaaggcacgggaggctctccagaaagcccaaacacaggagtttcaggggtccgaggactatgaaactgccctctccgggaaggaagccctgagtgctgccctgcgaagtcaaaatctcacaaagtcaacggagaatcaccggctgcgccggtcaattaaaaagataacccaagaacttagtgacctgcaacaggaaagggagcgccttgaaaaggacctagaagaggcccaccgtgagaaaagtaagggagactgtaccatccgagatctacgaaacgaagttgaaaagctgagaaacgaagtgaacgagagagagaaggcaatggagaatcgatataaatcactgctttcagaaagcaacaaaaagctccacaaccaggagcaggtgatcaagcacctcacagaaagtactaatcagaaggacgtgctgcttcaaaagttcaatgagaaagatttggaagtcatccaacagaattgctatctgatggctgctgaggacctggaactaagatcggagggtctgataacagagaagtgttcatcccagcagccccctggcagtaaaactatattcagcaaggaaaagaaacagtcttcagattatgaggaattaattcaggtcctgaaaaaagagcaggacatctacacacatttagtgaaatctctgcaggaatccgactcaataaacaacctccaggccgaactgaacaaaattttcgcccttcgcaagcagttggagcaagacgtactgagctatcagaatctgaggaaaactctggaagaacagatcagtgagattagacgcagggaagaggagtctttttccctttacagcgatcagacaagctatttgtcaatatgtctcgaggagaacaaccgattccaagtagagcatttcagtcaagaagagctcaagaaaaaggtaagcgatttaatccagctggtgaaggaattgtacacagataatcagcatcttaagaagactatctttgatctcagctgtatgggatttcagggcaacgggttcccggacaggctcgcttctactgaacaaacagaactcctagcgagtaaggaggacgaagataccatcaaaatcggcgaggacgatgagataaattttttgtcagatcagcatctccagcaaagcaacgagattatgaaggacttgtctaaggggggctgtaaaaatgggtatctgcgacatactgagtctaaaatctctgactgcgatggtgcgcacgcgccaggctgtttagaggagggcgcgttcattaacttactggcccccctgtttaatgaaaaggccacattacttctggagagccgccccgacctgctgaaggttgttagggagcttctgctgggccagctcttcctgactgaacaagaagtgtcgggggagcacctcgatgggaaaacagaaaaaacacccaaacagaaaggcgagctcgtccacttcgtccagacaaactcattctccaagccccacgatgaactgaaattatcctgcgaggcccagttggtgaaggccggggaggttcccaaagttggccttaaggatgcatccgtgcaaaccgtggcaaccgagggcgatctgctgcgctttaaacacgaagctactcgcgaagcttgggaggagaagcctattaacacagccctgtcagccgaacaccgccccgagaacctgcacggtgttcccggctggcaggccgcccttctatccttaccaggaataaccaatcgcgaagctaagaagtcacgcctccctatcctgattaaaccaagtcgatccttgggcaatatgtatcgcctcccggccacacaggaggtagtcactcagctgcaaagccagatactcgagttacagggcgagcttaaggagttcaagacctgcaataagcagctgcatcaaaagttaattctggccgaggcagtcatggaagggaggcccacccctgataaaaccctgctgaatgcccagccccccgtgggagccgcctatcaggactcaccaggggaacaaaaggggatcaaaaccacatctagtgtttggagggacaaagaaatggattccgaccagcagagatcctatgagattgactccgaaatttgtccacccgacgatcttgcctccctcccttcttgtaaagagaatccagaggacgtcttgtctccaactagcgtggcaacctatctaagctctaagtcccagccatccgcaaaggtgtctgtgatggggactgaccaatctgaaagcataaataccagcaacgaaactgagtacctgaagcagaagatccacgacctggagactgagctcgagggttaccagaactttatctttcagttgcagaagcacagtcaatgttcggaagctattattacggtgctgtgcggtacagaaggcgcccaggacggattgtctaagccaaaaaacggctccgacggggaggaaatgaccttctcctcattacaccaagttcgctatgtgaagcacgttaaaatcctgggaccacttgctccagagatgatagattccagggtgctcgagaatctgaaacagcaactcgaagagcaggagtacaaacttcagaaagagcagaatttgaacatgcagctgtttagcgagatccataatttgcagaataagtttagggatctttccccccctcggtacgacagtttagtccaatcccaggccagagaattaagcctccagcgacagcagataaaagatggacatggaatctgtgtaatctcacgacagcatatgaacaccatgataaaagccttcgaagagttgcttcaggctagtgatgtcgactattgcgtggcagagggattccaggagcagctgaatcagtgtgcggagttgttagagaagctcgaaaagctgttcttaaacggaaaatctgtgggagtagagatgaacacgcaaaacgagctcatggaacgcatcgaggaggacaatttgacgtatcagcacctgctccccgagtcaccagagcctagtgccagccatgcactcagtgactacgagacttcagagaaatcctttttctcccgagaccagaaacaggataacgagactgaaaagacctccgtgatggtcaactctttcagtcaagatttactcatggagcacattcaagaaatacgtaccctgcgtaaaaggctggaggagagcatcaaaactaacgagaaactgcgcaaacaactcgagcggcaaggtagtgagttcgtgcaaggaagtacatcaatattcgctagcggaagcgagcttcacagtagtctgacatctgagattcactttctccggaagcagaaccaggcgctgaacgccatgctgatcaagggtagcagggataagcagaaagagaatgacaagctaagagaaagcctgtcgaggaagacagtttcccttgagcacctgcaacgagaatacgccagtgtgaaagaggagaatgagcgattacagaaggaggggtccgagaaggagcgacacaaccagcaactcatacaggaggttagatgttcgggtcaggaactctctcgcgtgcaggaagaggtcaagctccgccagcaactcttgtcccagaatgacaagctgctccaatccctcagggtagagcttaaagcctacgagaagctagacgaagagcacaggcggctgcgagaggccagcggggaagggtggaaaggccaggatccgttcagggatctgcattctttgttgatggaaattcaagccctgcgcctgcaattggagcgaagtattgagactagcagcactttacagagcagactgaaggagcagctcgccagaggggctgaaaaagcccaagagggggccctgacactcgctgtgcaggcagtgtctatacccgaggtacctttacaaccagacaaacacgacggggataagtatccgatggagtcagacaattcttttgacctcttcgatagttctcaggccgtcacccccaaatcggtgagcgagaccccccctctctctggaaacgacaccgatagcctgtcctgcgatagcggaagcagcgctacctccaccccttgtgtgtcgcggctcgtgaccggccaccatctgtgggccagcaaaaatggccgtcacgtgctcggactcatcgaggactatgaggcccttctaaagcagatatcgcagggtcagagattgctcgcggagatggacatccagacacaggaggctccgtcctccacatcacaggagctcggcaccaaggggcctcacccagccccactctctaagttcgtgtcatccgtgagcaccgccaagctgaccctggaagaggcatacaggcgcctgaaattgctgtggcgcgtgtccctgcctgaagacgggcaatgtccactccattgtgagcagataggtgaaatgaaagccgaggtcaccaagctacacaagaagttgtttgaacaggaaaagaaacttcagaataccatgaagcttctacagctgagtaagcgtcaagaaaaagtgatctttgatcagttggttgtgacgcacaagatcctgcggaaagcacggggtaatctagagcttcgacctggcggcgcccacccgggcacctgctccccttcccgccccgggagttag

SEQ ID NO: 197468 - DNA, 5559 bp, Artificial Sequence
  derived and/or modified sequence
atgatggacctggtgctggaggaggacgtgaccgtgcccggcaccctgtcaggctgttctggcttggtgccctccgttcctgacgacctcgatgggatcaaccccaatgccggcttgggcaatggcctactgcctaatgttagcgaagagactgttagcccaacccgagctagaaatatgaaagactttgagaatcagatcactgagctcaagaaagagaactttaacctgaagttacgcatctatttcctggaggaacgcatgcagcaggaattccacgggccaacagagcacatttacaaaactaatatcgagctgaaagtggaggtggaatctctcaaacgggaattacaggagcgcgagcagctcctcattaaagcctcaaaagccgtggaaagcctcgccgaagccggtggcagtgagatccagcgggttaaggaggacgcccgcaaaaaagtgcaacaggttgaggatctgttgactaaaaggatccttctgctcgagaaagatgtcactgccgcacaggccgaactagaaaaagcgtttgcaggaactgagaccgaaaaggcccttcggctccggctagagtccaaactcagcgagatgaagaagatgcatgaaggagatcttgctatggctcttgtgttagatgagaaggacagactgattgaagagctcaagctgagtttgaaatctaaggaggctcttattcaatgcctgaaggaggagaagtcgcagatggcgtgcccagatgaaaacgtctcctctggagagctcaggggcctctgtgctgcgccccgcgaggaaaaagagagggagacagaggcagcccagatggagcatcaaaaggagagaaactcctttgaggagcgcatacaggctctggaagaggatctccgcgaaaaggagcgcgaaatcgccaccgagaaaaaaaatagtttaaagagagataaagcgatccagggactgactatggcgttgaagtccaaggaaaagaaggtcgaagagttgaactctgaaatagaaaagttaagcgccgcatttgccaaagctagagaagcgctgcagaaagcgcagacacaggagttccagggatctgaagactatgagacagccctgtctggcaaagaagcgctcagcgcagcgttgcgaagccagaatctaacaaaaagtaccgagaatcaccgcttgcgaagatccataaagaagatcacccaggagctgtcagatctgcaacaggagagagagcgtttggaaaaagatctggaagaagcacatcgcgaaaaaagcaagggagattgcaccattcgcgacctgaggaacgaagtggaaaagctgagaaatgaagtaaatgaacgggagaaggctatggagaacaggtataagtctctcctctcagagagtaataaaaagctgcacaaccaagagcaggtgataaaacatctcactgagtccacgaaccagaaagatgtgctgttgcagaaatttaatgaaaaggatctcgaagtcatccagcagaattgctatctgatggctgctgaagacctggagcttcgctccgagggcttgatcacagagaagtgttccagtcagcagccgccgggtagcaaaactattttttccaaggaaaaaaagcagtcctctgactacgaggaactcattcaggtgctgaaaaaggagcaagacatctatacgcatttggttaagtccttacaggagtctgactctattaataatctgcaggccgagctgaataaaattttcgccctacggaagcagctggaacaggatgttctctcttatcagaatttgagaaaaaccttggaggagcagattagtgagattcggaggagagaggaagaatcctttagcctgtactcagatcaaacctcttatctgtcaatctgccttgaggaaaataacaggttccaggttgagcatttctcccaggaagaactcaagaaaaaggtgagtgaccttatccagttggttaaggaactctataccgacaaccagcatctgaagaaaactatctttgacttgtcctgcatggggtttcagggaaacgggtttcctgatcggcttgccagtaccgagcaaactgaattgctagctagtaaagaggacgaagatacaattaaaatcggggaggacgacgaaatcaatttcctgtctgatcaacatctccagcagagcaacgaaatcatgaaggacttatctaaaggcgggtgcaaaaacggctaccttaggcatacagaaagtaaaatttcagattgcgacggggctcacgctcctggatgtctcgaggagggagcctttataaatctgctcgcacctctgtttaacgagaaagccaccctcctcctggagtcgcggcctgatctgctaaaagtggtccgcgagctgctacttggccagctattcctgaccgagcaggaggtgtcaggcgaacacttggacggcaaaacagagaagaccccaaagcagaaaggcgaattggtccactttgtacagaccaatagcttcagcaaacctcacgatgagctgaaactgagctgcgaagctcagctcgtgaaagccggagaggtcccaaaggtaggcctgaaggatgcgtccgtgcagaccgttgccacagagggggacctgctgagattcaagcacgaggcgacccgggaagcatgggaggagaaacccatcaacaccgcgctgtccgccgagcatcgaccagagaatctgcacggagtgccaggctggcaagccgctctgctgagtctgcctggtattacaaatcgggaggctaagaaaagtcgcctcccaatcttgataaagccatcaagatcattgggcaatatgtataggttgccggcaactcaagaggtggtcacacaactgcagtctcagatcttggagcttcagggcgagcttaaagagttcaagacatgcaataaacaactgcatcagaagcttattctcgccgaagcagtgatggaggggcggcctaccccggataaaactctccttaatgactctgagatctgcccccccgatgacctcgcttctctaccaagttgtaaggagaacccggaggacgtgctctcccccacctccgtcgcaacctacttgagcagtaaaagtcaacctagcgcaaaagtctcagtgatgggcactgaccagtctgaatctattaataccagcaatgaaacagagtatcttaagcaaaagatccatgatcttgaaacggaattggaaggctatcagaatttcatcttccaacttcaaaagcactcccaatgcagtgaggccatcatcaccgtgctgtgtggaactgaaggcgctcaggacggactgagcaagccaaagaatggatcagacggtgaagaaatgactttttcttctctgcaccaggttcggtatgtgaagcatgtgaaaattctcggtccactcgccccggagatgatcgactctagggtgctggaaaacttgaagcaacagctagaagaacaagagtacaagctccagaaagagcagaacctgaacatgcagctgttttcggaaattcacaacttgcagaataagtttagagacctgtctcccccaaggtatgactcgttggtgcaaagccaggcccgagaacttagcctacaaagacaacagatcaaggacggccatgggatttgcgttatctcccgccagcacatgaacacgatgatcaaagccttcgaagagctgctgcaggctagtgacgttgactactgcgtcgccgaaggatttcaagagcagctcaatcagtgcgctgagctgctggagaaacttgaaaagttgtttttaaacggcaagagcgtcggcgtcgagatgaacacccagaacgagctcatggaaaggatcgaggaggataatcttacctatcagcacttattgcctgagtctccagagccttcagcgagtcatgctctgagtgattatgaaacttcagagaaatcattcttctctcgggaccagaaacaagataacgaaactgaaaaaacatccgtgatggttaacagtttttcccaggacctcctaatggaacatatacaggagattcggactctgcggaagcggctggaggagagtatcaaaactaacgagaagctgcggaagcagttggaacgtcagggaagcgagttcgtccagggcagtacttcaatttttgcatctggttcggagctccatagctctttaaccagtgagattcactttttaaggaagcagaatcaggctctgaacgccatgctaatcaaagggtctagagataagcagaaagagaacgataaactgcgtgaaagcctcagccgcaaaaccgtttctttggagcacctccaacgggagtacgcgagcgtgaaggaagagaacgagagattacaaaaagaggggtctgaaaaggaaagacacaatcagcagctcatccaagaggtgcggtgtagtgggcaggagctgtccagggttcaggaagaagtcaaattaaggcagcagctgctgtctcaaaatgataagttgctccagtccctaagagtcgaattgaaggcttatgagaaactggacgaagaacatagacggctacgagaagcctccggagaagggtggaaagggcaggatcctttcagagatcttcatagccttcttatggagattcaggctctgaggctgcaactggagaggagcattgagacgtcctccacactgcagtcccggctcaaagagcagctagcgagaggtgccgagaaggcccaggaaggggctttaactctggctgtgcaggctgtgagcattcctgaagttcctctgcagcctgacaagcacgatggggacaagtatcctatggagtccgacaattcttttgacctctttgacagctctcaggcggtaactccaaaatctgtatcggaaacacctcctctctccggcaatgacacagactccttaagctgtgattctggctcctcagcaacctctacgccttgcgttagccgcctcgtgacaggccaccatctatgggcgtctaagaacggacgccatgtgctgggtttgatcgaagattacgaggcgttgctgaagcagatatctcaaggacaacgcctgttagctgagatggatattcagacgcaagaggctccctcaagtacctcacaagagctgggaacaaaaggaccccaccccgcacccctgtcaaagtttgtatcgagcgtgagcaccgcaaagctcacgttagaagaagcttaccgacgcctaaaactgttatggagagtgtccctgcctgaggatgggcagtgccccttgcactgtgaacagataggcgaaatgaaggccgaggtcactaaattgcataagaaactgttcgagcaagaaaagaaactccaaaacacaatgaaattgctgcagctcagtaagaggcaggagaaagtgatcttcgaccagttggtcgtaacacataagattctgaggaaagctcgcggcaacctggagttgaggccaggcggcgcacacccaggaacatgctcacccagcagacctgggtcgtag

SEQ ID NO: 197469 - DNA, 5681 bp, Artificial Sequence
  derived and/or modified sequence
atgatggatctggtccttgaggaagacgtgactgtccctgggactctaagtgggtgcagtggcttggtgccctctgttcccgatgatctggatgggatcaaccctaatgccggactaggcaatggcctcctgccaaacgtttctgaagaaactgttagtccgacacgtgcccgtaatatgaaagacttcgaaaatcaaatcacagagctgaaaaaggaaaactttaacctaaagctgaggatttactttctcgaagagaggatgcagcaagagttccacgggccaacagagcacatttacaaaaccaatatcgagcttaaagttgaagtggagagcctcaagcgcgagttacaggaacgggagcaattgcttatcaaagcatctaaagccgtggaaagcctcgctgaggccggaggcagtgaaatccaacgagttaaggaagacgccaggaagaaggtgcaacaagtcgaggacctactgacaaaacgcatcctactcctggagaaggacgtaactgctgcgcaggcagagctggaaaaggccttcgcaggtaccgaaactgaaaaagctctgcgcctccgcttggagagtaagctgtccgagatgaaaaagatgcacgagggtgatctggcgatggcactggtgctggatgagaaggatcgcttaattgaagaactgaagctgtcattgaagtctaaagaggctttaattcagtgcttgaaggaagaaaaatcacagatggcatgtcctgacgaaaacgtttcatccggcgaacttcggggactctgtgctgctcctcgcgaagagaaggagcgagagactgaagccgcacagatggagcaccagaaggagcgtaatagcttcgaggagcgcatccaggcgttggaagaggacctgcgcgaaaaggagcgagagatcgccactgaaaagaagaattcactgaaacgcgataaggcgattcagggtttaacgatggcgttaaagagcaaagaaaagaaggtggaagaactgaacagcgagatagaaaagctcagcgccgcttttgctaaagctagggaagccttacaaaaggcccaaacccaggaattccagggatcagaggactacgaaactgctctaagcggaaaagaggctttgtctgccgctctaaggagccagaatctcacaaagagcaccgagaaccaccggctgagaagatcaatcaagaaaataacacaggagttgagcgacttacagcaggagagggagagattggaaaaggaccttgaagaggctcatagggagaagtccaagggtgattgtactatcagagacctccgcaacgaggtggaaaaattaagaaacgaggtgaatgaaagggaaaaggctatggagaaccggtataagtcactcctctctgagtctaacaaaaaactgcataaccaagagcaggtgattaagcatttgacagaaagcacaaatcaaaaggatgtcctgctgcagaaatttaacgagaaggacctcgaggtgatccagcagaactgttatttgatggctgctgaagatttagagctcaggtccgagggccttataaccgaaaagtgctcgtctcagcagccaccaggttctaaaaccatcttctccaaggagaaaaagcaatcgtcagactatgaagaacttattcaagtgctgaagaaagaacaggacatttacacacatttggtgaagtccctccaggagagcgactctatcaataacctgcaggccgaactgaacaaaatatttgccctgcggaaacagttggagcaggatgtactgtcataccagaacctccgaaagaccctggaggagcaaatttccgaaattagacggagagaggaagagagctttagcttatattccgaccagacctcatatctgtccatttgcctggaggaaaacaacaggttccaggtcgagcatttctcccaggaagagctcaaaaaaaaagtgtctgacctgattcagctagtcaaggagttgtacacagacaatcagcatctgaagaaaactatttttgacctatcctgtatgggattccaagggaatggattccctgatcggcttgcctcgaccgagcagacggagcttctggcaagcaaggaagatgaggatacaataaagatcggggaggacgatgagatcaattttctgtcagatcagcatcttcagcagtctaatgagatcatgaaggacctctccaagggcggatgcaaaaatggttacctaaggcacacggagagtaagatcagcgactgcgacggcgctcacgcaccaggctgcttagaagaaggagcctttatcaatctcttggcaccattgtttaacgagaaagcaacactgttactagagtcccggccagatctcttaaaggttgtgagggagctattgcttgggcagctattcctaactgaacaggaagtttcaggggagcacctggatgggaagaccgagaaaacaccaaaacagaagggggaactggtgcactttgtgcagactaacagttttagtaaacctcacgacgagctgaagctcagttgcgaggctcagctggtgaaagcaggggaagtgccaaaagtagggctgaaagacgccagcgttcagaccgtcgcaacggagggagacctgctgcgctttaagcacgaggccaccagagaggcctgggaggaaaagcccataaatactgcgttgtccgccgagcacagacctgaaaacctacacggtgtgcctggctggcaggcagcactgctgtctctccctggaattaccaatcgggaagccaagaagtctcgactgcctatcctaattaagccaagtaggtctctgggcaacatgtaccgactgcccgctacccaggaagtggtgacgcagctgcagagccagattctcgagttgcagggggagctgaaggaatttaaaacttgcaataagcagcttcatcaaaaattgatcttagccgaggctgtcatggaaggacggccaactcctgataagaccctgttaaatgctcagccaccggtcggggcagcctaccaagactccccgggagagcagaaggggattaagacaacaagctctgtatggagggacaaggagatggactccgaccagcaaaggtcctacgaaattgattccgagatttgcccccctgatgacttggcctcactcccctcatgcaaggaaaaccctgaggatgtgctctctcccaccagcgttgctacgtatctcagcagcaagtctcagccgagtgcaaaagtttcagtaatgggcaccgaccagtcagaatccatcaacacctctaacgaaactgagtatctgaaacagaagattcacgatctggagaccgaactcgaaggctaccagaatttcatcttccagttgcaaaagcactcccaatgctccgaagcaatcattaccgtcttgtgtgggaccgaaggcgctcaggacgggctctccaagccaaaaaacggatcagacggagaggaaatgacgttttcctccctacatcaggtgcgctatgtgaaacacgtaaaaatcctggggccactggcccctgagatgattgactctcgggtcctggagaatctcaaacaacaactggaagagcaggaatataaattgcaaaaggagcagaatcttaacatgcagctgttctctgagatccataacctccagaacaagttccgggatcttagccccccacgatatgacagcttggtccagagccaagcgagggaactcagcctgcagcggcagcaaatcaaggacggacatggcatttgcgtgatctcccgccaacacatgaacactatgataaaggcatttgaagaactgctgcaggcctccgacgtcgactactgcgtggccgaaggattccaggaacagctcaatcaatgtgcagaattactcgagaagcttgagaaactgttcctcaatggaaagagcgtgggcgttgaaatgaacacgcagaatgaactgatggaaaggatcgaagaagataacctgacataccagcacctcttaccggaaagtcctgagccatcagctagtcatgccctgtcagactacgagacctcagaaaaatctttctttagcagggaccagaaacaagacaatgaaacggagaaaactagtgtgatggtcaactcttttagccaggacctcttaatggagcacatccaggagattaggaccctgcgcaaacgcctcgaggagagtatcaaaaccaatgaaaaattacgcaagcagttagaacgtcagggctcggagtttgtgcagggctccacctcaatcttcgcttcagggagtgagctgcactcatccctgacatctgaaattcattttctgcgcaagcaaaaccaagcactaaacgccatgctgattaaagggagtagagacaagcaaaaagagaatgacaaactgagagaatctctgagtaggaaaactgtatctctggagcatcttcaacgcgagtatgcaagtgttaaagaggagaatgaacgcttacagaaggagggaagtgaaaaagaacggcacaatcagcagctcatacaagaagtccgatgttctggtcaagaattgtcccgcgtgcaggaggaagtcaagttacggcaacagttgctgagtcagaacgataagttactgcaaagtctcagggtcgagctgaaggcttacgaaaaactggatgaggagcaccgccgtctccgagaggcatctggcgaggggtggaagggccaagatcccttcagagatctccactcgctgttgatggaaattcaggccctgcggctccagttagaacgcagcatagaaacatccagcactcttcagagccggctcaaagaacagctagcgcgtggcgcagagaaagcccaggagggagcactgaccctggcggtccaagctgtctcaatccccgaggttccactccagccagacaaacacgatggcgacaaataccccatggagagcgataactcatttgatctgttcgattccagccaagcagtgacacctaagtcagtttccgagactccaccgctgtccggcaacgatacggactctctgtcttgtgacagcggtagttctgcaaccagtacaccctgcgttagcaggctggtcactggacaccatctctgggcatctaagaatgggaggcacgttctaggcctgattgaagattatgaggcacttctcaaacagatatcccaaggccagagactcctggcagagatggacattcagacccaggaagctcctagctctacttctcaggagctgggtaccaaaggccctcatcctgccccactatccaaatttgtatcttctgtctcaactgctaagcttacactggaagaggcctatcggcgactcaaactactgtggcgagtcagcctgcctgaggacggccagtgtcccttacattgcgagcagattggagagatgaaagccgaggtcactaagctccacaagaagttgtttgagcaggagaagaaattacagaatacaatgaaactgctgcagctatccaagcgacaggagaaggtgatttttgatcagctggttgtcactcacaagatactgaggaaagcccgtggcaatctggagctaaggccgggtggcgctcaccctggcacctgcagcccatccaggccaggcagtta

SEQ ID NO: 197470 - DNA, 5558 bp, Artificial Sequence
  derived and/or modified sequence
atgatggacttagtgctggaagaggacgtgacagtgccaggtactctgagtgggtgcagcggcctagtgccctctgttcctgatgatctggacggcatcaacccaaatgccggattgggtaatgggttgctgcctaacgtatctgaagagaccgtgtcccccacacgggctcggaacatgaaagacttcgagaaccaaatcaccgagctgaagaaagaaaatttcaatctcaaattgcggatctattttctggaagagcgcatgcagcaggagttccatggtcccacagaacatatctacaagactaatatcgagctcaaagtcgaagtggaatcacttaagagagagctgcaggagcgggaacagctgcttataaaagcttcaaaagcagtggaatctttagctgaggccggtgggagcgaaatccagcgggttaaggaggatgccagaaagaaagtgcagcaagtggaggatctgcttacgaagcgcatcttgctcctggaaaaggatgtgactgccgcacaagcagagctcgaaaaggccttcgccggaactgagaccgagaaggcactgcggcttcggttagaatccaagttgtctgagatgaagaaaatgcacgaaggagacttggcaatggccctggtgttggacgaaaaggatcgcctgattgaagaacttaagttgtcccttaagagcaaagaggccttgatccagtgcctcaaagaagaaaagtctcagatggcttgtccagacgagaatgtgtcctcaggcgagctgcggggtctatgcgcagccccacgtgaagaaaaggaaagagagaccgaagcagcccaaatggaacatcaaaaggaacggaattctttcgaggagcggatccaggctctggaggaagatcttagagagaaagaacgggaaatcgctactgagaagaaaaattcattaaagcgagacaaggcaattcaaggacttaccatggcgctgaagagtaaggaaaaaaaagttgaggaattaaactctgaaatcgaaaagctgtctgcggcatttgccaaggcacgggaagctctccagaaagcccaaactcaggagttccaaggatcagaggattacgaaactgctttgtccggcaaagaagcactgagcgctgccctgagaagtcagaacttaacgaagtcgaccgagaatcatcgcctgcggcgatcaatcaagaagattacccaggagttgtccgaccttcaacaggagcgggaacgtctcgaaaaggatttggaggaggctcacagggaaaaatcgaaaggggattgcactataagggatctgcgaaatgaggtcgagaagcttcgcaacgaagtgaatgagcgcgagaaggcaatggaaaatcgctataaatctcttctttccgaatctaacaaaaagctacacaatcaggagcaagtgattaaacatttgaccgaaagcaccaatcagaaagatgttttactgcagaagtttaatgaaaaagatctggaggtcatccagcagaattgttatctgatggctgcagaagatttagaacttcggtcagagggcctcataaccgaaaagtgttcttcgcaacaaccgccaggatctaagaccatttttagcaaggagaagaagcagagcagtgactacgaggaactgatccaggtactgaaaaaagagcaagatatttatacccacctggtaaaaagcctgcaggagtcagacagcattaacaatctgcaggccgagttgaacaagatctttgccctgcgcaagcaactggagcaggatgtcttgagctaccagaacctgcggaaaactctggaagagcagatcagcgagatcaggaggcgcgaggaagagtcttttagtctgtattccgatcagacatcctatctcagtatttgtttggaagagaataacagatttcaggtggaacactttagtcaggaagagctgaagaagaaagtgtcagacctgatccaactcgtgaaagaattatacacagacaatcagcaccttaagaagacaatcttcgatctgtcttgcatgggtttccagggaaatggttttcctgataggctggcgtcgacagagcaaaccgagcttcttgcaagtaaagaggacgaggacacaattaagatcggagaggacgatgagattaatttcctaagcgatcaacacctccagcagagcaatgagatcatgaaggacttatcaaagggaggatgtaagaatggatacctgcgccacactgaaagtaaaatatctgattgtgatggagcccacgcccctggttgtctcgaagaaggagccttcatcaacctgttagctcccctgttcaacgagaaggccactctgctgttggagtctaggccggacttactgaaggtcgtccgcgagctcctgctagggcaacttttcctcaccgagcaagaggttagcggggagcacctagatgggaagaccgagaaaacccccaagcagaagggcgaacttgttcattttgtgcagactaactccttctccaagcctcatgatgaactaaagttgagctgtgaggcccagttggtgaaggccggagaagtaccaaaagtcggactgaaggacgcctcagttcagaccgtggccaccgagggggacctgttgcgatttaaacatgaagccacacgggaggcctgggaggaaaaacccatcaacacggctctgtctgccgagcatagaccggaaaatctgcatggcgtgcctggttggcaggctgcattgctgagcctgccagggattactaatcgggaggctaaaaaaagcaggctcccaatcctcattaaaccaagccgctcactgggaaacatgtatagactgccagcaacacaggaagtggtgacacagctgcagtcacagatcctagagttacagggagaattgaaagaattcaagacctgcaacaagcaacttcaccagaaactgatcctcgccgaggccgtcatggaaggacgccctacaccggacaagacactgttgaacgacagcgagatctgccctcctgacgacttagcgtccctgccgagctgtaaggagaatcccgaagacgtgttaagccccacgagtgtggccacctatttaagttctaagagtcagccctctgctaaggtcagcgtgatgggtaccgatcagtccgagagcattaataccagcaatgaaaccgagtacttgaagcagaagatccatgatcttgaaaccgagttggaagggtaccagaactttatcttccagctccaaaagcattctcagtgctcagaggccattattaccgtgttatgtggaactgaaggcgctcaggacgggctgtccaagcctaaaaacggcagcgacggggaggaaatgactttttcttctctacaccaggtgcgctatgtcaagcacgtgaagatcttaggtcccctcgcccctgaaatgatcgatagcagggtgctcgagaacctcaaacaacaactagaggagcaagagtataagctgcagaaggagcaaaacctgaacatgcaactgttcagtgaaatacacaacttgcaaaacaaatttagagacctgtcccccccaaggtatgattctctggtgcaaagtcaggcccgtgaactgtctcttcagaggcagcagatcaaagacggccatggcatctgcgtgatctccagacagcacatgaatactatgatcaaggcattcgaggagctgctccaagccagtgatgtggactactgtgtcgcagaggggtttcaggaacaactgaaccagtgtgccgagctcctagagaagctggagaaactgttcctgaatggcaaatcagtgggagtcgagatgaacacccagaatgagctgatggagcgcatcgaggaagataacttgacctaccagcacctactgccagaaagccccgagcctagcgcttcgcacgctctgtccgactatgaaacaagcgaaaagagtttcttttccagagaccaaaagcaggataatgaaaccgaaaaaaccagtgtgatggtgaattcttttagccaggacctcctgatggagcacatccaggagatccgcactctcagaaaacggctggaggagtcaattaaaaccaacgagaagctgcgcaagcaactggagcgccaaggctcagagttcgtgcagggaagcaccagtatctttgcatccggtagtgaactgcacagcagcctcacatctgagatccactttctgcggaaacagaatcaggccctgaatgcaatgttgatcaagggcagtcgcgacaaacagaaagaaaacgataagctacgcgagtcgctttcgcgtaaaactgtttctttggaacacctgcaaagagagtatgcatctgtaaaggaggagaacgaaagactgcagaaggaggggtcagagaaggagaggcataaccaacagctcatccaggaggtgcgttgtagtgggcaggagctctctcgtgtgcaggaagaggtgaaactcagacagcagttactctcacagaacgataaattactgcagagcctgcgtgtagaactgaaagcctacgagaagctcgatgaagagcaccgcaggttaagggaggcatcgggagagggatggaagggccaggacccttttagggacctgcattccctcctgatggagattcaggccctgaggcttcagctggagaggtcgatagagacaagctcaactttgcagtcaaggctcaaggaacagctggccaggggtgccgaaaaagctcaagagggagcactgacactggcggtccaggcagtgtccatccccgaggtacctctccagccggacaagcatgatggcgacaagtacccaatggaatcagataacagtttcgacctttttgattcttcgcaggcagtgaccccaaaaagcgtgagcgaaactcctccactcagtggaaacgatactgattctctgagttgtgattctggcagttccgccacttccacaccttgtgtgtcccgactggttaccggacatcacctgtgggccagcaagaacgggagacatgttctgggactgatcgaagattacgaagccctgctgaaacagatctcccagggtcagcgcctcttggccgagatggacatccagactcaggaagcaccttcctccacgtcgcaagaactggggactaagggccctcatcccgcaccgctctcgaagttcgtttccagcgtaagcaccgcaaagctcacactagaggaggcttataggaggttaaaactcctgtggcgcgtgtcacttcccgaggatgggcagtgccccctccactgtgaacagatcggcgagatgaaggcagaagtgacgaagctgcacaagaaactcttcgaacaggagaagaagttgcaaaacactatgaagcttttgcagctgtcaaaaagacaggagaaggttatctttgatcaattggtcgtaacgcacaaaatccttcggaaggccagaggtaacttagagcttcgacccggaggagcccaccccggaacctgttcaccatcccgtcccggatcata

SEQ ID NO: 197471 - DNA, 6228 bp, Artificial Sequence
  derived and/or modified sequence
ggaagaagcgccgggaaagatggcggcgtctgtggtttgaattccagcggcgccgccagagtctgaacaagagctggggtggagggggcggggacctggggagcccggcgggtcgctatcgcggggggtactagtggcgccgccgccacagacaccaacgctgtcgccacctctgtagccatgatggacttggtgttggaagaggacgtcaccgtccctgggacgctcagcggctgcagtggccttgttcccagtgtaccagatgacctggatggcatcaaccccaatgctgggttgggaaatggtctgctcccaaatgtgtcagaagaaacagtgtctcccaccagagcacggaacatgaaggactttgaaaatcaaatcactgaattgaagaaagaaaactttaacctaaagctccgcatctatttccttgaggaaagaatgcaacaggaatttcatggccccactgaacatatctacaaaactaacattgagctcaaggtggaagtagaaagtctgaagcgggaactccaggagagagagcagctgctcatcaaagcctccaaagcagttgagagcttagctgaagcaggtggctctgaaatccagcgggtgaaagaagatgctcgaaagaaggtgcagcaggtggaagatctcctaactaaaagaatactccttttggaaaaggatgtgacagccgcccaggcagaactggaaaaggcctttgcagggacagagacggagaaggctcttcggttgcgtttggaaagcaagctttcagagatgaagaagatgcacgagggggacttggcgatggctctggtcctggatgagaaagacagactgattgaggagttgaagctgtctttgaagagcaaagaagctttaattcagtgccttaaagaggagaaatctcagatggcatgtcctgatgagaatgtgtcatctggagagctccgaggactttgtgctgctccaagggaagaaaaggagagagaaactgaggctgcacaaatggagcatcagaaggagagaaacagctttgaagagaggatccaggcacttgaagaggacctgagagagaaggaaagagaaattgctacagagaagaaaaatagtctaaagagggataaagccattcagggtttaaccatggcattaaaatcaaaggaaaaaaaggttgaagaacttaactctgaaattgaaaagctcagtgctgcctttgctaaagccagagaggccctacagaaagcacagacccaggaatttcaggggtctgaagactatgagactgctctatcaggaaaggaagccctttcggctgcgctgcgctcacaaaacctcaccaagagtacagagaaccacagactgcgtagaagcattaagaagatcacccaggagctgagtgacttgcagcaggagagggagagactggagaaggacctggaggaagcccatcgagagaagagcaaaggagactgcaccatccgtgatcttagaaatgaagttgaaaaattacgcaatgaagtgaatgaaagagagaaagcaatggaaaatcgttacaagagtcttctgagtgaaagcaataaaaaattgcacaatcaagagcaagtgatcaaacatctaacagaaagtaccaatcagaaggacgtgttgcttcagaaattcaatgaaaaagatttggaagtaatacagcagaactgctatttaatggctgcagaggatcttgagctcaggagtgaaggcttaataacagaaaagtgctcttctcaacagccaccaggcagcaaaaccatcttctctaaggaaaagaaacaatcatcagactatgaagagctgattcaggtcttaaagaaagagcaggacatctatacccatctggtcaaatctctgcaggaatcagacagtatcaacaacctgcaggctgagttaaacaagatttttgccctgcggaagcaactggagcaggatgtgctttcatatcagaatttgcggaagaccttggaggagcagatcagcgaaattcggaggcgggaagaagaatcattttcactttatagtgatcaaacatcttatctaagtatttgccttgaagaaaacaatcggtttcaagtggaacatttttctcaagaagaacttaagaaaaaggtcagtgaccttatacagctagtgaaggagctgtatacagacaaccagcacctgaagaaaaccatttttgatctctcctgcatgggtttccagggaaatgggtttccagatagacttgcgtctacagaacaaacagagcttctggctagcaaggaggacgaggacacgatcaaaattggggaggatgacgagattaatttcctgagtgaccagcatttgcagcagagtaatgagattatgaaagacctttccaaaggaggctgcaaaaatggatacttaaggcacacggagtctaagatttcagattgtgatggggcccacgcacctggctgcctagaagaaggtgcattcataaacctgcttgcccctttgttcaatgagaaggccacattattactggaatccaggccagaccttctgaaagtggtacgggaactgcttctgggacaactattcttgacagagcaggaagtttctggagaacaccttgatggtaaaactgagaagacacctaagcaaaaaggtgaacttgtacattttgtccaaaccaactcattttccaagccacatgatgaactgaagttgtcttgtgaggcccagctagtaaaggcaggcgaagtgcccaaggtaggactgaaagatgcctcagtgcagactgtggccacggagggcgacctgctgagattcaagcatgaagcaacaagagaggcttgggaagagaaaccgatcaacactgcactcagcgcagagcatcggccagagaacctgcacggggtgcctgggtggcaggctgccctcctttccctccctggtattaccaacagagaggctaagaagtcccgcttgccaatcctaataaaaccatcccggtcattaggaaatatgtatcgtctccctgccacccaggaggtggtgacgcagctgcagagccagatcttggagctgcagggggagctgaaggagtttaaaacttgtaataagcaacttcaccaaaagttaattctggctgaagcagtgatggaggggaggccaacgcccgacaaaacgttgctgaatgctcagccccctgtgggagcagcctaccaggacagcccaggagagcagaaaggaattaaaaccacatcttctgtctggagagacaaggaaatggacagtgatcagcaaagaagctacgagattgactctgagatttgcccacctgatgaccttgccagcttgccatcatgcaaagaaaatcctgaagatgttctgagcccaacttcagtagctacttacctgagttccaagagtcagccttctgctaaagtcagtgtgatggggactgatcagtcagagagcattaatacctcaaatgagacagaatacttaaaacagaaaatccatgacttggaaactgagctggaaggctaccagaatttcatatttcagcttcaaaagcactcccagtgcagtgaggccataattacagttttgtgtgggacagaaggggcccaggatggcttgagcaagcccaagaatggttctgatggggaagaaatgaccttttcaagtttgcaccaagtgcgatacgtgaaacacgtgaaaatcctcggtccgctggccccagagatgattgacagcagggtgctggagaacctcaaacagcagctggaggaacaggaatacaagctgcagaaggagcagaatttgaacatgcaacttttcagtgagatccataatctgcagaataagttcagagatctctcacctcccagatacgattcattagttcagtcccaagccagggagctctcccttcaacggcagcagattaaggatggccatggcatctgtgtcatctcccgtcaacacatgaacaccatgattaaggcatttgaggagttgctgcaggccagtgatgtggattactgtgtggccgagggtttccaggaacagctgaatcaatgtgctgagctgctggagaaattggaaaagctatttctcaacggaaaatcagttggagtggaaatgaacacccagaatgaactgatggagaggattgaggaagacaacttaacctaccaacatcttctgcctgaatctcctgagccttcagcctctcatgcgctctctgattatgaaacatctgaaaagtccttcttctcacgagaccagaagcaagataatgagacagagaagacttcagttatggtgaacagtttttctcaagacttactaatggaacacatacaggaaattcgaactttgagaaagcgtttagaagaatctattaaaacaaatgagaagctacggaaacagttggaacggcaaggatctgaatttgttcaaggttctacaagcatttttgcttctggttcagagcttcatagttctctaacatcagaaattcatttcttgaggaagcagaaccaggccctcaatgcaatgctcattaaaggatccagagataaacagaaggagaatgacaaattacgagagtccctctccaggaagaccgtgagcctggagcaccttcagcgggagtatgccagcgtgaaggaagaaaatgaaaggctgcagaaagaaggcagcgagaaggagagacacaaccagcagctgatccaggaggtccgctgcagcggccaggagctgagcagggtgcaggaggaggtgaagttgaggcagcagctgctctcacagaatgacaagctattgcagtctctccgagtggagctgaaggcgtatgagaagctggatgaagagcacaggagactgagagaggcgtcgggagaaggctggaaggggcaggatcctttcagggacctgcacagcctcctgatggagatccaggctctgcgcttgcaactagaaaggagcatcgaaaccagcagcactctgcagagcaggctcaaggaacagctggcaaggggggcagagaaggcacaggaaggagccctcactctggctgtccaagccgtgtccatccctgaggtgccccttcagcctgacaaacacgatggtgacaaatatcccatggaaagtgataattcatttgatctgtttgattcctcccaggcagtgacaccaaaatcagtttcagagactcctccactctctgggaatgacacggactccctctcctgcgacagtggcagttcggcaactagcactccgtgtgtgtcccgcctggtcactggccaccacctgtgggccagcaagaatggccgccatgtcctgggcctgattgaggactatgaggccctgctcaaacagatcagccagggacagaggctccttgctgaaatggacattcaaacccaagaggctcccagctccacaagtcaagagctgggaacaaagggtccacacccagcaccactgagcaagtttgtgagcagtgtgagcacggccaagctgaccctggaagaggcctacaggcggctgaagcttctctggagagtctcactccccgaggatggccagtgcccccttcactgtgagcagattggagaaatgaaggcagaggtcaccaaactacataaaaaattgtttgaacaagaaaagaagttgcaaaacaccatgaagcttttgcagctgagcaagcgccaggaaaaagtcatctttgatcaattggtcgtaacccacaaaatccttcggaaggccagaggaaacctggagcttaggcctgggggagcccatccaggaacatgcagtcccagcagaccaggctcctgagaagaactttcagccaataaagcttgtgcttcccccaccgagctcacgctgtctctttgttccaagtgtggttcctatttattgaggaagaaagagctgtctggccaaaggaaatctattttttcccttcatgttttctctctgaaagttggcttgagagttgttgtcagaaaggtgcaggtgctccacaaacgggtggtaaaaaggcctcgagctcttggatgttgtatttcagatcaggggcaggcaccggagttgaggctgtgcgccttggtgggcttcacgtcttcccctggatttgcttagtactcagccagtgccacagtttgaagattctcattaaatgattcatttcatttcaccttg

SEQ ID NO: 197472 - DNA, 6107 bp, Artificial Sequence
  derived and/or modified sequence
aggaagaagcgccgggaaagatggcggcgtctgtggtttgaattccagcggcgccgccagagtctgaacaagagctggggtggagggggcggggacctggggagcccggcgggtcgctatcgcggggggtactagtggcgccgccgccacagacaccaacgctgtcgccacctctgtagccatgatggacttggtgttggaagaggacgtcaccgtccctgggacgctcagcggctgcagtggccttgttcccagtgtaccagatgacctggatggcatcaaccccaatgctgggttgggaaatggtctgctcccaaatgtgtcagaagaaacagtgtctcccaccagagcacggaacatgaaggactttgaaaatcaaatcactgaattgaagaaagaaaactttaacctaaagctccgcatctatttccttgaggaaagaatgcaacaggaatttcatggccccactgaacatatctacaaaactaacattgagctcaaggtggaagtagaaagtctgaagcgggaactccaggagagagagcagctgctcatcaaagcctccaaagcagttgagagcttagctgaagcaggtggctctgaaatccagcgggtgaaagaagatgctcgaaagaaggtgcagcaggtggaagatctcctaactaaaagaatactccttttggaaaaggatgtgacagccgcccaggcagaactggaaaaggcctttgcagggacagagacggagaaggctcttcggttgcgtttggaaagcaagctttcagagatgaagaagatgcacgagggggacttggcgatggctctggtcctggatgagaaagacagactgattgaggagttgaagctgtctttgaagagcaaagaagctttaattcagtgccttaaagaggagaaatctcagatggcatgtcctgatgagaatgtgtcatctggagagctccgaggactttgtgctgctccaagggaagaaaaggagagagaaactgaggctgcacaaatggagcatcagaaggagagaaacagctttgaagagaggatccaggcacttgaagaggacctgagagagaaggaaagagaaattgctacagagaagaaaaatagtctaaagagggataaagccattcagggtttaaccatggcattaaaatcaaaggaaaaaaaggttgaagaacttaactctgaaattgaaaagctcagtgctgcctttgctaaagccagagaggccctacagaaagcacagacccaggaatttcaggggtctgaagactatgagactgctctatcaggaaaggaagccctttcggctgcgctgcgctcacaaaacctcaccaagagtacagagaaccacagactgcgtagaagcattaagaagatcacccaggagctgagtgacttgcagcaggagagggagagactggagaaggacctggaggaagcccatcgagagaagagcaaaggagactgcaccatccgtgatcttagaaatgaagttgaaaaattacgcaatgaagtgaatgaaagagagaaagcaatggaaaatcgttacaagagtcttctgagtgaaagcaataaaaaattgcacaatcaagagcaagtgatcaaacatctaacagaaagtaccaatcagaaggacgtgttgcttcagaaattcaatgaaaaagatttggaagtaatacagcagaactgctatttaatggctgcagaggatcttgagctcaggagtgaaggcttaataacagaaaagtgctcttctcaacagccaccaggcagcaaaaccatcttctctaaggaaaagaaacaatcatcagactatgaagagctgattcaggtcttaaagaaagagcaggacatctatacccatctggtcaaatctctgcaggaatcagacagtatcaacaacctgcaggctgagttaaacaagatttttgccctgcggaagcaactggagcaggatgtgctttcatatcagaatttgcggaagaccttggaggagcagatcagcgaaattcggaggcgggaagaagaatcattttcactttatagtgatcaaacatcttatctaagtatttgccttgaagaaaacaatcggtttcaagtggaacatttttctcaagaagaacttaagaaaaaggtcagtgaccttatacagctagtgaaggagctgtatacagacaaccagcacctgaagaaaaccatttttgatctctcctgcatgggtttccagggaaatgggtttccagatagacttgcgtctacagaacaaacagagcttctggctagcaaggaggacgaggacacgatcaaaattggggaggatgacgagattaatttcctgagtgaccagcatttgcagcagagtaatgagattatgaaagacctttccaaaggaggctgcaaaaatggatacttaaggcacacggagtctaagatttcagattgtgatggggcccacgcacctggctgcctagaagaaggtgcattcataaacctgcttgcccctttgttcaatgagaaggccacattattactggaatccaggccagaccttctgaaagtggtacgggaactgcttctgggacaactattcttgacagagcaggaagtttctggagaacaccttgatggtaaaactgagaagacacctaagcaaaaaggtgaacttgtacattttgtccaaaccaactcattttccaagccacatgatgaactgaagttgtcttgtgaggcccagctagtaaaggcaggcgaagtgcccaaggtaggactgaaagatgcctcagtgcagactgtggccacggagggcgacctgctgagattcaagcatgaagcaacaagagaggcttgggaagagaaaccgatcaacactgcactcagcgcagagcatcggccagagaacctgcacggggtgcctgggtggcaggctgccctcctttccctccctggtattaccaacagagaggctaagaagtcccgcttgccaatcctaataaaaccatcccggtcattaggaaatatgtatcgtctccctgccacccaggaggtggtgacgcagctgcagagccagatcttggagctgcagggggagctgaaggagtttaaaacttgtaataagcaacttcaccaaaagttaattctggctgaagcagtgatggaggggaggccaacgcccgacaaaacgttgctgaatgactctgagatttgcccacctgatgaccttgccagcttgccatcatgcaaagaaaatcctgaagatgttctgagcccaacttcagtagctacttacctgagttccaagagtcagccttctgctaaagtcagtgtgatggggactgatcagtcagagagcattaatacctcaaatgagacagaatacttaaaacagaaaatccatgacttggaaactgagctggaaggctaccagaatttcatatttcagcttcaaaagcactcccagtgcagtgaggccataattacagttttgtgtgggacagaaggggcccaggatggcttgagcaagcccaagaatggttctgatggggaagaaatgaccttttcaagtttgcaccaagtgcgatacgtgaaacacgtgaaaatcctcggtccgctggccccagagatgattgacagcagggtgctggagaacctcaaacagcagctggaggaacaggaatacaagctgcagaaggagcagaatttgaacatgcaacttttcagtgagatccataatctgcagaataagttcagagatctctcacctcccagatacgattcattagttcagtcccaagccagggagctctcccttcaacggcagcagattaaggatggccatggcatctgtgtcatctcccgtcaacacatgaacaccatgattaaggcatttgaggagttgctgcaggccagtgatgtggattactgtgtggccgagggtttccaggaacagctgaatcaatgtgctgagctgctggagaaattggaaaagctatttctcaacggaaaatcagttggagtggaaatgaacacccagaatgaactgatggagaggattgaggaagacaacttaacctaccaacatcttctgcctgaatctcctgagccttcagcctctcatgcgctctctgattatgaaacatctgaaaagtccttcttctcacgagaccagaagcaagataatgagacagagaagacttcagttatggtgaacagtttttctcaagacttactaatggaacacatacaggaaattcgaactttgagaaagcgtttagaagaatctattaaaacaaatgagaagctacggaaacagttggaacggcaaggatctgaatttgttcaaggttctacaagcatttttgcttctggttcagagcttcatagttctctaacatcagaaattcatttcttgaggaagcagaaccaggccctcaatgcaatgctcattaaaggatccagagataaacagaaggagaatgacaaattacgagagtccctctccaggaagaccgtgagcctggagcaccttcagcgggagtatgccagcgtgaaggaagaaaatgaaaggctgcagaaagaaggcagcgagaaggagagacacaaccagcagctgatccaggaggtccgctgcagcggccaggagctgagcagggtgcaggaggaggtgaagttgaggcagcagctgctctcacagaatgacaagctattgcagtctctccgagtggagctgaaggcgtatgagaagctggatgaagagcacaggagactgagagaggcgtcgggagaaggctggaaggggcaggatcctttcagggacctgcacagcctcctgatggagatccaggctctgcgcttgcaactagaaaggagcatcgaaaccagcagcactctgcagagcaggctcaaggaacagctggcaaggggggcagagaaggcacaggaaggagccctcactctggctgtccaagccgtgtccatccctgaggtgccccttcagcctgacaaacacgatggtgacaaatatcccatggaaagtgataattcatttgatctgtttgattcctcccaggcagtgacaccaaaatcagtttcagagactcctccactctctgggaatgacacggactccctctcctgcgacagtggcagttcggcaactagcactccgtgtgtgtcccgcctggtcactggccaccacctgtgggccagcaagaatggccgccatgtcctgggcctgattgaggactatgaggccctgctcaaacagatcagccagggacagaggctccttgctgaaatggacattcaaacccaagaggctcccagctccacaagtcaagagctgggaacaaagggtccacacccagcaccactgagcaagtttgtgagcagtgtgagcacggccaagctgaccctggaagaggcctacaggcggctgaagcttctctggagagtctcactccccgaggatggccagtgcccccttcactgtgagcagattggagaaatgaaggcagaggtcaccaaactacataaaaaattgtttgaacaagaaaagaagttgcaaaacaccatgaagcttttgcagctgagcaagcgccaggaaaaagtcatctttgatcaattggtcgtaacccacaaaatccttcggaaggccagaggaaacctggagcttaggcctgggggagcccatccaggaacatgcagtcccagcagaccaggctcctgagaagaactttcagccaataaagcttgtgcttcccccaccgagctcacgctgtctctttgttccaagtgtggttcctatttattgaggaagaaagagctgtctggccaaaggaaatctattttttcccttcatgttttctctctgaaagttggcttgagagttgttgtcagaaaggtgcaggtgctccacaaacgggtggtaaaaaggcctcgagctcttggatgttgtatttcagatcaggggcaggcaccggagttgaggctgtgcgccttggtgggcttcacgtcttcccctggatttgcttagtactcagccagtgccacagtttgaagattctcattaaatgattcatttcatttcaccttga

SEQ ID NO: 197473 - DNA, 5682 bp, Artificial Sequence
  derived and/or modified sequence
atgatggacctggtgctggaggaggacgtgaccgtgcccggcaccctgagcggctgcagcggcctggtgcccagcgtgcccgacgacctggacggcatcaaccccaacgccggcctgggcaacggcctgctgcccaacgtgagcgaggagaccgtgagccccaccagagccagaaacatgaaggacttcgagaaccagatcaccgagctgaagaaggagaacttcaacctgaagctgagaatctacttcctggaggagagaatgcagcaggagttccacggccccaccgagcacatctacaagaccaacatcgagctgaaggtggaggtggagagcctgaagagagagctgcaggagagagagcagctgctgatcaaggccagcaaggccgtggagagcctggccgaggccggcggcagcgagatccagagagtgaaggaggacgccagaaagaaggtgcagcaggtggaggacctgctgaccaagagaatcctgctgctggagaaggacgtgaccgccgcccaggccgagctggagaaggccttcgccggcaccgagaccgagaaggccctgagactgagactggagagcaagctgagcgagatgaagaagatgcacgagggcgacctggccatggccctggtgctggacgagaaggacagactgatcgaggagctgaagctgagcctgaagagcaaggaggccctgatccagtgcctgaaggaggagaagagccagatggcctgccccgacgagaacgtgagcagcggcgagctgagaggcctgtgcgccgcccccagagaggagaaggagagagagaccgaggccgcccagatggagcaccagaaggagagaaacagcttcgaggagagaatccaggccctggaggaggacctgagagagaaggagagagagatcgccaccgagaagaagaacagcctgaagagagacaaggccatccagggcctgaccatggccctgaagagcaaggagaagaaggtggaggagctgaacagcgagatcgagaagctgagcgccgccttcgccaaggccagagaggccctgcagaaggcccagacccaggagttccagggcagcgaggactacgagaccgccctgagcggcaaggaggccctgagcgccgccctgagaagccagaacctgaccaagagcaccgagaaccacagactgagaagaagcatcaagaagatcacccaggagctgagcgacctgcagcaggagagagagagactggagaaggacctggaggaggcccacagagagaagagcaagggcgactgcaccatcagagacctgagaaacgaggtggagaagctgagaaacgaggtgaacgagagagagaaggccatggagaacagatacaagagcctgctgagcgagagcaacaagaagctgcacaaccaggagcaggtgatcaagcacctgaccgagagcaccaaccagaaggacgtgctgctgcagaagttcaacgagaaggacctggaggtgatccagcagaactgctacctgatggccgccgaggacctggagctgagaagcgagggcctgatcaccgagaagtgcagcagccagcagccccccggcagcaagaccatcttcagcaaggagaagaagcagagcagcgactacgaggagctgatccaggtgctgaagaaggagcaggacatctacacccacctggtgaagagcctgcaggagagcgacagcatcaacaacctgcaggccgagctgaacaagatcttcgccctgagaaagcagctggagcaggacgtgctgagctaccagaacctgagaaagaccctggaggagcagatcagcgagatcagaagaagagaggaggagagcttcagcctgtacagcgaccagaccagctacctgagcatctgcctggaggagaacaacagattccaggtggagcacttcagccaggaggagctgaagaagaaggtgagcgacctgatccagctggtgaaggagctgtacaccgacaaccagcacctgaagaagaccatcttcgacctgagctgcatgggcttccagggcaacggcttccccgacagactggccagcaccgagcagaccgagctgctggccagcaaggaggacgaggacaccatcaagatcggcgaggacgacgagatcaacttcctgagcgaccagcacctgcagcagagcaacgagatcatgaaggacctgagcaagggcggctgcaagaacggctacctgagacacaccgagagcaagatcagcgactgcgacggcgcccacgcccccggctgcctggaggagggcgccttcatcaacctgctggcccccctgttcaacgagaaggccaccctgctgctggagagcagacccgacctgctgaaggtggtgagagagctgctgctgggccagctgttcctgaccgagcaggaggtgagcggcgagcacctggacggcaagaccgagaagacccccaagcagaagggcgagctggtgcacttcgtgcagaccaacagcttcagcaagccccacgacgagctgaagctgagctgcgaggcccagctggtgaaggccggcgaggtgcccaaggtgggcctgaaggacgccagcgtgcagaccgtggccaccgagggcgacctgctgagattcaagcacgaggccaccagagaggcctgggaggagaagcccatcaacaccgccctgagcgccgagcacagacccgagaacctgcacggcgtgcccggctggcaggccgccctgctgagcctgcccggcatcaccaacagagaggccaagaagagcagactgcccatcctgatcaagcccagcagaagcctgggcaacatgtacagactgcccgccacccaggaggtggtgacccagctgcagagccagatcctggagctgcagggcgagctgaaggagttcaagacctgcaacaagcagctgcaccagaagctgatcctggccgaggccgtgatggagggcagacccacccccgacaagaccctgctgaacgcccagccccccgtgggcgccgcctaccaggacagccccggcgagcagaagggcatcaagaccaccagcagcgtgtggagagacaaggagatggacagcgaccagcagagaagctacgagatcgacagcgagatctgcccccccgacgacctggccagcctgcccagctgcaaggagaaccccgaggacgtgctgagccccaccagcgtggccacctacctgagcagcaagagccagcccagcgccaaggtgagcgtgatgggcaccgaccagagcgagagcatcaacaccagcaacgagaccgagtacctgaagcagaagatccacgacctggagaccgagctggagggctaccagaacttcatcttccagctgcagaagcacagccagtgcagcgaggccatcatcaccgtgctgtgcggcaccgagggcgcccaggacggcctgagcaagcccaagaacggcagcgacggcgaggagatgaccttcagcagcctgcaccaggtgagatacgtgaagcacgtgaagatcctgggccccctggcccccgagatgatcgacagcagagtgctggagaacctgaagcagcagctggaggagcaggagtacaagctgcagaaggagcagaacctgaacatgcagctgttcagcgagatccacaacctgcagaacaagttcagagacctgagcccccccagatacgacagcctggtgcagagccaggccagagagctgagcctgcagagacagcagatcaaggacggccacggcatctgcgtgatcagcagacagcacatgaacaccatgatcaaggccttcgaggagctgctgcaggccagcgacgtggactactgcgtggccgagggcttccaggagcagctgaaccagtgcgccgagctgctggagaagctggagaagctgttcctgaacggcaagagcgtgggcgtggagatgaacacccagaacgagctgatggagagaatcgaggaggacaacctgacctaccagcacctgctgcccgagagccccgagcccagcgccagccacgccctgagcgactacgagaccagcgagaagagcttcttcagcagagaccagaagcaggacaacgagaccgagaagaccagcgtgatggtgaacagcttcagccaggacctgctgatggagcacatccaggagatcagaaccctgagaaagagactggaggagagcatcaagaccaacgagaagctgagaaagcagctggagagacagggcagcgagttcgtgcagggcagcaccagcatcttcgccagcggcagcgagctgcacagcagcctgaccagcgagatccacttcctgagaaagcagaaccaggccctgaacgccatgctgatcaagggcagcagagacaagcagaaggagaacgacaagctgagagagagcctgagcagaaagaccgtgagcctggagcacctgcagagagagtacgccagcgtgaaggaggagaacgagagactgcagaaggagggcagcgagaaggagagacacaaccagcagctgatccaggaggtgagatgcagcggccaggagctgagcagagtgcaggaggaggtgaagctgagacagcagctgctgagccagaacgacaagctgctgcagagcctgagagtggagctgaaggcctacgagaagctggacgaggagcacagaagactgagagaggccagcggcgagggctggaagggccaggaccccttcagagacctgcacagcctgctgatggagatccaggccctgagactgcagctggagagaagcatcgagaccagcagcaccctgcagagcagactgaaggagcagctggccagaggcgccgagaaggcccaggagggcgccctgaccctggccgtgcaggccgtgagcatccccgaggtgcccctgcagcccgacaagcacgacggcgacaagtaccccatggagagcgacaacagcttcgacctgttcgacagcagccaggccgtgacccccaagagcgtgagcgagaccccccccctgagcggcaacgacaccgacagcctgagctgcgacagcggcagcagcgccaccagcaccccctgcgtgagcagactggtgaccggccaccacctgtgggccagcaagaacggcagacacgtgctgggcctgatcgaggactacgaggccctgctgaagcagatcagccagggccagagactgctggccgagatggacatccagacccaggaggcccccagcagcaccagccaggagctgggcaccaagggcccccaccccgcccccctgagcaagttcgtgagcagcgtgagcaccgccaagctgaccctggaggaggcctacagaagactgaagctgctgtggagagtgagcctgcccgaggacggccagtgccccctgcactgcgagcagatcggcgagatgaaggccgaggtgaccaagctgcacaagaagctgttcgagcaggagaagaagctgcagaacaccatgaagctgctgcagctgagcaagagacaggagaaggtgatcttcgaccagctggtggtgacccacaagatcctgagaaaggccagaggcaacctggagctgagacccggcggcgcccaccccggcacctgcagccccagcagacccggcagctag

SEQ ID NO: 197474 - DNA, 5559 bp, Artificial Sequence
  derived and/or modified sequence
atgatggacctggtgctggaggaggacgtgaccgtgcccggcaccctgagcggctgcagcggcctggtgcccagcgtgcccgacgacctggacggcatcaaccccaacgccggcctgggcaacggcctgctgcccaacgtgagcgaggagaccgtgagccccaccagagccagaaacatgaaggacttcgagaaccagatcaccgagctgaagaaggagaacttcaacctgaagctgagaatctacttcctggaggagagaatgcagcaggagttccacggccccaccgagcacatctacaagaccaacatcgagctgaaggtggaggtggagagcctgaagagagagctgcaggagagagagcagctgctgatcaaggccagcaaggccgtggagagcctggccgaggccggcggcagcgagatccagagagtgaaggaggacgccagaaagaaggtgcagcaggtggaggacctgctgaccaagagaatcctgctgctggagaaggacgtgaccgccgcccaggccgagctggagaaggccttcgccggcaccgagaccgagaaggccctgagactgagactggagagcaagctgagcgagatgaagaagatgcacgagggcgacctggccatggccctggtgctggacgagaaggacagactgatcgaggagctgaagctgagcctgaagagcaaggaggccctgatccagtgcctgaaggaggagaagagccagatggcctgccccgacgagaacgtgagcagcggcgagctgagaggcctgtgcgccgcccccagagaggagaaggagagagagaccgaggccgcccagatggagcaccagaaggagagaaacagcttcgaggagagaatccaggccctggaggaggacctgagagagaaggagagagagatcgccaccgagaagaagaacagcctgaagagagacaaggccatccagggcctgaccatggccctgaagagcaaggagaagaaggtggaggagctgaacagcgagatcgagaagctgagcgccgccttcgccaaggccagagaggccctgcagaaggcccagacccaggagttccagggcagcgaggactacgagaccgccctgagcggcaaggaggccctgagcgccgccctgagaagccagaacctgaccaagagcaccgagaaccacagactgagaagaagcatcaagaagatcacccaggagctgagcgacctgcagcaggagagagagagactggagaaggacctggaggaggcccacagagagaagagcaagggcgactgcaccatcagagacctgagaaacgaggtggagaagctgagaaacgaggtgaacgagagagagaaggccatggagaacagatacaagagcctgctgagcgagagcaacaagaagctgcacaaccaggagcaggtgatcaagcacctgaccgagagcaccaaccagaaggacgtgctgctgcagaagttcaacgagaaggacctggaggtgatccagcagaactgctacctgatggccgccgaggacctggagctgagaagcgagggcctgatcaccgagaagtgcagcagccagcagccccccggcagcaagaccatcttcagcaaggagaagaagcagagcagcgactacgaggagctgatccaggtgctgaagaaggagcaggacatctacacccacctggtgaagagcctgcaggagagcgacagcatcaacaacctgcaggccgagctgaacaagatcttcgccctgagaaagcagctggagcaggacgtgctgagctaccagaacctgagaaagaccctggaggagcagatcagcgagatcagaagaagagaggaggagagcttcagcctgtacagcgaccagaccagctacctgagcatctgcctggaggagaacaacagattccaggtggagcacttcagccaggaggagctgaagaagaaggtgagcgacctgatccagctggtgaaggagctgtacaccgacaaccagcacctgaagaagaccatcttcgacctgagctgcatgggcttccagggcaacggcttccccgacagactggccagcaccgagcagaccgagctgctggccagcaaggaggacgaggacaccatcaagatcggcgaggacgacgagatcaacttcctgagcgaccagcacctgcagcagagcaacgagatcatgaaggacctgagcaagggcggctgcaagaacggctacctgagacacaccgagagcaagatcagcgactgcgacggcgcccacgcccccggctgcctggaggagggcgccttcatcaacctgctggcccccctgttcaacgagaaggccaccctgctgctggagagcagacccgacctgctgaaggtggtgagagagctgctgctgggccagctgttcctgaccgagcaggaggtgagcggcgagcacctggacggcaagaccgagaagacccccaagcagaagggcgagctggtgcacttcgtgcagaccaacagcttcagcaagccccacgacgagctgaagctgagctgcgaggcccagctggtgaaggccggcgaggtgcccaaggtgggcctgaaggacgccagcgtgcagaccgtggccaccgagggcgacctgctgagattcaagcacgaggccaccagagaggcctgggaggagaagcccatcaacaccgccctgagcgccgagcacagacccgagaacctgcacggcgtgcccggctggcaggccgccctgctgagcctgcccggcatcaccaacagagaggccaagaagagcagactgcccatcctgatcaagcccagcagaagcctgggcaacatgtacagactgcccgccacccaggaggtggtgacccagctgcagagccagatcctggagctgcagggcgagctgaaggagttcaagacctgcaacaagcagctgcaccagaagctgatcctggccgaggccgtgatggagggcagacccacccccgacaagaccctgctgaacgacagcgagatctgcccccccgacgacctggccagcctgcccagctgcaaggagaaccccgaggacgtgctgagccccaccagcgtggccacctacctgagcagcaagagccagcccagcgccaaggtgagcgtgatgggcaccgaccagagcgagagcatcaacaccagcaacgagaccgagtacctgaagcagaagatccacgacctggagaccgagctggagggctaccagaacttcatcttccagctgcagaagcacagccagtgcagcgaggccatcatcaccgtgctgtgcggcaccgagggcgcccaggacggcctgagcaagcccaagaacggcagcgacggcgaggagatgaccttcagcagcctgcaccaggtgagatacgtgaagcacgtgaagatcctgggccccctggcccccgagatgatcgacagcagagtgctggagaacctgaagcagcagctggaggagcaggagtacaagctgcagaaggagcagaacctgaacatgcagctgttcagcgagatccacaacctgcagaacaagttcagagacctgagcccccccagatacgacagcctggtgcagagccaggccagagagctgagcctgcagagacagcagatcaaggacggccacggcatctgcgtgatcagcagacagcacatgaacaccatgatcaaggccttcgaggagctgctgcaggccagcgacgtggactactgcgtggccgagggcttccaggagcagctgaaccagtgcgccgagctgctggagaagctggagaagctgttcctgaacggcaagagcgtgggcgtggagatgaacacccagaacgagctgatggagagaatcgaggaggacaacctgacctaccagcacctgctgcccgagagccccgagcccagcgccagccacgccctgagcgactacgagaccagcgagaagagcttcttcagcagagaccagaagcaggacaacgagaccgagaagaccagcgtgatggtgaacagcttcagccaggacctgctgatggagcacatccaggagatcagaaccctgagaaagagactggaggagagcatcaagaccaacgagaagctgagaaagcagctggagagacagggcagcgagttcgtgcagggcagcaccagcatcttcgccagcggcagcgagctgcacagcagcctgaccagcgagatccacttcctgagaaagcagaaccaggccctgaacgccatgctgatcaagggcagcagagacaagcagaaggagaacgacaagctgagagagagcctgagcagaaagaccgtgagcctggagcacctgcagagagagtacgccagcgtgaaggaggagaacgagagactgcagaaggagggcagcgagaaggagagacacaaccagcagctgatccaggaggtgagatgcagcggccaggagctgagcagagtgcaggaggaggtgaagctgagacagcagctgctgagccagaacgacaagctgctgcagagcctgagagtggagctgaaggcctacgagaagctggacgaggagcacagaagactgagagaggccagcggcgagggctggaagggccaggaccccttcagagacctgcacagcctgctgatggagatccaggccctgagactgcagctggagagaagcatcgagaccagcagcaccctgcagagcagactgaaggagcagctggccagaggcgccgagaaggcccaggagggcgccctgaccctggccgtgcaggccgtgagcatccccgaggtgcccctgcagcccgacaagcacgacggcgacaagtaccccatggagagcgacaacagcttcgacctgttcgacagcagccaggccgtgacccccaagagcgtgagcgagaccccccccctgagcggcaacgacaccgacagcctgagctgcgacagcggcagcagcgccaccagcaccccctgcgtgagcagactggtgaccggccaccacctgtgggccagcaagaacggcagacacgtgctgggcctgatcgaggactacgaggccctgctgaagcagatcagccagggccagagactgctggccgagatggacatccagacccaggaggcccccagcagcaccagccaggagctgggcaccaagggcccccaccccgcccccctgagcaagttcgtgagcagcgtgagcaccgccaagctgaccctggaggaggcctacagaagactgaagctgctgtggagagtgagcctgcccgaggacggccagtgccccctgcactgcgagcagatcggcgagatgaaggccgaggtgaccaagctgcacaagaagctgttcgagcaggagaagaagctgcagaacaccatgaagctgctgcagctgagcaagagacaggagaaggtgatcttcgaccagctggtggtgacccacaagatcctgagaaaggccagaggcaacctggagctgagacccggcggcgcccaccccggcacctgcagccccagcagacccggcagctag

SEQ ID NO: 197475 - protein, 826 aa, Artificial Sequence
  derived and/or modified sequence
MVAPVLETSHVFCCPNRVRGVLNWSSGPRGLLAFGTSCSVVLYDPLKRVVVTNLNGHTARVNCIQWICKQDGSPSTELVSGGSDNQVIHWEIEDNQLLKAVHLQGHEGPVYAVHAVYQRRTSDPALCTLIVSAAADSAVRLWSKKGPEVMCLQTLNFGNGFALALCLSFLPNTDVPILACGNDDCRIHIFAQQNDQFQKVLSLCGHEDWIRGVEWAAFGRDLFLASCSQDCLIRIWKLYIKSTSLETQDDDNIRLKENTFTIENESVKIAFAVTLETVLAGHENWVNAVHWQPVFYKDGVLQQPVRLLSASMDKTMILWAPDEESGVWLEQVRVGEVGGNTLGFYDCQFNEDGSMIIAHAFHGALHLWKQNTVNPREWTPEIVISGHFDGVQDLVWDPEGEFIITVGTDQTTRLFAPWKRKDQSQVTWHEIARPQIHGYDLKCLAMINRFQFVSGADEKVLRVFSAPRNFVENFCAITGQSLNHVLCNQDSDLPEGATVPALGLSNKAVFQGDIASQPSDEEELLTSTGFEYQQVAFQPSILTEPPTEDHLLQNTLWPEVQKLYGHGYEIFCVTCNSSKTLLASACKAAKKEHAAIILWNTTSWKQVQNLVFHSLTVTQMAFSPNEKFLLAVSRDRTWSLWKKQDTISPEFEPVFSLFAFTNKITSVHSRIIWSCDWSPDSKYFFTGSRDKKVVVWGECDSTDDCIEHNIGPCSSVLDVGGAVTAVSVCPVLHPSQRYVVAVGLECGKICLYTWKKTDQVPEINDWTHCVETSQSQSHTLAIRKLCWKNCSGKTEQKEAEGAEWLHFASCGEDHTVKIHRVNKCAL

SEQ ID NO: 197476 - DNA, 2481 bp, Artificial Sequence
  derived and/or modified sequence
atggtggcccccgtgctggagaccagccacgtgttctgctgccccaacagagtgagaggcgtgctgaactggagcagcggccccagaggcctgctggccttcggcaccagctgcagcgtggtgctgtacgaccccctgaagagagtggtggtgaccaacctgaacggccacaccgccagagtgaactgcatccagtggatctgcaagcaggacggcagccccagcaccgagctggtgagcggcggcagcgacaaccaggtgatccactgggagatcgaggacaaccagctgctgaaggccgtgcacctgcagggccacgagggccccgtgtacgccgtgcacgccgtgtaccagagaagaaccagcgaccccgccctgtgcaccctgatcgtgagcgccgccgccgacagcgccgtgagactgtggagcaagaagggccccgaggtgatgtgcctgcagaccctgaacttcggcaacggcttcgccctggccctgtgcctgagcttcctgcccaacaccgacgtgcccatcctggcctgcggcaacgacgactgcagaatccacatcttcgcccagcagaacgaccagttccagaaggtgctgagcctgtgcggccacgaggactggatcagaggcgtggagtgggccgccttcggcagagacctgttcctggccagctgcagccaggactgcctgatcagaatctggaagctgtacatcaagagcaccagcctggagacccaggacgacgacaacatcagactgaaggagaacaccttcaccatcgagaacgagagcgtgaagatcgccttcgccgtgaccctggagaccgtgctggccggccacgagaactgggtgaacgccgtgcactggcagcccgtgttctacaaggacggcgtgctgcagcagcccgtgagactgctgagcgccagcatggacaagaccatgatcctgtgggcccccgacgaggagagcggcgtgtggctggagcaggtgagagtgggcgaggtgggcggcaacaccctgggcttctacgactgccagttcaacgaggacggcagcatgatcatcgcccacgccttccacggcgccctgcacctgtggaagcagaacaccgtgaaccccagagagtggacccccgagatcgtgatcagcggccacttcgacggcgtgcaggacctggtgtgggaccccgagggcgagttcatcatcaccgtgggcaccgaccagaccaccagactgttcgccccctggaagagaaaggaccagagccaggtgacctggcacgagatcgccagaccccagatccacggctacgacctgaagtgcctggccatgatcaacagattccagttcgtgagcggcgccgacgagaaggtgctgagagtgttcagcgcccccagaaacttcgtggagaacttctgcgccatcaccggccagagcctgaaccacgtgctgtgcaaccaggacagcgacctgcccgagggcgccaccgtgcccgccctgggcctgagcaacaaggccgtgttccagggcgacatcgccagccagcccagcgacgaggaggagctgctgaccagcaccggcttcgagtaccagcaggtggccttccagcccagcatcctgaccgagccccccaccgaggaccacctgctgcagaacaccctgtggcccgaggtgcagaagctgtacggccacggctacgagatcttctgcgtgacctgcaacagcagcaagaccctgctggccagcgcctgcaaggccgccaagaaggagcacgccgccatcatcctgtggaacaccaccagctggaagcaggtgcagaacctggtgttccacagcctgaccgtgacccagatggccttcagccccaacgagaagttcctgctggccgtgagcagagacagaacctggagcctgtggaagaagcaggacaccatcagccccgagttcgagcccgtgttcagcctgttcgccttcaccaacaagatcaccagcgtgcacagcagaatcatctggagctgcgactggagccccgacagcaagtacttcttcaccggcagcagagacaagaaggtggtggtgtggggcgagtgcgacagcaccgacgactgcatcgagcacaacatcggcccctgcagcagcgtgctggacgtgggcggcgccgtgaccgccgtgagcgtgtgccccgtgctgcaccccagccagagatacgtggtggccgtgggcctggagtgcggcaagatctgcctgtacacctggaagaagaccgaccaggtgcccgagatcaacgactggacccactgcgtggagaccagccagagccagagccacaccctggccatcagaaagctgtgctggaagaactgcagcggcaagaccgagcagaaggaggccgagggcgccgagtggctgcacttcgccagctgcggcgaggaccacaccgtgaagatccacagagtgaacaagtgcgccctgtag

SEQ ID NO: 197477 - DNA, 5849 bp, Artificial Sequence
  derived and/or modified sequence
agtagttccgctccgagggcggaagtgcgcgtctcttgtttgtgcggctgaccagttggcgacatggtggcacccgtgctggagacttctcacgtgttttgctgcccaaaccgggtgcggggagtcctgaactggagctctgggcccagaggacttctggcctttggcacgtcctgctccgtggtgctctatgaccccctgaaaagggttgttgttaccaacttgaatggtcacaccgcccgagtcaattgcatacagtggatttgtaaacaggatggctccccttctactgaattagtttctggaggatctgataatcaagtgattcactgggaaatagaggataatcagcttttaaaagcagtgcatcttcaaggccatgaaggacctgtttatgcggtgcatgctgtttaccagaggaggacatcagatcctgcattatgtacactgatcgtttctgcagctgcagattctgctgttcgactctggtctaaaaagggtccagaagtaatgtgccttcagactttaaactttggaaatggatttgctttggctctctgcttatcttttttgccaaatactgatgtaccaatattagcatgtggcaatgatgattgcagaattcacatatttgctcaacaaaatgatcagtttcagaaagtgctttctctctgtggacatgaggattggattagaggagtggaatgggcagcctttggtagagatcttttcctagcaagctgttcacaagattgcctgataagaatatggaagctgtatataaagtcaacatctttagaaactcaggatgacgataacataagactgaaagaaaatacttttaccatagaaaatgaaagtgttaaaatagcatttgctgttactctggagacagtgctagccggtcatgaaaactgggtaaatgcagttcactggcaacctgtgttttacaaagatggtgtcctacagcagccagtgagattattatctgcttccatggataaaaccatgattctctgggctccagatgaagagtcaggagtttggctagaacaggttcgagtaggtgaagtaggtgggaatactttgggattttatgattgccagttcaatgaagatggctccatgatcattgctcatgctttccacggagcgttgcacctttggaaacagaatacagttaacccaagagagtggactccagagattgtcatttcaggacactttgatggtgtccaagacctagtctgggatccagaaggagaatttattatcactgttggtactgatcagacaactagactttttgctccatggaagagaaaagaccaatcacaggtgacttggcatgaaattgcaaggcctcagatacatgggtatgacctgaaatgtttggcaatgattaatcggtttcagtttgtatctggagcagatgaaaaagttcttcgggttttttctgcacctcggaattttgtggaaaatttttgtgccattacaggacaatcactgaatcatgtgctctgtaatcaagatagtgatcttccagaaggagccactgtccctgcattgggattatcaaataaagctgtctttcagggagatatagcttctcagccttctgatgaagaggagctgttaactagtactggttttgagtatcagcaggtggcctttcagccctccatacttactgagcctcccactgaggatcatcttctgcagaatactttgtggcctgaagttcaaaaactatatgggcacggttatgaaatattttgtgttacttgtaacagttcaaagactctgcttgcctcagcttgtaaggcagctaagaaagagcatgcagctatcattctttggaacactacatcttggaaacaggtgcagaatttagttttccacagtttgacagtcacgcagatggccttctcacctaatgagaagttcttactagctgtttccagagatcgaacctggtcattgtggaaaaagcaggatacaatctcacctgagttcgagccagtttttagtctttttgccttcaccaacaaaattacttctgtgcacagtagaattatttggtcttgtgattggagtcctgacagcaagtatttcttcactgggagtcgagacaaaaaggtggttgtctggggtgagtgcgactccactgatgactgtattgagcacaacattggcccctgctcctcagtcctggacgtgggtggggctgtgacagctgtcagcgtctgcccagtgctccacccttctcaacgatacgtggttgcagtaggattggagtgtggaaagatttgcttatatacctggaaaaagactgatcaagttccagaaataaatgactggacccactgtgtagaaacaagtcaaagccaaagtcatacactggctatcagaaaattatgctggaagaattgcagtggaaaaactgaacagaaggaagcagaaggtgctgagtggttacactttgcaagctgtggtgaagatcacactgtgaagatacacagagtcaataaatgtgcactgtaatggacttaataactacatgcttgcagtcactggtatcttaaaatattatcatgtaaacaggtcatctttaccttcataactgaattgagtttctgggttttttttttttttgagatggagtcttgctttgtcacaacctccacctcccaggttcaagcgattctctttcttcagcctcctgagtagctgggactagaggcacaccaccaattccggctaatttttgtatttttagtagagactgggtttcaccgttggccaggcgggtctcaaactcctcgtctcaggtgatctgcttgcctcggcctcccaaagtgctgggattacaggcgtgagccactgcgcccagcctgagtttcattttttaagtcacatagcagtagtccttatttcagtgctagaccctttgaaatgcgatgaaagctatatggacccttcgctttgttatataacatatgcacacatacccagaattttgcacatatgttcagagattcctagacctgcagacctgcctctgtgtgtcccaatttaagaacctctgttctttcttcatgactggatttgcccaattttgtgttattttgggacttaatttgtccctctttgggacatttccttatttattgccctcttcagagagtagatgtagaaaataaagagaggaaacctagattacttaattttattttaacattttctatagatagcataccacgccaagtgtgctctgtcttgatccccttctttctagcatctgccagacattgtagagtttcgcaagcagttgtaggtttgagctgcagccagtcatttcttttattctttaaaagtacatagatttgtctttttagggctttactgaaagtaaaatatcctgacatttaaactgacagatgtaggaggtaaaaaatagagttctgaaacatttgaatttatgtgacagctgaagtcacgagatgagggatatatgtcccccagggaggatgcagaaagaagaaaagggtactggaaacagcatgtcagtggtgccagctgagggctggaggcagccaggagagttgggagcctgggtgctgggtggagagaggttaacagggaagacatgggaagtattgtgaaggctggtgtgagcaggggactactccagccctgttggaacatagagccatttggcagattgacaatgcagtgacagctgtatataataaatgtgttgaaaggaggaaggtgaggattttcttggtgggagtttatgctgttatttaacatattttgcttccaaaggggttaagatgttttacctaaatggaggtttctaggtcagtgctatacaatatttctaatctgtgttttatagtgtgagctacatatgtaattttaaaattttcaagtagccacataataaaggaaacaggtgaaatttaatgacatatttcctttaatacggtatatccaaaatattattatgtcaacctataatcagtataaaaacctgttactgaaatattttatagggcccatctcagttcagactagccacatttaagtgcttcatagccacatgtggctcatggccatccatatttggacaatgtactttagactattgcatctgtatactcttgtgccgtcagctggggggtggggtgtgtgtgcgtgtataccaaggcagtgagcatctgagctttgaacctcaaagaccaaaatgccctgcccattttcctgcttatcagctgaggaatctttacccacattgacacatgggcttgttctgacccaagtgcatgcaggcttccagagcagattcagaggcctaacttagtcctttagctttcctcccagcacagaactcccaaggttatctgcaagtaggccttgcctagagagactgagttttcaagttgtcagttttcccaaattgtcctcaagcatcttcctctggaatcaccttactgtttagtaaacattcagaggacttgctacacatctgggcagtctgcattgtaattcatatgtgtttacacatttgtgtcttcatctgctaaagcacctttgaaccatattgtaattcataatatctgaagcaattattatgaattgtagtaattcataatattgaagcgattcataatatctgaagcaatccccagatacgggttaggcatggccctgctctgagcaggatggcaaaagtggcagtccgtgacgcagcccttgttaccccaggctattactaaatggtggtggtggttttatcttaattaaaatgacatcaccaacaatgggccctttcctgtctgccaggaaaagttttctgtagtgacgcacgtgttgtgtgtgtatgtgtgcgtttgaggctatattactcattgctacggcagttcaaaatgacttggaaaaaaacaatgaacgctggtcattgatatgtatactgacatgtttgagggaagttactgtggtctgtaacttatgaaatacataaaaaatatgatgggtggagtgacggacacatggacagatatgaagcaagcactgtaaaatattagtggtagtttttgtatgcccatactcacggcaccattattcacagtagctaagagatggaagcaatatgtgcccatcagtgggtgaatgatcaacaaaatgtggtatattcatacagtggaatattattcagcctctaaaaggaagatacgctgacatgtgctgcaacatggatgaatcttgaggacatgatgctaagtgaagtaagccagtcactggaagacaaatactctatgcttccatttatgtgaagtatctagagcagtcaaatgcatagaaacaagtagaatggtagttgccaaggactgggggaggaggaaatgaggagttgtttaatgggtatagtgtttcagttttgcaagataaaaagtcctgtggattggttgcacagttaagttatgtgaatgctgtatgccaactcaactgtacactctaaaatggttaagatggtaaatcttatctttattttaccacagttttttttaaagcatggtaaacaccatttcccaggatgtaaatcggtactaaaaaaaaagtgctccaaagtaagatatatttgggaaacacagggataactaaggttagataggtgttctttattgcaggaattctaagagcatttaacaaattaatttacactgggaattttcagtgtggagggtctggctcatagcatttcacaaacattatacttcagagtcccaaagcctttaaataaaatgttaatggtagaaactccttaaggggtgttcactgta

SEQ ID NO: 197478 - DNA, 2481 bp, Artificial Sequence
  derived and/or modified sequence
atggtcgcgccagtccttgagacatcgcacgttttttgttgtcccaaccgtgtgagaggtgtgctgaattggtcgagtggtccgcgcggcctgttggcctttggaacttcatgctctgtcgtactctacgaccctctgaagagagtggtagtgactaacctgaatggccacactgcgcgcgtgaattgtatccagtggatatgcaaacaagatggcagcccgtccaccgaattggtgtcagggggtagcgataaccaagtaatccattgggagatcgaagataatcagctcctcaaagcggtgcacctacaggggcacgagggccctgtgtatgccgttcacgcagtctaccagcggaggaccagcgacccagccttgtgcacgctcatcgtctctgctgcagctgactctgcggtgagactgtggagcaaaaagggcccagaggtcatgtgcttgcaaacactgaattttgggaatggctttgcactagctctatgccttagctttcttcccaatacagatgtgccgatcctggcatgcggaaacgatgactgccgaattcatatcttcgctcaacagaatgaccagttccaaaaagtgctgtctctttgtggccatgaggattggattcgcggggtcgagtgggcagcctttggccgcgacctgtttctggcttcctgctcacaggactgtctcattaggatctggaagctctatatcaaatctacgtctctggagacccaagatgatgataacattaggctaaaagagaacacatttaccatcgagaatgagagcgtaaaaatcgccttcgccgtgacacttgagactgtgctggccggccacgagaactgggtcaatgcggtgcactggcagccagtgttctataaagacggcgtgcttcagcaacccgttaggctgctgagtgcgagcatggacaagacaatgattttatgggccccggatgaggagtccggcgtgtggcttgaacaggtaagggttggcgaagtgggcggaaacaccctggggttctatgattgtcagtttaatgaggatggcagcatgataattgcccatgcctttcacggtgctctacacctgtggaagcagaatactgtcaatcccagagaatggacaccggagattgttatcagtggacattttgacggggtccaagacctcgtgtgggatccagaaggggaattcatcattacagttgggacagaccaaaccacccgccttttcgccccttggaagcggaaagatcagtcccaggtgacatggcacgagattgcccggccgcagattcacggatacgacctcaagtgtctggctatgatcaatcgatttcagttcgtctcaggggcggacgagaaggtgctcagagtgttcagtgcaccgcgcaatttcgtcgaaaacttctgtgcaataacaggccagtccctaaatcatgtactgtgcaaccaagattctgacctgccagaaggtgccacagtgccggcactgggactgtccaataaggcagtgttccagggcgacatcgccagccaacctagtgatgaggaagagctcctgacaagcactgggtttgagtatcagcaagtggctttccagccctccattttaactgagcccccaactgaagaccatctcttacagaataccctatggcccgaagtgcagaaactgtatggacacggctatgaaatcttctgcgtcacttgcaactcgagcaaaactttactggcatccgcctgcaaggccgcaaagaaggaacatgcagccatcatactatggaatacgacaagctggaaacaggtccagaatctggtgtttcatagcctcacagtcactcagatggcatttagcccaaatgaaaaatttctgctcgctgtaagtagagatcgaacttggtctctctggaaaaaacaggatacaatctcccccgaattcgagccagtgttttcattattcgcatttaccaataagataaccagtgttcacagccggatcatctggtcttgcgactggagcccagactcgaaatacttcttcaccgggtctagggataaaaaagtcgtcgtgtggggcgaatgcgactccacagacgactgcattgaacacaatattggtccttgttcctcggtcttggacgtcggtggagccgtgacagcggtgagcgtgtgcccggtgctgcatccatcccagcgctacgttgtggctgtgggactggaatgcgggaagatttgcttgtatacctggaaaaaaaccgaccaggtcccggagattaatgattggactcactgcgtcgagacgtcccagagtcagtcacacaccctggcaatccgaaagctgtgttggaaaaattgttctggaaaaactgagcaaaaggaagccgaaggagcagagtggttgcatttcgcatcttgcggagaggatcatacggtaaagatccatcgcgtcaataagtgcgccctgtag

SEQ ID NO: 197479 - DNA, 2481 bp, Artificial Sequence
  derived and/or modified sequence
atggtggcccctgtgctggagaccagccacgtgttctgctgccccaacagagtgcggggcgtgctgaactggagcagcggcccccggggcctgctggccttcggcaccagctgcagcgtggtgctgtatgaccccctgaagagggtggtggtgaccaacctgaatggccacacagcccgggtgaactgcatccagtggatctgcaagcaggacggcagccccagcacagagctggtgtctgggggcagtgacaaccaggtgatccactgggagattgaggacaaccagctgctgaaggctgtgcacctgcagggccacgagggccctgtgtatgctgtgcatgctgtgtaccagaggaggaccagtgaccctgccctgtgcaccctcatcgtgtctgctgctgctgacagcgctgtgcggctgtggagcaagaagggccctgaggtgatgtgcctgcagaccctgaactttggaaatggatttgccctggccctgtgcctgtccttcctgcccaacacagatgtgcccatcctggcctgtggaaatgatgactgccgcatccacatctttgcccagcagaatgaccagttccagaaggtgctgagcctgtgtggccacgaggactggatccggggcgtggagtgggccgccttcggccgggacctcttcctggccagctgcagccaggactgcctgatccgcatctggaagctgtacatcaagagcaccagcctggagacccaggatgatgacaacatccggctgaaggagaacaccttcaccattgaaaatgaatctgtgaagatcgcctttgctgtgaccctggagaccgtgctggccggccacgagaactgggtgaatgctgtgcactggcagcctgtgttctacaaggatggagtgctgcagcagcctgtgcggctgctgagcgcctccatggacaagaccatgatcctgtgggccccagatgaggagagcggcgtgtggctggagcaggtgcgggtgggggaggtgggcggcaacaccctgggcttctatgactgccagttcaatgaagatggctccatgatcatcgcccacgccttccacggggccctgcacctgtggaagcagaacacagtgaacccccgggagtggaccccagagatcgtcatcagcggccactttgatggagtgcaggacctggtgtgggaccctgagggggagttcatcatcaccgtgggcacagaccagaccacccggctgtttgccccctggaagaggaaggaccagagccaggtgacctggcatgaaattgcccggccccagatccacggctatgacctgaagtgcctggccatgatcaaccgcttccagtttgtgtctggagcagatgagaaggtgctgcgggtcttcagcgcccccaggaactttgtggagaacttctgtgccatcaccggccagagcctgaaccacgtgctgtgcaaccaggacagcgacctgcctgagggcgccaccgtgcctgccctgggcctgagcaacaaggctgtgttccagggcgacatcgccagccagcccagtgatgaggaggagctgctgaccagcacaggctttgagtaccagcaggtggccttccagcccagcatcctgacagagcccccaacagaggaccacctgctgcagaacaccctgtggccagaggtgcagaagctgtatggccacggctatgagatcttctgtgtgacctgcaacagcagcaagaccctgctggccagcgcctgcaaggccgccaagaaggagcacgccgccatcatcctgtggaacaccacctcctggaagcaggtgcagaacctggtgttccacagcctgactgtgacccagatggccttcagccccaatgagaagttcctgctggccgtgtcccgggacaggacctggagcctgtggaagaagcaggacaccatcagccctgagtttgagcctgtgttcagcctgtttgccttcaccaacaagatcacctctgtgcacagccgcatcatctggagctgtgactggagcccagacagcaagtacttcttcaccggcagccgggacaagaaggtggtggtgtggggagaatgtgacagcacagatgactgcatcgagcacaacatcggcccctgcagctctgtgctggatgtgggcggcgctgtgacagctgtgtctgtgtgccctgtgctgcaccccagccagcgctacgtggtggccgtgggcctggagtgtgggaagatctgcctgtacacctggaagaagacagaccaggtgcctgagatcaatgactggacccactgtgtggagaccagccagagccagagccacaccctggccatcaggaagctgtgctggaagaactgcagcggcaagacagagcagaaggaggccgagggcgctgagtggctgcactttgccagctgtggggaggaccacacagtgaagatccaccgggtgaacaagtgtgccctgtag

SEQ ID NO: 197480 - DNA, 2481 bp, Artificial Sequence
  derived and/or modified sequence
atggtggcccccgtgctggagaccagccacgtgttctgctgccccaatcgcgtgcgaggtgttctcaactggagcagcggcccccgaggactgttggccttcgggacctcctgcagtgttgtcctctatgatcctctgaaacgcgtggtggtcacaaatctgaacggccataccgcccgagtgaattgcattcagtggatctgcaagcaggatggatctcctagtaccgagctagtgtccgggggatcggataaccaggtgatccactgggagatcgaagataatcaattgctaaaggcggttcatctgcagggccacgaaggccctgtatacgctgtccatgccgtataccagagacgaacctcagacccagcactgtgcactctgatcgttagcgctgccgcagattcagccgtccggttatggagtaaaaaggggcctgaggtgatgtgtctacagaccctcaactttgggaatggttttgccctggctctgtgtctgagttttctccctaacacagacgtaccaatactggcctgcggcaacgacgactgtcgaatccatatcttcgcacagcaaaacgatcagttccaaaaggtcttatcactgtgtggccacgaggactggatccgcggtgtggagtgggcagcgttcggtcgggacctgtttctggcttcctgctcccaggactgcctgatcagaatttggaagctgtacattaaaagcacttctttggaaacacaggacgatgataatattcggctgaaagagaacactttcactatagaaaacgagtcagtcaaaatcgcattcgccgtcactctggaaaccgtgcttgctggacatgaaaattgggttaatgctgtccactggcagccagtcttctacaaggatggagttttacagcagccggtgagactactctctgcctctatggataagaccatgatcctatgggcccccgacgaggaatcaggtgtgtggctcgagcaagtgcgcgtgggcgaagtcggaggcaataccctgggcttttacgattgtcagttcaacgaggacggctctatgatcattgcccacgcatttcatggggcactccatttatggaagcagaacacagtgaatccaagagagtggacccctgagattgtgatctccggccactttgatggcgttcaggatctcgtttgggaccccgagggggagttcatcattactgttggaacagatcagacgactcggctgtttgctccatggaagagaaaagatcagtcccaggttacctggcatgagatagctagacctcagattcacggttacgacttgaagtgtctcgcgatgataaaccgattccagttcgtttccggcgccgatgagaaagtcttgcgcgtgttttcagccccacggaattttgttgagaacttttgtgccatcacagggcagtctctgaatcatgttctatgtaaccaggattccgacctccccgaaggagccacagttccggcactggggttgtcgaacaaagccgtgtttcagggagatattgcgtcgcagcccagtgacgaggaggaattgctgacaagtactggatttgagtaccagcaggtcgcatttcagccttccatcttgaccgaacctccaacggaagaccatctactacagaacaccttgtggccagaagtgcagaagctgtacggccacgggtatgagatcttctgcgtgacctgcaattcttcaaaaactctcctagctagtgcctgcaaggctgccaagaaggagcacgctgccatcattctatggaataccactagctggaagcaggtccagaatttggtgttccacagtctgaccgtgacccagatggcattttctcctaacgagaaatttttacttgccgtgagtagagataggacatggagcctctggaaaaaacaggacaccatctccccagagttcgagcccgtgttcagtctgtttgcctttacaaataaaatcactagcgtgcattccagaatcatctggtcctgtgactggagcccggacagcaaatatttctttactggttcaagagacaaaaaggtggtagtgtggggagaatgcgattccacggacgactgtattgagcataatatcggaccctgtagcagcgtcttggatgtcggcggcgctgtcacggcggtgagcgtctgtcctgtgctccacccgagccagcggtacgtggtcgcggtgggacttgagtgcggcaaaatctgtctctacacctggaaaaagaccgaccaggtgcctgagatcaacgactggactcactgcgttgagacaagtcagtctcagagccacactctggctatccggaaactgtgctggaagaactgtagtggcaaaacagaacagaaagaggctgaaggtgccgagtggcttcatttcgcttcctgcggcgaggaccacacagttaagattcatagggtgaacaaatgcgctctctag

SEQ ID NO: 197481 - DNA, 2481 bp, Artificial Sequence
  derived and/or modified sequence
atggttgctcccgtcttggagacatcccacgtgttctgttgtccgaaccgagttaggggtgttctgaactggagcagcggacctagaggcctgctagcgttcggcacatcttgttcagtggttctttatgaccccctgaaaagggtggtggtgacgaatctgaatggccacacagctcgggttaactgcatccagtggatctgcaagcaggacggctcaccctcgaccgaattagtgtctggcggatcagacaaccaagtgattcactgggagatcgaggataatcagctgctgaaggcggtgcatctgcagggccacgagggaccagtgtacgcggtgcacgcagtttatcagcgtcgcacgtccgacccggctttgtgcactcttatcgtgtccgccgctgccgatagtgctgtgcgcctttggtcaaagaagggcccagaggtcatgtgcttacaaactctcaactttggcaacggctttgcactcgctctgtgtctgtcatttcttcccaatacagatgttcccatcctggcgtgtggaaatgacgattgccggatccacattttcgcacaacagaatgatcagtttcagaaggtactctcattgtgcggtcatgaagactggatccggggagtggagtgggccgcttttggccgagatcttttcctcgcatcttgctctcaggactgtctgatccggatttggaaactgtatattaaatccacatcgcttgagacccaggatgatgacaatatcaggctgaaggaaaatacattcacgattgaaaacgagtccgtgaagatcgcatttgccgtgactctggaaacagtgctagccggacatgagaactgggttaacgccgtgcactggcagccagtattctataaggatggcgtgctccagcagccagtccgcctgttaagtgcctctatggacaaaacaatgatcctgtgggcacctgatgaggaatcaggcgtgtggctagagcaggtgcgagtaggggaggtgggtgggaacaccttggggttctatgactgtcagttcaacgaggacggtagtatgattatcgcccacgctttccacggggcactccacttatggaagcaaaataccgtcaaccctcgcgaatggaccccagagattgtgatcagtggacacttcgatggggttcaggacctggtatgggatcccgaaggagaatttatcatcacagtcggcaccgaccagacaactagactttttgcaccatggaagcgcaaagaccagtcccaggtgacatggcacgagatagccagacctcagatacacggatacgatttaaaatgcctagctatgatcaaccgctttcagttcgtttccggagccgatgaaaaggttctgcgggtgttcagtgctccaagaaacttcgttgagaacttttgcgctattaccggccaaagccttaatcatgtactctgcaaccaagattctgaccttccggaaggtgccacggtgcctgctcttggactgagtaacaaggcagtgtttcagggcgacattgcgagtcagccatctgatgaggaggagcttctcacatccaccggttttgagtaccagcaggtggcattccagccgtccatactcacggagccaccaaccgaagaccatcttctccagaacacattgtggcccgaggttcaaaaattatacggacatggctatgagatattctgcgtaacatgcaactcctcaaaaacccttctggcttccgcctgcaaagcagccaagaaggagcacgccgcaattatcctgtggaacacaacatcttggaaacaggtgcaaaatctggtctttcattccctgacagtgacccagatggccttctctcccaacgaaaagttccttctagctgtgtcaagagacaggacctggagcctgtggaagaaacaggatacaatcagccctgaattcgagcctgtgttttccctgttcgccttcaccaataagataacatcagtgcactccagaatcatatggtcgtgcgattggtctcccgatagcaagtactttttcacaggcagtcgagacaagaaagtcgtcgtctggggtgagtgcgactcgacagacgattgcatcgagcataatatcggaccttgctccagcgtgctggatgttggtggcgctgtcaccgcagtgtccgtgtgtcctgtcctgcatcctagtcaaagatacgtcgtggctgtgggtttggagtgcgggaaaatttgcctgtatacttggaagaaaaccgaccaagtgcccgagatcaatgactggacacattgcgtggaaacttctcagagtcaaagtcacacgctggccattcgcaaactgtgctggaaaaactgtagcggtaagactgaacagaaggaggcagaaggtgccgaatggttacactttgcctcatgtggcgaggatcacacagtgaagatccaccgggtgaacaaatgcgccctgtag

SEQ ID NO: 197482 - protein, 423 aa, Artificial Sequence [sequence omitted]

SEQ ID NO: 197483 - DNA, 1272 bp, Artificial Sequence
  derived and/or modified sequence
atggcccagctgcagaccagattctacaccgacaacaagaagtacgccgtggacgacgtgcccttcagcatccccgccgccagcgagatcgccgacctgagcaacatcatcaacaagctgctgaaggacaagaacgagttccacaagcacgtggagttcgacttcctgatcaagggccagttcctgagaatgcccctggacaagcacatggagatggagaacatcagcagcgaggaggtggtggagatcgagtacgtggagaagtacaccgccccccagcccgagcagtgcatgttccacgacgactggatcagcagcatcaagggcgccgaggagtggatcctgaccggcagctacgacaagaccagcagaatctggagcctggagggcaagagcatcatgaccatcgtgggccacaccgacgtggtgaaggacgtggcctgggtgaagaaggacagcctgagctgcctgctgctgagcgccagcatggaccagaccatcctgctgtgggagtggaacgtggagagaaacaaggtgaaggccctgcactgctgcagaggccacgccggcagcgtggacagcatcgccgtggacggcagcggcaccaagttctgcagcggcagctgggacaagatgctgaagatctggagcaccgtgcccaccgacgaggaggacgagatggaggagagcaccaacagacccagaaagaagcagaagaccgagcagctgggcctgaccagaacccccatcgtgaccctgagcggccacatggaggccgtgagcagcgtgctgtggagcgacgccgaggagatctgcagcgccagctgggaccacaccatcagagtgtgggacgtggagagcggcagcctgaagagcaccctgaccggcaacaaggtgttcaactgcatcagctacagccccctgtgcaagagactggccagcggcagcaccgacagacacatcagactgtgggaccccagaaccaaggacggcagcctggtgagcctgagcctgaccagccacaccggctgggtgaccagcgtgaagtggagccccacccacgagcagcagctgatcagcggcagcctggacaacatcgtgaagctgtgggacaccagaagctgcaaggcccccctgtacgacctggccgcccacgaggacaaggtgctgagcgtggactggaccgacaccggcctgctgctgagcggcggcgccgacaacaagctgtacagctacagatacagccccaccaccagccacgtgggcgcctag

SEQ ID NO: 197484 - DNA, 1272 bp, Artificial Sequence
  derived and/or modified sequence
atggctcagcttcagacaagattctatacagataataagaaatatgccgtcgacgatgtgccctttagcatccctgctgcctctgaaattgctgatctgagtaatatcatcaataagctgcttaaggataaaaacgaattccacaagcacgtggaattcgacttcttgatcaagggacagttcttaagaatgcccctggacaaacacatggagatggagaacataagctctgaagaggtggtggagattgaatacgtcgagaagtatactgcaccccaacctgagcagtgtatgttccacgacgactggatttcaagcattaaaggagccgaagagtggattctcactgggagctatgataaaacatccaggatctggtctttggaaggcaagtccattatgaccatagttgggcataccgacgtagtgaaggacgtggcatgggttaaaaaggactccctgtcctgcctcttgttgtcagccagtatggatcagacaatactcctgtgggaatggaacgtcgaacgtaataaagtaaaggccctgcactgttgtcgagggcatgccggctctgtcgatagcatagcagtggatggctccggtaccaagttctgctcaggaagctgggataagatgctcaagatctggagtactgtacctaccgatgaggaggatgaaatggaggagtccacgaacaggcctagaaaaaagcagaagaccgagcaactaggtcttacccggacgccaattgtgactttgagtggccatatggaagcagtgtctagtgtactgtggtcagatgccgaggagatttgtagcgctagttgggaccatacgatccgagtgtgggacgtagaatccggatcattgaagagtacactgaccgggaacaaggtgttcaactgtatttcttatagcccactgtgtaagaggctagccagcggtagcaccgacagacatataaggctgtgggatccacgcactaaggacggcagcttggtgtcactgagcctcacgtcacacacgggctgggtgacctccgtcaaatggagcccaacacacgagcagcaactcatcagcggcagcctcgacaatattgtgaaactgtgggacaccaggtcttgcaaggcgccactatatgacctggcagcccacgaggacaaggtcttgtccgttgactggaccgacacaggactgctgttgtccggaggcgccgacaataaattgtactcctacagatactcccctactaccagccatgtgggagcctag

SEQ ID NO: 197485 - DNA, 1272 bp, Artificial Sequence
  derived and/or modified sequence
atggcccagctgcagacccgcttctacacagacaacaagaagtatgctgtggatgatgtgcccttcagcatcccagctgccagcgagattgctgacctgagcaacatcatcaacaagctgctgaaggacaagaatgagttccacaagcacgtggagtttgacttcctgatcaagggccagttcctgaggatgcccctggacaagcacatggagatggagaacatcagcagcgaggaggtggtggagattgaatatgtggagaagtacacagccccccagcctgagcagtgcatgtttcatgatgactggatcagcagcatcaagggagctgaggagtggatcctgaccggcagctatgacaagaccagccgcatctggagcctggagggcaagagcatcatgaccatcgtgggccacacagatgtggtgaaggatgtggcctgggtgaagaaggacagcctgagctgcctgctgctgagcgcctccatggaccagaccatcctgctgtgggagtggaatgtggagaggaacaaggtgaaggccctgcactgctgccggggccatgctggctctgtggacagcattgctgtggatggcagcggcaccaagttctgcagcggctcctgggacaagatgctgaagatctggagcacagtgcccacagatgaggaggatgagatggaggagagcaccaaccggcccaggaagaagcagaagacagagcagctgggcctgaccaggacccccatcgtgaccctgagcggccacatggaggccgtgtcctctgtgctgtggagcgatgctgaggagatctgcagcgcctcctgggaccacaccatccgggtgtgggatgtggagagcggcagcctgaagagcaccctgactggaaacaaggtgttcaactgcatctcctacagccccctgtgcaagaggctggccagcggcagcacagacagacacatccggctgtgggaccccaggaccaaggatggcagcctggtgtccctgagcctgaccagccacacaggctgggtgacctctgtgaagtggagccccacccatgagcagcagctgatcagcggcagcctggacaacatcgtgaagctgtgggacaccaggagctgcaaggcccccctgtatgacctggccgcccacgaggacaaggtgctgtctgtggactggacagacaccggcctgctgctgagcggcggcgctgacaacaagctgtacagctaccgctacagccccaccaccagccacgtgggcgcctag

SEQ ID NO: 197486 - DNA, 1272 bp, Artificial Sequence
  derived and/or modified sequence
atggcccagctgcagacccggttctacaccgacaacaagaagtacgccgttgatgacgtgccattttcaattccagcagcttcagaaattgccgacctgagtaacattattaacaaactactaaaagataagaatgagttccataagcatgtagaatttgactttctaattaaaggacaatttctcaggatgcccctggacaaacatatggagatggagaacatcagctcggaagaagtggttgaaatcgaatatgtggagaagtacacagcacctcagccagaacaatgtatgttccatgacgattggatatcgagtataaaaggggcagaagaatggatcttgaccggctcttacgacaaaactagtcgtatttggtccctggagggcaagtccattatgactatcgtcggccacaccgacgtagtgaaggatgtcgcttgggtgaaaaaagacagtcttagctgcctgttactgtcagcgagtatggaccagaccatcttgctgtgggaatggaacgtggagagaaacaaagtgaaagccttacattgctgcaggggtcatgccggcagcgtggacagtatcgccgtggatggcagcgggaccaagttctgttctggctcatgggataagatgcttaaaatctggagtactgtccctactgatgaggaagatgagatggaagagtcaacgaatcggccacggaaaaaacaaaaaacagaacagttgggtctcactcgaactccaatcgtgactctgagtgggcacatggaggcagtgagcagcgtgctttggtccgatgctgaagagatttgttcggcctcatgggatcacacaattcgagtgtgggacgtcgagtctgggagtttaaagagcacccttaccggaaataaggtattcaattgtataagctattccccactttgcaagagactggcctcaggctcaactgaccggcacattcggttatgggatcccaggaccaaggatggctccttggtcagccttagtctgacgtcacacactggctgggtgacttctgtgaagtggagcccaacacacgagcagcagctcatttccggtagcttggacaacattgtgaagttgtgggataccaggtcatgcaaggccccactctatgacctagccgctcacgaagataaggtcctatctgttgactggaccgatactggcctgctgctttctggcggagccgacaacaaactgtatagttacaggtacagccccaccacaagccatgttggagcctag

SEQ ID NO: 197487 - DNA, 1272 bp, Artificial Sequence
  derived and/or modified sequence
atggcacagctccagacacgattttacaccgataacaaaaagtacgcggtggacgacgtgccattttctatacctgctgctagtgaaatcgcagatctttccaatatcatcaataagctgcttaaggataaaaatgagttccacaagcatgttgaatttgacttccttatcaaggggcagttccttagaatgccactcgataaacacatggaaatggagaatatttccagcgaagaggtggttgagatcgagtatgtcgagaaatacactgcacctcagcccgagcagtgtatgttccatgatgattggatctcatctattaagggtgctgaagagtggatactgacaggctcatacgacaagacttcccgtatctggagcctggagggtaagtctattatgaccatagttggccataccgacgtggtgaaagatgtggcgtgggtgaaaaaagactctctcagctgtttgctgctttcagcttccatggaccagacaatcctgttatgggaatggaatgttgaaaggaacaaagtcaaggctttgcattgctgcaggggacacgcagggtcagtggactccatcgcagtggacggtagtgggactaaattctgcagcggctcatgggacaagatgcttaaaatctggagcaccgtccccaccgatgaggaggatgaaatggaagagtctacaaatcggccacgaaaaaaacagaaaacggagcagcttggactcaccagaactcccatagtaaccttgtctggacatatggaagcggttagcagcgtcctgtggtctgatgctgaagaaatatgcagtgctagctgggaccacactatacgtgtgtgggatgtggaaagtggttccctcaaatcaactttgacaggaaataaggttttcaattgtatcagctacagccccctttgcaagagactggccagcggatcaacagaccgccacattagactttgggacccaagaacaaaggacggaagtcttgtgtctctgtctctgacctctcataccggctgggtgacgagcgtcaaatggagcccaacacacgaacagcagctcatttcaggctccctggacaatatagtgaaactgtgggacaccagaagttgcaaagcccctctatatgacttggctgcccacgaggacaaggttctctcggtagactggacagatactggcctgctgttatccgggggagcagacaataagttgtattcttatcgttattcgcccacgacctcccacgtcggtgcttag

SEQ ID NO: 197488 - DNA, 2282 bp, Artificial Sequence
  derived and/or modified sequence
atcggccaccgtcgaccgtttcctctctcatccgttcttttctttgtatttccgcctctcgcctctctctaaaagccgcagttagaggcgagatttaggaaaaacctctgccgagtgagcctctggttgggaatatgtatgagaaaaaaaaactggcaaggcgttagtcaagcaaagctgaaggcagaggaaatttgatatctggctggagtctagaggatttaatgcaaataagatactctgagggcagcgtggcaaaaaaagactacaattcccggtggtcacagcgtttgagaagcgatgctttctgagacttgtagtaactaggagctgtgtttgaactatccaggctcaggacagcctcttgaaaaaaaattttttattaataaagcggatttgagtgggatctttttcctaatcgattacgggcccacacgtatgggaagaattctaacaatgattaaagggacatgctacctttacgactatccttttctaatcgatgactcctaaatctaggagtaggtagtcgatgtttgtggtctgggcgtctgtagaagggcaacctcgtgctttctgcagaggagaccggagggcagaaggcagagtccaggcttagactgcagttcctcgcttacctgtgcagtctaattttgagctgcctctttgtagtcttaaaaggcaggagcttcgtgttgtgggtctgctaacccgtacgtttccgtgggcaagtcgtgtgtactcctcgccatggctcagctccaaacacgcttctacactgataacaagaaatatgccgtagatgatgttcccttctcaatccctgctgcctctgaaattgccgaccttagtaacatcatcaataaactactaaaggacaaaaatgagttccacaaacatgtggagtttgatttccttattaagggccagtttctgcgaatgcccttggacaaacacatggaaatggagaacatctcatcagaagaagttgtggaaatagaatacgtggagaagtatactgcaccccagccagagcaatgcatgttccatgatgactggatcagttcaattaaaggggcagaggaatggatcttgactggttcttatgataagacttctcggatctggtccttggaaggaaagtcaataatgacaattgtgggacatacggatgttgtaaaagatgtggcctgggtgaaaaaagatagtttgtcctgcttattattgagtgcttctatggatcagactattctcttatgggagtggaatgtagagagaaacaaagtgaaagccctacactgctgtagaggtcatgctggaagtgtagattctatagctgttgatggctcaggaactaaattttgcagtggctcctgggataagatgctaaagatctggtctacagtccctacagatgaagaagatgaaatggaggagtccacaaatcgaccaagaaagaaacagaagacagaacagttgggactaacaaggactcccatagtgaccctctctggccacatggaggcagtttcctcagttctgtggtcagatgctgaagaaatctgcagtgcatcttgggaccatacaattagagtgtgggatgttgagtctggcagtcttaagtcaactttgacaggaaataaagtgtttaattgtatttcctattctccactttgtaaacgtttagcatctggaagcacagataggcatatcagactgtgggatccccgaactaaagatggttctttggtgtcgctgtccctaacgtcacatactggttgggtgacatcagtaaaatggtctcctacccatgaacagcagctgatttcaggatctttagataacattgttaagctgtgggatacaagaagttgtaaggctcctctctatgatctggctgctcatgaagacaaagttctgagtgtagactggacagacacagggctacttctgagtggaggagcagacaataaattgtattcctacagatattcacctaccacttcccatgttggggcatgaaagtgaacaataatttgactatagagattatttctgtaaatgaaattggtagagaaccatgaaattacatagatgcagatgcagaaagcagccttttgaagtttatataatgttttcacccttcataacagctaacgtatcactttttcttattttgtatttataataagataggttgtgtttataaaatacaaactgtggcatacattctctatacaaacttgaaattaaactgagttttacatttctctttaaaggta

SEQ ID NO: 197489 - protein, 1141 aa, Artificial Sequence
  derived and/or modified sequence
MAAAVGVRGRYELPPCSGPGWLLSLSALLSVAARGAFATTHWVVTEDGKIQQQVDSPMNLKHPHDLVILMRQEATVNYLKELEKQLVAQKIHIEENEDRDTGLEQRHNKEDPDCIKAKVPLGDLDLYDGTYITLESKDISPEDYIDTESPVPPDPEQPDCTKILELPYSIHAFQHLRGVQERVNLSAPLLPKEDPIFTYLSKRLGRSIDDIGHLIHEGLQKNTSSWVLYNMASFYWRIKNEPYQVVECAMRALHFSSRHNKDIALVNLANVLHRAHFSADAAVVVHAALDDSDFFTSYYTLGNIYAMLGEYNHSVLCYDHALQARPGFEQAIKRKHAVLCQQKLEQKLEAQHRSLQRTLNELKEYQKQHDHYLRQQEILEKHKLIQEEQILRNIIHETQMAKEAQLGNHQICRLVNQQHSLHCQWDQPVRYHRGDIFENVDYVQFGEDSSTSSMMSVNFDVQSNQSDINDSVKSSPVAHSILWIWGRDSDAYRDKQHILWPKRADCTESYPRVPVGGELPTYFLPPENKGLRIHELSSDDYSTEEEAQTPDCSITDFRKSHTLSYLVKELEVRMDLKAKMPDDHARKILLSRINNYTIPEEEIGSFLFHAINKPNAPIWLILNEAGLYWRAVGNSTFAIACLQRALNLAPLQYQDVPLVNLANLLIHYGLHLDATKLLLQALAINSSEPLTFLSLGNAYLALKNISGALEAFRQALKLTTKCPECENSLKLIRCMQFYPFLYNITSSVCSGTVVEESNGSDEMENSDETKMSEEILALVDEFQQAWPLEGFGGALEMKGRRLDLQGIRVLKKGPQDGVARSSCYGDCRSEDDEATEWITFQVKRVKKPKGDHKKTPGKKVETGQIENGHRYQANLEITGPKVASPGPQGKKRDYQRLGWPSPDECLKLRWVELTAIVSTWLAVSSKNIDITEHIDFATPIQQPAMEPLCNGNLPTSMHTLDHLHGVSNRASLHYTGESQLTEVLQNLGKDQYPQQSLEQIGTRIAKVLEKNQTSWVLSSMAALYWRVKGQGKKAIDCLRQALHYAPHQMKDVPLISLANILHNAKLWNDAVIVATMAVEIAPHFAVNHFTLGNVYVAMEEFEKALVWYESTLKLQPEFVPAKNRIQTIQCHLMLKKGRRSP

SEQ ID NO: 197490 - DNA, 3426 bp, Artificial Sequence
  derived and/or modified sequence
atggccgccgccgtgggcgtgagaggcagatacgagctgcccccctgcagcggccccggctggctgctgagcctgagcgccctgctgagcgtggccgccagaggcgccttcgccaccacccactgggtggtgaccgaggacggcaagatccagcagcaggtggacagccccatgaacctgaagcacccccacgacctggtgatcctgatgagacaggaggccaccgtgaactacctgaaggagctggagaagcagctggtggcccagaagatccacatcgaggagaacgaggacagagacaccggcctggagcagagacacaacaaggaggaccccgactgcatcaaggccaaggtgcccctgggcgacctggacctgtacgacggcacctacatcaccctggagagcaaggacatcagccccgaggactacatcgacaccgagagccccgtgccccccgaccccgagcagcccgactgcaccaagatcctggagctgccctacagcatccacgccttccagcacctgagaggcgtgcaggagagagtgaacctgagcgcccccctgctgcccaaggaggaccccatcttcacctacctgagcaagagactgggcagaagcatcgacgacatcggccacctgatccacgagggcctgcagaagaacaccagcagctgggtgctgtacaacatggccagcttctactggagaatcaagaacgagccctaccaggtggtggagtgcgccatgagagccctgcacttcagcagcagacacaacaaggacatcgccctggtgaacctggccaacgtgctgcacagagcccacttcagcgccgacgccgccgtggtggtgcacgccgccctggacgacagcgacttcttcaccagctactacaccctgggcaacatctacgccatgctgggcgagtacaaccacagcgtgctgtgctacgaccacgccctgcaggccagacccggcttcgagcaggccatcaagagaaagcacgccgtgctgtgccagcagaagctggagcagaagctggaggcccagcacagaagcctgcagagaaccctgaacgagctgaaggagtaccagaagcagcacgaccactacctgagacagcaggagatcctggagaagcacaagctgatccaggaggagcagatcctgagaaacatcatccacgagacccagatggccaaggaggcccagctgggcaaccaccagatctgcagactggtgaaccagcagcacagcctgcactgccagtgggaccagcccgtgagataccacagaggcgacatcttcgagaacgtggactacgtgcagttcggcgaggacagcagcaccagcagcatgatgagcgtgaacttcgacgtgcagagcaaccagagcgacatcaacgacagcgtgaagagcagccccgtggcccacagcatcctgtggatctggggcagagacagcgacgcctacagagacaagcagcacatcctgtggcccaagagagccgactgcaccgagagctaccccagagtgcccgtgggcggcgagctgcccacctacttcctgccccccgagaacaagggcctgagaatccacgagctgagcagcgacgactacagcaccgaggaggaggcccagacccccgactgcagcatcaccgacttcagaaagagccacaccctgagctacctggtgaaggagctggaggtgagaatggacctgaaggccaagatgcccgacgaccacgccagaaagatcctgctgagcagaatcaacaactacaccatccccgaggaggagatcggcagcttcctgttccacgccatcaacaagcccaacgcccccatctggctgatcctgaacgaggccggcctgtactggagagccgtgggcaacagcaccttcgccatcgcctgcctgcagagagccctgaacctggcccccctgcagtaccaggacgtgcccctggtgaacctggccaacctgctgatccactacggcctgcacctggacgccaccaagctgctgctgcaggccctggccatcaacagcagcgagcccctgaccttcctgagcctgggcaacgcctacctggccctgaagaacatcagcggcgccctggaggccttcagacaggccctgaagctgaccaccaagtgccccgagtgcgagaacagcctgaagctgatcagatgcatgcagttctaccccttcctgtacaacatcaccagcagcgtgtgcagcggcaccgtggtggaggagagcaacggcagcgacgagatggagaacagcgacgagaccaagatgagcgaggagatcctggccctggtggacgagttccagcaggcctggcccctggagggcttcggcggcgccctggagatgaagggcagaagactggacctgcagggcatcagagtgctgaagaagggcccccaggacggcgtggccagaagcagctgctacggcgactgcagaagcgaggacgacgaggccaccgagtggatcaccttccaggtgaagagagtgaagaagcccaagggcgaccacaagaagacccccggcaagaaggtggagaccggccagatcgagaacggccacagataccaggccaacctggagatcaccggccccaaggtggccagccccggcccccagggcaagaagagagactaccagagactgggctggcccagccccgacgagtgcctgaagctgagatgggtggagctgaccgccatcgtgagcacctggctggccgtgagcagcaagaacatcgacatcaccgagcacatcgacttcgccacccccatccagcagcccgccatggagcccctgtgcaacggcaacctgcccaccagcatgcacaccctggaccacctgcacggcgtgagcaacagagccagcctgcactacaccggcgagagccagctgaccgaggtgctgcagaacctgggcaaggaccagtacccccagcagagcctggagcagatcggcaccagaatcgccaaggtgctggagaagaaccagaccagctgggtgctgagcagcatggccgccctgtactggagagtgaagggccagggcaagaaggccatcgactgcctgagacaggccctgcactacgccccccaccagatgaaggacgtgcccctgatcagcctggccaacatcctgcacaacgccaagctgtggaacgacgccgtgatcgtggccaccatggccgtggagatcgccccccacttcgccgtgaaccacttcaccctgggcaacgtgtacgtggccatggaggagttcgagaaggccctggtgtggtacgagagcaccctgaagctgcagcccgagttcgtgcccgccaagaacagaatccagaccatccagtgccacctgatgctgaagaagggcagaagaagcccctag

SEQ ID NO: 197491 - DNA, 3426 bp, Artificial Sequence
  derived and/or modified sequence
atggcggccgctgtgggggtccgagggaggtacgagctgccaccctgtagtggaccagggtggctcctaagtctgagcgcactgctgagcgttgccgccaggggcgccttcgcaaccacacattgggttgtgacagaggacgggaaaatacagcagcaggtggactctccaatgaacctcaagcatcctcacgacttagttatactcatgagacaggaagccactgtgaattacctcaaagagctcgagaagcagctggtggcacaaaagatccatatcgaagagaatgaagatcgcgatacggggctggaacagaggcacaacaaagaggacccagactgcattaaagccaaagtgccattaggcgacctcgatttgtacgacggtacttacatcacattagaatccaaggacatcagccccgaggactatatcgacaccgagtccccggtcccaccagatcctgaacagcccgattgcaccaagattttggaattgccttacagtatacatgctttccaacatttgcgcggtgtccaggagagagtgaacctgtcagctcccttgcttccgaaggaagaccccatttttacctatctgtcaaagcgcctgggacgctcaattgatgacatcgggcacctaatccatgagggcctgcagaaaaatacaagcagttgggtgttatacaatatggcttcattctactggcgcatcaagaacgagccataccaggtcgttgagtgcgctatgagggcgctgcacttttcaagccgacacaacaaggacattgcgctcgttaacttggcgaatgtcctgcatcgcgctcacttctccgccgacgctgcggttgtagtgcacgccgccctggatgatagcgatttctttacttcctactataccctcgggaatatctacgccatgctgggggagtataaccacagtgtcttgtgctacgatcacgccttacaggcccgccccgggttcgagcaggccataaagaggaaacatgcagtactctgtcagcaaaagctagaacagaagttggaggcgcagcataggtctctgcagaggaccctcaacgagctaaaagagtatcagaagcagcacgatcattatctgcggcaacaagagattctggagaagcataagctgatccaagaggaacagatactcagaaatatcatccacgaaactcagatggcaaaagaagcccagttgggtaatcaccaaatttgccggttggtcaatcagcagcacagtttacactgccaatgggaccagccagttcgctatcaccggggtgacatcttcgagaacgtggactatgtgcagttcggagaggatagctcaaccagcagcatgatgagtgtcaactttgacgtacagagcaatcaaagcgacatcaatgatagcgtcaaaagcagtcccgtggctcattccattctatggatttgggggcgtgacagcgatgcttaccgcgacaaacaacatatactgtggcccaagcgggctgactgcaccgaatcatatcctagagtgcccgtgggcggtgaactccctacctatttcctccctcccgaaaacaaaggactcagaattcacgagctgagctcagatgattactccacagaggaagaagcccaaacacctgattgtagtattacagattttcgcaaatcccacaccctctcttatctagtgaaagagctcgaggtccgcatggacctgaaggcaaaaatgccagatgaccacgcaagaaaaattctgttatcacgcattaataactataccattcctgaggaggagatcggcagttttctatttcacgcaatcaacaaacccaacgcacctatttggcttatactcaatgaggccggtttgtattggcgggcagttggtaactccacctttgcaattgcttgcctccaaagggccctgaacttggcccctcttcagtatcaggacgtgcccttggtgaacctggcgaatttactcatccactatggtttacacctggacgccactaagttactgctgcaggcgctggccatcaattcttccgagccccttacctttctctctctggggaacgcctacctggctctgaaaaatattagcggagcactggaggcattccgccaagctctcaaactgactactaagtgtcctgagtgcgagaactcactgaagctaattcgctgcatgcaattctacccatttctgtataatataaccagctctgtttgctctggcaccgtcgtcgaggagtcaaacgggagtgacgagatggaaaattctgatgagacgaaaatgtccgaggagatactcgctctggtagacgagtttcaacaagcttggcccttagaaggctttggcggtgctctagagatgaaaggccgacggcttgaccttcaaggcatacgagtgctaaagaaaggcccgcaggacggggtcgctcggagttcctgctatggggattgccgatccgaagacgacgaagctactgaatggattacattccaggtgaagcgggttaagaaacctaagggagaccataagaaaacgcccggcaagaaagtcgaaactggccagatcgaaaacggccaccgctaccaggccaacctggaaattacaggccccaaagtcgccagccctggaccccaggggaaaaaacgtgactaccaaaggctgggctggccaagtccggatgaatgcctaaagttgcggtgggtggagctcaccgcgatcgtaagcacctggttagccgtcagctctaagaacatcgatattacagaacacatagacttcgccactccaatccagcagccagccatggagccactatgcaatgggaacctgccaaccagtatgcacacactggaccacttgcatggcgtatccaatagggctagccttcactacaccggagaatcccagctgacagaggtgctgcagaatttgggtaaggaccagtaccctcaacagtctctggagcagatcgggactcggatcgccaaggtgttggaaaagaaccagacctcctgggtgctttcttctatggccgcactctactggagggtgaagggtcagggaaagaaggctattgactgtctgagacaggccctgcactacgctccgcatcaaatgaaagacgtgcccctcatctcactcgcaaacatactgcataatgctaagctgtggaacgatgcagtgattgtcgctaccatggctgtggagattgcccctcactttgccgtgaaccatttcactctcggcaacgtctatgtggccatggaggaatttgagaaggccctcgtttggtacgagagcaccctgaagctgcagccagagtttgtccccgctaagaacagaatccagactattcagtgtcatctgatgctgaaaaagggtcgccggtccccttag

SEQ ID NO: 197492 - DNA, 3426 bp, Artificial Sequence
  derived and/or modified sequence
atggctgctgctgtgggcgtgcggggccgctatgagctgcccccctgcagcggccctggctggctgctgagcctgagcgccctgctgtctgtggccgcccggggggcctttgccaccacccactgggtggtgacagaagatggcaagatccagcagcaggtggacagccccatgaacctgaagcacccccatgacctggtgatcctgatgaggcaggaggccaccgtgaactacctgaaggagctggagaagcagctggtggcccagaagatccacattgaagaaaatgaagatcgggacaccggcctggagcagaggcacaacaaggaggaccctgactgcatcaaggccaaggtgcccctgggggacctggacctgtatgatggcacctacatcaccctggagagcaaggacatcagccctgaggactacatcgacacagagagccctgtgcccccagaccctgagcagcctgactgcaccaagatcctggagctgccctacagcatccacgccttccagcacctgcggggcgtgcaggagcgggtgaacctgagcgcccccctgctgcccaaggaggaccccatcttcacctacctgagcaagaggctgggccgcagcattgatgacatcggccacctgatccacgagggcctgcagaagaacaccagctcctgggtgctgtacaacatggccagcttctactggaggatcaagaatgagccctaccaggtggtggagtgtgccatgagggccctgcacttcagcagccgccacaacaaggacatcgccctggtgaacctggccaacgtgctgcaccgggcccacttcagcgcagatgctgctgtggtggtgcatgctgccctggatgacagcgacttcttcaccagctactacaccctgggcaacatctatgccatgctgggggagtacaaccacagcgtgctgtgctatgaccacgccctgcaggcccggcccggctttgagcaggccatcaagaggaagcatgctgtgctgtgccagcagaagctggagcagaagctggaggcccagcacaggagcctgcagaggaccctgaatgagctgaaggagtaccagaagcagcacgaccactacctgcggcagcaggagatcctggagaagcacaagctgatccaggaggagcagatcctgaggaacatcatccacgagacccagatggccaaggaggcccagctgggcaaccaccagatctgccgcctggtgaaccagcagcacagcctgcactgccagtgggaccagcctgtgcgctaccacagaggagacatctttgaaaatgtggactatgtgcagtttggagaggacagcagcaccagctccatgatgtctgtgaactttgatgtgcagagcaaccagagcgacatcaatgattctgtgaagagcagccctgtggcccacagcatcctgtggatctggggccgggacagtgatgcctacagagacaagcagcacatcctgtggcccaagagagctgactgcacagagagctacccccgggtgcctgtgggcggggagctgcccacctacttcctgcccccagaaaataaaggcctgcgcatccacgagctgagcagtgatgactacagcacagaggaggaggcccagaccccagactgcagcatcacagacttcaggaagagccacaccctgagctacctggtgaaggagctggaggtgaggatggacctgaaggccaagatgccagatgaccacgccaggaagatcctgctgagccgcatcaacaactacaccatccctgaggaggagatcggcagcttcctgttccacgccatcaacaagcccaatgcccccatctggctgatcctgaatgaagctggcctgtactggagggctgtgggcaacagcacctttgccatcgcctgcctgcagagggccctgaacctggcccccctgcagtaccaggatgtgcccctggtgaacctggccaacctgctgatccactacggcctgcacctggatgccaccaagctgctgctgcaggccctggccatcaacagcagcgagcccctgaccttcctgagcctgggcaatgcctacctggccctgaagaacatcagcggggccctggaggccttccggcaggccctgaagctgaccaccaagtgcccagaatgtgagaacagcctgaagctgatccgctgcatgcagttctaccccttcctgtacaacatcaccagctctgtgtgcagcggcaccgtggtggaggagagcaatggaagtgatgagatggagaacagtgatgagaccaagatgtctgaggagatcctggccctggtggatgagttccagcaggcctggcccctggagggctttggaggagccctggagatgaagggccggcggctggacctgcagggcatccgggtgctgaagaagggcccccaggatggagtggcccggagcagctgctacggggactgccgctcagaagatgatgaggccacagagtggatcaccttccaggtgaagagggtgaagaagcccaagggggaccacaagaagacccctgggaagaaggtggagaccggccagattgaaaatggccaccgctaccaggccaacctggagatcaccggccccaaggtggccagccctggcccccagggcaagaagagggactaccagaggctgggctggcccagcccagatgagtgcctgaagctgcgctgggtggagctgacagccatcgtgtccacctggctggccgtgagcagcaagaacatcgacatcacagagcacatcgactttgccacccccatccagcagcctgccatggagcccctgtgcaatggaaacctgcccacctccatgcacaccctggaccacctgcacggcgtgagcaacagagccagcctgcactacacaggagagagccagctgacagaggtgctgcagaacctgggcaaggaccagtacccccagcagagcctggagcagatcggcacccgcatcgccaaggtgctggagaagaaccagacctcctgggtgctgagctccatggccgccctgtactggagggtgaagggccagggcaagaaggccatcgactgcctgcggcaggccctgcactacgccccccaccagatgaaggatgtgcccctcatcagcctggccaacatcctgcacaatgccaagctgtggaatgatgctgtgattgtggccaccatggctgtggagatcgccccccactttgctgtgaaccacttcaccctgggcaatgtgtatgtggccatggaggagtttgagaaggccctggtgtggtatgagagcaccctgaagctgcagcctgagtttgtgcctgccaagaaccgcatccagaccatccagtgccacctgatgctgaagaagggccgccgcagcccctag

SEQ ID NO: 197493 - DNA, 3426 bp, Artificial Sequence
  derived and/or modified sequence
atggccgccgccgtgggcgtgcggggccggtacgagctgcccccctgctctggacccggatggctgctatccttgtccgccttgttaagcgtggccgcacggggtgccttcgctacgacccactgggtggtcactgaggacgggaagatccagcaacaggtggactctcctatgaatctcaagcatccgcacgacctggtcatactgatgaggcaggaggccacagttaactacctcaaggaactggagaagcagctggttgctcaaaaaatccacatagaagaaaacgaggatagggacacaggactggaacagcggcacaacaaggaggatccggactgtataaaagcaaaagtacctctcggtgacctcgacttgtacgacggcacatatatcacactcgagtctaaggacatctcaccagaggattacattgataccgaatcgcccgtgccccccgatcctgagcaacctgattgcacaaagattttggaactgccctattccattcacgcattccaacatcttcgcggggttcaggaacgagtcaacctgagcgcaccactgctgcccaaggaagatcctattttcacatatctaagcaaacggttaggacggtcaattgacgacatcggtcacctgattcacgaagggctgcaaaagaatacctcttcctgggtgctctataatatggcatctttttattggcggattaaaaatgagccataccaagttgttgagtgtgccatgcgggccctccacttttcttcgagacataacaaagacatcgcattagtaaatttggccaacgtacttcaccgcgcccacttttccgcagacgctgcagttgtggtacacgctgcacttgacgatagcgatttcttcacttcgtactacacactcgggaatatctacgccatgctgggcgagtacaatcactctgtgttgtgctacgaccatgctctccaggcccgccctggttttgaacaagcaatcaaacggaagcatgctgttctatgccagcagaaattggaacagaagttagaagcgcagcaccgcagcttacagagaacactgaatgaactgaaagagtatcagaagcagcatgatcactaccttcgtcagcaagagatcctagagaaacacaagctgattcaggaagagcagatcctaaggaatattatacatgagacccagatggccaaggaggcacagctgggaaaccaccagatttgcagattagtgaatcaacagcactcgctgcattgccagtgggatcagcccgtgcggtaccaccggggcgacatcttcgagaatgtagactacgtccagttcggggaggattcctccacctcctcaatgatgagcgtaaattttgacgtacagtcaaaccaatcagacattaatgacagtgttaagtcctccccagtagcacactcaatcttgtggatttggggcagggactccgatgcttacagggataaacagcacatcctatggccgaaaagagctgactgcactgagtcttaccctagagtgccagtaggcggggaattgcccacttacttcttaccacccgaaaacaaggggcttagaatccacgaactaagtagcgacgattacagcactgaagaagaggctcagacccctgattgctcaattaccgatttcaggaagtcccataccttatcatacttagttaaggaactggaggtcaggatggacctcaaggcaaagatgcccgacgatcatgcgagaaaaatattgctgagtcgcataaacaattatacgatccctgaagaagaaatcggcagtttcctatttcacgcaatcaataaacctaacgcccctatttggctaattctgaatgaggccggcctctattggagggctgtgggtaatagcactttcgccatagcttgtctacagcgagccctgaacctcgcacccttacagtatcaggacgtaccactggtgaacctggccaacttgcttatccactacgggctgcacctggatgcgacaaaactcttactccaggccttagcaatcaacagttccgagcccttaacttttctgtcgctgggtaacgcttatttggcgcttaagaacatcagtggagccctagaagccttccgccaggccttgaaactgacaaccaaatgcccagaatgtgagaattccctgaaactcatccggtgtatgcagttttacccattcttatataatatcacgtcgagcgtctgtagtggtacggtcgtggaagagtcaaacggctctgacgagatggagaactcagacgagactaagatgagtgaagagatcctggcactagtggatgagttccaacaagcctggccattagagggttttggcggcgcactggagatgaagggcaggcggttggatctacaggggataagagtgctcaagaagggcccgcaggatggcgtcgcccgtagctcatgttatggcgattgccgctctgaagacgatgaggccacagagtggattacctttcaggtgaagcgggtaaagaaacccaagggcgaccacaagaaaactcctgggaaaaaggtggagaccggacaaattgagaatggccatcgatatcaagcaaatctggagattaccgggcctaaggtggcaagccccggcccccagggcaagaagcgagattaccagcgactgggctggccatctcccgacgagtgcctgaagctacgctgggtggagttgaccgccattgttagcacctggctcgctgtaagcagcaaaaacatcgacatcaccgaacatatcgacttcgcaactcctatccagcagcccgctatggaacccctttgtaatggaaacctccctactagcatgcatactctggatcatttacatggggtttccaatagagcctctctccattacaccggggagtcacagctcaccgaggtgttgcagaacttgggcaaagaccaatatccacagcagtccctggaacagatcggaactagaatagctaaagtgctcgagaagaaccagaccagctgggtgctatcttccatggccgctttatactggagggtcaagggacaggggaagaaggccatcgactgtttgcggcaggccctgcattacgcccctcaccagatgaaggacgtccctctgatttctctcgcaaacattcttcacaacgccaagctgtggaacgatgctgtaatagtcgccacaatggcggtggagatcgccccacatttcgctgtgaaccatttcacactgggtaatgtgtatgtcgcgatggaggagttcgaaaaagcccttgtttggtatgagagcacgctaaagctgcagccagaatttgtacctgccaaaaatagaatccaaaccatccagtgccatctgatgctgaagaagggaaggagatcgccatag

SEQ ID NO: 197494 - DNA, 3426 bp, Artificial Sequence
  derived and/or modified sequence
atggctgccgctgtcggtgttaggggccgttacgaattgccaccttgtagtgggccaggatggctcttgtctctcagcgcgctactctcagtggctgctaggggcgcttttgcaaccactcattgggtggtgacagaagacggtaaaatccagcagcaagtggacagcccaatgaaccttaagcatccccatgatttggttatacttatgcggcaggaggctacagtcaactatctgaaagagttagagaagcagttagtcgcgcagaagatccatatcgaagagaatgaagaccgggacacaggcttggagcagcgtcacaacaaggaggatcccgattgtatcaaggccaaggttcctcttggggacctagacctttacgatggaacctacatcactctcgaaagcaaggacatctcacccgaggactacattgacaccgagtcaccggtcccacctgaccctgaacaaccagactgtacgaagatcttagagctcccttactcaatccacgcatttcaacacctacgcggagtccaggaacgagtgaatcttagtgcccctttgctgccaaaagaggaccctatctttacttatctatcgaaacgcctgggacgcagcatcgacgacattgggcacctcattcacgaagggcttcagaagaacacaagcagttgggtcctgtacaacatggccagcttttattggcgtatcaagaacgaaccatatcaggtggttgaatgtgccatgcgggctctgcacttctcatcacgccacaataaagacatcgccctggtcaatctagccaacgtgcttcatcgggcacacttctccgcagacgcagccgtcgtggtgcacgccgctctggatgatagtgattttttcactagctattataccctgggcaacatttacgcaatgctgggcgaatataaccactccgtcctatgctacgaccacgccctgcaggctagacccggattcgaacaagccatcaaacggaaacatgcggtgttgtgtcaacagaagctcgagcagaaattggaagctcagcacagaagtctacagcgtactctcaatgagctgaaggaatatcagaaacaacacgaccattacctaagacagcaagaaattctcgagaagcacaagctgatccaggaggagcagatactcaggaatattatacatgagacccagatggctaaagaggcccagttgggtaatcatcagatctgccgcctggtcaaccaacagcattcactgcactgtcagtgggaccaacctgtgcgttaccatcgcggagacatttttgaaaatgtggactacgtgcagtttggagaggatagctctacttcttccatgatgtcagtgaactttgatgttcaatcaaatcaaagtgacatcaatgattcagtaaagtcaagccccgtggcccactccatcttgtggatttggggacgggatagtgatgcataccgcgataaacaacacatactgtggcccaagcgggctgactgtaccgagagctatccaagagtacctgtcggcggtgaactcccaacctatttcctgcctccagaaaacaaggggctgcgtatccatgagctatcatcagacgactattctaccgaagaagaggcccagacacccgactgctcaataaccgacttccgtaaatcacacacacttagctatttggtaaaggaactggaagtgaggatggacctgaaagccaagatgcctgacgatcacgctcggaaaattctgctttccaggatcaacaactacaccattcccgaagaagaaataggttcctttctgtttcacgcaattaataaacctaacgcccctatttggcttattctaaacgaagcagggctgtattggagagctgtcggcaacagtaccttcgctatcgcctgtctacaaagggccctgaacttagcccctctccagtaccaagatgttcccctcgttaacttggctaacctccttatccactacggcctccatctcgacgcaaccaagctgcttctgcaggcacttgcaattaacagtagcgagcctttgaccttcctaagtttagggaatgcatatcttgcgctgaagaacataagcggcgcactggaggcatttagacaggcactgaagctaaccaccaagtgtccagagtgcgagaatagtctgaagttgattcgctgcatgcaattttacccttttctgtacaacataacctcatcagtgtgtagtggcacagttgtggaagagagcaacgggtccgatgaaatggaaaattccgacgaaaccaagatgagtgaagaaattctcgctctggtagatgagtttcagcaggcgtggcccctagagggattcggtggcgctctagaaatgaaaggcagaaggttggatctgcagggcatccgggtactcaagaaaggccctcaggatggggtggcaagaagctcatgctatggcgactgtcgttcagaggacgatgaggcaactgagtggattacctttcaagtaaagagggtcaaaaaaccaaagggagaccataagaagactcccggaaagaaggtggagaccggacagatagaaaacgggcatagataccaggcaaaccttgaaattaccggacctaaggtcgcttctcccggtccccagggtaagaaacgagattaccagcgactgggctggcctagcccagacgagtgcctgaaactacgctgggttgaactgaccgccatcgtatctacctggttagctgtctcttccaaaaacattgatatcaccgaacatattgacttcgctactcccatacagcagcccgctatggaacctttgtgcaacggtaatctcccaacttccatgcatactttggaccacctgcacggtgtgtctaatagagcgagcctacactacaccggcgagagtcagctgacagaggtgctgcagaatttggggaaagaccagtacccccagcagtccctggagcaaattggaactaggattgctaaagtgctcgagaagaaccagacatcatgggtgctgtcctctatggccgctctctactggcgggtgaagggccaaggcaaaaaagccattgactgtcttagacaagccttgcattatgctccccaccagatgaaagatgtccctctaatcagcttagccaacatcctccataatgccaaactctggaatgacgcagtaatcgtcgccacgatggcagtggagatcgcccctcatttcgccgtgaatcacttcaccctgggtaacgtgtacgtagctatggaagaattcgagaaggcccttgtgtggtatgaaagtactctaaagctgcagcctgagttcgtgcccgcaaaaaacaggattcaaactatacagtgccacctgatgctcaaaaagggcaggaggtccccttag

SEQ ID NO: 197495 - DNA, 3426 bp, Artificial Sequence
  derived and/or modified sequence
atggctgcagccgtaggagtgagaggccgctacgaactgcctccctgttcaggcccaggctggctgctttccctgtccgccctattatctgtggccgctagaggtgcattcgcgacaacacactgggtggtgaccgaggacggaaagatccagcagcaggtcgatagtccgatgaatttaaagcacccccacgatctcgtgatcttaatgagacaggaggccaccgtcaattatcttaaagaactggagaagcagctggtagcacagaaaattcacattgaggagaacgaagacagagatactgggctcgaacaaaggcataataaggaagaccccgattgcataaaagccaaggtgcccctgggggatcttgatctctacgacggaacctatatcactctcgagtctaaagacatctctcccgaggattacattgacactgaatcccctgtcccacccgatcccgaacagcccgattgcacgaagatcctggagctaccgtactccatccacgccttccagcacttacgcggcgtgcaggagcgagttaatctgagtgctccactgctaccgaaggaggatcccatatttacttacctatccaaaagactgggcagaagcatagatgatataggacacctcattcacgagggtctgcagaagaacacttctagttgggtgctgtataacatggcatctttctactggcggatcaagaatgagccttaccaggtggttgaatgcgccatgcgcgcacttcactttagcagtcgacacaacaaggatatagcgctggtgaatttagctaacgtcctgcatcgcgctcatttctctgctgatgccgcagtggtggttcatgcagccttagacgactctgatttcttcactagttactatactctcggcaatatttacgctatgctgggggaatacaaccactctgtgctgtgctacgaccatgcccttcaagcaagacccggctttgagcaagcaattaaacgcaagcacgccgttctctgtcaacagaaacttgagcagaaactggaggctcagcaccgatctctgcagaggacactcaatgaactaaaagagtatcagaagcagcatgaccactatcttcgtcagcaggagattctggaaaaacacaagctcatccaagaggagcagatcctcaggaacattatccacgaaacacagatggcaaaagaagcccagctgggcaatcaccagatctgtagactggttaaccaacagcactcactccactgccaatgggaccagccagtccggtaccatcggggcgatattttcgaaaacgttgattacgtgcagttcggtgaagactcctccactagtagcatgatgtcggtgaattttgatgttcagagtaatcaatcagatatcaatgattctgttaagtcaagcccagtcgcccatagcatcctctggatttggggcagggatagtgatgcttatcgtgacaagcagcacatcctttggccaaaaagagctgattgtaccgagagttaccctcgggtgcctgttggaggcgaactgcccacctactttcttcctcccgaaaacaagggtctcaggattcacgaactctctagcgacgattattctaccgaagaagaggcccagacaccagactgttccatcacagattttaggaaaagccataccctctcttacctggtgaaggagttggaggtccgaatggatctaaaggcaaaaatgccagacgatcatgcacggaagattctgctgtcccgcattaacaattacacgatcccagaggaggaaatcgggtcttttttgtttcacgctatcaataagccaaatgcccctatctggctgatcctgaatgaagcaggtttgtactggagagctgtgggcaatagcaccttcgccatcgcatgtctgcagcgggcgttaaatctcgcgcctctgcaatatcaagacgtgccactagtcaacctggccaatctgctgatccactatggcctgcatctggatgccaccaagctattgctccaggccctcgctattaatagttcagagcccctcacttttctgagcctcggtaatgcctatttagcccttaaaaacatctcaggtgcacttgaagcctttaggcaagccttgaagctcacaactaaatgtcctgagtgcgaaaatagtttgaaactcatacgctgcatgcagttctacccattcctgtataacattaccagttcagtatgctcagggactgtggttgaggaaagcaacggatctgacgaaatggaaaactcggacgaaaccaagatgagcgaggaaatcctagccttggttgatgaattccagcaggcctggccattggagggatttggcggcgccctggagatgaagggtagaaggctagacctgcagggtatccgggtgctcaagaaaggcccccaggacggcgtcgcgagatcaagctgctatggcgattgtagatcagaggatgacgaagcaacagagtggatcactttccaggtcaaacgagtgaagaagccgaagggcgatcacaagaagacccccggaaagaaggtggaaaccggacagatcgaaaacggacacagatatcaggcaaacctggaaatcacaggaccgaaggtggcatcacctggcccacaggggaagaaacgagactaccagagactcggttggccatccccagatgagtgcctcaagctgcgctgggtggaactcaccgccatcgtatcgacatggctggccgtttcttcaaagaacattgacatcacagaacacattgattttgctaccccaatacagcaaccggccatggagcccctttgtaatggaaaccttcctacttctatgcacaccctcgaccatctgcatggcgtgtctaatcgggcctccctgcattacaccggagagtctcagctcactgaggtcctgcagaatttgggcaaggatcagtacccgcagcagagtctcgaacagataggcacacggatcgccaaagtactggagaaaaatcagacttcttgggtgttgtcttcgatggcggccctctactggagagtgaagggacaggggaagaaggccatagactgtctgcgacaagcgttgcattatgcaccccatcagatgaaagacgtgccattgatctcactggccaatatcctgcataatgccaagctttggaacgacgctgtgattgtcgccacaatggccgtggagatcgcaccccacttcgccgtgaatcactttaccctcggtaatgtatatgtagccatggaagagttcgaaaaggccctcgtctggtacgagagcaccctgaagctgcaaccggaattcgtacctgcaaagaaccgtatacaaacaattcagtgccatttgatgctaaagaagggcagaagatccccttag

SEQ ID NO: 197496 - DNA, 3426 bp, Artificial Sequence
  derived and/or modified sequence
atggctgcagccgtaggagtgagaggccgctacgaactgcctccctgttcaggcccaggctggctgctttccctgtccgccctattatctgtggccgctagaggtgcattcgcgacaacacactgggtggtgaccgaggacggaaagatccagcagcaggtcgatagtccgatgaatttaaagcacccccacgatctcgtgatcttaatgagacaggaggccaccgtcaattatcttaaagaactggagaagcagctggtagcacagaaaattcacattgaggagaacgaagacagagatacaggactagagcaacgtcacaacaaggaagatccagactgtataaaggctaaagttcccctgggcgatttagatctgtacgatggcacctatattacgcttgagagtaaggatatttctccggaagattacattgataccgagagccccgttcctccagaccctgagcagccagattgtactaagattctcgaattaccctactcgatccatgcgttccagcacctcaggggcgtccaagaacgtgtcaatttgtctgcacctcttctccctaaggaagatcctatcttcacttacttgtcaaagcgcttgggtcgctctatcgacgacatcggtcatctcattcatgagggactgcagaaaaatacctcttcctgggttctgtacaatatggcatctttctattggcggatcaagaacgagccataccaggtagtggaatgtgcaatgagagctcttcacttctcttccagacacaataaagatatcgctctcgtaaacttagcaaacgttctgcatagagctcatttttcggccgacgcagccgttgtggtgcacgcggcgttggatgattccgatttcttcacatcctactacacattaggtaacatctatgctatgctcggtgaatacaaccacagcgtgttgtgctatgaccacgcgctccaggctagacctggctttgaacaggcaattaaacgcaaacacgccgtcctctgccagcagaaactagagcaaaagttagaggcgcagcatcgatcactgcagcggacactcaatgagctgaaagaatatcagaagcaacatgaccattatttgcggcagcaagagattttggagaagcacaagttgatacaggaggagcagattctacgcaatataatccacgaaactcagatggctaaagaagcccagcttggcaatcaccagatttgtaggcttgtcaaccagcagcacagcctccattgtcagtgggatcagccagttagatatcatagaggagatatttttgagaatgtagattatgtccagtttggagaggatagttctactagcagcatgatgagtgttaacttcgatgtccaatccaaccagtccgatattaacgatagcgtgaaatcaagtcccgttgcccacagtattctctggatttgggggagagatagtgacgcttatcgagataaacagcacatcctctggccaaagcgagccgactgtaccgagagctaccccagggttcccgtgggaggagaactgcctacttattttcttccccctgagaacaaaggtttacgcatccatgaactctcctctgacgattacagcactgaagaagaagcgcagactcccgactgctcgataactgactttcgaaaatcacataccttatcatacctcgtcaaggaactggaggttagaatggacctgaaagctaaaatgcccgacgaccacgcccgtaagatcttgctcagccgaattaataactacacaataccggaggaagaaatcggcagttttctgtttcatgcaatcaataaacctaatgctcctatttggctaattctcaacgaagccggcctttactggagagctgtggggaactcaaccttcgcaatagcatgtttacaaagggctctgaatttagcccccctgcaatatcaggacgtgcctctggttaatctagctaatcttctcattcactatggcttgcacctcgatgctacaaaactccttctacaagcactggccattaactcctccgaacctctgaccttcctcagcctaggcaatgcctacctagccctgaagaatattagcggcgctttagaagcatttaggcaggccctcaaactgaccactaagtgtcccgaatgtgagaatagtcttaaactgatcagatgcatgcaattttacccctttctctacaacataacttcatcagtgtgttccggcaccgtggtagaagagtctaatggaagcgacgagatggaaaactccgatgaaacaaaaatgtcagaagagatcctagcgctcgtggatgaatttcagcaggcatggccccttgaaggattcggtggggccctggagatgaaaggcagaagactagatttgcagggaattagggtactcaagaaaggcccccaggacggagtagctcgaagttcctgttatggagactgcagaagcgaagatgacgaagctactgaatggataacgtttcaggtcaagagagtgaagaagccaaaaggtgaccacaagaaaactccaggcaaaaaggtagagaccggccagatcgaaaacgggcatagatatcaagctaatctggaaattaccggcccaaaggtcgccagtccgggtccccagggaaaaaaaagggattaccagagactcggctggccgagtcctgatgaatgcctcaaactgcgctgggtggagctcacagctatcgtttctacatggctcgccgtctcctctaaaaatatcgatatcacagaacacattgactttgctactccgattcagcaaccagccatggaaccgctctgtaacgggaatctgcccacatcaatgcataccctggatcatctgcatggagtgtcaaatcgtgcgagtttacactacacaggagagagtcagctgactgaagtcttgcaaaatctaggaaaggatcagtacccccaacagtcgctggagcaaatcggcaccagaattgcgaaagttcttgagaaaaaccagacatcctgggtcctaagcagtatggccgctctgtattggagagtcaaaggccagggtaaaaaagccatcgattgtctgcgacaggcattacactatgccccacatcagatgaaagatgttcccttaatcagccttgctaacattctgcacaatgccaaattgtggaacgatgctgtcatagtggccacgatggctgttgaaatagccccgcactttgccgttaatcattttactctgggaaatgtgtatgtagctatggaagagttcgagaaagctttggtttggtacgaatctacgctcaagctgcaacctgaattcgttccagctaaaaatcgcatccaaacaatccagtgccatctgatgttaaagaaaggtagaagatcaccatag

SEQ ID NO: 197497 - DNA, 4469 bp, Artificial Sequence
  derived and/or modified sequence
gccgggggggcaagatggcggcggcagtaggggttcgtggccggtacgagctgccgccttgctccggcccaggctggctcctcagcctttccgccttgctgagtgtggcggcacgaggggccttcgccaccacgcactgggtcgtcacggaggacgggaaaatccagcagcaggtggattcaccaatgaacttgaagcatcctcatgacctagtcatattaatgagacaagaagcaacagttaactacctcaaagaattagagaaacaattagttgctcaaaaaattcacatagaagagaatgaggacagagacacaggactggaacagagacataataaagaagacccagactgcatcaaagccaaggtgcccttaggggacctggatctatatgatggcacatacataactttggagagcaaagacatcagtcctgaagattatatagacacagaatctcctgtccctccagacccagagcaacctgattgtactaaaattctagaacttccatatagtatacatgcttttcagcacttgagaggtgtacaggagagagttaatctttctgcacctctgctacctaaagaagacccaatcttcacatatttatctaaacggttaggaaggagtatagatgacataggtcacctcattcatgaaggcctacagaagaacacttcctcgtgggtactgtataacatggcttcattttactggagaattaagaatgagccatatcaggtagtagaatgtgccatgcgagcacttcacttctcttccaggcacaataaagacattgccctggtcaacctggcaaacgttctacacagagcacacttctctgctgatgctgctgtcgtggtccatgcagctctggatgacagtgacttcttcaccagctattacactttggggaatatatatgcaatgcttggggaatataaccactcagtgctctgttatgaccacgctttgcaggccagacctgggtttgagcaagctataaagaggaagcatgctgtcctatgtcagcaaaaactggagcagaaattggaggctcagcatagatctctccagcgaacactgaatgagttaaaagagtatcaaaagcagcatgaccactacctgagacagcaggaaatcctagaaaaacataaactgattcaggaggagcaaatcttaagaaatatcattcatgagactcagatggcaaaagaggcacaattaggaaatcatcagatatgccgactggtcaaccagcagcatagtttacattgccagtgggaccagcctgtacgctatcatcgtggagatatctttgaaaatgtggactatgttcagtttggtgaggattcatcaacctccagtatgatgtctgtgaactttgatgttcaatcaaatcagagtgatatcaatgattcggtcaagtcttctcccgtagcccattctattctctggatttggggcagggactctgatgcatatagggacaaacagcatattctatggcctaaaagagcagattgtacagaaagctaccctagagtccctgttggtggggaattgccaacgtattttctgcctccggaaaacaaaggactcaggatccacgaactcagcagtgatgattattctacagaagaagaggcccaaacccctgactgttccataactgacttcagaaaaagccacactctgtcctacttagtcaaagaattagaggttcgcatggatctgaaagccaaaatgccagatgaccatgcacgaaaaattttgctttcccgtattaataactatactatcccagaagaagaaattgggtctttcttatttcatgctattaataagccaaatgctcctatctggctcatactcaatgaagctggactatactggagagcagtaggaaatagcacttttgctattgcctgtcttcagagggctttgaatttagctccacttcaataccaagatgttcctcttgtcaacttggccaaccttttgattcattacggccttcatcttgatgccactaagctgctacttcaagctttggccatcaatagctctgagcctctgacctttttgagcctgggaaatgcttaccttgctctgaagaatatcagtggggcacttgaggcctttagacaggccttgaaattaaccaccaaatgtccagagtgtgaaaacagcctgaagttgatccgctgtatgcagttttatccttttctgtacaacatcacttcttctgtttgcagtggtacggtggttgaggagagcaatggttctgatgagatggagaattcagatgaaaccaaaatgtcagaagaaatactggctttggtggatgaatttcaacaggcatggcctttggaaggctttgggggtgcactagagatgaaagggcggcgtctagacttacaaggaatacgggtgctgaagaaaggtccccaggatggagtggccagaagctcttgctatggagactgcagaagtgaagatgatgaagcaacagaatggattacattccaggtcaaacgtgtaaagaaacccaaaggagatcataagaaaactcctgggaaaaaagtagaaacaggtcagatagaaaatggacatcgttaccaagcaaacctagagatcactggccccaaggtggcatctcctgggccacaaggaaaaaaacgtgactaccagcgtctgggatggcccagcccggacgaatgcctcaaactccgctgggtagagctgactgccatcgtgagtacctggcttgcagtttcttcaaaaaacattgacatcacagaacacatagattttgccacccctatacagcagccagcaatggagcctctttgcaatggcaatctccccacgagtatgcataccctggaccacttgcatggggtttccaaccgagccagcctgcactacacaggggagagtcagttaacagaggtattacaaaatctcggcaaagaccaatatccacaacagtcgcttgaacagattggcacccgaattgccaaagttttggaaaagaaccagacgtcctgggtcctctccagcatggcagccctctactggagggtgaaaggccaaggaaagaaggcaatcgactgcctccgccaggctctgcactatgcgccacaccagatgaaggatgtgcccctgattagcctggccaacatcttgcacaatgccaagctctggaatgacgccgtcatagtagccaccatggcagtagagatcgcaccacactttgctgtgaaccacttcactctgggcaatgtctacgtggcaatggaagaatttgaaaaagcactggtgtggtatgaatccacattgaagcttcagcccgagtttgtcccagccaagaaccgaatccagaccatccagtgtcacttaatgctgaagaagggacggcgctctccttagtgcacttcttccttctctctttctctttactcatgctctaaaaaaaaagaataagaaaagaaaccaatcattgtcagtatctactattaatgatgtgtgtgaaaataactaagacttataacaggacttttacatatgtgggaattggtttgtttttgtttttacgtttctcctttcccccaaccaacctcagaagaggcaccttcagaaacacacatttcttaaaaggaaagtgcagcttcaagatattgtgtaaatactgagccaagacatttctggagctgtgctctgtctccaaaaacctcaatgcctttagggcttttctcagtggtccagctagccttctctttggaggaggatgaagccgcattgcacattctctgcttcctgtcgtagcctctgttgtcaatggaaatgcggaagcccatctggtgcccgtcagtgagaagcaacgttctgcgctctctccgttagacctccatgctgtccccagtcttgtccattccatgctgctgtgttacaaactctcagaggtagtttgcaggggaggaaggggaatatgattttaaaaacaaaatatttacaacaacaaaaattcttaggatcacctgacctttgtaatgttatttatgttggggagggaggggggctgagaaggggaaatcagcagtgtgcaacatctttataatttgtactttaattacaaatcacaaggaaaccaataagttgaaatcctatataacaggtttatatatatagaatatgtatatttgaagccctctacagactgagtctatgttttactaattctttgttcactgtgttacccatcttggaataagttgtgaatgtcagctccctctctctgaggcctccagacttagctcctcaggagggtaatgagccaaggttgagtgtttccatacaatgcttttacctttgatcccaggagaatcagaaactccaacattttggaatcttcaagggcacatactgagaaaaaaaataaaattgtttatgagcaaaata

SEQ ID NO: 197498 - protein, 1182 aa, Artificial Sequence
  derived and/or modified sequence
MRAVLTWRDKAEHCINDIAFKPDGTQLILAAGSRLLVYDTSDGTLLQPLKGHKDTVYCVAYAKDGKRFASGSADKSVIIWTSKLEGILKYTHNDAIQCVSYNPITHQLASCSSSDFGLWSPEQKSVSKHKSSSKIICCSWTNDGQYLALGMFNGIISIRNKNGEEKVKIERPGGSLSPIWSICWNPSREERNDILAVADWGQKVSFYQLSGKQIGKDRALNFDPCCISYFTKGEYILLGGSDKQVSLFTKDGVRLGTVGEQNSWVWTCQAKPDSNYVVVGCQDGTISFYQLIFSTVHGLYKDRYAYRDSMTDVIVQHLITEQKVRIKCKELVKKIAIYRNRLAIQLPEKILIYELYSEDLSDMHYRVKEKIIKKFECNLLVVCANHIILCQEKRLQCLSFSGVKEREWQMESLIRYIKVIGGPPGREGLLVGLKNGQILKIFVDNLFAIVLLKQATAVRCLDMSASRKKLAVVDENDTCLVYDIDTKELLFQEPNANSVAWNTQCEDMLCFSGGGYLNIKASTFPVHRQKLQGFVVGYNGSKIFCLHVFSISAVEVPQSAPMYQYLDRKLFKEAYQIACLGVTDTDWRELAMEALEGLDFETAKKAFIRVQDLRYLELISSIEERKKRGETNNDLFLADVFSYQGKFHEAAKLYKRSGHENLALEMYTDLCMFEYAKDFLGSGDPKETKMLITKQADWARNIKEPKAAVEMYISAGEHVKAIEICGDHGWVDMLIDIARKLDKAEREPLLLCATYLKKLDSPGYAAETYLKMGDLKSLVQLHVETQRWDEAFALGEKHPEFKDDIYMPYAQWLAENDRFEEAQKAFHKAGRQREAVQVLEQLTNNAVAESRFNDAAYYYWMLSMQCLDIAQDPAQKDTMLGKFYHFQRLAELYHGYHAIHRHTEDPFSVHRPETLFNISRFLLHSLPKDTPSGISKVKILFTLAKQSKALGAYRLARHAYDKLRGLYIPARFQKSIELGTLTIRAKPFHDSEELVPLCYRCSTNNPLLNNLGNVCINCRQPFIFSASSYDVLHLVEFYLEEGITDEEAISLIDLEVLRPKRDDRQLEIANNSSQILRLVETKDSIGDEDPFTAKLSFEQGGSEFVPVVVSRLVLRSMSRRDVLIKRWPPPLRWQYFRSLLPDASITMCPSCFQMFHSEDYELLVLQHGCCPYCRRCKDDPGP

SEQ ID NO: 197499 - protein, 1032 aa, Artificial Sequence
  derived and/or modified sequence
MFNGIISIRNKNGEEKVKIERPGGSLSPIWSICWNPSREERNDILAVADWGQKVSFYQLSGKQIGKDRALNFDPCCISYFTKGEYILLGGSDKQVSLFTKDGVRLGTVGEQNSWVWTCQAKPDSNYVVVGCQDGTISFYQLIFSTVHGLYKDRYAYRDSMTDVIVQHLITEQKVRIKCKELVKKIAIYRNRLAIQLPEKILIYELYSEDLSDMHYRVKEKIIKKFECNLLVVCANHIILCQEKRLQCLSFSGVKEREWQMESLIRYIKVIGGPPGREGLLVGLKNGQILKIFVDNLFAIVLLKQATAVRCLDMSASRKKLAVVDENDTCLVYDIDTKELLFQEPNANSVAWNTQCEDMLCFSGGGYLNIKASTFPVHRQKLQGFVVGYNGSKIFCLHVFSISAVEVPQSAPMYQYLDRKLFKEAYQIACLGVTDTDWRELAMEALEGLDFETAKKAFIRVQDLRYLELISSIEERKKRGETNNDLFLADVFSYQGKFHEAAKLYKRSGHENLALEMYTDLCMFEYAKDFLGSGDPKETKMLITKQADWARNIKEPKAAVEMYISAGEHVKAIEICGDHGWVDMLIDIARKLDKAEREPLLLCATYLKKLDSPGYAAETYLKMGDLKSLVQLHVETQRWDEAFALGEKHPEFKDDIYMPYAQWLAENDRFEEAQKAFHKAGRQREAVQVLEQLTNNAVAESRFNDAAYYYWMLSMQCLDIAQDPAQKDTMLGKFYHFQRLAELYHGYHAIHRHTEDPFSVHRPETLFNISRFLLHSLPKDTPSGISKVKILFTLAKQSKALGAYRLARHAYDKLRGLYIPARFQKSIELGTLTIRAKPFHDSEELVPLCYRCSTNNPLLNNLGNVCINCRQPFIFSASSYDVLHLVEFYLEEGITDEEAISLIDLEVLRPKRDDRQLEIANNSSQILRLVETKDSIGDEDPFTAKLSFEQGGSEFVPVVVSRLVLRSMSRRDVLIKRWPPPLRWQYFRSLLPDASITMCPSCFQMFHSEDYELLVLQHGCCPYCRRCKDDPGP

SEQ ID NO: 197500 - protein, 961 aa, Artificial Sequence
  derived and/or modified sequence
MRAVLTWRDKAEHCINDIAFKPDGTQLILAAGSRLLVYDTSDGTLLQPLKGHKDTVYCVAYAKDGKRFASGSADKSVIIWTSKLEGILKYTHNDAIQCVSYNPITHQLASCSSSDFGLWSPEQKSVSKHKSSSKIICCSWTNDGQYLALGMFNGIISIRNKNGEEKVKIERPGGSLSPIWSICWNPSREERNDILAVADWGQKVSFYQLSGKQIGKDRALNFDPCCISYFTKGEYILLGGSDKQVSLFTKDGVRLGTVGEQNSWVWTCQAKPDSNYVVVGCQDGTISFYQLIFSTVHGLYKDRYAYRDSMTDVIVQHLITEQKVRIKCKELVKKIAIYRNRLAIQLPEKILIYELYSEDLSDMHYRVKEKIIKKFECNLLVVCANHIILCQEKRLQCLSFSGVKEREWQMESLIRYIKVIGGPPGREGLLVGLKNGQILKIFVDNLFAIVLLKQATAVRCLDMSASRKKLAVVDENDTCLVYDIDTKELLFQEPNANSVAWNTQCEDMLCFSGGGYLNIKASTFPVHRQKLQGFVVGYNGSKIFCLHVFSISAVEVPQSAPMYQYLDRKLFKEAYQIACLGVTDTDWRELAMEALEGLDFETAKKAFIRVQDLRYLELISSIEERKKRGETNNDLFLADVFSYQGKFHEAAKLYKRSGHENLALEMYTDLCMFEYAKDFLGSGDPKETKMLITKQADWARNIKEPKAAVEMYISAGEHVKAIEICGDHGWVDMLIDIARKLDKAEREPLLLCATYLKKLDSPGYAAETYLKMGDLKSLVQLHVETQRWDEAFALGEKHPEFKDDIYMPYAQWLAENDRFEEAQKAFHKAGRQREAVQVLEQLTNNAVAESRFNDAAYYYWMLSMQCLDIAQDPAQKDTMLGKFYHFQRLAELYHGYHAIHRHTEDPFSVHRPETLFNISRFLLHSLPKDTPSGISKVCENTLHLGQAEQGPRCLQAGPARL

SEQ ID NO: 197501 - DNA, 3549 bp, Artificial Sequence
  derived and/or modified sequence
atgagagccgtgctgacatggagagacaaagctgaacattgcatcaatgatatcgcttttaaacccgatggaacacaattaattctcgcggcaggaagtcggttgctggtatatgatacttccgatggtaccctgctgcagccattgaaggggcacaaggacactgtctactgcgtcgcctacgcaaaggacggtaagcgtttcgcatccggctcggccgataagagtgtcattatctggacttctaagctggaaggtattctgaagtacacacataatgacgctatccagtgcgtctcatataaccccataacacaccagcttgcgtcttgctcctccagcgattttgggctctggagcccagagcagaagagcgtgtctaaacataagtcctcttccaaaatcatttgctgcagttggaccaacgacggacaatatctcgcgcttggcatgtttaacggaattatctctatccggaataagaatggagaagagaaggttaaaattgagagacccgggggatcccttagtcccatctggtcgatctgttggaatccttctcgcgaggaacgcaatgacattttagcagtcgcagattggggccagaaagtttctttttatcagctgtcaggaaaacaaattggcaaggatagagcccttaatttcgatccatgctgtatctcctactttaccaaaggagagtacatattattggggggctctgataaacaggttagtctcttcacgaaagacggtgtccgtctgggcaccgtgggtgagcagaattcctgggtgtggacgtgtcaggctaagcccgacagcaattacgtggtagtcggatgccaggatggaactatcagtttttaccagctcatattcagcaccgtgcatggattatacaaggatagatacgcttaccgagactccatgacagacgtcatcgtgcaacatctgatcactgaacaaaaggtacgtataaagtgtaaggaactggttaagaagatagcaatctaccgaaaccgcctggccatacagctgcctgagaagatattgatctacgagctatactctgaggacctctctgacatgcattacagagtgaaggagaaaatcatcaagaagttcgagtgtaacctactagtggtctgtgcaaatcatattattctgtgccaggagaaaaggttgcagtgcctgtctttctcaggagtgaaagagcgggagtggcagatggagtctttgataagatatattaaagtgattgggggcccgcccggtagagaaggtctcctggttggactaaaaaatggccagattttgaagatatttgtcgataatttatttgcaattgtcctccttaagcaggccaccgccgtgcgatgtcttgatatgtcagccagtagaaagaagttagcagtggtggatgaaaatgacacctgtctggtctacgacattgatacgaaagaactgctgtttcaagaaccgaatgccaatagtgtggcatggaacacacagtgcgaggatatgctgtgtttttcaggaggcgggtacctgaatattaaggccagcaccttcccagttcaccgccagaaactgcaaggattcgtagtcgggtataacgggagcaagattttctgcctgcatgtgttctctatcagtgccgtggaagtcccccagagtgcacctatgtatcagtacttggacaggaagctgtttaaagaggcataccagattgcatgcctgggcgtcaccgatacagactggcgtgaactggcgatggaggccctggaaggcctcgacttcgaaactgccaaaaaggcctttatacgagtgcaggacctgagatacctggaactgattagttcgattgaggaacgaaagaaacgaggcgagactaacaatgatcttttcctcgcggacgtttttagttaccaaggaaagttccatgaggcggctaagctctacaaacggtcaggccacgaaaacctcgccttagagatgtacactgacctgtgtatgtttgagtatgctaaagatttcctggggtctggcgaccctaaagagactaaaatgctgatcactaagcaggctgactgggcccggaacataaaggagcccaaagcagcggtcgaaatgtatatttccgccggggaacacgtgaaagcaatagagatttgcggggaccacggctgggtcgatatgctgatcgacatcgccagaaagctcgacaaagctgagcgtgaaccgctgctattatgtgccacctatcttaaaaaacttgactcccccgggtatgctgcagaaacgtatctgaagatgggggatctcaagtccctcgtccagctgcacgtagaaacacagcggtgggatgaagcctttgcactgggtgagaagcatcccgaattcaaagatgatatctatatgccgtatgcccagtggcttgccgaaaacgacaggtttgaggaggcacagaaagcctttcacaaagcagggaggcaacgcgaggccgtccaggtgctggagcaactcaccaacaacgcagtggcagaatctcggttcaatgacgcggcctactattactggatgttatctatgcagtgtttggacattgcccaggatcctgctcagaaggatactatgctaggcaaattctatcactttcagcgccttgccgaattataccatggctaccatgcaattcatagacacactgaggaccccttttcggtacaccgccccgagactctgtttaatattagcagattcttactgcattctctacccaaagacacacccagcggaattagcaaggttaagatcctcttcacacttgctaagcagagcaaggctctgggcgcctaccgtctggccaggcacgcttatgataagctaagggggctgtatattcctgcccgcttccagaagtccatcgaactgggtacattgaccatccgcgctaagcccttccacgattccgaggagctcgtaccactttgttaccgatgctcgactaataatcctctattgaacaatctcggcaatgtctgcattaattgtcgccaaccattcatcttttccgcctcctcttatgatgtactgcacctggttgaattttacctagaagaaggtattacggacgaggaggcgatcagcctgatcgacctggaagtgcttcgcccgaaacgggacgatagacaactggagatcgccaacaattcatcgcaaattcttcggttggttgagacgaaggactcgattggcgatgaggacccgtttaccgcaaaactcagcttcgaacagggcggatctgaattcgtcccagtggtggtgagcaggttggttctccgatcaatgtcacggagggacgtgctgatcaaaagatggcctcctcccctgaggtggcaatacttccgcagcctgctgcctgatgcaagcataactatgtgcccttcgtgttttcagatgtttcactctgaggattatgaacttctcgtgctgcaacacggatgctgtccttattgtaggcgctgcaaggacgacccagggccctag

SEQ ID NO: 197502 - DNA, 2886 bp, Artificial Sequence
  derived and/or modified sequence
atgagggcagttctaacctggcgggataaagctgagcactgcatcaacgatatcgcatttaaacccgacggcacccaattgatactggccgctggctcacggctcctagtgtacgacacctctgacggtactctactgcagccactaaagggacacaaagatactgtctattgtgtcgcatatgcaaaggatggcaagaggttcgcgtctgggagcgcagataaatctgtgattatctggactagcaagctggaaggcatcctgaagtacacccacaatgatgcaattcagtgcgtctcttacaaccctatcactcatcagttggcttcatgtagttctagtgacttcgggctttggtctccagagcagaaatcagtctctaagcataagtctagctctaaaatcatttgctgcagttggaccaacgatggccagtacctggccctggggatgtttaatggaatcatctctataagaaacaaaaacggagaggaaaaggtcaaaatcgagagaccaggtggtagcctgtctccaatttggagcatttgctggaatccatcccgagaagagcgcaacgacatattggcggttgcggactggggtcagaaggtgtccttctatcagctgtctgggaagcagattggaaaggatagggcgcttaattttgatccctgctgcatctcctactttactaagggggagtacattctcctcggcgggtccgacaagcaggtgtctctcttcacgaaagacggggtgaggctcgggaccgtcggtgagcagaatagctgggtctggacttgccaagccaaacccgattccaattacgtcgtggttggatgccaggacggcaccatttcattttaccaactgatcttctccacggtgcatgggctttataaggatcggtatgcatatcgcgattctatgaccgatgtcattgtccagcacctgatcacagagcaaaaggtccggattaaatgcaaggaactggtaaagaaaatcgctatatatcgtaatcggctcgcaatccagttgcctgagaagattctgatctacgagttatattctgaagacctcagtgacatgcactaccgtgtgaaggagaaaatcataaagaagttcgaatgtaatttgcttgttgtgtgtgcaaatcacattattctttgtcaggagaagaggctgcagtgtctgtcattcagcggcgtcaaagaacgcgagtggcagatggaatccctgatccgctacattaaagtgatcggtgggcctccagggagagagggcctactggttggactcaaaaatggccagattctcaaaattttcgtagataatcttttcgctatcgtgttgctgaaacaagcaaccgctgtcaggtgcctggatatgtcagcatctcgtaagaaactggcagtcgtcgatgagaatgacacatgtctcgtttatgacatcgacactaaggaactcttgttccaggagcccaacgctaattccgtggcatggaatacacagtgtgaggatatgctgtgcttctccggcggcggatatctgaacattaaggcgtcaacattccccgtccacaggcagaaactccagggatttgtggtaggatataacggcagtaagattttttgtctgcacgtcttcagcataagcgccgtggaagtacctcagagtgcaccaatgtatcagtacctggaccgcaaactgttcaaagaagcctatcaaatcgcatgcctcggagtgacagacaccgactggcgcgagctcgcaatggaagcccttgagggcctcgactttgagactgccaaaaaggccttcattcgggtgcaagacctgcggtacttagagctcatctctagcatcgaggagcgcaaaaagaggggcgaaacaaataacgatctgttcctggccgatgtcttctcatatcagggtaaattccatgaggcggctaagctctacaaacgatcaggccatgaaaatttagccttagaaatgtataccgacctgtgcatgtttgaatatgccaaagactttttgggcagtggggaccccaaggaaacaaagatgctcattaccaaacaggctgattgggcacggaacatcaaggagcctaaagccgcagttgaaatgtacatctccgccggggaacacgtgaaagccattgaaatctgcggcgaccacggttgggtggatatgctgatagatatagcaaggaagctcgataaagccgagagggagccactgctgctctgcgccacctatctgaaaaagctggattctcccggatatgctgctgagacctatcttaaaatgggggacctgaaatctctggttcagctccacgtggaaacccagcggtgggacgaagcattcgctctgggggagaagcatccagagttcaaagatgatatatatatgccctacgcgcagtggctggccgagaatgataggtttgaagaagcccagaaggcattccacaaagccggaaggcagcgagaagcagtgcaggtgctagaacagctgacgaacaacgccgtagcagagagccgtttcaacgatgctgcttactactattggatgctgagtatgcaatgcctggacattgcccaggaccccgcccaaaaagatactatgctgggcaaattttaccacttccaacggctggcagagctctaccatggctaccacgctatacaccgccacaccgaagatccattttctgtacacagaccagagaccctgttcaatatttcccgatttctgcttcattcgctacctaaggacactccctcaggtatcagcaaggtttgcgaaaatacactgcacttaggtcaggccgaacagggcccaagatgcctgcaggctggaccagcccgactctag

SEQ ID NO: 197503 - DNA, 3841 bp, Artificial Sequence
  derived and/or modified sequence
attgcttttgctgcttttctggctttccctttcggacatgcgcgctcggagcaaggcgccctcgcactcagcttaccgcgcatgtacgttgccaggggtaacgcaggtagccaaagtggcttgtggagtggcgaccgttagtgaggcggttgctgagacagacgctgaggcgggtaggaggagcccgagccgtaagggaagccgtgatgagggccgtgttgacgtggagagataaagccgagcactgtataaatgacatcgcatttaagcctgatggaactcaactgattttggctgccggaagcagattactggtttatgacacctctgatggcaccttacttcagcccctcaagggacacaaagacactgtgtactgtgtggcatatgcgaaggatggcaagcgctttgcttctggatcagctgacaaaagcgttattatctggacatcaaaactggaaggcattctgaagtacacgcacaatgatgctatacaatgtgtctcctacaatcctattactcatcaactggcatcttgttcctccagtgactttgggttgtggtctcctgaacagaagtctgtctccaaacacaaatcaagcagcaagatcatctgctgcagctggacaaatgatggtcagtacctggcgctggggatgttcaatgggatcatcagcatacggaacaaaaatggcgaggagaaagtaaagatcgagcggccggggggctccctctcgccaatatggtccatctgctggaacccttcaagagaggaacgtaatgacatcctggctgtggctgactggggacagaaagtttccttctaccagctgagtggaaaacagattggaaaggatcgggcactgaactttgacccctgctgcatcagctactttactaaaggcgagtacattttgctggggggttcagacaagcaagtatctcttttcaccaaggatggagtgcggcttgggactgttggggagcagaactcctgggtgtggacgtgtcaagcgaaaccggattccaactatgtggtggtcggctgccaggacggcaccatttccttctaccagcttattttcagcacagtccatgggctttacaaggaccgctatgcctacagggatagcatgactgacgtcattgtgcagcacctgatcactgagcagaaagttcggattaaatgcaaagagcttgtcaagaagattgccatctacagaaatcgattggctatccaactgccagagaaaatcctcatctatgagttgtattcagaggacttatcagacatgcattaccgggtaaaggagaagattatcaagaagtttgagtgcaacctcctggtggtgtgtgccaatcacatcatcctgtgccaggagaaacggctgcagtgcctgtccttcagcggagtgaaggagcgggagtggcagatggagtctctcattcgttacatcaaggtgatcggtggccctcctggaagagaaggcctcttagtggggctgaagaatggacagatcctgaagatcttcgtggacaatctctttgctatcgtcctgctgaagcaggccacagctgtgcgctgcttggacatgagtgcctcccgtaagaagctggccgtggtagatgaaaatgacacttgcctggtgtatgacatcgacaccaaggagctgctttttcaggaaccaaacgccaacagtgtagcttggaacacccagtgtgaggacatgctctgcttctcgggaggaggctacctcaacatcaaagccagcaccttccctgtgcaccggcagaagctgcagggctttgtggtcggctacaatggctccaagatcttctgcctccatgtcttctccatttctgccgtggaggtgccgcagtccgctcccatgtaccagtacctggataggaaactgttcaaggaagcctaccagattgcttgcttgggtgtcacagacactgattggcgtgaactggccatggaagcgctagaaggtttagattttgaaacagcaaagaaggccttcatcagagtacaagacctccgatatttagagctcatcagcagcattgaggagaggaagaagcggggagagaccaacaatgacctgtttctggcagatgtgttttcctaccaggggaagttccatgaggccgccaaactgtacaagaggagtgggcacgagaacctcgcgcttgaaatgtacaccgacctctgcatgtttgagtatgccaaggatttccttggatctggagaccccaaagaaacaaagatgctaatcaccaaacaggctgactgggccagaaatatcaaggagcccaaagccgccgtggagatgtacatctcagcaggagagcacgtcaaggccatcgagatctgtggtgaccatggctgggttgacatgttgatcgacatcgcccgcaaactggacaaggctgagcgcgagcccctgctgctgtgcgctacctacctcaagaagctggacagccctggctatgctgctgagacctacctgaagatgggtgacctcaagtccctggtgcagctgcacgtggagacccagcgctgggatgaggcctttgctttgggtgagaagcatcctgagtttaaggatgacatctacatgccgtatgctcagtggctagcagagaacgatcgctttgaggaagcccagaaagcgttccacaaggctgggcgacagagagaagcggtccaggtgctggagcagctcacaaacaatgccgtggcggagagcaggtttaatgatgctgcctattattactggatgctgtccatgcagtgcctcgatatagctcaagatcctgcccagaaggacacaatgcttggcaagttctaccacttccagcgtttggcagagctgtaccatggttaccatgccatccatcgccacacggaagatccgttcagtgtccatcgtcctgaaactcttttcaacatctccaggttcctgctgcacagcctgcccaaggacaccccctcgggcatctctaaagtgaaaatactcttcaccttggccaagcagagcaaggccctcggtgcctacaggctggcccggcacgcctatgacaagctgcgtggcctgtacatccctgccagattccaaaagtccattgagctgggtaccctgaccatccgcgccaagcccttccacgacagtgaggagttggtgcccttgtgctaccgctgctccaccaacaacccgctgctcaacaacctgggcaacgtctgcatcaactgccgccagcccttcatcttctccgcctcttcctacgacgtgctacacctggttgagttctacctggaggaagggatcactgatgaagaagccatctccctcatcgacctggaggtgctgagacccaagcgggatgacagacagctagagattgcaaacaacagctcccagattctgcggctagtggagaccaaggactccatcggagatgaggacccgttcacagctaagctgagctttgagcaaggtggctcagagttcgtgccagtggtggtgagccggctggtgctgcgctccatgagccgccgggatgtcctcatcaagcgatggcccccacccctgaggtggcaatacttccgctcactgctgcctgacgcctccattaccatgtgcccctcctgcttccagatgttccattctgaggactatgagttgctggtgcttcagcatggctgctgcccctactgccgcaggtgcaaggatgaccctggcccatgaccagcatcctggggacggcctgcaccctctgcccgccttggggtctgctgggctgtgaaggagaataaagagttaaactgtcagaa

SEQ ID NO: 197504 - DNA, 3568 bp, Artificial Sequence
  derived and/or modified sequence
aagccgtgatgagggccgtgttgacgtggagagataaagccgagcactgtataaatgacatcgcatttaagcctgatggaactcaactgattttggctgccggaagcagattactggtttatgacacctctgatggcaccttacttcagcccctcaagggacacaaagacactgtgtactgtgtggcatatgcgaaggatggcacaatgatgctatacaatgtgtctcctacaatcctattactcatcaactggcatcttgttcctccagtgactttgggttgtggtctcctgaacagaagtctgtctccaaacacaaatcaagcagcaagatcatctgctgcagctggacaaatgatggtcagtacctggcgctggggatgttcaatgggatcatcagcatacggaacaaaaatggcgaggagaaagtaaagatcgagcggccggggggctccctctcgccaatatggtccatctgctggaacccttcaagagaggaacgtaatgacatcctggctgtggctgactggggacagaaagtttccttctaccagctgagtggaaaacagattggaaaggatcgggcactgaactttgacccctgctgcatcagctactttactaaaggcgagtacattttgctggggggttcagacaagcaagtatctcttttcaccaaggatggagtgcggcttgggactgttggggagcagaactcctgggtgtggacgtgtcaagcgaaaccggattccaactatgtggtggtcggctgccaggacggcaccatttccttctaccagcttattttcagcacagtccatgggctttacaaggaccgctatgcctacagggatagcatgactgacgtcattgtgcagcacctgatcactgagcagaaagttcggattaaatgcaaagagcttgtcaagaagattgccatctacagaaatcgattggctatccaactgccagagaaaatcctcatctatgagttgtattcagaggacttatcagacatgcattaccgggtaaaggagaagattatcaagaagtttgagtgcaacctcctggtggtgtgtgccaatcacatcatcctgtgccaggagaaacggctgcagtgcctgtccttcagcggagtgaaggagcgggagtggcagatggagtctctcattcgttacatcaaggtgatcggtggccctcctggaagagaaggcctcttagtggggctgaagaatggacagatcctgaagatcttcgtggacaatctctttgctatcgtcctgctgaagcaggccacagctgtgcgctgcttggacatgagtgcctcccgtaagaagctggccgtggtagatgaaaatgacacttgcctggtgtatgacatcgacaccaaggagctgctttttcaggaaccaaacgccaacagtgtagcttggaacacccagtgtgaggacatgctctgcttctcgggaggaggctacctcaacatcaaagccagcaccttccctgtgcaccggcagaagctgcagggctttgtggtcggctacaatggctccaagatcttctgcctccatgtcttctccatttctgccgtggaggtgccgcagtccgctcccatgtaccagtacctggataggaaactgttcaaggaagcctaccagattgcttgcttgggtgtcacagacactgattggcgtgaactggccatggaagcgctagaaggtttagattttgaaacagcaaagaaggccttcatcagagtacaagacctccgatatttagagctcatcagcagcattgaggagaggaagaagcggggagagaccaacaatgacctgtttctggcagatgtgttttcctaccaggggaagttccatgaggccgccaaactgtacaagaggagtgggcacgagaacctcgcgcttgaaatgtacaccgacctctgcatgtttgagtatgccaaggatttccttggatctggagaccccaaagaaacaaagatgctaatcaccaaacaggctgactgggccagaaatatcaaggagcccaaagccgccgtggagatgtacatctcagcaggagagcacgtcaaggccatcgagatctgtggtgaccatggctgggttgacatgttgatcgacatcgcccgcaaactggacaaggctgagcgcgagcccctgctgctgtgcgctacctacctcaagaagctggacagccctggctatgctgctgagacctacctgaagatgggtgacctcaagtccctggtgcagctgcacgtggagacccagcgctgggatgaggcctttgctttgggtgagaagcatcctgagtttaaggatgacatctacatgccgtatgctcagtggctagcagagaacgatcgctttgaggaagcccagaaagcgttccacaaggctgggcgacagagagaagcggtccaggtgctggagcagctcacaaacaatgccgtggcggagagcaggtttaatgatgctgcctattattactggatgctgtccatgcagtgcctcgatatagctcaagatcctgcccagaaggacacaatgcttggcaagttctaccacttccagcgtttggcagagctgtaccatggttaccatgccatccatcgccacacggaagatccgttcagtgtccatcgtcctgaaactcttttcaacatctccaggttcctgctgcacagcctgcccaaggacaccccctcgggcatctctaaagtgaaaatactcttcaccttggccaagcagagcaaggccctcggtgcctacaggctggcccggcacgcctatgacaagctgcgtggcctgtacatccctgccagattccaaaagtccattgagctgggtaccctgaccatccgcgccaagcccttccacgacagtgaggagttggtgcccttgtgctaccgctgctccaccaacaacccgctgctcaacaacctgggcaacgtctgcatcaactgccgccagcccttcatcttctccgcctcttcctacgacgtgctacacctggttgagttctacctggaggaagggatcactgatgaagaagccatctccctcatcgacctggaggtgctgagacccaagcgggatgacagacagctagagattgcaaacaacagctcccagattctgcggctagtggagaccaaggactccatcggagatgaggacccgttcacagctaagctgagctttgagcaaggtggctcagagttcgtgccagtggtggtgagccggctggtgctgcgctccatgagccgccgggatgtcctcatcaagcgatggcccccacccctgaggtggcaatacttccgctcactgctgcctgacgcctccattaccatgtgcccctcctgcttccagatgttccattctgaggactatgagttgctggtgcttcagcatggctgctgcccctactgccgcaggtgcaaggatgaccctggcccatgaccagcatcctggggacggcctgcaccctctgcccgccttggggtctgctgggctgtgaaggagaataaagagttaaactgtcagaatgtg

SEQ ID NO: 197505 - DNA, 3742 bp, Artificial Sequence
  derived and/or modified sequence
aacgcaggtagccaaagtggcttgtggagtggcgaccgttagtgaggcggttgctgagacagacgctgaggcgggtaggaggagcccgagccgtaagggaagccgtgatgagggccgtgttgacgtggagagataaagccgagcactgtataaatgacatcgcatttaagcctgatggaactcaactgattttggctgccggaagcagattactggtttatgacacctctgatggcaccttacttcagcccctcaagggacacaaagacactgtgtactgtgtggcatatgcgaaggatggcaagcgctttgcttctggatcagctgacaaaagcgttattatctggacatcaaaactggaaggcattctgaagtacacgcacaatgatgctatacaatgtgtctcctacaatcctattactcatcaactggcatcttgttcctccagtgactttgggttgtggtctcctgaacagaagtctgtctccaaacacaaatcaagcagcaagatcatctgctgcagctggacaaatgatggtcagtacctggcgctggggatgttcaatgggatcatcagcatacggaacaaaaatggcgaggagaaagtaaagatcgagcggccggggggctccctctcgccaatatggtccatctgctggaacccttcaagagaggaacgtaatgacatcctggctgtggctgactggggacagaaagtttccttctaccagctgagtggaaaacagattggaaaggatcgggcactgaactttgacccctgctgcatcagctactttactaaaggcgagtacattttgctggggggttcagacaagcaagtatctcttttcaccaaggatggagtgcggcttgggactgttggggagcagaactcctgggtgtggacgtgtcaagcgaaaccggattccaactatgtggtggtcggctgccaggacggcaccatttccttctaccagcttattttcagcacagtccatgggctttacaaggaccgctatgcctacagggatagcatgactgacgtcattgtgcagcacctgatcactgagcagaaagttcggattaaatgcaaagagcttgtcaagaagattgccatctacagaaatcgattggctatccaactgccagagaaaatcctcatctatgagttgtattcagaggacttatcagacatgcattaccgggtaaaggagaagattatcaagaagtttgagtgcaacctcctggtggtgtgtgccaatcacatcatcctgtgccaggagaaacggctgcagtgcctgtccttcagcggagtgaaggagcgggagtggcagatggagtctctcattcgttacatcaaggtgatcggtggccctcctggaagagaaggcctcttagtggggctgaagaatggacagatcctgaagatcttcgtggacaatctctttgctatcgtcctgctgaagcaggccacagctgtgcgctgcttggacatgagtgcctcccgtaagaagctggccgtggtagatgaaaatgacacttgcctggtgtatgacatcgacaccaaggagctgctttttcaggaaccaaacgccaacagtgtagcttggaacacccagtgtgaggacatgctctgcttctcgggaggaggctacctcaacatcaaagccagcaccttccctgtgcaccggcagaagctgcagggctttgtggtcggctacaatggctccaagatcttctgcctccatgtcttctccatttctgccgtggaggtgccgcagtccgctcccatgtaccagtacctggataggaaactgttcaaggaagcctaccagattgcttgcttgggtgtcacagacactgattggcgtgaactggccatggaagcgctagaaggtttagattttgaaacagcaaagaaggccttcatcagagtacaagacctccgatatttagagctcatcagcagcattgaggagaggaagaagcggggagagaccaacaatgacctgtttctggcagatgtgttttcctaccaggggaagttccatgaggccgccaaactgtacaagaggagtgggcacgagaacctcgcgcttgaaatgtacaccgacctctgcatgtttgagtatgccaaggatttccttggatctggagaccccaaagaaacaaagatgctaatcaccaaacaggctgactgggccagaaatatcaaggagcccaaagccgccgtggagatgtacatctcagcaggagagcacgtcaaggccatcgagatctgtggtgaccatggctgggttgacatgttgatcgacatcgcccgcaaactggacaaggctgagcgcgagcccctgctgctgtgcgctacctacctcaagaagctggacagccctggctatgctgctgagacctacctgaagatgggtgacctcaagtccctggtgcagctgcacgtggagacccagcgctgggatgaggcctttgctttgggtgagaagcatcctgagtttaaggatgacatctacatgccgtatgctcagtggctagcagagaacgatcgctttgaggaagcccagaaagcgttccacaaggctgggcgacagagagaagcggtccaggtgctggagcagctcacaaacaatgccgtggcggagagcaggtttaatgatgctgcctattattactggatgctgtccatgcagtgcctcgatatagctcaagatcctgcccagaaggacacaatgcttggcaagttctaccacttccagcgtttggcagagctgtaccatggttaccatgccatccatcgccacacggaagatccgttcagtgtccatcgtcctgaaactcttttcaacatctccaggttcctgctgcacagcctgcccaaggacaccccctcgggcatctctaaagtctgtgaaaatactcttcaccttggccaagcagagcaaggccctcggtgcctacaggctggcccggcacgcctatgacaagctgcgtggcctgtacatccctgccagattccaaaagtccattgagctgggtaccctgaccatccgcgccaagcccttccacgacagtgaggagttggtgcccttgtgctaccgctgctccaccaacaacccgctgctcaacaacctgggcaacgtctgcatcaactgccgccagcccttcatcttctccgcctcttcctacgacgtgctacacctggttgagttctacctggaggaagggatcactgatgaagaagccatctccctcatcgacctggaggtgctgagacccaagcgggatgacagacagctagagattgcaaacaacagctcccagattctgcggctagtggagaccaaggactccatcggagatgaggacccgttcacagctaagctgagctttgagcaaggtggctcagagttcgtgccagtggtggtgagccggctggtgctgcgctccatgagccgccgggatgtcctcatcaagcgatggcccccacccctgaggtggcaatacttccgctcactgctgcctgacgcctccattaccatgtgcccctcctgcttccagatgttccattctgaggactatgagttgctggtgcttcagcatggctgctgcccctactgccgcaggtgcaaggatgaccctggcccatgaccagcatcctggggacggcctgcaccctctgcccgccttggggtctgctgggctgtgaaggagaataaagagttaaactgtc

SEQ ID NO: 197506 - DNA, 3549 bp, Artificial Sequence
  derived and/or modified sequence
atgagagctgtgctgacctggagggacaaggccgagcactgcatcaatgacatcgccttcaagccagatggcacccagctgatcctggccgccggcagccggctgctggtgtatgacaccagtgatggcaccctgctgcagcccctgaagggccacaaggacacagtgtactgtgtggcctatgccaaggatggcaagagatttgccagcggcagcgctgacaagagcgtcatcatctggaccagcaagctggagggcatcctgaagtacacccacaatgatgccatccagtgtgtgtcctacaaccccatcacccaccagctggccagctgcagcagcagtgactttggcctgtggagccctgagcagaagtctgtgtccaagcacaagagcagcagcaagatcatctgctgctcctggaccaatgatggccagtacctggccctgggcatgtttaatggcatcatcagcatccggaacaagaatggagaggagaaggtgaagattgaaagacctgggggcagcctgagccccatctggagcatctgctggaaccccagccgggaggagagaaatgacatcctggccgtggccgactggggccagaaggtgtccttctaccagctgagcggcaagcagatcggcaaggaccgggccctgaactttgacccctgctgcatctcctacttcaccaagggggagtacatcctgctgggcggcagtgacaagcaggtgtccctcttcaccaaggatggagtgcggctgggcaccgtgggggagcagaacagctgggtgtggacctgccaggccaagccagacagcaactacgtggtggtgggctgccaggacggcaccatctccttctaccagctgatcttcagcacagtgcacggcctgtacaaggacagatatgcctacagagacagcatgacagatgtgattgtgcagcacctgatcacagagcagaaggtgcgcatcaagtgcaaggagctggtgaagaagatcgccatctacagaaaccggctggccatccagctgcctgagaagatcctgatctatgagctgtacagcgaggacctgagtgacatgcactacagagtgaaggagaagatcatcaagaagtttgagtgcaacctgctggtggtgtgtgccaaccacatcatcctgtgccaggagaagaggctgcagtgcctgtccttctctggagtgaaggagcgggagtggcagatggagagcctcatccgctacatcaaggtgattggaggccccccaggccgggagggcctgctggtgggcctgaagaatggccagatcctgaagatctttgtggacaacctgtttgccatcgtgctgctgaagcaggccacagctgtgcgctgcctggacatgtctgccagcaggaagaagctggccgtggtggatgaaaatgacacctgcctggtgtatgacatcgacaccaaggagctgctcttccaggagcccaatgccaacagcgtggcctggaacacccagtgtgaggacatgctgtgcttcagcggcggcggctacctgaacatcaaggccagcaccttccctgtgcaccggcagaagctgcagggctttgtggtgggctacaacggcagcaagatcttctgcctgcacgtgttcagcatctctgctgtggaggtgccccagagcgcccccatgtaccagtacctggacaggaagctgttcaaggaggcctaccagatcgcctgcctgggcgtgacagacacagactggagggagctggccatggaggccctggagggcctggactttgaaacagccaagaaggccttcatccgggtgcaggacctgcgctacctggagctgatcagcagcattgaggagaggaagaagagaggagagaccaacaatgacctcttcctggctgatgtgttctcctaccagggcaagttccacgaggccgccaagctgtacaagaggagcggccacgagaacctggccctggagatgtacacagacctgtgcatgtttgaatatgccaaggacttcctgggcagcggggaccccaaggagaccaagatgctgatcaccaagcaggccgactgggccaggaacatcaaggagcccaaggctgctgtggagatgtacatctctgctggggagcacgtgaaggccatcgagatctgtggggaccacggctgggtggacatgctgattgatattgccaggaagctggacaaggccgagcgggagcccctgctgctgtgtgccacctacctgaagaagctggacagccctggctatgctgctgagacctacctgaagatgggagacctgaagagcctggtgcagctgcacgtggagacccagcgctgggatgaggcctttgccctgggggagaagcaccctgagttcaaggatgacatctacatgccctatgcccagtggctggctgaaaatgacagatttgaggaggcccagaaggccttccacaaggccggccggcagcgggaggccgtgcaggtgctggagcagctgaccaacaatgctgtggccgagagccgcttcaatgatgctgcctactactactggatgctgtccatgcagtgcctggacatcgcccaggaccctgcccagaaggacaccatgctgggcaagttctaccacttccagaggctggccgagctgtaccacggctaccacgccatccaccgccacacagaggaccccttctctgtgcacaggcctgagaccctcttcaacatcagccgcttcctgctgcacagcctgcccaaggacacccccagcggcatcagcaaggtgaagatcctcttcaccctggccaagcagagcaaggccctgggcgcctaccgcctggcccggcatgcctatgacaagctgcggggcctgtacatcccagcccgcttccagaagagcattgagctgggcaccctgaccatccgggccaagcccttccatgattctgaggagctggtgcccctgtgctaccgctgcagcaccaacaaccccctgctgaacaacctgggcaatgtgtgcatcaactgccggcagcccttcatcttcagcgccagcagctatgatgtgctgcacctggtggagttctacctggaggagggcatcacagatgaggaggccatcagcctgattgacctggaggtgctgcggcccaagagagatgaccggcagctggagatcgccaacaacagcagccagatcctgcggctggtggagaccaaggacagcattggagatgaggaccccttcaccgccaagctgagctttgagcagggcggcagcgagtttgtgcctgtggtggtgtcccggctggtgctgcgctccatgagcagaagagatgtgctgatcaagcgctggcccccacccctgcgctggcagtacttccgcagcctgctgcctgatgccagcatcaccatgtgccccagctgcttccagatgttccacagcgaggactatgagctgctggtgctgcagcacggctgctgcccctactgccgccgctgcaaggatgaccccggcccctag

SEQ ID NO: 197507 - DNA, 2886 bp, Artificial Sequence
  derived and/or modified sequence
atgagagctgtgctgacctggagggacaaggccgagcactgcatcaatgacatcgccttcaagccagatggcacccagctgatcctggccgccggcagccggctgctggtgtatgacaccagtgatggcaccctgctgcagcccctgaagggccacaaggacacagtgtactgtgtggcctatgccaaggatggcaagagatttgccagcggcagcgctgacaagagcgtcatcatctggaccagcaagctggagggcatcctgaagtacacccacaatgatgccatccagtgtgtgtcctacaaccccatcacccaccagctggccagctgcagcagcagtgactttggcctgtggagccctgagcagaagtctgtgtccaagcacaagagcagcagcaagatcatctgctgctcctggaccaatgatggccagtacctggccctgggcatgtttaatggcatcatcagcatccggaacaagaatggagaggagaaggtgaagattgaaagacctgggggcagcctgagccccatctggagcatctgctggaaccccagccgggaggagagaaatgacatcctggccgtggccgactggggccagaaggtgtccttctaccagctgagcggcaagcagatcggcaaggaccgggccctgaactttgacccctgctgcatctcctacttcaccaagggggagtacatcctgctgggcggcagtgacaagcaggtgtccctcttcaccaaggatggagtgcggctgggcaccgtgggggagcagaacagctgggtgtggacctgccaggccaagccagacagcaactacgtggtggtgggctgccaggacggcaccatctccttctaccagctgatcttcagcacagtgcacggcctgtacaaggacagatatgcctacagagacagcatgacagatgtgattgtgcagcacctgatcacagagcagaaggtgcgcatcaagtgcaaggagctggtgaagaagatcgccatctacagaaaccggctggccatccagctgcctgagaagatcctgatctatgagctgtacagcgaggacctgagtgacatgcactacagagtgaaggagaagatcatcaagaagtttgagtgcaacctgctggtggtgtgtgccaaccacatcatcctgtgccaggagaagaggctgcagtgcctgtccttctctggagtgaaggagcgggagtggcagatggagagcctcatccgctacatcaaggtgattggaggccccccaggccgggagggcctgctggtgggcctgaagaatggccagatcctgaagatctttgtggacaacctgtttgccatcgtgctgctgaagcaggccacagctgtgcgctgcctggacatgtctgccagcaggaagaagctggccgtggtggatgaaaatgacacctgcctggtgtatgacatcgacaccaaggagctgctcttccaggagcccaatgccaacagcgtggcctggaacacccagtgtgaggacatgctgtgcttcagcggcggcggctacctgaacatcaaggccagcaccttccctgtgcaccggcagaagctgcagggctttgtggtgggctacaacggcagcaagatcttctgcctgcacgtgttcagcatctctgctgtggaggtgccccagagcgcccccatgtaccagtacctggacaggaagctgttcaaggaggcctaccagatcgcctgcctgggcgtgacagacacagactggagggagctggccatggaggccctggagggcctggactttgaaacagccaagaaggccttcatccgggtgcaggacctgcgctacctggagctgatcagcagcattgaggagaggaagaagagaggagagaccaacaatgacctcttcctggctgatgtgttctcctaccagggcaagttccacgaggccgccaagctgtacaagaggagcggccacgagaacctggccctggagatgtacacagacctgtgcatgtttgaatatgccaaggacttcctgggcagcggggaccccaaggagaccaagatgctgatcaccaagcaggccgactgggccaggaacatcaaggagcccaaggctgctgtggagatgtacatctctgctggggagcacgtgaaggccatcgagatctgtggggaccacggctgggtggacatgctgattgatattgccaggaagctggacaaggccgagcgggagcccctgctgctgtgtgccacctacctgaagaagctggacagccctggctatgctgctgagacctacctgaagatgggagacctgaagagcctggtgcagctgcacgtggagacccagcgctgggatgaggcctttgccctgggggagaagcaccctgagttcaaggatgacatctacatgccctatgcccagtggctggctgaaaatgacagatttgaggaggcccagaaggccttccacaaggccggccggcagcgggaggccgtgcaggtgctggagcagctgaccaacaatgctgtggccgagagccgcttcaatgatgctgcctactactactggatgctgtccatgcagtgcctggacatcgcccaggaccctgcccagaaggacaccatgctgggcaagttctaccacttccagaggctggccgagctgtaccacggctaccacgccatccaccgccacacagaggaccccttctctgtgcacaggcctgagaccctcttcaacatcagccgcttcctgctgcacagcctgcccaaggacacccccagcggcatcagcaaggtgtgtgagaacaccctgcacctgggccaggccgagcagggcccccgctgcctgcaggccggccctgcccggctgtag

SEQ ID NO: 197508 - DNA, 3549 bp, Artificial Sequence
  derived and/or modified sequence
atgcgggccgtgctgacctggcgggacaaggccgagcactgcatcaacgacattgctttcaagcccgatggcacacaactgatcctcgccgccggcagcagattgctggtgtacgatacgagcgatgggactctgttacagcccctgaagggccataaagatacagtgtattgtgtggcgtatgccaaggatgggaaacggtttgcttctggctctgccgataagtctgtaatcatctggacaagtaaactggaggggatcctaaaatatacgcacaatgacgccatccagtgcgtatcctacaacccaattacccatcaactggcatcctgtagtagcagcgatttcgggctctggtcccccgaacagaaatcagtaagcaaacataagagctcatccaagattatttgctgttcttggaccaacgatggtcagtacctcgctttaggcatgtttaacggaatcatttccattaggaataaaaacggagaagaaaaggtaaagattgaacgcccgggcgggagcctctctccaatttggtcaatctgttggaatcctagtcgcgaggaacggaacgatatcctagcggtagcagattgggggcagaaagttagcttttaccagctcagcggtaagcagataggcaaagacagagctttaaatttcgatccttgttgcatcagttacttcactaagggcgaatacatcttgctcggcggttctgataagcaagtgagcttattcacaaaagacggggtgaggctcgggaccgtgggagagcaaaattcatgggtctggacgtgccaggcgaagccagatagcaattatgttgtagtcggttgccaggacggcacaatatccttctatcagctcatctttagcactgttcacggtctgtacaaagatagatatgcgtacagagatagcatgactgatgtaattgtccagcatctgataacagaacagaaagttagaattaagtgcaaggagttagtcaaaaagatagcaatttaccggaatagactagctattcaattgcccgaaaagatcttaatttacgaactctatagtgaagatctctcggatatgcattaccgtgtcaaggagaagattattaaaaaatttgagtgtaatctgctcgtcgtttgcgcaaatcatattatcctgtgccaggaaaagagattgcaatgcctttccttctcaggtgttaaggaaagggagtggcaaatggaatctctgatcagatatatcaaggtaatcggcggccccccgggccgagagggcctcctggtcgggttgaagaatgggcagatactcaagatttttgttgacaatctgttcgccatcgtgctgctcaagcaggcaaccgcagtgcgctgcctggacatgtccgcaagtcgcaagaagctggctgtggtggacgagaatgacacttgtttggtctacgatatcgacacaaaggaactgcttttccaggagcccaatgctaattccgtggcatggaatacccagtgtgaagatatgctctgtttcagcggtgggggatatctcaatattaaggcgtcaaccttccccgtgcacaggcagaaactccagggattcgtggtgggttacaacggaagcaagattttttgtctgcacgtcttttcaatttctgccgttgaggtccctcagtcagcgcccatgtaccagtaccttgatcgaaaactgttcaaagaggcttatcagatcgcctgtcttggtgtgacagacacagactggagggagctggctatggaggccttggagggtctcgatttcgaaactgccaaaaaagcctttatccgagttcaagacctccgctatctggaactaattagttctattgaggaacggaagaagcgcggcgagaccaacaatgatctgttcctggcagatgtgttttcatatcagggcaaatttcatgaggccgctaaattgtataagcggtctggccacgagaacctggctctagagatgtatacggatctgtgcatgtttgagtatgccaaggatttcctgggctctggggaccccaaggagaccaaaatgttgatcacaaaacaggctgactgggcccgcaatataaaggaacccaaggccgccgttgagatgtatatctctgctggcgagcatgtgaaggcgatcgaaatctgcggcgaccacggctgggtggacatgttaatcgacattgcaagaaagctggacaaggcagagcgggaaccattattgctgtgcgccacatatctgaagaaactcgattcgccaggatacgccgccgagacctatctcaagatgggcgaccttaaatcccttgtacagcttcacgttgagacacagcgctgggatgaagcatttgctctgggtgagaaacaccccgaatttaaagacgatatctacatgccatatgcacagtggctggctgaaaatgacaggttcgaggaagctcagaaggctttccacaaagcgggccggcaaagggaagccgtgcaggtcctggaacaattgactaacaacgctgtggcagagtcgaggtttaacgacgctgcttactattactggatgttatctatgcagtgtctggacatcgcccaagatccggcacagaaagatacgatgctgggtaaattctatcactttcagaggctggcagaactctaccacggctaccacgctattcatcggcatactgaggacccattctccgttcatagacctgagactctttttaacatcagcagattcctcctccactcactaccaaaggatacaccctctggaatttcaaaggtgaagatactctttacattggccaaacagagtaaggccctcggagcatatcggttagcccggcatgcctacgataaactaaggggactctacatcccagctcgttttcaaaagtctatcgagctcggcacactcacaatccgggccaaaccatttcatgactcggaggagctggtgcctctctgctacaggtgctccacaaacaatcctctcctcaataacctcggcaacgtgtgtattaactgccgacagccttttattttcagcgcatcttcgtacgacgttctgcacctggtcgagttttatcttgaggaaggaattaccgatgaagaggctatctcgttgattgacttagaggtgctgcggccaaaaagggatgataggcagcttgaaattgcgaacaattctagtcagatcctgaggctcgtggagaccaaggactcgatcggagatgaggacccattcacagcgaaactgtcgttcgaacaggggggatcagagttcgtaccggtcgtcgtgagcaggctagtactgaggtcaatgtctagacgggatgtgcttatcaagcgatggccccctccactgagatggcagtacttccggtctttactgccggatgcatctatcactatgtgcccttcttgcttccagatgtttcactcagaagattacgaactgcttgtgctgcagcatggatgttgtccatattgcagacggtgtaaggacgaccccggtccctag

SEQ ID NO: 197509 - DNA, 2886 bp, Artificial Sequence
  derived and/or modified sequence
atgcgggccgtgctgacctggcgggacaaggccgagcactgcatcaatgacatcgccttcaaaccagatggaactcagttaatcttggctgccgggtcacgcctcttagtctatgacaccagcgatgggactttgcttcagccactcaaaggacataaggacacagtctattgcgtcgcatacgccaaggatggcaagagattcgcaagcgggagcgctgataagtcagtcataatctggacctccaagcttgagggaattctaaaatatacgcataatgacgccatccaatgcgtttcctataatcccataacccatcagctggcaagctgctcatcatcggattttggactgtggtcccccgagcaaaaatccgtcagtaagcacaagtctagttctaaaatcatctgttgttcatggacgaacgacgggcagtacctggcattgggaatgtttaatggtatcatatcaattagaaacaaaaacggagaggagaaagtgaagatcgagcgacccgggggcagtttaagccctatttggagtatttgttggaatccgagccgggaggaacggaacgacatccttgctgtggcagactggggacagaaggtaagcttctaccagcttagcggaaagcagataggcaaagatcgggctctgaatttcgacccatgctgcataagctacttcacgaaaggagagtacattctgttgggcggatccgataagcaagtctctttgttcacaaaggatggcgttcgcctcggcacagtgggcgagcaaaattcctgggtttggacctgtcaggctaaaccagacagtaactatgtcgtggttgggtgtcaagatggaactatctctttctaccagctgattttctctaccgtacacggcctttataaagacagatatgcttacagggattccatgaccgacgtcattgtgcagcatttaatcacagaacagaaggtgcggataaaatgtaaagagctggtcaaaaaaatcgcgatctaccgcaatagactcgctatccaacttccggaaaagatcctaatctacgaactgtattccgaggacctgagcgatatgcactaccgcgtgaaagagaaaattatcaagaaatttgagtgtaacctgctggtcgtttgcgcaaatcacatcatactgtgtcaggagaagagactccaatgccttagcttctctggcgtgaaggaacgcgagtggcagatggaaagtcttattcggtacatcaaagtgattggcggcccccccggcagggagggcttgctagttggcttaaagaacgggcagattctgaagattttcgtggataacttgtttgccattgtactgctgaagcaagctaccgccgttcgttgtctagacatgagcgcgtcgagaaaaaaactcgccgtcgtggacgaaaacgacacttgcctcgtgtacgatattgacaccaaagagttgcttttccaggagcccaacgctaactccgtggcctggaatacccagtgcgaggatatgttgtgctttagcggcggaggataccttaatatcaaggcttcgacctttcctgtgcatcggcagaagcttcagggctttgtggtgggatataatgggagtaagatcttctgcctccatgtcttctcaatatcggccgtggaagttccccagtcggccccaatgtaccaatatctggatcgcaaactatttaaagaagcataccagattgcctgcctgggggtaacggacacagattggagagaactggctatggaggccttggaaggcctcgactttgagactgccaaaaaggcttttataagggtgcaggatctgcggtatctcgagctcattagcagtatagaggagagaaaaaagcgcggcgaaactaataacgatctttttctcgccgatgtattcagttaccagggcaaattccatgaggcagcgaagttgtacaagcggtccggtcacgaaaacctggcccttgagatgtacactgacttatgtatgttcgaatacgccaaagacttccttggatcaggcgaccccaaggagactaaaatgctcattaccaagcaggcagattgggctcgcaatataaaagagcctaaggccgcagtggaaatgtatatcagcgcaggggaacatgtcaaagccatcgaaatttgtggggaccatggctgggtggatatgctgatcgatatcgcccgaaagctggataaggcagagcgagaaccactgctcctgtgcgccacataccttaagaagctcgactcgccaggttacgccgcagaaacatatttgaaaatgggggacctgaagtccctcgtccagttgcacgttgagacccagcgatgggacgaggctttcgccttaggcgagaaacaccctgagtttaaagatgatatctacatgccatacgcacagtggctggccgagaacgatcgattcgaagaagcccagaaagcctttcacaaggcgggacgtcagcgggaggctgtgcaagtgctggagcagctgaccaacaatgccgtggccgagtccagattcaacgacgcagcctactactattggatgctttctatgcagtgcctcgacatcgcccaggatcctgctcagaaagatacaatgctgggcaagttttatcactttcagaggctggctgagctctaccacgggtaccacgccatccatcgccataccgaagaccctttctctgttcaccgcccagagaccctttttaatatttctcgtttcctgcttcattcgttacccaaagacacaccttccggaatcagcaaggtctgcgagaataccctacacctcggccaggccgaacagggtcctcggtgtctgcaggccggcccagcaaggctgtag

SEQ ID NO: 197510 - DNA, 3549 bp, Artificial Sequence
  derived and/or modified sequence
atgcgggctgtcttgacgtggagggataaagccgaacattgcattaatgatattgccttcaaacccgatgggacacagcttatactggccgctggatcgcgcctcttagtatacgatacctctgacggaactctcctgcagcccttgaagggccataaagacacagtctactgcgtggcttatgccaaagacggcaaaagatttgcttcaggctctgccgataagtccgtgatcatctggacctccaagctggagggaatcttgaagtacacccacaacgatgccattcagtgcgtgtcctataacccaatcacccaccaactagcaagttgtagttcctcagactttggcttgtggtcccccgagcagaaatcagtttctaagcataagtcttctagcaagatcatctgttgcagttggactaacgatggacagtacctggcattgggaatgtttaacggtattatctctatccgcaataagaatggggaagagaaggtcaagattgagcgcccaggagggtccctctctcccatctggtcaatctgctggaatcctagccgcgaagagcggaacgatattctggccgtcgccgactggggccagaaggtgagtttctatcagctctctggaaagcagatcgggaaagatcgcgcactcaatttcgacccttgttgcatctcctattttaccaagggcgagtacatacttttaggaggttcggataagcaggtgagtctgtttactaaagatggagttcgccttggaacagtgggagaacagaactcttgggtgtggacctgtcaggccaaaccagatagtaactacgtggtggtcggatgccaggacggaacaatatccttttaccagctgattttctctactgttcatggcctatacaaggataggtatgcataccgtgactccatgactgatgtgatcgtacagcacctaatcactgaacagaaggtgcgcatcaagtgcaaagaactggttaagaagatcgccatttaccgtaacaggctcgccatacagttgccagaaaagatcctgatctatgaattgtattcagaagatctatcagatatgcactatcgggttaaggagaagatcatcaagaagttcgagtgtaatctcctagtggtctgtgcgaaccacataatcctttgccaagaaaaaagactgcagtgtctttcctttagcggagttaaggagcgcgaatggcagatggaatctctcattcggtacattaaggtgattggaggacctcccggaagggaggggctactggttggcttgaaaaatggacaaatcttgaaaatattcgttgataatctattcgcaatcgtcctgctcaaacaggccactgctgttagatgcttagatatgtcagcctcaagaaagaagctggccgtagtggatgagaacgacacatgcctggtgtacgatatcgacactaaggaactgttgtttcaagagccaaatgcaaactctgttgcgtggaacacacagtgtgaagatatgctgtgcttctccggaggaggttatctcaatattaaagccagcacttttcctgtgcaccgccaaaagctgcagggattcgtcgtgggttacaacgggagcaaaatcttttgcctccatgtgttcagcataagcgccgtggaagtcccacaatctgccccaatgtaccagtacctcgaccgcaagctctttaaagaagcctatcaaatcgcatgcctgggagttaccgacacagactggagagagttggcaatggaagcactagaaggcctcgatttcgaaactgccaaaaaagccttcatcagggtccaggatctccgttacctggagctgatctcatcaatcgaagaacggaagaagcggggtgagactaacaacgacctgtttctcgccgacgtgttttcatatcagggcaaatttcacgaagcggcaaaactgtacaaacgctccgggcacgaaaacctcgctctggagatgtatacggatctgtgcatgtttgaatatgctaaagattttttggggtccggagatcctaaggaaactaaaatgctgatcacaaagcaggctgactgggcgagaaacatcaaagagcctaaagcagctgtggaaatgtatatctccgccggagaacatgtgaaagcaatcgagatctgcggtgatcatgggtgggtggatatgctgatcgacattgcccgaaagcttgataaagccgagcgggagccactcctgctgtgcgccacttatctcaaaaagttggattctcccggatacgccgcagagacatatttgaagatgggagacttgaagagcctcgtccaattacacgtcgagacgcagagatgggacgaagctttcgcattgggggaaaagcacccggaattcaaagacgatatttacatgccatacgcacagtggctggccgaaaacgacagattcgaggaagctcaaaaagcttttcataaggcgggaagacagagagaagccgtccaggtgctagagcagctcaccaataacgctgtcgctgagagtcggttcaatgacgcagcctattactactggatgctaagtatgcaatgcctggacatcgcccaagaccctgcccagaaggatacaatgttgggtaagttttaccatttccagaggctggccgaactgtaccacggctatcatgcaatccatcgacacaccgaggacccattctcagtacatcggccagagactctgttcaacatatctagatttttactacactccctacctaaggacacaccctccggcattagcaaggtaaagatcctctttactctggcgaaacagtcaaaagcactgggggcttataggctggcaagacacgcttacgataagctgagagggctatacatccctgctcggtttcagaagtcgattgaactcgggacgcttaccatcagggctaagcccttccatgatagcgaagagcttgtcccgctgtgctatcgctgtagcactaataacccacttctcaacaacttaggcaatgtgtgcatcaactgcagacaaccgttcatcttttctgctagcagttacgacgtgcttcacctagtagaattttacctggaggagggtatcacagatgaggaagccatatcattgatagacctagaagtgctccgacctaaaagggacgacaggcagctggagatcgcgaacaattccagtcagatcttgaggctagtagagactaaggactccattggggacgaggatccattcactgccaaactctctttcgagcaggggggttccgagttcgttccggtggttgtgtccagactggttctgcggtcaatgtcccggagggacgttcttatcaaaaggtggcctccacccctccggtggcagtacttcagatctctgcttccagatgcctcaatcactatgtgtcccagctgtttccagatgttccactcagaagactatgagctgctggtgttacagcacggatgttgtccatactgccgtcggtgcaaggacgaccccggaccttag

SEQ ID NO: 197511 - DNA, 2886 bp, Artificial Sequence
  derived and/or modified sequence
atgcgagccgtgctaacctggcgcgataaagccgaacattgcatcaacgatattgccttcaagcccgacggtactcaacttattctggcggcaggctcaaggctccttgtgtatgatactagcgacggcacacttcttcaacccctcaaaggacataaagacacggtttactgtgtcgcctatgctaaggacggaaagcgctttgcttccgggagtgcagataaatccgtgatcatttggacgtccaagctcgagggaattttgaaatacacccataatgacgcaatccaatgcgttagctacaaccctatcactcaccagttggcatcttgtagcagcagcgattttgggctgtggtcaccggagcagaagagcgtgtctaagcataagtcttcaagtaaaattatctgctgtagctggacgaatgatgggcaataccttgcattgggaatgttcaacgggatcatctctatcaggaacaagaatggcgaagaaaaggtgaagattgaacgtcctggcggaagcctctcccccatatggagtatctgctggaacccatctagagaagagaggaatgatatcctagccgtggccgactgggggcagaaagtttccttctaccagctcagtggcaaacagatcggaaaggacagggcactcaacttcgatccctgctgtatttcttacttcacgaagggtgagtacattctgctcggaggatctgacaaacaggtttccctattcacaaaagatggggtccggctgggaaccgtaggagagcagaacagttgggtctggacctgccaggcgaagcctgactcaaactacgttgtagttggctgtcaggatgggacaatatccttttatcaactgatcttctctactgtccatggactgtataaagaccgctacgcataccgagactccatgactgatgtgatcgtgcagcacctcattacggaacagaaggtgaggattaagtgtaaagagctggtcaaaaaaatagcaatctaccgcaaccggctggcaattcagttaccggaaaagattctgatttacgagctatatagcgaggatctgtcagatatgcattaccgagtaaaagagaagattatcaaaaagtttgaatgcaacttacttgtcgtgtgcgccaaccatattatcctttgccaggagaagagactgcagtgtctgtcctttagcggggtgaaagagcgtgagtggcaaatggagtcattgatacggtacatcaaggtaatcggcggacccccaggcagagaggggctcttagttgggttaaagaatggtcaaatcctcaaaatctttgttgacaatctcttcgccatagtgcttctgaaacaagcaacggctgtgagatgtctcgacatgtcagcctcccgaaagaagctcgcggtggtggacgagaacgacacatgtctggtctacgacattgatactaaagaactcctttttcaggagcctaacgctaactcagtcgcctggaacacccagtgtgaggacatgctgtgctttagcggcggtggttacctcaacattaaagcgagcacttttcccgtccacaggcagaaactgcaaggtttcgtggtgggctacaatggatctaaaatcttctgtctgcacgtgttctcaattagcgcggtggaggtgcctcagagcgcgcctatgtaccagtacctggatcggaaactttttaaggaagcgtaccagatcgcatgtctcggggtcaccgataccgactggcgggagctcgccatggaagcgctcgaaggtttggattttgagacggccaaaaaggcatttatcagggttcaggacttaagatacctcgagttgatcagttcgattgaggaacggaagaaacgcggagagacgaataatgatctttttctggcagatgtcttcagctatcagggtaagttccatgaggccgctaagttgtataaacgctctggtcacgaaaacctggctctcgagatgtacaccgatctttgcatgtttgagtacgccaaggatttcctgggatctggagatcctaaggagactaagatgcttatcactaagcaagcagattgggccagaaatatcaaggagcctaaggcagcggtcgagatgtatataagcgccggagagcatgtaaaagccattgagatttgcggggatcacggttgggtggacatgctaattgacatcgcgagaaaacttgacaaagccgagcgcgaacccctgttgctctgcgccacttacttaaagaagctcgattctcccggttacgccgctgaaacatacctcaagatgggcgacctgaaatctcttgtccaactgcatgtagagacgcagcgctgggacgaagcattcgccttgggcgaaaagcaccccgagtttaaagacgacatctatatgccatacgcccaatggctggccgaaaatgatcgcttcgaagaggcccagaaggcgttccacaaggctgggcgacagcgcgaagccgtacaggtgctggaacaactcactaacaatgccgtggccgaaagccgctttaacgatgcagcttattattattggatgctgtctatgcaatgcctggacatcgcccaggatcctgcccagaaggacacaatgctgggtaagttttatcattttcagcgcctggccgagctgtatcacggctaccatgcaatccacagacacactgaagatccgttctccgtccatcgtcccgaaacattgtttaacatctctaggttcctcctgcattccctcccgaaggacaccccttcaggcatttctaaggtgtgcgagaatacgctgcatctcggccaggccgagcagggaccaagatgcctgcaggctggccctgcacggctgtag

SEQ ID NO: 197512 - DNA, 3549 bp, Artificial Sequence
  derived and/or modified sequence
atgagagccgtgctgacctggagagacaaggccgagcactgcatcaacgacatcgccttcaagcccgacggcacccagctgatcctggccgccggcagcagactgctggtgtacgacaccagcgacggcaccctgctgcagcccctgaagggccacaaggacaccgtgtactgcgtggcctacgccaaggacggcaagagattcgccagcggcagcgccgacaagagcgtgatcatctggaccagcaagctggagggcatcctgaagtacacccacaacgacgccatccagtgcgtgagctacaaccccatcacccaccagctggccagctgcagcagcagcgacttcggcctgtggagccccgagcagaagagcgtgagcaagcacaagagcagcagcaagatcatctgctgcagctggaccaacgacggccagtacctggccctgggcatgttcaacggcatcatcagcatcagaaacaagaacggcgaggagaaggtgaagatcgagagacccggcggcagcctgagccccatctggagcatctgctggaaccccagcagagaggagagaaacgacatcctggccgtggccgactggggccagaaggtgagcttctaccagctgagcggcaagcagatcggcaaggacagagccctgaacttcgacccctgctgcatcagctacttcaccaagggcgagtacatcctgctgggcggcagcgacaagcaggtgagcctgttcaccaaggacggcgtgagactgggcaccgtgggcgagcagaacagctgggtgtggacctgccaggccaagcccgacagcaactacgtggtggtgggctgccaggacggcaccatcagcttctaccagctgatcttcagcaccgtgcacggcctgtacaaggacagatacgcctacagagacagcatgaccgacgtgatcgtgcagcacctgatcaccgagcagaaggtgagaatcaagtgcaaggagctggtgaagaagatcgccatctacagaaacagactggccatccagctgcccgagaagatcctgatctacgagctgtacagcgaggacctgagcgacatgcactacagagtgaaggagaagatcatcaagaagttcgagtgcaacctgctggtggtgtgcgccaaccacatcatcctgtgccaggagaagagactgcagtgcctgagcttcagcggcgtgaaggagagagagtggcagatggagagcctgatcagatacatcaaggtgatcggcggcccccccggcagagagggcctgctggtgggcctgaagaacggccagatcctgaagatcttcgtggacaacctgttcgccatcgtgctgctgaagcaggccaccgccgtgagatgcctggacatgagcgccagcagaaagaagctggccgtggtggacgagaacgacacctgcctggtgtacgacatcgacaccaaggagctgctgttccaggagcccaacgccaacagcgtggcctggaacacccagtgcgaggacatgctgtgcttcagcggcggcggctacctgaacatcaaggccagcaccttccccgtgcacagacagaagctgcagggcttcgtggtgggctacaacggcagcaagatcttctgcctgcacgtgttcagcatcagcgccgtggaggtgccccagagcgcccccatgtaccagtacctggacagaaagctgttcaaggaggcctaccagatcgcctgcctgggcgtgaccgacaccgactggagagagctggccatggaggccctggagggcctggacttcgagaccgccaagaaggccttcatcagagtgcaggacctgagatacctggagctgatcagcagcatcgaggagagaaagaagagaggcgagaccaacaacgacctgttcctggccgacgtgttcagctaccagggcaagttccacgaggccgccaagctgtacaagagaagcggccacgagaacctggccctggagatgtacaccgacctgtgcatgttcgagtacgccaaggacttcctgggcagcggcgaccccaaggagaccaagatgctgatcaccaagcaggccgactgggccagaaacatcaaggagcccaaggccgccgtggagatgtacatcagcgccggcgagcacgtgaaggccatcgagatctgcggcgaccacggctgggtggacatgctgatcgacatcgccagaaagctggacaaggccgagagagagcccctgctgctgtgcgccacctacctgaagaagctggacagccccggctacgccgccgagacctacctgaagatgggcgacctgaagagcctggtgcagctgcacgtggagacccagagatgggacgaggccttcgccctgggcgagaagcaccccgagttcaaggacgacatctacatgccctacgcccagtggctggccgagaacgacagattcgaggaggcccagaaggccttccacaaggccggcagacagagagaggccgtgcaggtgctggagcagctgaccaacaacgccgtggccgagagcagattcaacgacgccgcctactactactggatgctgagcatgcagtgcctggacatcgcccaggaccccgcccagaaggacaccatgctgggcaagttctaccacttccagagactggccgagctgtaccacggctaccacgccatccacagacacaccgaggaccccttcagcgtgcacagacccgagaccctgttcaacatcagcagattcctgctgcacagcctgcccaaggacacccccagcggcatcagcaaggtgaagatcctgttcaccctggccaagcagagcaaggccctgggcgcctacagactggccagacacgcctacgacaagctgagaggcctgtacatccccgccagattccagaagagcatcgagctgggcaccctgaccatcagagccaagcccttccacgacagcgaggagctggtgcccctgtgctacagatgcagcaccaacaaccccctgctgaacaacctgggcaacgtgtgcatcaactgcagacagcccttcatcttcagcgccagcagctacgacgtgctgcacctggtggagttctacctggaggagggcatcaccgacgaggaggccatcagcctgatcgacctggaggtgctgagacccaagagagacgacagacagctggagatcgccaacaacagcagccagatcctgagactggtggagaccaaggacagcatcggcgacgaggaccccttcaccgccaagctgagcttcgagcagggcggcagcgagttcgtgcccgtggtggtgagcagactggtgctgagaagcatgagcagaagagacgtgctgatcaagagatggcccccccccctgagatggcagtacttcagaagcctgctgcccgacgccagcatcaccatgtgccccagctgcttccagatgttccacagcgaggactacgagctgctggtgctgcagcacggctgctgcccctactgcagaagatgcaaggacgaccccggcccctag

SEQ ID NO: 197513 - DNA, 2886 bp, Artificial Sequence
  derived and/or modified sequence
atgagagccgtgctgacctggagagacaaggccgagcactgcatcaacgacatcgccttcaagcccgacggcacccagctgatcctggccgccggcagcagactgctggtgtacgacaccagcgacggcaccctgctgcagcccctgaagggccacaaggacaccgtgtactgcgtggcctacgccaaggacggcaagagattcgccagcggcagcgccgacaagagcgtgatcatctggaccagcaagctggagggcatcctgaagtacacccacaacgacgccatccagtgcgtgagctacaaccccatcacccaccagctggccagctgcagcagcagcgacttcggcctgtggagccccgagcagaagagcgtgagcaagcacaagagcagcagcaagatcatctgctgcagctggaccaacgacggccagtacctggccctgggcatgttcaacggcatcatcagcatcagaaacaagaacggcgaggagaaggtgaagatcgagagacccggcggcagcctgagccccatctggagcatctgctggaaccccagcagagaggagagaaacgacatcctggccgtggccgactggggccagaaggtgagcttctaccagctgagcggcaagcagatcggcaaggacagagccctgaacttcgacccctgctgcatcagctacttcaccaagggcgagtacatcctgctgggcggcagcgacaagcaggtgagcctgttcaccaaggacggcgtgagactgggcaccgtgggcgagcagaacagctgggtgtggacctgccaggccaagcccgacagcaactacgtggtggtgggctgccaggacggcaccatcagcttctaccagctgatcttcagcaccgtgcacggcctgtacaaggacagatacgcctacagagacagcatgaccgacgtgatcgtgcagcacctgatcaccgagcagaaggtgagaatcaagtgcaaggagctggtgaagaagatcgccatctacagaaacagactggccatccagctgcccgagaagatcctgatctacgagctgtacagcgaggacctgagcgacatgcactacagagtgaaggagaagatcatcaagaagttcgagtgcaacctgctggtggtgtgcgccaaccacatcatcctgtgccaggagaagagactgcagtgcctgagcttcagcggcgtgaaggagagagagtggcagatggagagcctgatcagatacatcaaggtgatcggcggcccccccggcagagagggcctgctggtgggcctgaagaacggccagatcctgaagatcttcgtggacaacctgttcgccatcgtgctgctgaagcaggccaccgccgtgagatgcctggacatgagcgccagcagaaagaagctggccgtggtggacgagaacgacacctgcctggtgtacgacatcgacaccaaggagctgctgttccaggagcccaacgccaacagcgtggcctggaacacccagtgcgaggacatgctgtgcttcagcggcggcggctacctgaacatcaaggccagcaccttccccgtgcacagacagaagctgcagggcttcgtggtgggctacaacggcagcaagatcttctgcctgcacgtgttcagcatcagcgccgtggaggtgccccagagcgcccccatgtaccagtacctggacagaaagctgttcaaggaggcctaccagatcgcctgcctgggcgtgaccgacaccgactggagagagctggccatggaggccctggagggcctggacttcgagaccgccaagaaggccttcatcagagtgcaggacctgagatacctggagctgatcagcagcatcgaggagagaaagaagagaggcgagaccaacaacgacctgttcctggccgacgtgttcagctaccagggcaagttccacgaggccgccaagctgtacaagagaagcggccacgagaacctggccctggagatgtacaccgacctgtgcatgttcgagtacgccaaggacttcctgggcagcggcgaccccaaggagaccaagatgctgatcaccaagcaggccgactgggccagaaacatcaaggagcccaaggccgccgtggagatgtacatcagcgccggcgagcacgtgaaggccatcgagatctgcggcgaccacggctgggtggacatgctgatcgacatcgccagaaagctggacaaggccgagagagagcccctgctgctgtgcgccacctacctgaagaagctggacagccccggctacgccgccgagacctacctgaagatgggcgacctgaagagcctggtgcagctgcacgtggagacccagagatgggacgaggccttcgccctgggcgagaagcaccccgagttcaaggacgacatctacatgccctacgcccagtggctggccgagaacgacagattcgaggaggcccagaaggccttccacaaggccggcagacagagagaggccgtgcaggtgctggagcagctgaccaacaacgccgtggccgagagcagattcaacgacgccgcctactactactggatgctgagcatgcagtgcctggacatcgcccaggaccccgcccagaaggacaccatgctgggcaagttctaccacttccagagactggccgagctgtaccacggctaccacgccatccacagacacaccgaggaccccttcagcgtgcacagacccgagaccctgttcaacatcagcagattcctgctgcacagcctgcccaaggacacccccagcggcatcagcaaggtgtgcgagaacaccctgcacctgggccaggccgagcagggccccagatgcctgcaggccggccccgccagactgtag

SEQ ID NO: 197514 - protein, 1407 aa, Artificial Sequence [sequence omitted]

SEQ ID NO: 197515 - protein, 1435 aa, Artificial Sequence
  derived and/or modified sequence
MREKGRRKKGRTWAEAAKTVLEKYPNTPMSHKEILQVIQREGLKEIRSGTSPLACLNAMLHTNSRGEEGIFYKVPGRMGVYTLKKDVPDGVKELSEGSEESSDGQSDSQSSENSSSSSDGGSNKEGKKSRWKRKVSSSSPQSGCPSPTIPAGKVISPSQKHSKKALKQALKQQQQKKQQQQCRPSISISSNQHLSLKTVKAASDSVPAKPATWEGKQSDGQTGSPQNSNSSFSSSVKVENTLLGLGKKSFQRSERLHTRQMKRTKCADIDVETPDSILVNTNLRALINKHTFSVLPGDCQQRLLLLLPEVDRQVGPDGLMKLNGSALNNEFFTSAAQGWKERLSEGEFTPEMQVRIRQEIEKEKKVEPWKEQFFESYYGQSSGLSLEDSKKLTASPSDPKVKKTPAEQPKSMPVSEASLIRIVPVVSQSECKEEALQMSSPGRKEECESQGEVQPNFSTSSEPLLSSALNTHELSSILPIKCPKDEDLLEQKPVTSAEQESEKNHLTTASNYNKSESQESLVTSPSKPKSPGVEKPIVKPTAGAGPQETNMKEPLATLVDQSPESLKRKSSLTQEEAPVSWEKRPRVTENRQHQQPFQVSPQPFLNRGDRIQVRKVPPLKIPVSRISPMPFHPSQVSPRARFPVSITSPNRTGARTLADIKAKAQLVKAQRAAAAAAAAAAAAASVGGTIPGPGPGGGQGPGEGGEGQTARGGSPGSDRVSETGKGPTLELAGTGSRGGTRELLPCGPETQPQSETKTTPSQAQPHSVSGAQLQQTPPVPPTPAVSGACTSVPSPAHIEKLDNEKLNPTRATATVASVSHPQGPSSCRQEKAPSPTGPALISGASPVHCAADGTVELKAGPSKNIPNPSASSKTDASVPVAVTPSPLTSLLTTATLEKLPVPQVSATTAPAGSAPPSSTLPAASSLKTPGTSLNMNGPTLRPTSSIPANNPLVTQLLQGKDVPMEQILPKPLTKVEMKTVPLTAKEERGMGALIATNTTENSTREEVNERQSHPATQQQLGKTLQSKQLPQVPRPLQLFSAKELRDSSIDTHQYHEGLSKATQDQILQTLIQRVRRQNLLSVVPPSQFNFAHSGFQLEDISTSQRFMLGFAGRRTSKPAMAGHYLLNISTYGRGSESFRRTHSVNPEDRFCLSSPTEALKMGYTDCKNATGESSSSKEDDTDEESTGDEQESVTVKEEPQVSQSAGKGDTSSGPHSRETLSTSDCLASKNVKAEIPLNEQTTLSKENYLFTRGQTFDEKTLARDLIQAAQKQMAHAVRGKAIRSSPELFSSTVLPLPADSPTHQPLLLPPLQTPKLYGSPTQIGPSYRGMINVSTSSDMDHNSAVPGSQVSSNVGDVMSFSVTVTTIPASQAMNPSSHGQTIPVQAFSEENSIEGTPSKCYCRLKAMIMCKGCGAFCHDDCIGPSKLCVSCLVVR

SEQ ID NO: 197516 - DNA, 2757 bp, Artificial Sequence
  derived and/or modified sequence
atgaagcggacaaaatgtgccgatatagacgtggagaccccagattctatactggtgaacaccaacttgcgggccctaattaacaaacacaccttcagtgtcttgccaggggactgtcagcaacggctccttttattgctgcccgaagtcgatagacaagtcggccccgacggacttatgaaactgaatggtagcgccctcaacaatgaattttttacatccgccgctcagggctggaaagagcgactgtcagagggcgagtttacccctgaaatgcaggtccgcattaggcaggaaatcgaaaaggagaaaaaggtcgagccttggaaggagcagttcttcgagagttactacggccagtcctccgggttgtctcttgaggatagtaagaaattgaccgcaagtccatcagacccaaaggtgaaaaagacacctgcggagcaacctaagagtatgccagtatctgaagcttcgttgatcagaatagtgcccgtggtgtcgcagtcagaatgcaaggaagaggcacttcagatgtctagccctggcagaaaggaagagtgcgagagtcagggcgaggtccagcctaatttttctacctcctcagagcctttactaagctcagccctcaacactcatgagctctcctcgatcctgcccattaaatgccccaaagacgaggatcttctcgaacagaagccagtaacgtccgctgagcaggaaagcgaaaagaatcacctcacaaccgcatcaaactacaataaatccgagagtcaggaatccctggtgaccagcccctcaaaaccgaaaagtcccggcgtggagaaacccatcgtgaagcccactgcaggcgcaggcccacaagaaacaaatatgaaagagccattggccacactagtagatcaaagccccgaatcattgaagcgcaagagttcactgacacaggaggaagcccccgttagctgggaaaagcgccctcgcgtgaccgagaatcggcaacatcagcaaccttttcaagtttctccccagccatttctgaataggggggatcgaatacaggtgagaaaagtacctccacttaaaataccagtctcaagaataagtcctatgcctttccacccctcccaggtgtcacctagagcccgatttcccgtcagcattacgagtcccaacagaactggagccagaaccttggccgatatcaaagctaaagcgcaacttgtgaaagcccagagagccgcggcagcagctgctgccgctgctgctgctgcagccagtgtgggtggcacaattcctggaccagggccaggaggaggccaaggccccggcgagggcggagagggccaaaccgccagaggcggcagccccgggtccgaccgcgttagtgagacagggaaggggcctacacttgaactagccgggaccggttctcggggaggcacgcgggagctgcttccgtgtggcccagagacacagcctcagagtgagactaagactacccctagccaagcccagccacacagcgtctctggggctcagctccagcagactcctcccgtcccccctactccggccgtgtccggggcctgcacaagcgtcccatcccccgctcatatcgagaaacttgacaacgaaaagctgaatccaacacgggccaccgccaccgtcgcatctgtatcccatccacaaggcccctcctcctgtcggcaggagaaagccccatcaccgacagggtttcaacttgaagacatatccacatcgcagagatttatgttgggatttgccggcagaaggacgagtaagccggctatggccggacactatctgttaaatatctcaacatacggacgaggatcggagagcttccggcggacacactcagtgaaccctgaggatcgcttctgcctgagtagccccaccgaagctctgaagatggggtatactgattgcaagaacgctaccggcgaaagcagctcatccaaagaggatgataccgacgaggaaagtaccggagacgaacaggagagcgtgacagtgaaggaagaaccacaggtcagccaatccgctggcaaaggcgacactagttcaggaccccacagccgagaaactctttccacctccgattgtctagcgtcaaagaacgtaaaggctgagatcccactaaacgagcagactacattatcaaaggagaattatctgtttacccgtggccagacgtttgacgaaaaaacgctggccagggatctgatccaggccgcccagaaacagatggcccacgctgttagaggtaaagccattcgcagtagtcctgaactgtttagctccacggtgcttcctctgccagcggactctccaacccaccagcctctattgctgccaccgttgcagacgccaaaactgtacggatcacccacccaaatcggcccaagctatcggggaatgataaacgtgagcacttcttcggacatggaccacaattccgctgtgccaggatcacaggtctcttcaaacgtaggagatgtcatgtctttctcggtgaccgtcaccaccattccagcatctcaggccatgaacccttcttctcacggacagacaatccctgttcaagctttttctgaagaaaacagcatcgaaggtaccccaagtaaatgctattgtaggctgaaggctatgatcatgtgcaagggctgcggagcattttgccacgacgactgcatcggaccttctaagctgtgtgtgtcatgtctcgttgtgcgttag

SEQ ID NO: 197517 - DNA, 4224 bp, Artificial Sequence
  derived and/or modified sequence
atgtcacacaaagaaattctgcaggtgatacagcgggagggactgaaggagatctcctctgggacctctcccctggcatgcttaaacgccatgctgcacaccaactccaggggagaggagggcatcttctacaaggtgcccggccgcatgggagtctatacccttaaaaaagacgtgcccgacggtgtcaaagagctgtcagagggtagcgaggagagttccgacgggcagtcagactctcagagctcagagaactcatctagtagctccgatggaggctcgaataaggaagggaagaaatctcgctggaaacggaaggtgagctcatcttccccccaaagcggctgcccaagccccactataccagccggcaaggtgattagccctagccagaagcactccaaaaaggcgctgaaacaagccctcaagcagcaacagcaaaagaagcagcagcagcaatgccgtcccagcatctcgatctccagtaaccagcaccttagtctgaagaccgtgaaagccgcaagcgacagtgtgcccgctaaaccagcaacatgggagggaaaacagtcggatggccagactgggagtccccagaattctaactctagtttttcctccagcgtgaaggtcgagaatacactgttagggctgggcaaaaagtcttttcaacgtagtgagagattacatacacgccagatgaaaagaacaaaatgcgcagacatcgacgtggaaacaccagattcgatcctagttaacacaaacttgcgggctttgattaataagcacactttctccgtactcccgggagactgccagcagagattgctgctccttctgcctgaggtcgatcgacaagttggtcctgatgggctcatgaagcttaacggttcagctctcaataacgagtttttcaccagcgctgcacaaggctggaaggaacggctctccgagggcgagttcacccctgaaatgcaggtgagaatccgacaggaaatcgagaaagaaaaaaaagtggaaccttggaaagagcagttcttcgaaagctattacgggcagagctccggcttgtccttggaggattccaaaaagctgacggccagcccctctgacccgaaggtcaagaagacccctgctgagcagcccaaatccatgcctgtgagtgaggcttctctgattagaatagtgcccgtggtgtcccagagcgagtgcaaggaggaggcattgcagatgtcatctcccggaagaaaggaggaatgcgagtctcagggagaggttcagcctaacttttcaaccagcagtgagcctttattgtcctccgccttaaatacacatgagctctcatctatccttcccattaagtgtcccaaggatgaggatctgttagaacagaaacctgtaacgtctgcggagcaggagagcgagaaaaaccatttaacgaccgcgtccaactataataagagcgaaagtcaggaatccctggttacgtcccccagcaagccaaagtccccaggcgtggagaaacctattgtcaagccaaccgccggtgctgggcctcaggagaccaatatgaaagagccactcgccactctggtggaccagagtcccgagtctctgaaaaggaagtcaagcctgacacaggaggaggccccggtctcatgggagaaacgtcccagagtgacagaaaaccgccagcaccaacagccttttcaggtgagcccccaaccattcctgaatcgcggcgatagaatccaagtccggaaagttccacccctaaagattccagtatcccgtatttcccctatgcccttccatccgtctcaagtgagcccaagggctcgattcccagtgtcaatcacaagcccgaataggacaggtgctaggaccctggccgacataaaggcaaaagcccaactggtcaaagcacagcgagcggctgcggctgccgcggcggcggcagcagccgctgcctctgtgggcggtactatcccgggcccagggccaggtggcggacaggggcccggagagggaggggagggccaaacggctcgaggggggagtcccggatctgaccgggtcagtgagacaggaaaaggacctactctcgagcttgccgggacgggaagtcgcggcggtactcgggaactgcttccttgtggtcctgagacacagccccagagtgagaccaagacgacaccctcccaggcgcagccacacagcgtgtccggggcccaacttcaacagactccgcccgttcctccgactccagcggtgagtggggcatgcacatcggttccaagtcccgcacacatcgaaaaactcgacaatgagaagctcaatcccacaagagcgaccgccacggtagcctctgtgtcacacccccaaggtccaagctcatgtaggcaggaaaaggcgccctcccccacggggcccgcactgatttctggggcttcacccgtccattgtgccgcagatggaactgttgaactgaaagctgggccatctaaaaatatcccgaatccatctgcttccagtaagacagacgcttccgtgccagttgcagtgactccatcaccgctaacctcactgctgactacagctaccttagagaaactgcctgtacctcaggtgtcggcaactacagcgcctgcaggaagtgctccacctagctccaccctgcctgctgccagctcactcaaaacacccggaacatcattgaacatgaacggcccaacgttgcggcctacttcatctatcccagctaacaaccctctggtcacacagttgctgcaaggaaaagacgtgccgatggagcagattttacccaaacctctgaccaaagtcgagatgaaaacagtgccacttaccgctaaggaggagagaggcatgggagccctgattgccaccaacaccactgagaactcaacccgtgaagaggtgaatgaacggcagagtcaccccgctacccagcaacagctgggcaaaacgctgcagtccaagcagctgcctcaggtaccccgccccttgcaactgttctctgcaaaagagttacgggactcatccatcgacacacatcaataccacgagggactgtctaaagccacccaggatcagattctgcagaccttgattcaaagagtgcggcggcaaaacctgttatcggttgttcccccatctcaattcaatttcgcccacagtgggttccagctcgaagacatctctacgtcccagcgatttatgctgggatttgccggtcggagaacctccaagcccgctatggctggacattacttgcttaacatctctacttacgggcggggctcggagtcctttagaaggacccacagtgttaaccccgaggaccgtttttgtttatcgtcccccacagaggcgctgaagatgggatacacagattgtaagaatgccacaggggagtccagctcatccaaagaggacgatactgatgaggaatctactggggatgagcaggaaagtgtgacagtgaaggaggagccacaggtcagccagtcagcagggaaaggggataccagtagtgggccacattcgcgcgagacccttagcacttctgattgtcttgcgtcaaagaatgtaaaggcagagatccctctgaatgaacagacaacattatccaaagaaaactatctcttcacccgcgggcagaccttcgacgagaagaccctggcccgggaccttattcaggccgcgcagaaacaaatggctcacgcggtcaggggtaaagccattaggtcttctccagagctgttcagcagtacagtgctccctctccctgccgacagcccaacacatcagccactgttgctcccccctctgcagacccctaaactctacggctcacccacacaaatcggcccttcctaccgggggatgattaacgtttccacctctagtgacatggatcacaactccgccgtgcctggatcacaagtgtccagtaacgtcggcgatgtgatgagtttttcagtgaccgtgaccaccattccagcttctcaggctatgaacccctcctcccacggacagaccattccagtccaggcgttttccgaagagaacagtatcgaaggtactccaagcaagtgttattgtcgattgaaggcaatgattatgtgcaaagggtgcggggccttttgtcacgatgattgtatcgggccttccaaactctgcgtttcttgtctcgtggtgagatag

SEQ ID NO: 197518 - DNA, 2757 bp, Artificial Sequence
  derived and/or modified sequence
atgaagagaactaaatgtgcagatatagacgtagagacccccgattcgatcctcgtgaacaccaatttgcgcgccttgattaataaacacacattttccgtgctccccggggactgccaacaacgactgctcctgttattgcctgaggttgatagacaggtgggacccgatgggttgatgaaactaaatggtagcgcacttaacaatgaatttttcacctcagccgctcagggatggaaagagaggctgtccgagggcgagttcactccagagatgcaggttagaatccgccaggagattgaaaaagagaagaaagtcgaaccttggaaagaacaatttttcgaatcatattacggacaaagcagcggactttcactggaagacagcaagaagcttacagcctcccctagtgaccctaaagtgaaaaaaacaccagcggaacagccgaaaagcatgcctgtttctgaggcctccctgatcaggatagtgcccgttgtgtcgcagtcagagtgtaaggaagaagcactgcaaatgagttcccctggaaggaaggaggagtgtgaaagtcagggcgaagtccagccaaacttttctacttcttcggaacccttgctgagttctgccctcaacacgcatgaattgagctcaatactgcctattaagtgcccgaaagacgaggacctccttgagcaaaaaccggttacctctgcggaacaggagtctgagaagaatcacctaactacagctagtaattacaataagagtgagtctcaagagtctctcgtgacttctcctagcaagccaaagagtcccggagtggagaaacctatcgtcaagcctaccgccggggcaggcccacaggaaacgaatatgaaggagccgctggcaactctcgtagatcagtctccagagtcgctcaaacgcaagtcctcactcacacaggaagaagcgccggtgtcttgggaaaagcgaccccgagttacagaaaatcgccagcaccagcaaccgttccaggtgagccctcaacctttcctgaatagaggagaccgcatacaggtgcggaaagtgccccctctgaaaatccctgtgagcagaatttcccccatgccatttcacccctcacaggtgagtccaagagctaggttccctgtgtcgattacaagccctaatcggacaggtgcccgcacgttggccgacatcaaggcaaaggcccagttggtgaaggctcaaagagccgccgccgcagccgcagccgccgccgcagccgccgcttctgttggcgggaccatcccagggccggggcctggcggagggcaaggacccggggaaggaggtgaggggcagactgcacgtggtggtagcccaggtagcgatcgggtgtctgaaactggaaaggggccaaccttggagctcgccgggaccggatccaggggcggaaccagagagctgcttccctgcggccccgagacccagccacagagcgagacaaagaccactccctcgcaggcccagccccacagtgtgagcggtgcccaactgcagcagactccacccgtaccgcccacacccgctgtgagcggagcttgcacatctgtccccagcccagcacatatcgaaaagctcgacaatgagaaactgaacccaacaagagccactgcgactgtggcttctgtgtcccacccacagggccccagctcatgtcggcaggagaaagctccctcccctacaggttttcagctggaagacatctccacaagccaaagattcatgcttggcttcgcaggccgaagaacgtccaaacctgcgatggccggccactacctccttaatatctctacctatggacggggatctgaaagtttcagacggacccactctgtgaaccccgaggatcggttctgtctgagcagtccaacagaggctttaaagatgggctacactgactgcaagaacgctactggagagagctccagtagtaaggaggatgacacagacgaagagtcgaccggagatgaacaggaatctgttacagtgaaagaggagcctcaggtgtcacaatccgccggaaagggcgatacgtcaagtgggcctcactccagagaaacactcagtaccagcgactgtttggcaagcaaaaatgtgaaagctgaaataccattgaatgaacagacgaccctttccaaggagaattacctattcacacgcggacaaactttcgatgagaaaaccctggccagagacttgatccaggcggcccaaaaacagatggctcacgccgtcaggggcaaagccattaggtcctcccccgagctcttttccagtacagtgttgccactgccggccgattcccccacacaccagcccctcctgctgcctccactgcagactcctaagctctatggcagcccgacacagatcggcccgagctacagaggcatgattaacgtttccacatcttccgatatggaccataactccgcagtccctggctcacaggtgagtagtaatgttggtgatgtgatgtcattctccgtaacagttaccaccattcccgcgagtcaggcaatgaacccctcctctcatggccagacgattcccgtgcaggccttttctgaagagaactccattgaagggactcctagcaagtgctactgtcgcctgaaagcgatgatcatgtgtaaagggtgcggtgctttctgtcacgatgactgtatcggacctagcaagctgtgcgtcagctgcctggttgtgcgttag

SEQ ID NO: 197519 - DNA, 4308 bp, Artificial Sequence
  derived and/or modified sequence
atgagggaaaaaggccggagaaaaaaaggcagaacctgggcggaagccgcgaagacagttctggagaagtatcctaatacccctatgagtcacaaggagatcctgcaagtcattcaaagagagggcttgaaggagatcaggtccgggacctctcccttagcatgtctgaacgcgatgctgcacacgaattctcgtggagaagaaggcatcttttacaaagtcccgggcaggatgggagtttacaccctgaaaaaggatgtgcccgatggagttaaagagttgtctgaaggaagtgaggaatctagtgacggtcaaagtgatagtcagtccagcgagaactcctcaagcagttccgatggagggtcgaacaaggagggcaaaaagtctcggtggaaaagaaaagtgtcctcctcctccccccagtctggctgtccaagtcccacaattccagccggcaaagttatttccccaagtcagaaacatagcaaaaaggccctgaaacaagctctgaagcagcaacaacagaagaagcagcaacagcagtgcagaccttctattagcatctccagcaatcaacaccttagcctgaagacagttaaagcagcttccgactcagtcccagccaagcctgccacttgggaaggcaagcagagcgacggtcagactggctccccccagaattcaaacagttcattttcctccagtgtcaaagtggaaaacacactgctgggcttaggtaagaagtccttccagaggtcagaacgtctgcatacccgccagatgaagcggaccaagtgcgcagacattgatgtggaaacccccgactctatactagtcaatacaaatttgagggccctcatcaataagcacacttttagcgtgctgcctggcgactgccagcagagacttctcctccttttaccggaggtcgacagacaagtggggcccgacggccttatgaagttaaacggaagcgctctcaacaacgagttctttacctccgccgctcaagggtggaaggaaagattgtctgaaggcgaattcacacctgagatgcaagtgaggatcagacaggagatcgagaaggagaaaaaagtggagccatggaaagaacagttctttgagtcctactacgggcaatctagtggactgtctttagaggattctaagaaactgacagcaagtcctagtgacccaaaggttaagaagacaccagccgagcagcccaaaagcatgcctgtttccgaagctagtctcatcaggatagtacccgtggtcagccagagtgaatgtaaagaggaagcactgcagatgtcaagtcctgggcgaaaagaggagtgcgaaagccagggcgaggtgcagcccaactttagcacatcatccgaaccccttctgagttccgcccttaatactcacgaactctcaagcattctgcccataaaatgccccaaagacgaagacctgttagaacagaagccagtgacctccgcagagcaggaaagtgagaagaatcatctgactacggctagtaactataacaaatctgagagccaggagagtcttgtgaccagcccttctaagccaaaaagcccaggggtggagaaaccgatagtcaagcctacagccggcgcaggtccccaagaaaccaatatgaaagagccactagcaaccctcgttgaccagtcccctgagagcctaaagaggaaatcatccttgactcaagaggaagcacccgtgagctgggagaaacgcccaagggtcaccgagaaccgtcaacatcagcaaccctttcaggtatcacctcagccatttctcaacagaggggacagaattcaagtgcggaaagtgcctcctctcaaaataccagtgtcgcggattagccctatgccatttcacccttcccaggtctcaccgcgcgcacggttcccagtctcaattacctctccgaaccggaccggcgccaggacactggctgacattaaggccaaagcgcagctagtgaaagcgcagagggcggccgctgccgctgcagccgccgccgcggctgcagcctctgtggggggaactatccccgggccgggccccggcggaggtcagggccctggagaaggtggcgaagggcaaactgctagagggggcagtccaggatccgacagggtgtccgagaccgggaaaggtccgactctcgagctggcaggaaccggctctcgaggggggaccagggagttactaccctgtggacccgaaacacagccgcagagtgagaccaaaaccacccccagccaggcccaaccccactcagtgtcgggggcgcagctgcagcagacccctccggtgccgccgactcctgctgtgtctggagcgtgcaccagtgtcccatcccctgctcacatcgaaaaactggacaatgaaaagttgaatcccacgcgcgccacagctacggtcgcaagcgttagccatccacagggtccctcttcatgccggcaggaaaaggctccgagcccaactggtccagccctgatcagcggtgcctcccccgtgcattgcgctgccgacggcacagtagaactgaaagcaggtccaagcaaaaatatccctaacccgagtgcctcgagtaagacggatgccagcgtgcctgtcgctgtaactcctagcccactgacctccctcctgacaaccgctacactggaaaaactgcccgtaccccaggtgtctgcaactaccgcacctgcgggcagtgctccgccttcttcaacgctgcctgctgcttcctcgctgaaaaccccgggaacatctctaaacatgaacggaccaactctgaggcccacctccagcattcctgcgaataatcctctggtgactcagctcctgcaggggaaagacgtgcctatggagcaaatactgcccaaacctctaacgaaagtcgagatgaaaactgtgcctttgacagcaaaggaggagagagggatgggagccctcatcgctaccaacactaccgagaatagcactagagaggaggtcaacgaaagacaatctcacccggctacccagcagcagcttggaaagactcttcagagcaagcaactgcctcaggtcccccggcctctccaactgttctctgctaaagagctgagggattcttcaatagatacccatcagtaccacgagggtctttccaaggccacgcaggatcagatacttcagaccctgatacaacgagtgcgcagacagaacctcctgtccgttgtgccgccgagccagttcaatttcgcacacagcgggttccagcttgaagatatatccacatcccagagatttatgttggggtttgccggaaggaggacatcgaagccagcaatggccgggcactacctgctaaatatctcgacatacggccgtgggtcagagtccttcaggaggactcacagtgtcaatcctgaggacagattctgcttgtccagtcctaccgaggctttaaaaatgggatacactgactgtaaaaatgctacaggggagagtagttcctccaaggaagacgacactgacgaggagagtaccggagatgaacaggaatccgtgacagtgaaggaggagccacaagttagccagtccgccgggaaaggtgatacttctagcggaccccatagcagagagactctgagcacgagcgattgcttagctagtaagaacgtcaaggccgagattccactgaacgaacagaccaccctcagcaaggaaaattacctgttcacgcgggggcaaacgttcgacgagaaaacactggccagggacttgattcaggccgcccaaaaacagatggcccatgccgttcgaggcaaagcaatcaggtcctcacctgagctgttcagctctacagtcctgccgttaccggccgactccccgacgcatcagcctctgttgctcccccccctgcaaacccccaagttgtatggcagccccacccaaatcggtccgagctatcgaggcatgatcaatgtgtctacttcatcggatatggaccacaactctgctgttcccggatctcaggtctcctccaacgtgggcgatgtaatgtccttttccgtgaccgttacaacaatccccgccagccaagctatgaacccatccagccacgggcagactatcccagtgcaggccttttccgaggaaaactcaattgagggaactcctagcaaatgctactgtagactaaaggctatgattatgtgcaagggctgcggggccttctgccatgatgattgtattgggccctctaaactctgcgtgtcttgtctggtggtcaggtag

SEQ ID NO: 197520 - DNA, 3781 bp, Artificial Sequence
  derived and/or modified sequence
gtacagtaagaacccaatatggcagcggcggtagcagtggcaacggcagcaagaggaccggccgccccatagacccccccgcgcaccacccccgccgcttcctctgcttgggtgcccccccggtctgacttcccttttctcccacctttcccggcaccgcgggaaaagcagcgcagggcagagcaggcagggagggcggccggagcccggacacgggagcctcccagtcagttcaagacccgacatgagggaaaagggacgtaggaagaagggcaggacctgggcggaggccgccaagacggtcttagaaaaataccccaatacacccatgagtcataaagaaattcttcaagttatccagagagaaggactaaaagaaatcagcagtgggacttctcctcttgcatgcctgaatgcaatgcttcacacaaactccagaggtgaagagggcatcttctataaggttccaggtagaatgggagtatatactttgaagaaagatgtgccggatggggtgaaagagctgtcagaaggttcagaagaaagcagtgatggtcagtcagattcccagagttctgagaacagcagcagcagcagtgatggtggcagcaacaaggagggaaaaaagagcaggtggaaaaggaaagtatcgtcgtcctccccgcagtcaggctgcccatcacccaccattccagcaggtaaagtcatttctccatcacagaagcacagcaagaaggcactaaagcaggcgctaaagcagcaacagcagaagaagcagcagcagcaatgcaggccaagcatatccatctcctccaaccagcatctctcactaaagactgtcaaagcagccagtgactctgtacctgccaaacctgcaacatgggaaggaaagcaatctgatggacagacaggcagccctcaaaactcaaactccagcttttcttcctcagttaaagtggaaaatactttactaggcttggggaagaagtcattccagagatctgagagactccataccagacaaatgaaaagaactaaatgtgctgacattgacgttgagacaccggactccattctggttaatacaaatctgcgagcactgatcaacaagcacacattttcagtccttcctggagattgccagcaacgactgcttttactactcccagaggtagatcgacaggttggtccagatggtttaatgaagttaaatggctcagcccttaacaatgaattcttcacttcagcagcccaaggctggaaggaaagactctcagaaggtgagtttacacctgagatgcaggtgagaattcgacaagagattgagaaggagaaaaaagtggagccatggaaagaacaattctttgaaagctactatgggcagagttctggcctgagccttgaagattctaagaaattgacagcttctcccagtgatcccaaagtaaagaaaaccccagctgaacaaccaaaatccatgcctgtgtcagaggcctctcttatcagaatagttccagtagtctcccagtcagagtgtaaagaagaagcattgcaaatgtcatcaccaggcagaaaagaagagtgtgaaagccaaggtgaagtgcagccgaacttctccacatcttcagagcccctgctttcctcagctctcaatacacatgagcttagcagcattcttcccatcaagtgcccaaaggatgaggatctcttggagcagaagccagtcacctctgctgaacaggaatctgagaagaaccatctcaccacagcttctaattataacaaaagtgaaagccaagaatctttagttacatcgccaagcaaacccaagagtcctggggttgaaaaaccaatagtgaagcccacagcaggagcgggtccacaggagactaatatgaaagaacctctagcaactcttgttgatcagagcccagaaagcctcaagaggaagtcttccctcacccaagaagaggcccctgtgagctgggagaagaggccacgtgtcactgagaatcgccagcaccagcagccatttcaggtctcaccacagccctttctcaatagaggggacagaatccaggtgcgaaaagtaccacctctcaagatcccggtctccagaatctcccccatgccgtttcatccatcgcaggtctctcccagggctcgttttccagtctccatcactagtcctaacagaacaggagccagaactcttgcagacatcaaagcaaaagcccaactggtcaaagcacagagggcagcagctgccgctgccgccgcagctgctgcagccgcctcagttggagggaccattccaggacctggcccagggggtggacaaggtccaggagagggtggtgaagggcagactgctagaggaggcagtccaggctcagacagagtcagtgaaactggaaagggccccacactggaactggcaggaactggaagcaggggaggtacgagagagcttttaccctgtggtccagagactcagccccagtctgagaccaagaccaccccaagccaggcacagcctcatagtgtctctggagcacaactacagcaaacccccccagtgcctccaacacctgccgtcagtggagcatgcacaagtgtcccatcaccagcccacatagagaaattggataatgaaaaactgaaccccaccagagcaacagccacagtggcctctgtcagccatccacaagggcccagtagttgcagacaggagaaagcaccttctccaacaggtttccagctggaagacatctccacaagccagaggttcatgctgggttttgctggcagaaggacatccaaacctgcaatggcagggcactacttactgaatatttctacctacggccggggctcagagagctttaggaggacccattctgtaaaccctgaagatcgtttttgtctaagcagccccactgaagccttgaaaatgggatatacagactgtaaaaatgcaacaggagagagtagcagcagcaaagaagatgacactgatgaggaaagtactggtgatgagcaggaatctgtcacagtgaaagaggagccccaggtttcccagagtgctggcaagggtgacacaagttcaggacctcacagcagggaaactctatctaccagtgattgcttagctagcaagaatgtgaaggctgagataccattgaatgagcaaaccactttaagtaaggagaattacctgttcactagaggccaaacatttgatgaaaagaccctagccagagatttaattcaggcagcacagaagcagatggctcatgcagtgagaggtaaggcaatccgtagcagccccgagcttttcagttctactgttcttcctctgcctgcagacagccccacccaccagcccctactccttccacccctgcaaaccccgaagttgtatggaagccccacccagatagggccaagctatagaggcatgatcaatgtctccacctcatctgacatggaccataactctgctgtaccaggtagccaggtatctagcaatgtaggtgatgtcatgtcattttcagtgactgtcactaccatccctgctagccaagctatgaatcccagcagccatggccagaccattcctgttcaggcgttctccgaagagaacagcatagagggcacgccttcgaaatgttactgccgcttgaaagccatgatcatgtgcaaaggctgtggcgctttctgccatgatgattgcatcggcccctccaaactgtgcgtctcctgccttgtcgttcggtaa

SEQ ID NO: 197521 - DNA, 8889 bp, Artificial Sequence
  derived and/or modified sequence
gtacagtaagaacccaatatggcagcggcggtagcagtggcaacggcagcaagaggaccggccgccccatagacccccccgcgcaccacccccgccgcttcctctgcttgggtgcccccccggtctgacttcccttttctcccacctttcccggcaccgcgggaaaagcagcgcagggcagagcaggcagggagggcggccggagcccggacacgggagcctcccagtcagttcaagacccgacatgagggaaaagggacgtaggaagaagggcaggacctgggcggaggccgccaagacggtcttagaaaaataccccaatacacccatgagtcataaagaaattcttcaagttatccagagagaaggactaaaagaaatcagcagtgggacttctcctcttgcatgcctgaatgcaatgcttcacacaaactccagaggtgaagagggcatcttctataaggttccaggtagaatgggagtatatactttgaagaaagatgtgccggatggggtgaaagagctgtcagaaggttcagaagaaagcagtgatggtcagtcagattcccagagttctgagaacagcagcagcagcagtgatggtggcagcaacaaggagggaaaaaagagcaggtggaaaaggaaagtatcgtcgtcctccccgcagtcaggctgcccatcacccaccattccagcaggtaaagtcatttctccatcacagaagcacagcaagaaggcactaaagcaggcgctaaagcagcaacagcagaagaagcagcagcagcaatgcaggccaagcatatccatctcctccaaccagcatctctcactaaagactgtcaaagcagccagtgactctgtacctgccaaacctgcaacatgggaaggaaagcaatctgatggacagacaggcagccctcaaaactcaaactccagcttttcttcctcagttaaagtggaaaatactttactaggcttggggaagaagtcattccagagatctgagagactccataccagacaaatgaaaagaactaaatgtgctgacattgacgttgagacaccggactccattctggttaatacaaatctgcgagcactgatcaacaagcacacattttcagtccttcctggagattgccagcaacgactgcttttactactcccagaggtagatcgacaggttggtccagatggtttaatgaagttaaatggctcagcccttaacaatgaattcttcacttcagcagcccaaggctggaaggaaagactctcagaaggtgagtttacacctgagatgcaggtgagaattcgacaagagattgagaaggagaaaaaagtggagccatggaaagaacaattctttgaaagctactatgggcagagttctggcctgagccttgaagattctaagaaattgacagcttctcccagtgatcccaaagtaaagaaaaccccagctgaacaaccaaaatccatgcctgtgtcagaggcctctcttatcagaatagttccagtagtctcccagtcagagtgtaaagaagaagcattgcaaatgtcatcaccaggcagaaaagaagagtgtgaaagccaaggtgaagtgcagccgaacttctccacatcttcagagcccctgctttcctcagctctcaatacacatgagcttagcagcattcttcccatcaagtgcccaaaggatgaggatctcttggagcagaagccagtcacctctgctgaacaggaatctgagaagaaccatctcaccacagcttctaattataacaaaagtgaaagccaagaatctttagttacatcgccaagcaaacccaagagtcctggggttgaaaaaccaatagtgaagcccacagcaggagcgggtccacaggagactaatatgaaagaacctctagcaactcttgttgatcagagcccagaaagcctcaagaggaagtcttccctcacccaagaagaggcccctgtgagctgggagaagaggccacgtgtcactgagaatcgccagcaccagcagccatttcaggtctcaccacagccctttctcaatagaggggacagaatccaggtgcgaaaagtaccacctctcaagatcccggtctccagaatctcccccatgccgtttcatccatcgcaggtctctcccagggctcgttttccagtctccatcactagtcctaacagaacaggagccagaactcttgcagacatcaaagcaaaagcccaactggtcaaagcacagagggcagcagctgccgctgccgccgcagctgctgcagccgcctcagttggagggaccattccaggacctggcccagggggtggacaaggtccaggagagggtggtgaagggcagactgctagaggaggcagtccaggctcagacagagtcagtgaaactggaaagggccccacactggaactggcaggaactggaagcaggggaggtacgagagagcttttaccctgtggtccagagactcagccccagtctgagaccaagaccaccccaagccaggcacagcctcatagtgtctctggagcacaactacagcaaacccccccagtgcctccaacacctgccgtcagtggagcatgcacaagtgtcccatcaccagcccacatagagaaattggataatgaaaaactgaaccccaccagagcaacagccacagtggcctctgtcagccatccacaagggcccagtagttgcagacaggagaaagcaccttctccaacaggtcctgctctaatctcaggtgcctcacctgttcattgtgcagctgatggcacagttgagctcaaagcaggtcctagtaagaatatacctaacccttcagcctcatcaaagacagatgctagtgtgccagtggctgtaactccctcccctttaacatctttattgaccacagccactttagaaaagcttcctgtaccccaggtcagtgcaactacagcacctgctggatcagctccaccctcgagcactttgccagcagcttctagccttaaaaccccaggaacttctttaaacatgaatggacccactttaagaccaacctctagtatccctgctaataatcctttagtgactcagctgcttcaaggcaaagatgttcccatggagcaaattctgcctaaacctctcaccaaagttgaaatgaaaacggttccactgactgcaaaagaggaaagggggatgggagcgctcatagctaccaacacaacagaaaatagcaccagagaggaagttaatgagagacagtcccatccagctacgcagcagcagctgggcaaaaccttgcaaagtaagcagctcccccaggttccaaggccccttcagctcttttcagctaaggagctgagggactccagcattgacacacaccaataccacgaaggactaagtaaagcaacccaagatcagatccttcagactctcattcagagggttcggaggcagaatcttctctcagttgtgccgccctcacagttcaacttcgctcactcaggtttccagctggaagacatctccacaagccagaggttcatgctgggttttgctggcagaaggacatccaaacctgcaatggcagggcactacttactgaatatttctacctacggccggggctcagagagctttaggaggacccattctgtaaaccctgaagatcgtttttgtctaagcagccccactgaagccttgaaaatgggatatacagactgtaaaaatgcaacaggagagagtagcagcagcaaagaagatgacactgatgaggaaagtactggtgatgagcaggaatctgtcacagtgaaagaggagccccaggtttcccagagtgctggcaagggtgacacaagttcaggacctcacagcagggaaactctatctaccagtgattgcttagctagcaagaatgtgaaggctgagataccattgaatgagcaaaccactttaagtaaggagaattacctgttcactagaggccaaacatttgatgaaaagaccctagccagagatttaattcaggcagcacagaagcagatggctcatgcagtgagaggtaaggcaatccgtagcagccccgagcttttcagttctactgttcttcctctgcctgcagacagccccacccaccagcccctactccttccacccctgcaaaccccgaagttgtatggaagccccacccagatagggccaagctatagaggcatgatcaatgtctccacctcatctgacatggaccataactctgctgtaccaggtagccaggtatctagcaatgtaggtgatgtcatgtcattttcagtgactgtcactaccatccctgctagccaagctatgaatcccagcagccatggccagaccattcctgttcaggcgttctccgaagagaacagcatagagggcacgccttcgaaatgttactgccgcttgaaagccatgatcatgtgcaaaggctgtggcgctttctgccatgatgattgcatcggcccctccaaactgtgcgtctcctgccttgtcgttcggtaatgagactagaaagagatacactgtaaaggagggggaagggaagggttgaccagttgggttttttgcgtccttttggaatcacagaaataaacaagtaggtttcagttgtcttcagagacaaatgttacttaatcaggaatacaaagtacagattttttacattttagaggaagagcaccttgtatagtaagtctaagtcaagcaagactttgtgaatttgtgacaagtttgcacttacaaaatcatgtaaatatgtcacattttgtttaacattatttttccaagtgtttaggtaataatgtattactttgaattcagattaatgttctactacttgtgactgagaaaagtttaatgccggcatggtaaaaggaagctgtctcccttctgacatttcctaggaagctaggaaaaggaaagtgaaggaatggtctaaagaaatgaccattcacactgattttgtctggacagtctggccgcaggttattcatagattattcagcctttgcaggacttggattcagggttttactcagtccctttaccttaggtggaatcttcttaaattgaaatttttggtaaggaattcatttcacaggtagtgtttcagactctgaaagccctgacttggttcttggcttctactgtactagttactagttactggtactgttgccaagcaatctgcttggaatttgtggatccctgctgttccctaatcccaccccctgccctgagacagtgaatgtagtccgtgaagggagtgcctctctgggaccccctgtgttgttacaggctgtgcagtgcaacaattccagcaaaaataccctatccccgcacttagtcattcgtggtaactaacaattttgaaatactcatataaaatgaacaggaaagtgttagtgattgggtgatttgagctacatcttgttgagcaaggggagtgaaaccacagaaactgttaaattgaacgtaaataactttggaaaacagttttgacactagaacaaggtcgcttctcttttcctcttctctcccaacctgttaacctagtgctagatagtcagctgctgttgcaggtagaaaagctcaccaatgccacatttgttcattctgttcaacctgttttgacctcccaggcatctgaacaggatgacatcatcttattatatcttactttacacatacgtgtatgtacacacacacacacaatacaagacatttttcctgttttagaaaatatagcccttgtttggattactgctgtctgagcactagaaatttctaatggaaagaggcctctgaatggctaagggaacatctggaaaggaaggaaaatgagccctaaaggttttttggttgcttgtttttgtttctttttctttcttgtttccttttttgtttttaaatccttctctagtgactgaagaaattgtgagtacataatatttaggtcatggttaaggaacattaaaataaacctgcagtttaacagaattttgtattaaatgggggagtgtcaatttgcatcatttgcatattgatttcaagtctcctaatttggaatgggtaaagtacaaatgttaatgcaacatagtacagttgtatttgtccttcatattcaggatgtgatatttacaaaatgcagaacagtttaaacttgttaagtcacattccagattaggagaaaatgggcaataatcatctctgttttgcccccattctactacccaccactgcccaccccacccccacatcacacactcttcgatgctttcccacagcccctgctccgctcctctccgtaagaaactcacttcactgtttttcacttttcacttctggcttttttgtggcccaaggccaatataggattaatatctgtgttccagcttcagccagaacgatatgtctgtccatctttctcctttcttccagcacacacagctaagagataagaaggctgcaaggattggggataaggagtatattttcaagccaagaaccagtagaaaacagaaataatggtgctcccaaatattcagtaccttgggcaatccaggaagggtttaaagagacctgttgctgcatagaactctccctgccctaccccttaactccaccttagtgccagggccgagggctggtctgcatgctggaagaggttgagagttttggaattgattccatgctaaatgtcagttaccagtttggattgatgaaagtgatttttctgctttacctttttcctgtcagaaaggttttcctctgtgctacccttaacttagggatgaacagactataactaggaaaggaggaaaggtatcagggatttttaagtccgtttagagagcaaaccatattgtgcctcttcatcttgacccaggctcttatagataggtcctaaacattgctgttcactagattatcttaacaaataatactcagctaaatatttgcatttaggaatactcctaaaacagatattgccaactagatacactgcctcaatcttgaccagacaagagaacagttaagttctctcagttgggtagtaacttgaataccagtctatttatcagttggtttcaacacagaggtttcaagtggaaagccattcatcttaaaagctgaacagaaaaattaaaaaaaaaaaaaacacattacaatctggccttttagaaaatgaagcagtagaaacaaaacctttattagtatggtattccagcagcacctttaaagcaatctttaccttagttttttgagttgttttacctttcatcccaatctgaaaagttttaataaatgctgagcttattcttagggtatgacctggcattatttccagtgactagtcaggcattatgcctgatgcatacgcctcccgtgcacccctatctagccttcagatgtcctccactgcaggtcaccccaggagatagcatcaataatatagtctcagtcttgtttataaagattctaagttgtctagtaaataagtctccctgaatcttaaataattttggagaattagaattctccatcctattaaacagaaagtaaagccaaatagcctggagttgtttgtcctacttgttccataacccctatgctcaagatactgaagctatctgtggtatttcatgtaacatttctaagaataagagctggcaaatgggaaacttggggtggagagagcatacttattgggctgtgaaggcatacggatgtacatgttttagagcttatctcagatttaaatagccaaaggaagacctcattgccttccaggtgaaggtgcaaagtcatacatattaatgacctgacagttaacattctgttgtttattattgcctttctccaccttagagagccataaataactctctggtgaagtgatttgctataatgggggtgaggagtggggagacttctctggtcattacactgctatttatttctagaactcactatcagtgagcagtgccagagtgttttctctttgacctagaggtttcacatcatagcaaggagggaaaagtctccccatctccttacaactgtgtgctaagtaagtaacttggccaagggtagttttcagctcaatttatagaatagtccaaagagactttgagaaacatggtgataggcaggggcctttcctaccatgtttcaatacctacaaacctattgaaagagaacagtaggtaaaacatttcctaaagttgaagcaatagcttcgtagattcttggttactttattttttttaatgctttacatttgatacaactattgaagatcaattttaaaaatagctttccagtaatatattttaagtaatatatattttaatatctgtaaaaagtgacagtggaagactttgaatttctcatatatggtatgtttgatgtaggacctcactgttaaggcacaaattatttcaaaggaagttactctaaagacactcagattatttcagaaaaatgcaataaggggaatagttttggggtttattttttattttaaaagaaaattgacttatttaccacaagctatttttttcccttctggctgtaaggtttgtacagactggtttggtaaatgctaaacttttgtgtcttttgcctttttaaaggaattgttaacattggaattgagggtatgtacagagaagttggtgtcaacaccatttaaaaagtcatattttttcacaaatatagaaaatcattttacataagaattttaagtatttgcaataaatatatgtatatagattgtatgtattcctatattcttatttttcattttattattaagtaaaagatcattaaaagtg

SEQ ID NO: 197522 - DNA, 3299 bp, Artificial Sequence
  derived and/or modified sequence
tcctccaggatgcattgagttttttcacttaaatcaaagtggctcccgcctgggcaacagatatcgtcgtcctccccgcagtcaggctgcccatcacccaccattccagcaggtaaagtcatttctccatcacagaagcacagcaagaaggcactaaagcaggcgctaaagcagcaacagcagaagaagcagcagcagcaatgcaggccaagcatatccatctcctccaaccagcatctctcactaaagactgtcaaagcagccagtgactctgtacctgccaaacctgcaacatgggaaggaaagcaatctgatggacagacaggcagccctcaaaactcaaactccagcttttcttcctcagttaaagtggaaaatactttactaggcttggggaagaagtcattccagagatctgagagactccataccagacaaatgaaaagaactaaatgtgctgacattgacgttgagacaccggactccattctggttaatacaaatctgcgagcactgatcaacaagcacacattttcagtccttcctggagattgccagcaacgactgcttttactactcccagaggtagatcgacaggttggtccagatggtttaatgaagttaaatggctcagcccttaacaatgaattcttcacttcagcagcccaaggctggaaggaaagactctcagaaggtgagtttacacctgagatgcaggtgagaattcgacaagagattgagaaggagaaaaaagtggagccatggaaagaacaattctttgaaagctactatgggcagagttctggcctgagccttgaagattctaagaaattgacagcttctcccagtgatcccaaagtaaagaaaaccccagctgaacaaccaaaatccatgcctgtgtcagaggcctctcttatcagaatagttccagtagtctcccagtcagagtgtaaagaagaagcattgcaaatgtcatcaccaggcagaaaagaagagtgtgaaagccaaggtgaagtgcagccgaacttctccacatcttcagagcccctgctttcctcagctctcaatacacatgagcttagcagcattcttcccatcaagtgcccaaaggatgaggatctcttggagcagaagccagtcacctctgctgaacaggaatctgagaagaaccatctcaccacagcttctaattataacaaaagtgaaagccaagaatctttagttacatcgccaagcaaacccaagagtcctggggttgaaaaaccaatagtgaagcccacagcaggagcgggtccacaggagactaatatgaaagaacctctagcaactcttgttgatcagagcccagaaagcctcaagaggaagtcttccctcacccaagaagaggcccctgtgagctgggagaagaggccacgtgtcactgagaatcgccagcaccagcagccatttcaggtctcaccacagccctttctcaatagaggggacagaatccaggtgcgaaaagtaccacctctcaagatcccggtctccagaatctcccccatgccgtttcatccatcgcaggtctctcccagggctcgttttccagtctccatcactagtcctaacagaacaggagccagaactcttgcagacatcaaagcaaaagcccaactggtcaaagcacagagggcagcagctgccgctgccgccgcagctgctgcagccgcctcagttggagggaccattccaggacctggcccagggggtggacaaggtccaggagagggtggtgaagggcagactgctagaggaggcagtccaggctcagacagagtcagtgaaactggaaagggccccacactggaactggcaggaactggaagcaggggaggtacgagagagcttttaccctgtggtccagagactcagccccagtctgagaccaagaccaccccaagccaggcacagcctcatagtgtctctggagcacaactacagcaaacccccccagtgcctccaacacctgccgtcagtggagcatgcacaagtgtcccatcaccagcccacatagagaaattggataatgaaaaactgaaccccaccagagcaacagccacagtggcctctgtcagccatccacaagggcccagtagttgcagacaggagaaagcaccttctccaacaggtttccagctggaagacatctccacaagccagaggttcatgctgggttttgctggcagaaggacatccaaacctgcaatggcagggcactacttactgaatatttctacctacggccggggctcagagagctttaggaggacccattctgtaaaccctgaagatcgtttttgtctaagcagccccactgaagccttgaaaatgggatatacagactgtaaaaatgcaacaggagagagtagcagcagcaaagaagatgacactgatgaggaaagtactggtgatgagcaggaatctgtcacagtgaaagaggagccccaggtttcccagagtgctggcaagggtgacacaagttcaggacctcacagcagggaaactctatctaccagtgattgcttagctagcaagaatgtgaaggctgagataccattgaatgagcaaaccactttaagtaaggagaattacctgttcactagaggccaaacatttgatgaaaagaccctagccagagatttaattcaggcagcacagaagcagatggctcatgcagtgagaggtaaggcaatccgtagcagccccgagcttttcagttctactgttcttcctctgcctgcagacagccccacccaccagcccctactccttccacccctgcaaaccccgaagttgtatggaagccccacccagatagggccaagctatagaggcatgatcaatgtctccacctcatctgacatggaccataactctgctgtaccaggtagccaggtatctagcaatgtaggtgatgtcatgtcattttcagtgactgtcactaccatccctgctagccaagctatgaatcccagcagccatggccagaccattcctgttcaggcgttctccgaagagaacagcatagagggcacgccttcgaaatgttactgccgcttgaaagccatgatcatgtgcaaaggctgtggcgctttctgccatgatgattgcatcggcccctccaaactgtgcgtctcctgccttgtcgttcggtaatgagactagaaagagatacactgtaaaggagggggaagggaagggttgaccagttgggttttttgcgtccttttggaatcacagaaataaacaagtaggtttca

SEQ ID NO: 197523 - DNA, 8943 bp, Artificial Sequence
  derived and/or modified sequence
acagtagtgacggccgcgcgggagcggtcacatgaccgtagcggcagcctgtacagtaagaacccaatatggcagcggcggtagcagtggcaacggcagcaagaggaccggccgccccatagacccccccgcgcaccacccccgccgcttcctctgcttgggtgcccccccggtctgacttcccttttctcccacctttcccggcaccgcgggaaaagcagcgcagggcagagcaggcagggagggcggccggagcccggacacgggagcctcccagtcagttcaagacccgacatgagggaaaagggacgtaggaagaagggcaggacctgggcggaggccgccaagacggtcttagaaaaataccccaatacacccatgagtcataaagaaattcttcaagttatccagagagaaggactaaaagaaatcagaagtgggacttctcctcttgcatgcctgaatgcaatgcttcacacaaactccagaggtgaagagggcatcttctataaggttccaggtagaatgggagtatatactttgaagaaagatgtgccggatggggtgaaagagctgtcagaaggttcagaagaaagcagtgatggtcagtcagattcccagagttctgagaacagcagcagcagcagtgatggtggcagcaacaaggagggaaaaaagagcaggtggaaaaggaaagtatcgtcgtcctccccgcagtcaggctgcccatcacccaccattccagcaggtaaagtcatttctccatcacagaagcacagcaagaaggcactaaagcaggcgctaaagcagcaacagcagaagaagcagcagcagcaatgcaggccaagcatatccatctcctccaaccagcatctctcactaaagactgtcaaagcagccagtgactctgtacctgccaaacctgcaacatgggaaggaaagcaatctgatggacagacaggcagccctcaaaactcaaactccagcttttcttcctcagttaaagtggaaaatactttactaggcttggggaagaagtcattccagagatctgagagactccataccagacaaatgaaaagaactaaatgtgctgacattgacgttgagacaccggactccattctggttaatacaaatctgcgagcactgatcaacaagcacacattttcagtccttcctggagattgccagcaacgactgcttttactactcccagaggtagatcgacaggttggtccagatggtttaatgaagttaaatggctcagcccttaacaatgaattcttcacttcagcagcccaaggctggaaggaaagactctcagaaggtgagtttacacctgagatgcaggtgagaattcgacaagagattgagaaggagaaaaaagtggagccatggaaagaacaattctttgaaagctactatgggcagagttctggcctgagccttgaagattctaagaaattgacagcttctcccagtgatcccaaagtaaagaaaaccccagctgaacaaccaaaatccatgcctgtgtcagaggcctctcttatcagaatagttccagtagtctcccagtcagagtgtaaagaagaagcattgcaaatgtcatcaccaggcagaaaagaagagtgtgaaagccaaggtgaagtgcagccgaacttctccacatcttcagagcccctgctttcctcagctctcaatacacatgagcttagcagcattcttcccatcaagtgcccaaaggatgaggatctcttggagcagaagccagtcacctctgctgaacaggaatctgagaagaaccatctcaccacagcttctaattataacaaaagtgaaagccaagaatctttagttacatcgccaagcaaacccaagagtcctggggttgaaaaaccaatagtgaagcccacagcaggagcgggtccacaggagactaatatgaaagaacctctagcaactcttgttgatcagagcccagaaagcctcaagaggaagtcttccctcacccaagaagaggcccctgtgagctgggagaagaggccacgtgtcactgagaatcgccagcaccagcagccatttcaggtctcaccacagccctttctcaatagaggggacagaatccaggtgcgaaaagtaccacctctcaagatcccggtctccagaatctcccccatgccgtttcatccatcgcaggtctctcccagggctcgttttccagtctccatcactagtcctaacagaacaggagccagaactcttgcagacatcaaagcaaaagcccaactggtcaaagcacagagggcagcagctgccgctgccgccgcagctgctgcagccgcctcagttggagggaccattccaggacctggcccagggggtggacaaggtccaggagagggtggtgaagggcagactgctagaggaggcagtccaggctcagacagagtcagtgaaactggaaagggccccacactggaactggcaggaactggaagcaggggaggtacgagagagcttttaccctgtggtccagagactcagccccagtctgagaccaagaccaccccaagccaggcacagcctcatagtgtctctggagcacaactacagcaaacccccccagtgcctccaacacctgccgtcagtggagcatgcacaagtgtcccatcaccagcccacatagagaaattggataatgaaaaactgaaccccaccagagcaacagccacagtggcctctgtcagccatccacaagggcccagtagttgcagacaggagaaagcaccttctccaacaggtcctgctctaatctcaggtgcctcacctgttcattgtgcagctgatggcacagttgagctcaaagcaggtcctagtaagaatatacctaacccttcagcctcatcaaagacagatgctagtgtgccagtggctgtaactccctcccctttaacatctttattgaccacagccactttagaaaagcttcctgtaccccaggtcagtgcaactacagcacctgctggatcagctccaccctcgagcactttgccagcagcttctagccttaaaaccccaggaacttctttaaacatgaatggacccactttaagaccaacctctagtatccctgctaataatcctttagtgactcagctgcttcaaggcaaagatgttcccatggagcaaattctgcctaaacctctcaccaaagttgaaatgaaaacggttccactgactgcaaaagaggaaagggggatgggagcgctcatagctaccaacacaacagaaaatagcaccagagaggaagttaatgagagacagtcccatccagctacgcagcagcagctgggcaaaaccttgcaaagtaagcagctcccccaggttccaaggccccttcagctcttttcagctaaggagctgagggactccagcattgacacacaccaataccacgaaggactaagtaaagcaacccaagatcagatccttcagactctcattcagagggttcggaggcagaatcttctctcagttgtgccgccctcacagttcaacttcgctcactcaggtttccagctggaagacatctccacaagccagaggttcatgctgggttttgctggcagaaggacatccaaacctgcaatggcagggcactacttactgaatatttctacctacggccggggctcagagagctttaggaggacccattctgtaaaccctgaagatcgtttttgtctaagcagccccactgaagccttgaaaatgggatatacagactgtaaaaatgcaacaggagagagtagcagcagcaaagaagatgacactgatgaggaaagtactggtgatgagcaggaatctgtcacagtgaaagaggagccccaggtttcccagagtgctggcaagggtgacacaagttcaggacctcacagcagggaaactctatctaccagtgattgcttagctagcaagaatgtgaaggctgagataccattgaatgagcaaaccactttaagtaaggagaattacctgttcactagaggccaaacatttgatgaaaagaccctagccagagatttaattcaggcagcacagaagcagatggctcatgcagtgagaggtaaggcaatccgtagcagccccgagcttttcagttctactgttcttcctctgcctgcagacagccccacccaccagcccctactccttccacccctgcaaaccccgaagttgtatggaagccccacccagatagggccaagctatagaggcatgatcaatgtctccacctcatctgacatggaccataactctgctgtaccaggtagccaggtatctagcaatgtaggtgatgtcatgtcattttcagtgactgtcactaccatccctgctagccaagctatgaatcccagcagccatggccagaccattcctgttcaggcgttctccgaagagaacagcatagagggcacgccttcgaaatgttactgccgcttgaaagccatgatcatgtgcaaaggctgtggcgctttctgccatgatgattgcatcggcccctccaaactgtgcgtctcctgccttgtcgttcggtaatgagactagaaagagatacactgtaaaggagggggaagggaagggttgaccagttgggttttttgcgtccttttggaatcacagaaataaacaagtaggtttcagttgtcttcagagacaaatgttacttaatcaggaatacaaagtacagattttttacattttagaggaagagcaccttgtatagtaagtctaagtcaagcaagactttgtgaatttgtgacaagtttgcacttacaaaatcatgtaaatatgtcacattttgtttaacattatttttccaagtgtttaggtaataatgtattactttgaattcagattaatgttctactacttgtgactgagaaaagtttaatgccggcatggtaaaaggaagctgtctcccttctgacatttcctaggaagctaggaaaaggaaagtgaaggaatggtctaaagaaatgaccattcacactgattttgtctggacagtctggccgcaggttattcatagattattcagcctttgcaggacttggattcagggttttactcagtccctttaccttaggtggaatcttcttaaattgaaatttttggtaaggaattcatttcacaggtagtgtttcagactctgaaagccctgacttggttcttggcttctactgtactagttactagttactggtactgttgccaagcaatctgcttggaatttgtggatccctgctgttccctaatcccaccccctgccctgagacagtgaatgtagtccgtgaagggagtgcctctctgggaccccctgtgttgttacaggctgtgcagtgcaacaattccagcaaaaataccctatccccgcacttagtcattcgtggtaactaacaattttgaaatactcatataaaatgaacaggaaagtgttagtgattgggtgatttgagctacatcttgttgagcaaggggagtgaaaccacagaaactgttaaattgaacgtaaataactttggaaaacagttttgacactagaacaaggtcgcttctcttttcctcttctctcccaacctgttaacctagtgctagatagtcagctgctgttgcaggtagaaaagctcaccaatgccacatttgttcattctgttcaacctgttttgacctcccaggcatctgaacaggatgacatcatcttattatatcttactttacacatacgtgtatgtacacacacacacacaatacaagacatttttcctgttttagaaaatatagcccttgtttggattactgctgtctgagcactagaaatttctaatggaaagaggcctctgaatggctaagggaacatctggaaaggaaggaaaatgagccctaaaggttttttggttgcttgtttttgtttctttttctttcttgtttccttttttgtttttaaatccttctctagtgactgaagaaattgtgagtacataatatttaggtcatggttaaggaacattaaaataaacctgcagtttaacagaattttgtattaaatgggggagtgtcaatttgcatcatttgcatattgatttcaagtctcctaatttggaatgggtaaagtacaaatgttaatgcaacatagtacagttgtatttgtccttcatattcaggatgtgatatttacaaaatgcagaacagtttaaacttgttaagtcacattccagattaggagaaaatgggcaataatcatctctgttttgcccccattctactacccaccactgcccaccccacccccacatcacacactcttcgatgctttcccacagcccctgctccgctcctctccgtaagaaactcacttcactgtttttcacttttcacttctggcttttttgtggcccaaggccaatataggattaatatctgtgttccagcttcagccagaacgatatgtctgtccatctttctcctttcttccagcacacacagctaagagataagaaggctgcaaggattggggataaggagtatattttcaagccaagaaccagtagaaaacagaaataatggtgctcccaaatattcagtaccttgggcaatccaggaagggtttaaagagacctgttgctgcatagaactctccctgccctaccccttaactccaccttagtgccagggccgagggctggtctgcatgctggaagaggttgagagttttggaattgattccatgctaaatgtcagttaccagtttggattgatgaaagtgatttttctgctttacctttttcctgtcagaaaggttttcctctgtgctacccttaacttagggatgaacagactataactaggaaaggaggaaaggtatcagggatttttaagtccgtttagagagcaaaccatattgtgcctcttcatcttgacccaggctcttatagataggtcctaaacattgctgttcactagattatcttaacaaataatactcagctaaatatttgcatttaggaatactcctaaaacagatattgccaactagatacactgcctcaatcttgaccagacaagagaacagttaagttctctcagttgggtagtaacttgaataccagtctatttatcagttggtttcaacacagaggtttcaagtggaaagccattcatcttaaaagctgaacagaaaaattaaaaaaaaaaaaaacacattacaatctggccttttagaaaatgaagcagtagaaacaaaacctttattagtatggtattccagcagcacctttaaagcaatctttaccttagttttttgagttgttttacctttcatcccaatctgaaaagttttaataaatgctgagcttattcttagggtatgacctggcattatttccagtgactagtcaggcattatgcctgatgcatacgcctcccgtgcacccctatctagccttcagatgtcctccactgcaggtcaccccaggagatagcatcaataatatagtctcagtcttgtttataaagattctaagttgtctagtaaataagtctccctgaatcttaaataattttggagaattagaattctccatcctattaaacagaaagtaaagccaaatagcctggagttgtttgtcctacttgttccataacccctatgctcaagatactgaagctatctgtggtatttcatgtaacatttctaagaataagagctggcaaatgggaaacttggggtggagagagcatacttattgggctgtgaaggcatacggatgtacatgttttagagcttatctcagatttaaatagccaaaggaagacctcattgccttccaggtgaaggtgcaaagtcatacatattaatgacctgacagttaacattctgttgtttattattgcctttctccaccttagagagccataaataactctctggtgaagtgatttgctataatgggggtgaggagtggggagacttctctggtcattacactgctatttatttctagaactcactatcagtgagcagtgccagagtgttttctctttgacctagaggtttcacatcatagcaaggagggaaaagtctccccatctccttacaactgtgtgctaagtaagtaacttggccaagggtagttttcagctcaatttatagaatagtccaaagagactttgagaaacatggtgataggcaggggcctttcctaccatgtttcaatacctacaaacctattgaaagagaacagtaggtaaaacatttcctaaagttgaagcaatagcttcgtagattcttggttactttattttttttaatgctttacatttgatacaactattgaagatcaattttaaaaatagctttccagtaatatattttaagtaatatatattttaatatctgtaaaaagtgacagtggaagactttgaatttctcatatatggtatgtttgatgtaggacctcactgttaaggcacaaattatttcaaaggaagttactctaaagacactcagattatttcagaaaaatgcaataaggggaatagttttggggtttattttttattttaaaagaaaattgacttatttaccacaagctatttttttcccttctggctgtaaggtttgtacagactggtttggtaaatgctaaacttttgtgtcttttgcctttttaaaggaattgttaacattggaattgagggtatgtacagagaagttggtgtcaacaccatttaaaaagtcatattttttcacaaatatagaaaatcattttacataagaattttaagtatttgcaataaatatatgtatatagattgtatgtattcctatattcttatttttcattttattattaagtaaaagatcattaaaagtgaaaa

SEQ ID NO: 197524 - DNA, 2757 bp, Artificial Sequence
  derived and/or modified sequence
atgaagaggaccaagtgtgccgacattgatgtggagaccccagacagcatcctggtgaacaccaacctgcgggccctgatcaacaagcacaccttctctgtgctgcccggggactgccagcagaggctgctgctgctgctgcctgaggtggaccggcaggtgggcccagatggcctgatgaagctgaatggaagtgccctgaacaatgagttcttcaccagcgctgcccagggctggaaggagcggctgtctgagggggagttcaccccagagatgcaggtgcgcatccggcaggagattgagaaggagaagaaggtggagccctggaaggagcagttctttgagagctactacggccagagcagcggcctgagcctggaggacagcaagaagctgacagccagccccagcgaccccaaggtgaagaagaccccagctgagcagcccaagtccatgcctgtgtctgaggccagcctcatccgcatcgtgcctgtggtgtcccagagcgagtgcaaggaggaggccctgcagatgagcagccctggcaggaaggaggagtgtgagagccagggcgaggtgcagcccaacttcagcaccagcagcgagcccctgctgagcagcgccctgaacacccatgagctgagcagcatcctgcccatcaagtgccccaaggatgaggacctgctggagcagaagcctgtgaccagcgctgagcaggagagcgagaagaaccacctgaccacagccagcaactacaacaagtctgagagccaggagagcctggtgaccagccccagcaagcccaagagccctggggtggagaagcccatcgtgaagcccacagctggggccggcccccaggagaccaacatgaaggagcccctggccaccctggtggaccagagccctgagagcctgaagaggaagagcagcctgacccaggaggaggcccctgtgtcctgggagaagaggccccgggtgacagaaaatcggcagcaccagcagcccttccaggtgagcccccagcccttcctgaacagaggagaccgcatccaggtgaggaaggtgccccccctgaagatccctgtgagccgcatcagccccatgcccttccaccccagccaggtgagcccccgggcccgcttccctgtgtccatcaccagccccaacagaactggagcccggaccctggccgacatcaaggccaaggcccagctggtgaaggcccagagagctgctgctgctgctgctgctgctgctgctgctgctgcctctgtgggcggcaccatccctggccctggccctgggggcggccagggccctggagagggcggggagggccagacagcccggggcggcagccctggcagtgacagagtgtctgaaacaggcaagggccccaccctggagctggccggcaccggcagccggggcggcacccgggagctgctgccctgtggccctgagacccagccccagagcgagaccaagaccacccccagccaggcccagccccacagcgtgtctggggcccagctgcagcagaccccacctgtgccccccaccccagctgtgtctggggcctgcacctctgtgcccagccctgcccacatcgagaagctggacaatgagaagctgaaccccacccgggccacagccaccgtggcctctgtgagccacccccagggccccagcagctgccggcaggagaaggcccccagccccaccggcttccagctggaggacatcagcaccagccagcgcttcatgctgggctttgctggccgccgcaccagcaagccagccatggccggccactacctgctgaacatcagcacctacggccggggcagcgagagcttccggaggacccacagcgtgaaccctgaggaccgcttctgcctgagcagccccacagaggccctgaagatgggctacacagactgcaagaatgccactggagagagcagcagcagcaaagaagatgacacagatgaggagagcactggagatgagcaggagagcgtgacagtgaaggaggagccccaggtgtcccagagcgctgggaagggggacaccagcagcggcccccacagccgggagaccctgagcaccagtgactgcctggccagcaagaatgtgaaggccgagatccccctgaatgagcagaccaccctgagcaaagaaaactacctgttcacccggggccagacctttgatgagaagaccctggcccgggacctgatccaggccgcccagaagcagatggcccatgctgtgcggggcaaggccatccgcagcagccctgagctgttcagcagcacagtgctgcccctgcctgctgacagccccacccaccagcccctgctgctgccccccctgcagacccccaagctgtatggcagccccacccagatcggccccagctaccggggcatgatcaacgtgtccaccagcagtgacatggaccacaacagcgctgtgcccggcagccaggtgagcagcaatgtgggagatgtgatgtccttctctgtgacagtgaccaccatcccagccagccaggccatgaaccccagcagccacggccagaccatccctgtgcaggccttctctgaagaaaattccattgagggcacccccagcaagtgctactgccgcctgaaggccatgatcatgtgcaagggctgtggggccttctgccatgatgactgcatcggccccagcaagctgtgtgtgtcctgcctggtggtgaggtag

SEQ ID NO: 197525 - DNA, 4224 bp, Artificial Sequence
  derived and/or modified sequence
atgagccacaaggagatcctgcaggtgatccagcgggagggcctgaaggagatcagcagcggcaccagccccctggcctgcctgaatgccatgctgcacaccaacagcagaggagaggagggcatcttctacaaggtgcccggccgcatgggcgtgtacaccctgaagaaggatgtgcctgatggagtgaaggagctgtctgagggcagcgaggagagcagtgatggccagagcgacagccagagcagcgagaacagcagcagcagcagtgatggcggcagcaacaaggagggcaagaagagccgctggaagaggaaggtgagcagcagcagcccccagagcggctgccccagccccaccatcccagctgggaaggtgatcagccccagccagaagcacagcaagaaggccctgaagcaggccctgaagcagcagcagcagaagaagcagcagcagcagtgccggcccagcatcagcatcagcagcaaccagcacctgagcctgaagacagtgaaggccgccagtgacagcgtgcctgccaagccagccacctgggagggcaagcagagtgatggccagacaggcagcccccagaacagcaacagcagcttcagcagctctgtgaaggtggagaacaccctgctgggcctgggcaagaagagcttccagaggtctgagcggctgcacacccggcagatgaagaggaccaagtgtgccgacattgatgtggagaccccagacagcatcctggtgaacaccaacctgcgggccctgatcaacaagcacaccttctctgtgctgcccggggactgccagcagaggctgctgctgctgctgcctgaggtggaccggcaggtgggcccagatggcctgatgaagctgaatggaagtgccctgaacaatgagttcttcaccagcgctgcccagggctggaaggagcggctgtctgagggggagttcaccccagagatgcaggtgcgcatccggcaggagattgagaaggagaagaaggtggagccctggaaggagcagttctttgagagctactacggccagagcagcggcctgagcctggaggacagcaagaagctgacagccagccccagcgaccccaaggtgaagaagaccccagctgagcagcccaagtccatgcctgtgtctgaggccagcctcatccgcatcgtgcctgtggtgtcccagagcgagtgcaaggaggaggccctgcagatgagcagccctggcaggaaggaggagtgtgagagccagggcgaggtgcagcccaacttcagcaccagcagcgagcccctgctgagcagcgccctgaacacccatgagctgagcagcatcctgcccatcaagtgccccaaggatgaggacctgctggagcagaagcctgtgaccagcgctgagcaggagagcgagaagaaccacctgaccacagccagcaactacaacaagtctgagagccaggagagcctggtgaccagccccagcaagcccaagagccctggggtggagaagcccatcgtgaagcccacagctggggccggcccccaggagaccaacatgaaggagcccctggccaccctggtggaccagagccctgagagcctgaagaggaagagcagcctgacccaggaggaggcccctgtgtcctgggagaagaggccccgggtgacagaaaatcggcagcaccagcagcccttccaggtgagcccccagcccttcctgaacagaggagaccgcatccaggtgaggaaggtgccccccctgaagatccctgtgagccgcatcagccccatgcccttccaccccagccaggtgagcccccgggcccgcttccctgtgtccatcaccagccccaacagaactggagcccggaccctggccgacatcaaggccaaggcccagctggtgaaggcccagagagctgctgctgctgctgctgctgctgctgctgctgctgcctctgtgggcggcaccatccctggccctggccctgggggcggccagggccctggagagggcggggagggccagacagcccggggcggcagccctggcagtgacagagtgtctgaaacaggcaagggccccaccctggagctggccggcaccggcagccggggcggcacccgggagctgctgccctgtggccctgagacccagccccagagcgagaccaagaccacccccagccaggcccagccccacagcgtgtctggggcccagctgcagcagaccccacctgtgccccccaccccagctgtgtctggggcctgcacctctgtgcccagccctgcccacatcgagaagctggacaatgagaagctgaaccccacccgggccacagccaccgtggcctctgtgagccacccccagggccccagcagctgccggcaggagaaggcccccagccccaccggccctgccctgatcagcggggccagccctgtgcactgtgccgcagatggcaccgtggagctgaaggccggccccagcaagaacatccccaaccccagcgccagcagcaagacagatgcctctgtgcctgtggccgtgacccccagccccctgaccagcctgctgaccacagccaccctggagaagctgcctgtgccccaggtgtctgccaccacagccccagctggcagcgccccacccagcagcaccctgcctgctgccagcagcctgaagaccccaggcaccagcctgaacatgaatggccccaccctgcggcccaccagcagcatcccagccaacaaccccctggtgacccagctgctgcagggcaaggatgtgcccatggagcagatcctgcccaagcccctgaccaaggtggagatgaagacagtgcccctgacagccaaggaggagcggggcatgggcgccctgattgccaccaacaccacagagaacagcacccgggaggaggtgaatgaaaggcagagccacccagccacccagcagcagctgggcaagaccctgcagagcaagcagctgccccaggtgccccggcccctgcagctgttcagcgccaaggagctgcgggacagcagcattgacacccaccagtaccacgagggcctgagcaaggccacccaggaccagatcctgcagaccctcatccagagggtgcggcggcagaacctgctgtctgtggtgccccccagccagttcaactttgcccacagcggcttccagctggaggacatcagcaccagccagcgcttcatgctgggctttgctggaagaaggaccagcaagccagccatggccggccactacctgctgaacatcagcacctacggccggggcagcgagagcttccggaggacccacagcgtgaacccagaagatcgcttctgcctgagcagccccacagaggccctgaagatgggctacacagactgcaagaatgccaccggggagagcagcagcagcaaggaggatgacacagatgaggagagcactggagatgagcaggagagcgtgacagtgaaggaggagccccaggtgtcccagagcgctggaaaaggagacaccagcagcggcccccacagccgggagaccctgagcaccagtgactgcctggccagcaagaatgtgaaggccgagatccccctgaatgagcagaccaccctgagcaaggagaactacctgttcacccggggccagacctttgatgagaagaccctggcccgggacctgatccaggccgcccagaagcagatggcccatgctgtgcggggcaaggccatccgcagcagccctgagctgttcagcagcacagtgctgcccctgcctgctgacagccccacccaccagcccctgctgctgccccccctgcagacccccaagctgtatggcagccccacccagatcggccccagctaccggggcatgatcaacgtgtccaccagcagtgacatggaccacaacagcgctgtgcccggcagccaggtgagcagcaatgtgggagatgtgatgtccttctctgtgacagtgaccaccatcccagccagccaggccatgaaccccagcagccacggccagaccatccctgtgcaggccttcagcgaggagaacagcattgagggcacccccagcaagtgctactgccgcctgaaggccatgatcatgtgcaagggctgtggggccttctgccatgatgactgcatcggccccagcaagctgtgtgtgtcctgcctggtggtgaggtag

SEQ ID NO: 197526 - DNA, 4308 bp, Artificial Sequence
  derived and/or modified sequence
atgagggagaagggccgcaggaagaagggccgcacctgggccgaggccgccaagacagtgctggagaagtaccccaacacccccatgagccacaaggagatcctgcaggtgatccagcgggagggcctgaaggagatccgcagcggcaccagccccctggcctgcctgaatgccatgctgcacaccaacagcagaggagaggagggcatcttctacaaggtgcccggccgcatgggcgtgtacaccctgaagaaggatgtgcctgatggagtgaaggagctgtctgagggcagcgaggagagcagtgatggccagagcgacagccagagcagcgagaacagcagcagcagcagtgatggcggcagcaacaaggagggcaagaagagccgctggaagaggaaggtgagcagcagcagcccccagagcggctgccccagccccaccatcccagctgggaaggtgatcagccccagccagaagcacagcaagaaggccctgaagcaggccctgaagcagcagcagcagaagaagcagcagcagcagtgccggcccagcatcagcatcagcagcaaccagcacctgagcctgaagacagtgaaggccgccagtgacagcgtgcctgccaagccagccacctgggagggcaagcagagtgatggccagacaggcagcccccagaacagcaacagcagcttcagcagctctgtgaaggtggagaacaccctgctgggcctgggcaagaagagcttccagaggtctgagcggctgcacacccggcagatgaagaggaccaagtgtgccgacattgatgtggagaccccagacagcatcctggtgaacaccaacctgcgggccctgatcaacaagcacaccttctctgtgctgcccggggactgccagcagaggctgctgctgctgctgcctgaggtggaccggcaggtgggcccagatggcctgatgaagctgaatggaagtgccctgaacaatgagttcttcaccagcgctgcccagggctggaaggagcggctgtctgagggggagttcaccccagagatgcaggtgcgcatccggcaggagattgagaaggagaagaaggtggagccctggaaggagcagttctttgagagctactacggccagagcagcggcctgagcctggaggacagcaagaagctgacagccagccccagcgaccccaaggtgaagaagaccccagctgagcagcccaagtccatgcctgtgtctgaggccagcctcatccgcatcgtgcctgtggtgtcccagagcgagtgcaaggaggaggccctgcagatgagcagccctggcaggaaggaggagtgtgagagccagggcgaggtgcagcccaacttcagcaccagcagcgagcccctgctgagcagcgccctgaacacccatgagctgagcagcatcctgcccatcaagtgccccaaggatgaggacctgctggagcagaagcctgtgaccagcgctgagcaggagagcgagaagaaccacctgaccacagccagcaactacaacaagtctgagagccaggagagcctggtgaccagccccagcaagcccaagagccctggggtggagaagcccatcgtgaagcccacagctggggccggcccccaggagaccaacatgaaggagcccctggccaccctggtggaccagagccctgagagcctgaagaggaagagcagcctgacccaggaggaggcccctgtgtcctgggagaagaggccccgggtgacagaaaatcggcagcaccagcagcccttccaggtgagcccccagcccttcctgaacagaggagaccgcatccaggtgaggaaggtgccccccctgaagatccctgtgagccgcatcagccccatgcccttccaccccagccaggtgagcccccgggcccgcttccctgtgtccatcaccagccccaacagaactggagcccggaccctggccgacatcaaggccaaggcccagctggtgaaggcccagagagctgctgctgctgctgctgctgctgctgctgctgctgcctctgtgggcggcaccatccctggccctggccctgggggcggccagggccctggagagggcggggagggccagacagcccggggcggcagccctggcagtgacagagtgtctgaaacaggcaagggccccaccctggagctggccggcaccggcagccggggcggcacccgggagctgctgccctgtggccctgagacccagccccagagcgagaccaagaccacccccagccaggcccagccccacagcgtgtctggggcccagctgcagcagaccccacctgtgccccccaccccagctgtgtctggggcctgcacctctgtgcccagccctgcccacatcgagaagctggacaatgagaagctgaaccccacccgggccacagccaccgtggcctctgtgagccacccccagggccccagcagctgccggcaggagaaggcccccagccccaccggccctgccctgatcagcggggccagccctgtgcactgtgccgcagatggcaccgtggagctgaaggccggccccagcaagaacatccccaaccccagcgccagcagcaagacagatgcctctgtgcctgtggccgtgacccccagccccctgaccagcctgctgaccacagccaccctggagaagctgcctgtgccccaggtgtctgccaccacagccccagctggcagcgccccacccagcagcaccctgcctgctgccagcagcctgaagaccccaggcaccagcctgaacatgaatggccccaccctgcggcccaccagcagcatcccagccaacaaccccctggtgacccagctgctgcagggcaaggatgtgcccatggagcagatcctgcccaagcccctgaccaaggtggagatgaagacagtgcccctgacagccaaggaggagcggggcatgggcgccctgattgccaccaacaccacagagaacagcacccgggaggaggtgaatgaaaggcagagccacccagccacccagcagcagctgggcaagaccctgcagagcaagcagctgccccaggtgccccggcccctgcagctgttcagcgccaaggagctgcgggacagcagcattgacacccaccagtaccacgagggcctgagcaaggccacccaggaccagatcctgcagaccctcatccagagggtgcggcggcagaacctgctgtctgtggtgccccccagccagttcaactttgcccacagcggcttccagctggaggacatcagcaccagccagcgcttcatgctgggctttgctggaagaaggaccagcaagccagccatggccggccactacctgctgaacatcagcacctacggccggggcagcgagagcttccggaggacccacagcgtgaacccagaagatcgcttctgcctgagcagccccacagaggccctgaagatgggctacacagactgcaagaatgccaccggggagagcagcagcagcaaggaggatgacacagatgaggagagcactggagatgagcaggagagcgtgacagtgaaggaggagccccaggtgtcccagagcgctggaaaaggagacaccagcagcggcccccacagccgggagaccctgagcaccagtgactgcctggccagcaagaatgtgaaggccgagatccccctgaatgagcagaccaccctgagcaaggagaactacctgttcacccggggccagacctttgatgagaagaccctggcccgggacctgatccaggccgcccagaagcagatggcccatgctgtgcggggcaaggccatccgcagcagccctgagctgttcagcagcacagtgctgcccctgcctgctgacagccccacccaccagcccctgctgctgccccccctgcagacccccaagctgtatggcagccccacccagatcggccccagctaccggggcatgatcaacgtgtccaccagcagtgacatggaccacaacagcgctgtgcccggcagccaggtgagcagcaatgtgggagatgtgatgtccttctctgtgacagtgaccaccatcccagccagccaggccatgaaccccagcagccacggccagaccatccctgtgcaggccttcagcgaggagaacagcattgagggcacccccagcaagtgctactgccgcctgaaggccatgatcatgtgcaagggctgtggggccttctgccatgatgactgcatcggccccagcaagctgtgtgtgtcctgcctggtggtgaggtag

SEQ ID NO: 197527 - DNA, 2757 bp, Artificial Sequence
  derived and/or modified sequence
atgaagcggaccaagtgcgccgacatcgacgtggagacccccgactccatactcgttaacacaaatctgagagcgttaattaacaaacacaccttcagcgtgttacctggagactgtcaacagagactgctgttactccttccagaagttgacaggcaggtgggcccggatgggctcatgaaattgaacggaagcgccctgaacaatgaatttttcacatctgctgcgcaaggttggaaggagcggctgtcagaaggggagtttacccctgagatgcaggtgcgcattagacaggaaattgagaaggagaagaaagtggagccctggaaagaacagtttttcgagtcctactatggtcagagctctggcctgagtctcgaagatagtaagaaattaacagcttctcctagtgatcccaaagtgaaaaagaccccggccgagcagccaaagtctatgccagtttctgaggcgagcctgatcaggattgttccggtggtgagccagtccgaatgcaaggaggaagcattacaaatgagcagccctggacggaaggaagagtgcgaatcccagggagaagtccagccaaatttcagcacctccagtgagccactcctgtctagcgccctgaatacccatgaactcagttctattctcccgataaagtgtccaaaggacgaggatctcctcgaacaaaaaccagtgacctctgcagagcaggaatccgagaaaaaccaccttaccaccgctagcaactacaataaatctgaatctcaggagagtcttgtcacttcacccagcaagccaaagagccctggggtagaaaaacccatagtcaaaccaacagcaggtgccggaccccaggagactaatatgaaagaaccactggccactctggttgaccagtcacctgagagcctgaaaagaaaatcatcgttgacgcaagaagaggccccagtttcctgggagaagcgacccagggtgacagaaaacaggcagcaccagcaaccttttcaggtttccccccagccgttcctgaaccgtggggatcgaattcaggtgcgcaaggtgcccccgctgaagatccccgtgtctcggattagccctatgcccttccaccctagtcaggttagtccgagagcccggttccccgtgtccatcacgagtcctaacaggacaggagccagaactcttgctgacattaaggctaaggcacaattggtgaaagcacagagggctgctgcagcagcggccgcagctgctgccgcagctgcaagcgtaggtgggactatccccggcccggggcccggaggaggacaagggcctggcgaaggcggcgaaggccagacggcacgggggggaagcccgggatccgaccgggtgtcagagacaggcaaaggacccaccctggaattggctggaacgggaagcagaggtggcaccagagagctgctcccctgtggccccgagactcagcctcagtcagagaccaagacaactccatctcaagctcagcctcacagcgtctctggggctcagcttcagcaaacccctcccgtgccgcctacacccgccgtttcgggagcgtgcaccagtgtgccctcaccagcccatattgagaagctcgataacgagaagctgaaccctacccgtgctaccgcgactgtggccagtgtgtctcacccccaggggcctagcagctgcagacaggaaaaggctcccagcccgacgggctttcagttagaggatattagcacatctcaacggttcatgctggggtttgccggccggcgcacgagcaagcctgctatggccggacattaccttctgaatatcagcacttatggccgcggaagtgagtcatttaggcggactcatagcgtgaaccccgaggacaggttctgtttgagctccccgaccgaggctctgaagatgggatataccgactgtaagaacgccactggcgagagcagctcatccaaggaggatgacaccgatgaagaaagcacaggggacgagcaggagagtgtaactgtgaaggaggagccacaggtttctcagagcgcagggaagggggatacctcaagtggacctcactcccgcgaaacccttagcacttctgactgccttgcctcaaagaatgttaaggccgaaatccctctgaatgagcaaactacgcttagtaaggaaaattacttatttactagaggacagacatttgacgagaagacgctggctcgtgatctgatccaggccgcccagaagcagatggctcatgccgtgcggggtaaggccatccgctcttccccggagttgttttccagcacagtgctcccgctgccagcggactccccaacacaccagccattactgctgcctccattgcagacacccaaattgtacggtagtcccacccagattggaccaagctaccgggggatgataaatgtctccacatcctcggacatggatcacaatagcgcagttcccggctcgcaggtgtcttcaaacgtgggagacgtgatgtctttctcagttaccgtgacgactataccggcaagccaggccatgaatccctcttcacatggacaaacaattcccgtacaggccttcagcgaagagaatagtatcgaaggcacaccaagcaagtgctactgcaggttgaaggctatgatcatgtgtaagggctgcggtgccttttgtcacgacgattgcatcgggccgagtaagctgtgcgtttcatgcctggtcgtcagatag

SEQ ID NO: 197528 - DNA, 4224 bp, Artificial Sequence
  derived and/or modified sequence
atgagccacaaggagatcctgcaggtgatccagcgggagggcctgaaagagataagcagtggaacttcgcccctggcttgtctcaatgcgatgctgcacactaacagtagaggagaggagggaatcttttataaggtgcccggcagaatgggagtctacacgctgaagaaggatgtccccgacggggtgaaagagttgtccgaaggcagcgaggagagcagcgacggccagagcgactcgcagagcagcgaaaattcaagttctagtagtgacggagggtccaataaggagggtaaaaagtcccggtggaagcggaaagtgagctcctcctccccccagagcgggtgtcctagtcccacaatcccggccggaaaagttatctctcccagccagaaacattcgaagaaggctcttaagcaggcgttgaagcagcagcagcaaaagaagcagcagcagcaatgcagaccctccattagcatttcatccaaccagcatctttccctcaaaaccgtgaaagcagccagtgattccgtccctgccaagccagctacttgggagggaaagcagtccgacggccagactggctccccgcagaatagcaactcgtctttctcttcaagtgtgaaggttgaaaatacattacttggcctcggaaaaaagtccttccaacgttctgaacggttgcacactagacaaatgaagcgcacaaaatgtgccgatattgatgtggagacccccgactcgatccttgtaaatacgaacctacgcgcactcattaacaagcacacgttctctgtgctccctggagactgccagcagcgcttgctcctgctgctgcctgaggtcgaccggcaggtgggaccggatgggttgatgaagctcaacggaagcgctcttaataatgagttcttcactagcgcggcgcaaggctggaaggaacgcctaagtgagggtgaatttactcctgagatgcaagtgcgaatccggcaggagatcgagaaagagaaaaaagtggagccatggaaggagcaattttttgagagttattatggtcagagcagcgggctgtctctggaagacagtaagaagcttactgcttccccctctgacccaaaggtaaagaaaactccagctgaacagcccaagagcatgcctgtgtctgaagcgtcgctgatccgcatcgtgccagtggtgagccagtctgaatgcaaggaggaggcacttcagatgagcagcccaggacgtaaagaagagtgcgaatcccagggtgaggtccagcccaacttctcgacgtcctccgagccccttctctcatcagctctcaacactcatgaactctcttctatccttccaattaaatgcccgaaggatgaagatcttcttgaacaaaagccagtgacctccgccgaacaagagagcgagaaaaatcacttaacaaccgctagcaactataataagtcagagtcgcaagagtccctggtgacaagtccaagcaaacccaagtctcccggggttgagaagcccattgtcaaacccactgcaggcgcaggcccccaggagacgaatatgaaagagcccttggccaccttggttgaccagtcgcctgaatccctcaagcgtaaatcatccctgacccaggaggaagcccccgtgagttgggagaaacgacctagagtgactgaaaatcggcagcaccagcagccattccaggtcagcccacagccattcttgaatcggggggatagaattcaggtccggaaggttcctcccctgaaaatccccgtgtctcgaataagcccaatgccctttcatccctctcaggtgagccccagagcacgattcccagtgtcgattacttctcccaatcggactggcgcaaggactctcgccgatataaaggctaaagcgcagttagtgaaagcacagagggcagcggccgccgcagccgccgccgcggcagcagctgccagtgttggcgggaccatacctggcccaggacctggaggaggccagggccctggcgaaggcggggaaggccaaactgcccggggtggtagtcccggcagcgaccgggtcagcgagaccgggaagggcccaacgctggaactggctggcaccggatctagagggggaacgcgtgagctactgccctgtggtcccgagacgcaaccacagagcgagacaaagactaccccttcacaggctcagccacactccgtgtcgggtgcacagctccaacaaactcctcccgtcccacccactcccgctgtcagtggtgcttgcacctcagtcccctctcccgcccatatagagaaattggacaatgagaagctgaatccaacacgggccactgcgacagtggcaagcgtgtcccatcctcagggaccctcatcctgtcggcaagaaaaagccccttccccgacaggcccagcactcatttctggcgcctccccggtacactgcgccgctgacgggaccgtcgagctcaaagctggccccagcaaaaatatccccaaccctagtgcctctagtaagacggacgcgagcgtccccgtggccgttacgccgtcaccactcacctctcttctgaccaccgccacactcgagaagctgcccgtgccgcaggtgagcgcaactactgcacctgccggctcagcccctcccagctcgactctacctgcagcttcgtccctgaaaacacctgggacttcactgaacatgaacggccccactctgagaccaacttcttcaatccctgcaaacaatcctcttgttacgcagctgctgcagggcaaggacgtgccaatggagcagattttgccaaaaccgctgactaaagtcgagatgaaaactgtcccactcaccgccaaagaggagcggggcatgggcgccctgatcgcaactaacactacagaaaacagtacccgagaagaggtgaatgagaggcagagccaccctgccacacagcagcaacttgggaagacactccagagcaaacagcttccccaggttcctaggcctctgcagctattctccgccaaagaactgagagactcgagcatagacacgcaccagtaccacgagggtttaagtaaagccacgcaggatcagatcttgcagactctcatccagagggtgagaaggcaaaatttactaagcgtggtgccccctagccagtttaactttgctcattcaggtttccaactcgaggatatctcgaccagccaacgtttcatgctgggctttgccggccgccggaccagtaagcccgcaatggctggacactacttgttaaacatctctacctatggtcggggctctgagtcatttcgaagaactcacagcgtcaaccctgaagatagattctgtctgtcatcacccacagaggcccttaagatggggtacaccgattgtaagaacgctactggagaatcttcaagcagtaaggaggacgatactgatgaagaatcaactggggatgagcaagagtccgtcactgtgaaagaagaaccacaggtttcgcagtcggctggaaagggtgatacctcgtctggtccccactcccgggaaactctctccacaagtgactgtttggcgtcaaaaaatgtaaaagctgagattcctctgaatgagcaaacgactctgtctaaggagaactatttgttcacccgaggccagacattcgacgaaaagaccctggcccgcgatcttattcaggccgcccagaagcaaatggcgcacgcggtacgagggaaagcaattcggagcagtcctgagttgttcagctccacagttctgccgctgccggctgatagtccgacacaccagccactgttgcttccacccttgcaaacaccgaagctctacggcagccccacacagatcggcccatcttatagaggcatgataaatgtctctacttcctctgatatggaccataatagcgccgttcccggcagccaggtatcctcgaatgttggggatgtcatgtctttctccgtgactgtgaccacaatcccggcttctcaagcaatgaacccctcatctcatggccagacaattcctgttcaagcctttagtgaagagaacagcatagagggtacaccctcaaaatgctactgccggctcaaggctatgattatgtgcaagggatgtggggctttttgtcacgatgactgcattggaccctccaaactatgtgtgtcttgcctcgttgtgcggtag

SEQ ID NO: 197529 - DNA, 2757 bp, Artificial Sequence
  derived and/or modified sequence
atgaagcggaccaagtgcgccgacatcgacgtggagacccccgactcaatcctcgttaacaccaatctacgagctctgatcaataagcatacctttagcgtactccccggtgactgtcagcagaggctgctgctcttactgccagaggtggataggcaagttgggcccgatgggttaatgaaattgaacggctccgccctaaataacgaattcttcaccagcgcggctcaaggctggaaggaacggctttccgaaggggagttcaccccagagatgcaggtaagaataagacaagagattgaaaaagaaaagaaggtcgaaccctggaaagaacaattttttgaaagttattatggccagagttctggcctgtccctggaagacagcaagaagctgaccgcctctcctagcgatcccaaagtcaagaagaccccagcagagcaacctaagtcaatgcccgtctccgaggctagcctgatccgtatcgtgccggtcgtctcccaaagcgagtgtaaggaagaagccttgcagatgtctagtcctggcagaaaggaagagtgcgaaagccagggtgaggtgcagcctaacttttcaactagcagcgaaccgctgctctcatctgcgctcaatacacacgaactctcaagcattctgccaattaaatgcccaaaggatgaggacttactggaacagaagcctgtgacttccgccgaacaggaatcagagaagaaccacttaaccacggccagcaattacaacaaatctgaatcacaggaaagcttggtcacttccccttccaagcctaagagccccggtgtggaaaagccgatcgttaagcccactgcaggagccgggccccaggagactaatatgaaagaacctctggccaccctcgtcgatcaatcccccgagagcctgaagcgcaagtcctcgctgactcaagaggaagccccagtatcctgggagaagcgccctcgagtgaccgagaatcgacaacaccagcaaccttttcaagtgtcccctcagccatttctgaatagaggcgacaggattcaggtcagaaaggtccccccattaaagattcccgtgagtaggatctcacctatgccctttcatcctagccaagtgtccccacgagcgcgtttcccagtcagtataacctcccctaacaggaccggggccaggaccctcgctgatatcaaagccaaagctcagctggtaaaagctcagcgcgctgctgctgcagctgctgcagctgctgctgccgccgccagcgtgggaggaacaattcctgggcccggacccggtggcggccaaggccccggcgaggggggtgagggtcagactgctcgcggggggtcccccggctcggatcgagtctcggaaacgggcaaaggacccacactggaattggccggcaccgggtcacgcggaggaacaagagaacttctgccatgcggacccgaaactcagccacaatcagaaactaagaccactccttctcaggcacagccccactcagtatcaggagcccagctccaacagaccccgccggtgccgcctacccccgccgtctccggggcttgtacttccgttcctagcccagcccacatagagaaacttgacaacgagaagcttaatccaaccagggcaacagcaaccgttgcatcggtcagtcacccgcagggacccagctcttgtcgccaggagaaggcccctagtcccacaggattccaacttgaagatatcagcacttcacaaagatttatgctcgggttcgctggacgcagaacctctaagccggctatggcaggacactacctgctcaatatcagcacttacggcagggggtcagagagttttcgccgtacacactccgtgaatccagaggatagattctgcctttcgtcccccacggaggcccttaaaatgggttacaccgattgcaaaaacgctaccggagagagctcatcaagtaaagaagacgacactgatgaggagtcaaccggcgacgagcaggagagtgtgacagtgaaggaagagccacaagtctctcagtctgcagggaaaggggatacaagctctggcccccacagtagagaaacattatcaacaagtgactgcctcgcctccaaaaatgttaaagccgagatccccctgaacgaacaaacgaccctgtctaaagaaaactatctcttcactcgcggccagacctttgatgagaaaaccctcgcaagggatctgatccaagctgcgcagaaacagatggctcacgcagtgagagggaaggcaatacgtagctcacccgaactattttcctccaccgtgctccctctcccggcggattcccccacacatcagccactgctcttgcctcccctgcagaccccaaagctctacgggtcccctacgcagatcggcccatcttatcggggcatgataaatgtcagcacatctagtgacatggatcacaactctgctgtccctggttctcaggtaagctcaaatgtgggcgacgtgatgtccttcagcgtaacagtcacgacaatcccggctagtcaggccatgaacccaagtagccacggacagactatccccgtgcaagcatttagcgaagaaaattcaatcgagggcacccctagtaaatgttattgcagactgaaggccatgatcatgtgcaaggggtgtggagctttctgccacgacgactgcatcggacccagtaagctgtgtgtgtcttgcctcgtggtaagatag

SEQ ID NO: 197530 - DNA, 4308 bp, Artificial Sequence
  derived and/or modified sequence
atgcgggagaagggccggcggaagaagggccggacctgggccgaggcagccaaaactgtcttggagaagtatccgaatactcccatgagccataaagaaattctgcaggtgatccagcgagaaggactgaaggaaatccggtcaggcaccagcccactggcctgcctgaacgctatgttgcataccaatagcagaggagaggagggaatattttacaaggtaccgggccggatgggtgtctatacccttaaaaaagatgtgcccgatggagttaaagagctctcagagggaagtgaggagtccagcgacgggcagtccgacagccaaagctccgagaattcctcctctagctcagacggcggttccaacaaggaggggaagaagagccgctggaagcggaaagtgtcatcatcaagcccccagtcaggctgtccaagtcctaccattcctgcaggaaaggttatcagcccgagtcagaaacacagtaagaaagcccttaaacaggctctaaaacaacaacagcaaaaaaagcagcagcagcagtgcaggccatccatatctatctccagcaatcagcatcttagcttaaaaaccgttaaagccgcaagcgattccgtgcctgccaagcccgccacttgggagggaaagcagtctgacgggcagactggctccccccagaattctaattctagcttttcttcctccgttaaggtcgagaacactctgctgggactggggaaaaaatcctttcaacgctccgaaagactgcacacgagacagatgaagcgcactaaatgcgccgatatcgacgtggagacgcctgacagtatcctggtcaacacaaacctccgggccttaatcaataaacatacctttagcgttctccctggagactgtcagcaaagactcctgctcctgctgccggaagtggataggcaggtggggccagatggattgatgaaattgaatggatctgctctgaacaacgagtttttcacctctgccgctcagggctggaaagaacgactctcagagggagagtttactccagaaatgcaggtgagaattcgtcaagagattgagaaggaaaaaaaggtggaaccatggaaggagcagtttttcgaaagttactacggccagtcaagcggacttagtctagaagattccaaaaagctcaccgcctctcctagcgaccctaaagttaaaaaaaccccggctgagcaaccaaagagcatgcctgtctccgaggcttcgctcataagaatcgtgccagtggtcagccaatcagagtgcaaggaggaagcactacagatgtcatccccaggtcggaaggaggagtgtgaatcacaaggcgaagttcagcctaatttctccacgtcaagcgagcccctcctgagtagtgccctgaatactcacgagctttcctccattttacctatcaagtgtcctaaagatgaggatttactggagcagaagcctgtgacatcggccgaacaggaaagcgagaagaaccacctcacgacggcaagtaattacaacaaatcagagtcacaggaatccctcgttacctccccaagcaagccaaagagtccaggcgttgagaagcccattgtgaaaccaaccgcgggagccggcccccaggaaactaatatgaaggagcctttagccacacttgtggaccagagtcctgagtcactgaagcgcaagtcatctctgactcaagaggaggccccggtcagttgggaaaagaggcctagagtgaccgagaataggcaacatcagcagcctttccaggtgagcccccagccatttttaaatcgaggcgacagaatccaggtgcgcaaggttccccccctaaagattccagtgtcccggatctctcctatgccctttcacccaagccaggtttctccaagagccagattcccagtatctattacttctccaaaccgaactggtgcccggactcttgccgacatcaaagctaaagcccaactagtcaaggcgcagcgcgcagccgctgccgctgctgccgctgcagctgccgcggcttccgtcgggggcaccataccaggcccaggtcccggcggcggccagggacctggcgagggtggcgagggacaaaccgccaggggaggtagtccaggttccgatcgggttagtgagaccggcaaggggcctacactggagctagcagggacaggtagcagaggaggtacacgtgagctgctgccatgtggccccgaaacccaaccacaaagtgagacaaaaacaacaccttctcaagcacagcctcactccgtgagcggcgcccagctccagcagaccccccccgtgccaccaactcccgccgttagcggggcttgcacttctgtgccgagccccgcccacatcgaaaagttggacaatgaaaagctaaatcctactagagctactgccaccgtggccagtgtttcgcatccgcaggggccctccagttgccgccaggaaaaggctccatctcccaccggtccagctctcatttcaggtgcatctccagtgcattgcgcggcagatggcacggtggagttgaaggctgggccaagtaaaaacatccccaacccttccgcttcaagcaagacagacgcatctgtacctgttgcagtgactccatctcccttgaccagcctgttaacgaccgcaaccctggagaagctgccagtccctcaggtgagtgcaacaacagccccagccgggagtgccccacctagctccacacttcctgcggcgagcagcttgaaaacgcccggtacctcattaaacatgaacggcccaaccctgcgacccacttcatctattcctgcaaacaatccactggtgacacagctgcttcaagggaaagacgtgccaatggagcagattctacctaaacccttgaccaaagtcgaaatgaaaaccgtcccactgaccgcaaaggaggagagagggatgggggctcttatagctaccaataccaccgaaaacagcacccgtgaggaagtcaatgagcggcagtctcatcccgcaacacaacagcagctgggtaagactcttcagtcaaagcagctgccccaggttccccgccccctgcagttgttttctgccaaggagctgcgagatagcagtatcgatacacatcaataccacgaggggctcagcaaggcaactcaggaccagatattgcaaacactgattcaaagggtccgcagacagaacctgctctcagtggtgccaccctcccagttcaatttcgcccactctggcttccagctggaggatatatcgacgagccagcgattcatgctgggctttgcaggccgacgaacctccaagccggccatggccggccactaccttcttaacataagtacttatgggcggggctcagagtccttcagacggacgcacagtgtcaatcctgaagatcggttttgtctatcctctcccactgaagcactgaagatgggatataccgactgcaagaatgccactggagaatcttcatctagtaaagaggacgacacggacgaggagagtaccggggacgaacaggagagcgtgacagtcaaggaagaaccccaagtgtctcagagtgcgggaaaaggtgacacttcttcaggcccacacagtagagagacattgtcaacgagcgactgcctcgccagtaagaatgtcaaggctgaaattccacttaacgagcagacgacacttagtaaggagaattacctgtttacaagagggcaaacatttgacgagaagacattagctcgggatctcatccaggccgcccaaaaacagatggctcacgcagtgaggggaaaagctattcgaagctcccccgagctcttttctagcacagttctgcccctgcctgcagattctccgacccatcagccgcttctccttcctcccctgcaaacccccaaattgtatggatccccgactcagatcggtccttcttatcgaggcatgataaatgtgtcgactagtagcgatatggaccataatagcgcggtcccaggaagccaggtctcttctaatgtgggggacgtgatgtccttcagtgtcactgttaccaccattcctgctagccaggcaatgaaccccagctcgcacggccaaacaatccccgtgcaggcatttagcgaggagaattccatcgaagggacaccgagtaaatgttactgtcggttaaaggcgatgatcatgtgcaagggttgcggggctttctgccacgatgattgcatcggaccgtccaagctctgcgtctcttgtctggtggtccggtag

SEQ ID NO: 197531 - DNA, 2757 bp, Artificial Sequence
  derived and/or modified sequence
atgaagagaaccaaatgcgccgatattgacgtggagacccctgactccatccttgtgaataccaaccttcgcgctctcatcaacaagcatacatttagcgttctgcctggcgactgccagcaaagactgttgctgctgcttcctgaagtagatagacaggtgggtcccgacgggcttatgaagctcaacggctctgcattaaacaatgagttttttacttcggcagcacaggggtggaaagaaagactatccgaaggtgagtttacacccgagatgcaggtgcggataaggcaggaaattgagaaggagaaaaaggtcgaaccatggaaagagcagtttttcgagtcttactatggccagtccagcggcctgtccctagaggactctaagaaactgactgcctcaccttctgatcccaaagttaagaaaacgcctgccgagcagcccaaaagtatgcctgtatctgaggccagcctgatcaggatagtgcccgtggtgagccaaagcgaatgcaaggaagaggcccttcagatgtcatcacccggacgcaaggaagaatgcgagagtcagggcgaggtacaacccaactttagtacctcatcagagcctcttttatccagcgcccttaacacgcacgaactgtcttcaatcctgccgatcaaatgcccaaaagatgaagacctacttgaacaaaagcctgtgactagcgcagagcaggaaagtgagaagaaccatcttaccaccgcatccaattacaacaagagtgaatctcaggaatcgcttgtgacctcaccatccaagcctaagagccccggagttgagaagcccattgtgaagccaactgcaggcgcagggccacaagagaccaatatgaaagagccccttgctacacttgtggaccagtcccccgagtccctcaagcgtaaaagtagcttgacacaggaggaggcacctgtctcttgggagaaacggccaagagtcacagaaaaccggcagcatcagcaaccttttcaggtttctccacagccttttctcaatcgcggagacagaattcaggtccggaaagttcctcccttaaaaataccggtctctcggatctctccaatgcctttccacccctcacaggtgtcccctagggctcgctttcccgtctctattaccagcccaaatcgaaccggagcccgtaccctcgcggatattaaggccaaggcccagctggtaaaagcccagcgggcagcggcagccgctgcagccgcagctgcagctgcagcgagcgtggggggtacaattccaggacccggtcctggaggcggacaggggcctggcgagggaggcgaagggcagacagccagaggtggttccccaggttctgatagggtatcagaaactggcaagggacctaccctagagctggccggaactggctctcgcggaggcactcgggagctattaccctgtgggccagagacacagccacaaagtgagacaaagaccacgccaagtcaagctcagccccactcagtgagcggtgctcagctccagcagacaccgcctgtgccgcctacaccggcagttagcggggcttgcaccagcgtgccctctccagcccacatcgagaagttagacaacgagaaactgaatccaaccagagctaccgctaccgttgcgagtgtgtcgcatcctcagggaccatcgagctgcaggcaggagaaggctcctagtccaacgggatttcagctggaggatatttccacaagtcaaaggttcatgctcggcttcgccggaagaaggacctctaagcctgcgatggctggtcactatttgctgaacattagtacttacgggcgtggctcagagtcctttagaagaacccattcagtgaacccagaggaccgcttttgcctgtctagtccaaccgaggcgctaaagatgggatatacagactgtaagaatgcgactggtgaatccagtagtagcaaggaggacgataccgacgaagagtcaacgggggatgagcaggagtccgttaccgtaaaggaagaaccacaggtgtcacagtccgcaggaaagggcgacacctcatccgggcctcactcaagggagaccttaagcacaagcgactgtctagcgtccaagaatgtcaaagccgagattccactgaatgaacagacgaccttatcgaaggaaaattatctattcacacggggacagactttcgacgagaaaactctcgcaagggacctaattcaggcagcccagaaacagatggcccacgccgtgcggggaaaggccattcgcagctctcctgagctgtttagttcaacggtcctccctctgccggctgatagccccactcaccaaccgttgctgctgccccctttgcagacccctaagctgtacggatcgccaactcagatcggcccatcatacaggggtatgatcaatgtgtccacctcatccgacatggaccataattctgccgtgcctggatcgcaggtgagttctaatgttggtgacgtgatgtctttcagcgtcacagttactacgattcctgcaagtcaggctatgaacccctcctcccacggtcaaacgatcccagtgcaggcctttagcgaggaaaacagtatcgaaggtacccccagcaagtgttactgtcgcctaaaagccatgattatgtgtaaagggtgtggggctttctgtcatgatgattgtataggtccctctaagctctgtgtgtcctgtctggtggtccggtag

SEQ ID NO: 197532 - DNA, 4224 bp, Artificial Sequence
  derived and/or modified sequence
atgagccacaaggaaatcctacaagtgatccagagggaaggactgaaagaaatatcaagcggcacctctccgcttgcttgtctaaacgccatgctccatacaaattcccgcggtgaagaaggtatattctacaaggttcctggacgcatgggtgtgtataccctgaaaaaagatgtgcctgatggagtaaaagagctcagtgaaggtagcgaagaatcctcagatggccagagtgattcccagtcctctgaaaactcgtcttccagtagtgacggcggatctaacaaagagggcaagaaaagccggtggaaacgcaaagtgtctagtagcagcccacagtcggggtgcccctctcccaccattcctgcaggtaaggtgatttcaccaagccagaagcacagcaagaaagctctcaaacaagcactgaagcagcagcagcaaaagaaacagcagcagcagtgccggccatccatatccattagttcaaatcaacatctatcattaaagacagtgaaagcagcctcggattccgtgccagcgaagcccgcaacatgggaagggaagcagagtgatggccaaactggatctccacaaaacagcaactccagcttttcctcctccgttaaggtggaaaatactctgttgggcctcggcaaaaagtcattccagaggagcgagcgattgcacacgcgacagatgaaaaggacaaagtgcgccgacattgatgttgagacccctgactctatcctggtgaacacaaacctaagagctctgatcaataagcacacattttccgtgctccctggagattgccagcaacgtctcctgctgttactgcctgaagtcgaccgacaagtgggtccagacggcctgatgaaactgaacggatcagctctaaataacgaattcttcaccagtgctgcccaaggatggaaggaaagactgtccgagggtgagtttacccccgaaatgcaagttcgcatcagacaggagatcgagaaagagaaaaaggtggagccttggaaggagcagttcttcgagagctactatgggcagtccagcggtttgagcctggaggattcaaaaaagcttacggcatcaccttccgaccccaaggttaaaaagactcccgcagaacagcccaagagcatgcccgtgagtgaggccagtctgattagaatcgtccctgtcgtttcacagagcgagtgtaaagaggaagctcttcaaatgtcaagccctgggagaaaagaagagtgtgagtctcagggcgaggtccagccaaactttagtacctcgagcgagcccttgctaagttccgccctcaatactcatgaactgagctccatccttcccattaagtgcccgaaggatgaggatctgctggagcagaagcctgtgaccagcgctgagcaggagagtgagaagaaccatctgaccaccgctagtaactataacaaaagcgaatcacaggagtctctggttacctcaccatcaaaaccaaagtctcccggagtggaaaagcctatcgtgaaacctactgctggagctggcccacaagaaaccaatatgaaagaacccctcgcgacactggtagatcagtcacccgaatccctgaagaggaagagcagtttgacacaagaagaggctcccgtcagctgggaaaaaagacccagagtcacagaaaaccggcaacatcaacaacccttccaggtctcaccccagccattcttgaaccgcggagatcgaattcaagtgagaaaggtgcccccattaaaaatccctgtttcaaggatttcccccatgccattccacccaagccaggtgtctccaagagcacggtttccagtgtcaattacctccccgaacagaacgggtgcccgtaccctggctgatattaaggcaaaggctcagctggtgaaggcccaaagagctgcagccgcagccgcagctgccgctgctgccgctgcatcagtcgggggaactattcccggtcctggtccaggagggggacaggggcctggagagggtggtgaaggccagaccgccaggggcggatcacctggttccgaccgcgtctcggagactggaaaggggcctactcttgagctggcaggtaccggtagcagggggggaacccgggagctcctgccatgcgggcctgaaacgcagcctcaatccgagaccaagaccacgccaagtcaggcccagccccatagtgtgagtggagcccagctccagcagacaccccctgtgcccccaacacccgctgtctcaggcgcttgtacatccgtcccgtcccccgctcatatcgaaaaactggacaacgagaagctgaatccgacacgcgctactgctacagttgcgtccgtgtctcacccccaaggcccaagtagctgccggcaagagaaagctcccagccccaccggcccagcactgatcagcggggcatcacccgtgcattgtgctgctgacggcacagtggagctcaaggccggacctagtaagaatatccccaacccctccgcaagcagcaagacagatgcaagtgtgcctgtcgccgtaacacctagcccactgacttctctcctcacaaccgctaccttggaaaagctgccggtgccccaggtatccgctactaccgctcctgcgggaagcgctccacctagctcaactcttcccgctgctagctcgctgaaaacgcctgggacgtctctgaacatgaatggcccaactttaaggccaaccagctctattccagccaacaatccactcgtcacgcagctgctgcagggcaaagatgtccccatggagcaaatcctgcccaaacctctgacaaaggtagagatgaagacagttccgctcactgcaaaggaggagagaggtatgggtgcactgattgcaaccaatactaccgaaaacagtaccagggaggaggtcaatgaacggcagtctcatcccgctactcaacagcagctaggcaagactttgcagtcaaagcagctgccacaagttcccaggcccctgcagctgttcagcgcgaaggagctgagggattctagtattgatacccaccaataccacgagggcctcagtaaggctacccaggatcagatcctccagactttaatccagagagtccggaggcagaacctgctgtccgtagtgccaccaagccaatttaatttcgcacatagtggcttccagctggaggacataagcactagccagcgatttatgctgggcttcgccggacggaggacttctaagcccgcaatggcaggccactacttgttaaatatctcaacttacgggagaggaagtgagtccttccgcagaactcacagtgtcaatcccgaggaccgcttttgtttgtcatctcctacagaggctctcaagatgggttacactgattgtaagaacgctaccggcgagtctagctcttccaaggaggacgacaccgatgaagaatcaacaggtgatgagcaagagagcgttacagtgaaggaagaacctcaagtttcacaaagcgccggaaagggggacacaagcagcgggccacactcgcgcgagacgcttagcacaagtgactgtctggcatccaaaaacgttaaagcagagatcccccttaacgaacagactactctgagcaaggagaattacctatttaccagggggcagacattcgacgaaaagactctcgcaagggatttgatccaagccgcacaaaagcaaatggcgcatgcagtacgtggcaaggcaatccgatcgagcccagagttattctcatcaactgtcctgcctctgcctgcagatagccccacccatcaaccactgctgctcccaccccttcagaccccaaagctgtatgggtcccctactcagattggcccatcgtaccggggtatgattaacgtgtccacctctagcgatatggatcacaactccgctgtgcctggatcacaggtgagcagcaatgtgggcgacgtaatgtccttcagtgtgactgtgacaaccatacccgcttcccaggcaatgaatccatctagtcatggccagaccattcccgtgcaggccttctctgaggagaactctattgaagggacgccatccaagtgttattgccgcctgaaagccatgattatgtgtaaggggtgtggggcattttgccacgacgactgcatcggcccatcaaagttgtgtgttagttgtctggtggtgcggtag

SEQ ID NO: 197533 - DNA, 2757 bp, Artificial Sequence
  derived and/or modified sequence
atgaagcgtacaaaatgcgccgatatcgatgttgagaccccggatagcatcttggtcaatacaaatttgcgcgcactgatcaataagcatactttctctgttttgcctggggactgtcagcaacgcctgctgctcctgctacccgaagtcgacagacaggtggggcctgacgggcttatgaagctgaacgggagcgcccttaacaacgaattttttaccagcgctgcacagggctggaaagaacggctatcagagggggagttcacccctgagatgcaagtcaggattcggcaggagattgagaaagagaagaaggtggagccatggaaagagcaatttttcgaatcttactacgggcagtctagcgggctgtcactggaagattcaaagaaactgacggccagcccaagcgatccaaaggtaaaaaagacccccgctgaacagcccaaatctatgccagtgtcggaggccagcctgattagaattgtccctgtggtgagccaatctgagtgcaaagaggaagcacttcaaatgtctagcccgggaagaaaagaggagtgcgaaagtcagggggaggtgcagccgaactttagtactagtagcgagcctctgctgtcatcagcgctcaatacacacgagctttcatccatcttacccattaagtgtccgaaagacgaagacttgttagagcagaaacctgttacttccgccgaacaggaatccgaaaagaatcatctcaccacagccagcaactacaacaaaagtgaatctcaggagagcctggttacaagcccaagcaaacctaaaagccctggggttgagaagccaattgttaagccgacggctggggctggccctcaagaaacaaatatgaaagagcctctggccaccttggtagatcagtcccctgaatcccttaaaagaaaaagttctcttacacaggaggaagcacccgtgtcttgggagaagaggcctcgggtgacagaaaaccgtcagcaccaacagccgttccaagtaagcccccagcccttcctgaaccgcggtgaccgcatccaggtgagaaaggttcctccactgaagattcctgtctcccgaatctccccgatgccttttcatcccagtcaggtctctcctagagccagattcccggtgagcatcacgtccccgaacagaactggcgcaagaacactggccgacatcaaggcaaaagctcagctggttaaggcacagcgggcagccgcagcagccgctgctgccgctgcagccgctgcctctgtcggtggcactattcccggaccgggtccaggcggagggcaggggccaggtgaggggggtgagggccagaccgcgcgaggtggcagtccaggatcagatcgcgtgagtgagacgggaaagggccctactctcgagttagcaggtactggaagtcggggaggtacacgagagctactgccttgtggaccagaaacccagcctcaatctgaaactaagaccacgcccagccaggcacagcctcatagcgtcagcggtgctcagcttcagcagaccccacctgtgcctcccacacctgctgtgtctggagcttgtactagcgttccttctccagcccatattgagaaactcgataatgagaagttgaatcctacccgggcaacggccacagtggctagcgtcagccaccctcagggaccctcctcctgtagacaggaaaaagctccctcaccaacaggcttccagcttgaggatatttctacaagccagcggttcatgctcgggttcgccggtcggagaactagcaagcctgccatggcaggccactatttgcttaacatcagcacgtatgggaggggctcagagtccttcaggaggacccacagtgtaaatcctgaagatagattctgtctgtcctcccctactgaggcattgaagatgggttatacagattgtaagaatgcaacaggtgagagttcctcatctaaagaggatgatacggatgaagaatccaccggggacgaacaagaaagtgtaacagtgaaggaagagcctcaggtaagtcagtcagctggtaagggagatacatctagtggaccacacagtcgggagaccctgagtacaagcgattgccttgccagtaagaacgtcaaggcggagattcctttaaacgagcagaccaccttaagtaaagagaactacctatttacgagagggcaaaccttcgacgagaagactttggcccgtgatctcattcaggctgcacagaagcagatggcacacgccgtgagggggaaggcaatacgctcctcccccgagctttttagctcaacggtgcttcccctgccagccgacagtccaacacatcagcctctcttattgccaccactacaaacaccgaaattatacggatctcccactcaaattgggccatcctaccgagggatgatcaatgtttccacctcttctgacatggatcacaacagtgccgtgcctggaagtcaagtaagttctaatgtaggggatgtgatgagcttctctgtaaccgtgaccactatccccgcatcccaggcaatgaatcccagtagccacggacagaccatccctgttcaagccttcagtgaagagaactctattgaaggcaccccgtctaagtgttactgtagactgaaggctatgatcatgtgcaagggttgcggagcgttttgccacgatgactgcatcggaccgtcaaagctatgtgtgtcctgtctggtggtgagatag

SEQ ID NO: 197534 - DNA, 4308 bp, Artificial Sequence
  derived and/or modified sequence
atgagggagaaaggacgtcgaaaaaaggggagaacatgggcagaggctgcaaaaacagtcctggaaaagtaccccaacacgcccatgtcccataaggagatcctgcaggtcattcagagggagggcctgaaggagatcagatccggaactagcccactcgcctgcctgaacgccatgctacacacgaattcccggggagaggaaggcattttctacaaggtgcctggtcgcatgggagtctatactctcaagaaggatgtacccgatggcgtaaaggaacttagcgaaggtagcgaggagtcctcggacggtcagagtgattctcaatccagcgaaaattcttcttcttcctctgatggcggttccaataaagaggggaaaaagagcaggtggaaaaggaaggtctcctcctcatctccacagagtggctgccccagccccacgatccctgccggtaaggttatttctccatcccagaagcatagtaagaaggcacttaagcaggcattgaaacagcagcaacagaagaagcaacaacagcagtgccggcctagtattagtatctccagtaaccagcacctgtctctgaaaacagtaaaagccgctagtgactcagtccctgcaaagcctgccacctgggagggtaagcagtctgacgggcagacaggaagcccccagaactcaaatagctcgttttcctcgtccgtgaaggtggagaacactctacttggacttggtaagaaaagcttccaaaggtcagaaagactgcatactcgccagatgaagcggacaaaatgtgccgatatcgatgttgaaacacctgacagtattctagtcaataccaatctacgagccctgatcaataagcacacattcagcgtgctccctggtgattgtcagcagagactgcttctgctgttgcccgaggtggatcgccaggtcggtcccgacggcctgatgaaactcaacggcagcgctctgaacaacgagttcttcacatccgccgctcagggctggaaggagcgacttagcgaaggggagttcacgccggagatgcaggttagaatccgccaggaaatcgaaaaggaaaagaaagtcgagccatggaaagagcagttctttgagtcgtattatggtcagagctccggcctctcactggaagactcaaaaaaactgaccgccagtccatccgaccccaaagtgaagaagacaccggcagagcagcctaagtcgatgccagttagcgaagcttccttaatccgcatcgtaccggttgtgtcacagtctgagtgcaaagaggaggcgctgcagatgtctagcccaggcagaaaggaagagtgcgaatcccaaggagaagttcagcctaactttagcacatcgagcgaaccactattgagctcagcactgaatacccatgaactgtcgtctatcctgcccatcaagtgccccaaggatgaagatctgctggaacaaaagccagtaacttccgccgaacaggagtccgaaaagaaccatttgacaactgcctctaactataacaagtcagagtcccaggagagtcttgtaacatctccgtccaagcctaaatcgcccggtgtcgagaagccaatcgtaaaacctacggctggggcaggccctcaggagacaaatatgaaagaacccctcgcgactttggttgaccagtcccctgaatccctgaagcgaaagagcagcctgacccaggaagaggcgcctgtgtcctgggagaagcgaccccgagtgaccgagaacaggcagcaccagcaaccatttcaggtgtctccacaaccatttctcaacagaggggatcggatccaggtgaggaaggtgccacccctgaagattcccgtaagcaggatctctccgatgccttttcacccttcccaagtatctcctagggcccgatttcctgtgtccattaccagccctaacaggaccggggctaggaccttggccgacatcaaagctaaggcacagctagttaaggcccagagggcagctgcagctgcagcggctgcagctgccgcagccgcttcagttggaggcaccatccccggtccaggacctgggggtggtcagggacccggagagggaggagaaggccagacagcccgaggcggtagtcctggtagcgacagagtctctgagaccggcaagggcccaaccctggagctggccggtacgggctcccgaggaggtacaagagaactcctgccttgtggccctgagactcagcctcagtcagagacgaagactacaccttcacaggctcaacctcactcagtgtccggagcacagctgcaacagaccccgcctgttcccccaacacctgccgtgtctggggcatgtacttctgtgccttcgccagcacacatcgaaaaacttgacaacgagaaactcaaccctacccgggcaactgccactgttgcgagtgtcagccacccacagggtccatcctcctgccgccaggagaaagccccaagccccacaggccctgcactgatcagcggagcatcgccagtgcactgtgcagcagacgggaccgttgaacttaaagccggaccgtcaaaaaacattccgaacccttcggcgtccagtaagacggacgcctcagttcccgtggccgtcacaccctcaccactcacgtccctgcttaccactgctaccttggagaagctccccgtgcctcaggtctctgccactaccgctcccgcaggaagtgcacctcctagctctacactgcccgctgccagttctctaaagacccctgggaccagtttaaacatgaacgggccaaccctccggccaacttcctccattccagcgaacaacccactggtgactcagttgcttcagggtaaggacgtgcccatggaacaaattcttccaaagcccttaaccaaggtggagatgaagacggtgccgctgaccgccaaggaggagaggggaatgggtgctctcatcgcaacgaacaccacagagaattccacacgggaggaggttaatgagcggcagagtcatccagcaacccagcagcagctcggcaagacacttcaatcaaagcagctgccccaagtcccgagaccacttcagttgttctctgccaaagagctgcgcgactcatctatagacacacaccagtaccacgaagggctgtccaaggccacccaggatcagatcctgcagaccttgatccagcgggtacggaggcaaaacctcctttcagtagtccctccttcccagttcaacttcgcccacagtgggttccagcttgaggatatctctacttctcaacggttcatgctgggctttgccggaaggcgcacatctaagcctgcgatggccggtcattatctcctgaatatttccacctatgggcgtgggtccgaatcatttcgcaggactcactccgtgaacccagaggacagattttgtctgtcttctcctacagaggccttgaagatgggctacaccgattgcaaaaatgccacaggcgagtcgagttccagtaaggaagacgataccgatgaggagtccaccggggacgaacaggagagcgtgacagtcaaggaagaaccacaagttagccaaagcgcaggaaaaggcgacactagcagtgggcctcacagcagagagactctctcaacgtccgattgtctagcatctaagaatgtgaaggcagagattcctctgaatgaacagacaactctctcaaaggagaactatctgttcactcggggtcagaccttcgacgagaagacactggcgagggacctgatccaagcagcccagaagcagatggcacatgccgttaggggcaaggcgatccgctctagtcctgaactgttctcgtccacagtgctgcccttaccagccgactcccctacacaccagcctcttctgctgcctcccctgcagacccctaagctctatggaagtccaacgcaaatcggaccctcctaccggggtatgattaatgtgtccactagtagtgacatggaccataacagcgccgtgcccggaagccaggttagcagcaacgttggcgacgtaatgagcttctctgtcaccgttacaaccatccccgctagccaagctatgaacccatcatctcatggacaaaccatccccgtccaggccttttccgaggagaattcaatcgagggaacgcccagtaaatgttattgccgactcaaggcgatgatcatgtgcaagggttgtggggcattctgtcacgatgattgcataggaccaagcaaactgtgtgtgtcatgcctggtggtgcggtag

SEQ ID NO: 197535 - DNA, 2757 bp, Artificial Sequence
  derived and/or modified sequence
atgaagagaaccaagtgcgccgacatcgacgtggagacccccgacagcatcctggtgaacaccaacctgagagccctgatcaacaagcacaccttcagcgtgctgcccggcgactgccagcagagactgctgctgctgctgcccgaggtggacagacaggtgggccccgacggcctgatgaagctgaacggcagcgccctgaacaacgagttcttcaccagcgccgcccagggctggaaggagagactgagcgagggcgagttcacccccgagatgcaggtgagaatcagacaggagatcgagaaggagaagaaggtggagccctggaaggagcagttcttcgagagctactacggccagagcagcggcctgagcctggaggacagcaagaagctgaccgccagccccagcgaccccaaggtgaagaagacccccgccgagcagcccaagagcatgcccgtgagcgaggccagcctgatcagaatcgtgcccgtggtgagccagagcgagtgcaaggaggaggccctgcagatgagcagccccggcagaaaggaggagtgcgagagccagggcgaggtgcagcccaacttcagcaccagcagcgagcccctgctgagcagcgccctgaacacccacgagctgagcagcatcctgcccatcaagtgccccaaggacgaggacctgctggagcagaagcccgtgaccagcgccgagcaggagagcgagaagaaccacctgaccaccgccagcaactacaacaagagcgagagccaggagagcctggtgaccagccccagcaagcccaagagccccggcgtggagaagcccatcgtgaagcccaccgccggcgccggcccccaggagaccaacatgaaggagcccctggccaccctggtggaccagagccccgagagcctgaagagaaagagcagcctgacccaggaggaggcccccgtgagctgggagaagagacccagagtgaccgagaacagacagcaccagcagcccttccaggtgagcccccagcccttcctgaacagaggcgacagaatccaggtgagaaaggtgccccccctgaagatccccgtgagcagaatcagccccatgcccttccaccccagccaggtgagccccagagccagattccccgtgagcatcaccagccccaacagaaccggcgccagaaccctggccgacatcaaggccaaggcccagctggtgaaggcccagagagccgccgccgccgccgccgccgccgccgccgccgccgccagcgtgggcggcaccatccccggccccggccccggcggcggccagggccccggcgagggcggcgagggccagaccgccagaggcggcagccccggcagcgacagagtgagcgagaccggcaagggccccaccctggagctggccggcaccggcagcagaggcggcaccagagagctgctgccctgcggccccgagacccagccccagagcgagaccaagaccacccccagccaggcccagccccacagcgtgagcggcgcccagctgcagcagaccccccccgtgccccccacccccgccgtgagcggcgcctgcaccagcgtgcccagccccgcccacatcgagaagctggacaacgagaagctgaaccccaccagagccaccgccaccgtggccagcgtgagccacccccagggccccagcagctgcagacaggagaaggcccccagccccaccggcttccagctggaggacatcagcaccagccagagattcatgctgggcttcgccggcagaagaaccagcaagcccgccatggccggccactacctgctgaacatcagcacctacggcagaggcagcgagagcttcagaagaacccacagcgtgaaccccgaggacagattctgcctgagcagccccaccgaggccctgaagatgggctacaccgactgcaagaacgccaccggcgagagcagcagcagcaaggaggacgacaccgacgaggagagcaccggcgacgagcaggagagcgtgaccgtgaaggaggagccccaggtgagccagagcgccggcaagggcgacaccagcagcggcccccacagcagagagaccctgagcaccagcgactgcctggccagcaagaacgtgaaggccgagatccccctgaacgagcagaccaccctgagcaaggagaactacctgttcaccagaggccagaccttcgacgagaagaccctggccagagacctgatccaggccgcccagaagcagatggcccacgccgtgagaggcaaggccatcagaagcagccccgagctgttcagcagcaccgtgctgcccctgcccgccgacagccccacccaccagcccctgctgctgccccccctgcagacccccaagctgtacggcagccccacccagatcggccccagctacagaggcatgatcaacgtgagcaccagcagcgacatggaccacaacagcgccgtgcccggcagccaggtgagcagcaacgtgggcgacgtgatgagcttcagcgtgaccgtgaccaccatccccgccagccaggccatgaaccccagcagccacggccagaccatccccgtgcaggccttcagcgaggagaacagcatcgagggcacccccagcaagtgctactgcagactgaaggccatgatcatgtgcaagggctgcggcgccttctgccacgacgactgcatcggccccagcaagctgtgcgtgagctgcctggtggtgagatag

SEQ ID NO: 197536 - DNA, 4224 bp, Artificial Sequence
  derived and/or modified sequence
atgagccacaaggagatcctgcaggtgatccagagagagggcctgaaggagatcagcagcggcaccagccccctggcctgcctgaacgccatgctgcacaccaacagcagaggcgaggagggcatcttctacaaggtgcccggcagaatgggcgtgtacaccctgaagaaggacgtgcccgacggcgtgaaggagctgagcgagggcagcgaggagagcagcgacggccagagcgacagccagagcagcgagaacagcagcagcagcagcgacggcggcagcaacaaggagggcaagaagagcagatggaagagaaaggtgagcagcagcagcccccagagcggctgccccagccccaccatccccgccggcaaggtgatcagccccagccagaagcacagcaagaaggccctgaagcaggccctgaagcagcagcagcagaagaagcagcagcagcagtgcagacccagcatcagcatcagcagcaaccagcacctgagcctgaagaccgtgaaggccgccagcgacagcgtgcccgccaagcccgccacctgggagggcaagcagagcgacggccagaccggcagcccccagaacagcaacagcagcttcagcagcagcgtgaaggtggagaacaccctgctgggcctgggcaagaagagcttccagagaagcgagagactgcacaccagacagatgaagagaaccaagtgcgccgacatcgacgtggagacccccgacagcatcctggtgaacaccaacctgagagccctgatcaacaagcacaccttcagcgtgctgcccggcgactgccagcagagactgctgctgctgctgcccgaggtggacagacaggtgggccccgacggcctgatgaagctgaacggcagcgccctgaacaacgagttcttcaccagcgccgcccagggctggaaggagagactgagcgagggcgagttcacccccgagatgcaggtgagaatcagacaggagatcgagaaggagaagaaggtggagccctggaaggagcagttcttcgagagctactacggccagagcagcggcctgagcctggaggacagcaagaagctgaccgccagccccagcgaccccaaggtgaagaagacccccgccgagcagcccaagagcatgcccgtgagcgaggccagcctgatcagaatcgtgcccgtggtgagccagagcgagtgcaaggaggaggccctgcagatgagcagccccggcagaaaggaggagtgcgagagccagggcgaggtgcagcccaacttcagcaccagcagcgagcccctgctgagcagcgccctgaacacccacgagctgagcagcatcctgcccatcaagtgccccaaggacgaggacctgctggagcagaagcccgtgaccagcgccgagcaggagagcgagaagaaccacctgaccaccgccagcaactacaacaagagcgagagccaggagagcctggtgaccagccccagcaagcccaagagccccggcgtggagaagcccatcgtgaagcccaccgccggcgccggcccccaggagaccaacatgaaggagcccctggccaccctggtggaccagagccccgagagcctgaagagaaagagcagcctgacccaggaggaggcccccgtgagctgggagaagagacccagagtgaccgagaacagacagcaccagcagcccttccaggtgagcccccagcccttcctgaacagaggcgacagaatccaggtgagaaaggtgccccccctgaagatccccgtgagcagaatcagccccatgcccttccaccccagccaggtgagccccagagccagattccccgtgagcatcaccagccccaacagaaccggcgccagaaccctggccgacatcaaggccaaggcccagctggtgaaggcccagagagccgccgccgccgccgccgccgccgccgccgccgccgccagcgtgggcggcaccatccccggccccggccccggcggcggccagggccccggcgagggcggcgagggccagaccgccagaggcggcagccccggcagcgacagagtgagcgagaccggcaagggccccaccctggagctggccggcaccggcagcagaggcggcaccagagagctgctgccctgcggccccgagacccagccccagagcgagaccaagaccacccccagccaggcccagccccacagcgtgagcggcgcccagctgcagcagaccccccccgtgccccccacccccgccgtgagcggcgcctgcaccagcgtgcccagccccgcccacatcgagaagctggacaacgagaagctgaaccccaccagagccaccgccaccgtggccagcgtgagccacccccagggccccagcagctgcagacaggagaaggcccccagccccaccggccccgccctgatcagcggcgccagccccgtgcactgcgccgccgacggcaccgtggagctgaaggccggccccagcaagaacatccccaaccccagcgccagcagcaagaccgacgccagcgtgcccgtggccgtgacccccagccccctgaccagcctgctgaccaccgccaccctggagaagctgcccgtgccccaggtgagcgccaccaccgcccccgccggcagcgccccccccagcagcaccctgcccgccgccagcagcctgaagacccccggcaccagcctgaacatgaacggccccaccctgagacccaccagcagcatccccgccaacaaccccctggtgacccagctgctgcagggcaaggacgtgcccatggagcagatcctgcccaagcccctgaccaaggtggagatgaagaccgtgcccctgaccgccaaggaggagagaggcatgggcgccctgatcgccaccaacaccaccgagaacagcaccagagaggaggtgaacgagagacagagccaccccgccacccagcagcagctgggcaagaccctgcagagcaagcagctgccccaggtgcccagacccctgcagctgttcagcgccaaggagctgagagacagcagcatcgacacccaccagtaccacgagggcctgagcaaggccacccaggaccagatcctgcagaccctgatccagagagtgagaagacagaacctgctgagcgtggtgccccccagccagttcaacttcgcccacagcggcttccagctggaggacatcagcaccagccagagattcatgctgggcttcgccggcagaagaaccagcaagcccgccatggccggccactacctgctgaacatcagcacctacggcagaggcagcgagagcttcagaagaacccacagcgtgaaccccgaggacagattctgcctgagcagccccaccgaggccctgaagatgggctacaccgactgcaagaacgccaccggcgagagcagcagcagcaaggaggacgacaccgacgaggagagcaccggcgacgagcaggagagcgtgaccgtgaaggaggagccccaggtgagccagagcgccggcaagggcgacaccagcagcggcccccacagcagagagaccctgagcaccagcgactgcctggccagcaagaacgtgaaggccgagatccccctgaacgagcagaccaccctgagcaaggagaactacctgttcaccagaggccagaccttcgacgagaagaccctggccagagacctgatccaggccgcccagaagcagatggcccacgccgtgagaggcaaggccatcagaagcagccccgagctgttcagcagcaccgtgctgcccctgcccgccgacagccccacccaccagcccctgctgctgccccccctgcagacccccaagctgtacggcagccccacccagatcggccccagctacagaggcatgatcaacgtgagcaccagcagcgacatggaccacaacagcgccgtgcccggcagccaggtgagcagcaacgtgggcgacgtgatgagcttcagcgtgaccgtgaccaccatccccgccagccaggccatgaaccccagcagccacggccagaccatccccgtgcaggccttcagcgaggagaacagcatcgagggcacccccagcaagtgctactgcagactgaaggccatgatcatgtgcaagggctgcggcgccttctgccacgacgactgcatcggccccagcaagctgtgcgtgagctgcctggtggtgagatag

SEQ ID NO: 197537 - DNA, 4308 bp, Artificial Sequence
  derived and/or modified sequence
atgagagagaagggcagaagaaagaagggcagaacctgggccgaggccgccaagaccgtgctggagaagtaccccaacacccccatgagccacaaggagatcctgcaggtgatccagagagagggcctgaaggagatcagaagcggcaccagccccctggcctgcctgaacgccatgctgcacaccaacagcagaggcgaggagggcatcttctacaaggtgcccggcagaatgggcgtgtacaccctgaagaaggacgtgcccgacggcgtgaaggagctgagcgagggcagcgaggagagcagcgacggccagagcgacagccagagcagcgagaacagcagcagcagcagcgacggcggcagcaacaaggagggcaagaagagcagatggaagagaaaggtgagcagcagcagcccccagagcggctgccccagccccaccatccccgccggcaaggtgatcagccccagccagaagcacagcaagaaggccctgaagcaggccctgaagcagcagcagcagaagaagcagcagcagcagtgcagacccagcatcagcatcagcagcaaccagcacctgagcctgaagaccgtgaaggccgccagcgacagcgtgcccgccaagcccgccacctgggagggcaagcagagcgacggccagaccggcagcccccagaacagcaacagcagcttcagcagcagcgtgaaggtggagaacaccctgctgggcctgggcaagaagagcttccagagaagcgagagactgcacaccagacagatgaagagaaccaagtgcgccgacatcgacgtggagacccccgacagcatcctggtgaacaccaacctgagagccctgatcaacaagcacaccttcagcgtgctgcccggcgactgccagcagagactgctgctgctgctgcccgaggtggacagacaggtgggccccgacggcctgatgaagctgaacggcagcgccctgaacaacgagttcttcaccagcgccgcccagggctggaaggagagactgagcgagggcgagttcacccccgagatgcaggtgagaatcagacaggagatcgagaaggagaagaaggtggagccctggaaggagcagttcttcgagagctactacggccagagcagcggcctgagcctggaggacagcaagaagctgaccgccagccccagcgaccccaaggtgaagaagacccccgccgagcagcccaagagcatgcccgtgagcgaggccagcctgatcagaatcgtgcccgtggtgagccagagcgagtgcaaggaggaggccctgcagatgagcagccccggcagaaaggaggagtgcgagagccagggcgaggtgcagcccaacttcagcaccagcagcgagcccctgctgagcagcgccctgaacacccacgagctgagcagcatcctgcccatcaagtgccccaaggacgaggacctgctggagcagaagcccgtgaccagcgccgagcaggagagcgagaagaaccacctgaccaccgccagcaactacaacaagagcgagagccaggagagcctggtgaccagccccagcaagcccaagagccccggcgtggagaagcccatcgtgaagcccaccgccggcgccggcccccaggagaccaacatgaaggagcccctggccaccctggtggaccagagccccgagagcctgaagagaaagagcagcctgacccaggaggaggcccccgtgagctgggagaagagacccagagtgaccgagaacagacagcaccagcagcccttccaggtgagcccccagcccttcctgaacagaggcgacagaatccaggtgagaaaggtgccccccctgaagatccccgtgagcagaatcagccccatgcccttccaccccagccaggtgagccccagagccagattccccgtgagcatcaccagccccaacagaaccggcgccagaaccctggccgacatcaaggccaaggcccagctggtgaaggcccagagagccgccgccgccgccgccgccgccgccgccgccgccgccagcgtgggcggcaccatccccggccccggccccggcggcggccagggccccggcgagggcggcgagggccagaccgccagaggcggcagccccggcagcgacagagtgagcgagaccggcaagggccccaccctggagctggccggcaccggcagcagaggcggcaccagagagctgctgccctgcggccccgagacccagccccagagcgagaccaagaccacccccagccaggcccagccccacagcgtgagcggcgcccagctgcagcagaccccccccgtgccccccacccccgccgtgagcggcgcctgcaccagcgtgcccagccccgcccacatcgagaagctggacaacgagaagctgaaccccaccagagccaccgccaccgtggccagcgtgagccacccccagggccccagcagctgcagacaggagaaggcccccagccccaccggccccgccctgatcagcggcgccagccccgtgcactgcgccgccgacggcaccgtggagctgaaggccggccccagcaagaacatccccaaccccagcgccagcagcaagaccgacgccagcgtgcccgtggccgtgacccccagccccctgaccagcctgctgaccaccgccaccctggagaagctgcccgtgccccaggtgagcgccaccaccgcccccgccggcagcgccccccccagcagcaccctgcccgccgccagcagcctgaagacccccggcaccagcctgaacatgaacggccccaccctgagacccaccagcagcatccccgccaacaaccccctggtgacccagctgctgcagggcaaggacgtgcccatggagcagatcctgcccaagcccctgaccaaggtggagatgaagaccgtgcccctgaccgccaaggaggagagaggcatgggcgccctgatcgccaccaacaccaccgagaacagcaccagagaggaggtgaacgagagacagagccaccccgccacccagcagcagctgggcaagaccctgcagagcaagcagctgccccaggtgcccagacccctgcagctgttcagcgccaaggagctgagagacagcagcatcgacacccaccagtaccacgagggcctgagcaaggccacccaggaccagatcctgcagaccctgatccagagagtgagaagacagaacctgctgagcgtggtgccccccagccagttcaacttcgcccacagcggcttccagctggaggacatcagcaccagccagagattcatgctgggcttcgccggcagaagaaccagcaagcccgccatggccggccactacctgctgaacatcagcacctacggcagaggcagcgagagcttcagaagaacccacagcgtgaaccccgaggacagattctgcctgagcagccccaccgaggccctgaagatgggctacaccgactgcaagaacgccaccggcgagagcagcagcagcaaggaggacgacaccgacgaggagagcaccggcgacgagcaggagagcgtgaccgtgaaggaggagccccaggtgagccagagcgccggcaagggcgacaccagcagcggcccccacagcagagagaccctgagcaccagcgactgcctggccagcaagaacgtgaaggccgagatccccctgaacgagcagaccaccctgagcaaggagaactacctgttcaccagaggccagaccttcgacgagaagaccctggccagagacctgatccaggccgcccagaagcagatggcccacgccgtgagaggcaaggccatcagaagcagccccgagctgttcagcagcaccgtgctgcccctgcccgccgacagccccacccaccagcccctgctgctgccccccctgcagacccccaagctgtacggcagccccacccagatcggccccagctacagaggcatgatcaacgtgagcaccagcagcgacatggaccacaacagcgccgtgcccggcagccaggtgagcagcaacgtgggcgacgtgatgagcttcagcgtgaccgtgaccaccatccccgccagccaggccatgaaccccagcagccacggccagaccatccccgtgcaggccttcagcgaggagaacagcatcgagggcacccccagcaagtgctactgcagactgaaggccatgatcatgtgcaagggctgcggcgccttctgccacgacgactgcatcggccccagcaagctgtgcgtgagctgcctggtggtgagatag

SEQ ID NO: 197538 - protein, 663 aa, Artificial Sequence
  derived and/or modified sequence
MLQMPKLNEIPPGRAGRREARGEGRWPGQTGPEAARLEWRAQGQAGGARAPWDSWGSSRLPTQPGPGWSRCPPSLLCALSFQKSTMESKDEVSDTDSGIILQSGPDSPVSPMKELTHAVHKQQRALEARLEACLEELRRLCLREAELTGTLPAEYPLKPGEKAPKVRRRIGAAYKLDDWALHREDPLSSLERQLALQLQITEAARRLCLEENLSRQARRQRKHSMLQEEKKLQELQRCLVERRRNSEPPPAAALPLGRELSASDDSSLSDGLLLEEEESQVPKPPPESPAPPSRPLPPQTLEGLQPTGPEAGSPERAPVQNSPWKETSLDHPYEKPRKSSEPWSESSSPATTPQDGPSASSLWLLEPASYHVVPIRGVPGQWQGRTSAPATPEIQGRRGQSQSLRVDSFRAGPEGRGRSAFPRRRPTHYTVTVPDSCFPATKPPLPHAACHSCSEDSGSDVSSISHPTSPGSSSPDISFLQPLSPPKTHRHRGAWVPAGSRELVAHHPKLLLPPGYFPAGRYVVVAESPLPPGEWELRRAAPGPAYEEEGTPLRYQRLVPSRSRIVRTPSLKDSPAGRGLSKAAVSEELKWWHERARLRSTRPHSLDRQGAFRVRSLPLGREGFGRALGPRAQVPTVCVLRRSPDGAPVQVFVPEKGEIISQV

SEQ ID NO: 197539 - DNA, 1992 bp, Artificial Sequence
  derived and/or modified sequence
atgctgcagatgcccaagctgaacgagatcccccccggcagagccggcagaagagaggccagaggcgagggcagatggcccggccagaccggccccgaggccgccagactggagtggagagcccagggccaggccggcggcgccagagccccctgggacagctggggcagcagcagactgcccacccagcccggccccggctggagcagatgcccccccagcctgctgtgcgccctgagcttccagaagagcaccatggagagcaaggacgaggtgagcgacaccgacagcggcatcatcctgcagagcggccccgacagccccgtgagccccatgaaggagctgacccacgccgtgcacaagcagcagagagccctggaggccagactggaggcctgcctggaggagctgagaagactgtgcctgagagaggccgagctgaccggcaccctgcccgccgagtaccccctgaagcccggcgagaaggcccccaaggtgagaagaagaatcggcgccgcctacaagctggacgactgggccctgcacagagaggaccccctgagcagcctggagagacagctggccctgcagctgcagatcaccgaggccgccagaagactgtgcctggaggagaacctgagcagacaggccagaagacagagaaagcacagcatgctgcaggaggagaagaagctgcaggagctgcagagatgcctggtggagagaagaagaaacagcgagcccccccccgccgccgccctgcccctgggcagagagctgagcgccagcgacgacagcagcctgagcgacggcctgctgctggaggaggaggagagccaggtgcccaagcccccccccgagagccccgccccccccagcagacccctgcccccccagaccctggagggcctgcagcccaccggccccgaggccggcagccccgagagagcccccgtgcagaacagcccctggaaggagaccagcctggaccacccctacgagaagcccagaaagagcagcgagccctggagcgagagcagcagccccgccaccaccccccaggacggccccagcgccagcagcctgtggctgctggagcccgccagctaccacgtggtgcccatcagaggcgtgcccggccagtggcagggcagaaccagcgcccccgccacccccgagatccagggcagaagaggccagagccagagcctgagagtggacagcttcagagccggccccgagggcagaggcagaagcgccttccccagaagaagacccacccactacaccgtgaccgtgcccgacagctgcttccccgccaccaagccccccctgccccacgccgcctgccacagctgcagcgaggacagcggcagcgacgtgagcagcatcagccaccccaccagccccggcagcagcagccccgacatcagcttcctgcagcccctgagcccccccaagacccacagacacagaggcgcctgggtgcccgccggcagcagagagctggtggcccaccaccccaagctgctgctgccccccggctacttccccgccggcagatacgtggtggtggccgagagccccctgccccccggcgagtgggagctgagaagagccgcccccggccccgcctacgaggaggagggcacccccctgagataccagagactggtgcccagcagaagcagaatcgtgagaacccccagcctgaaggacagccccgccggcagaggcctgagcaaggccgccgtgagcgaggagctgaagtggtggcacgagagagccagactgagaagcaccagaccccacagcctggacagacagggcgccttcagagtgagaagcctgcccctgggcagagagggcttcggcagagccctgggccccagagcccaggtgcccaccgtgtgcgtgctgagaagaagccccgacggcgcccccgtgcaggtgttcgtgcccgagaagggcgagatcatcagccaggtgtag

SEQ ID NO: 197540 - DNA, 1992 bp, Artificial Sequence
  derived and/or modified sequence
atgctgcagatgccgaagttaaatgagattcccccaggaagagccggtcgccgcgaagccagaggtgaagggaggtggcctggacaaaccggtcctgaggccgcccgactggagtggcgggcgcagggacaggcagggggcgccagagcaccctgggattcctggggaagtagcaggcttccgactcaacctggcccggggtggtctcgctgtcccccttcactcctatgcgcgctctcgttccagaaaagtacaatggaatcgaaagacgaagtcagcgatacagatagtggcatcatactccagagcggccctgattcccctgtaagccctatgaaagagctaactcacgctgttcacaaacagcagagagccctggaggctcggcttgaagcctgcctggaagaactgagaaggctgtgcctcagagaagctgagcttacgggtaccctgccagctgaataccctctgaaacctggggagaaggccccaaaagttagaagacgcatcggagccgcatataagcttgatgactgggcactgcacagagaagatccactgagcagtctcgaacgccagttggcactgcagttgcagattacggaagctgcccggcgtctctgcctagaagagaacttgtctcgacaagcccgacgacagcgtaaacattctatgttgcaggaagagaagaaactccaagagcttcagaggtgcctggtggagcgtagacggaattcagagccacctcccgccgccgcactaccgttggggcgcgaactgagcgccagcgacgatagtagtctgagtgacgggctgctgttggaggaagaggaaagtcaggtccccaagcctcctcctgaatctccagcaccccccagccggccactacccccacagacactggagggattgcaaccaactggaccggaagcgggttcccccgagagagctccagtgcagaactccccctggaaggagacatccctggaccatccatacgagaaacctcgtaagagttctgagccatggtccgaatcgtcctccccagccacaaccccacaagatggcccttctgcatcctccctgtggctgttggagcccgccagttatcatgttgtgccgattagaggcgtgcccgggcagtggcaggggcggacatcagcccccgccacaccggagatacaagggaggcggggacagtctcaaagtctgcgagtcgacagcttcagagctggtcccgaaggcagaggcaggagcgcttttcctagaagaaggcctacacactacactgtgaccgttcccgatagttgctttcctgctacaaaacctcctctgcctcacgccgcttgccacagctgcagtgaggattccggctcggatgtcagctccatctctcaccctactagccccggttccagctcaccagacatctctttcttgcagcctctgagtccccctaagacacaccggcaccggggggcctgggttccagccggatctcgtgaactagtggcacaccaccctaaactgcttctaccacccgggtacttccccgctggcagatacgtcgtggttgcagagtctcctcttcctccaggagaatgggagctgcgccgcgctgctcctggccccgcttatgaggaggagggtacaccactgaggtaccagcgcctggtgccaagtagaagtaggatcgtacggaccccatcactgaaagatagtccagccggaagaggcttatcgaaagctgcagtgtcagaggaattgaaatggtggcacgagcgtgcaaggcttcggagcacgaggccccatagcctggaccgccagggcgccttcagggtgaggtctcttcccctgggacgggagggcttcgggcgcgccctcggcccgagggcccaggtgcctacagtgtgcgtgttgcgtagatcccctgacggcgcccctgtacaagtgtttgtgcctgaaaagggggaaatcatttcacaggtctag

SEQ ID NO: 197541 - DNA, 1992 bp, Artificial Sequence
  derived and/or modified sequence
atgctgcagatgcccaagctgaatgagatccccccaggccgggccggcagaagagaggcccggggggagggccgctggccaggccagacaggccctgaggccgcccggctggagtggagggcccagggccaggccggcggggcccgggccccctgggacagctggggcagcagccggctgcccacccagcccggccctggctggagccgctgcccccccagcctgctgtgtgccctgtccttccagaagagcaccatggagagcaaggatgaggtgtctgacacagattctggcatcatcctgcagagcggccctgacagccctgtgagccccatgaaggagctgacccatgctgtgcacaagcagcagagggccctggaggcccggctggaggcctgcctggaggagctgcggcggctgtgcctgcgggaggccgagctgaccggcaccctgcctgctgagtaccccctgaagccaggagagaaggcccccaaggtgagaagacgcatcggggccgcctacaagctggatgactgggccctgcaccgggaggaccccctgagcagcctggagcggcagctggccctgcagctgcagatcacagaagctgcccggcggctgtgcctggaggagaacctgagccggcaggcccggcggcagaggaagcacagcatgctgcaggaggagaagaagctgcaggagctgcagcgctgcctggtggagaggagaagaaacagcgagcccccacctgctgctgccctgcccctgggccgggagctgagcgccagtgatgacagcagcctgagtgatggcctgctgctggaggaggaggagagccaggtgcccaagcccccacctgagagccctgccccacccagccggcccctgcccccccagaccctggagggcctgcagcccactggacctgaggccggcagccctgagcgggcccctgtgcagaacagcccctggaaggagaccagcctggaccacccctatgagaagcccaggaagagcagcgagccctggagcgagagcagcagccctgccaccaccccccaggacggccccagcgccagcagcctgtggctgctggagcccgccagctaccacgtggtgcccatccggggcgtgcccggccagtggcagggccgcaccagcgccccagccaccccagagatccagggcagaagaggccagagccagagcctgcgggtggacagcttccgggccggccctgagggccggggccgcagcgccttcccccggcggcggcccacccactacacagtgacagtgcctgacagctgcttccctgccaccaagccacccctgccccacgccgcctgccacagctgcagtgaagattctggcagtgatgtgagcagcatcagccaccccaccagccctggcagcagcagcccagacatctccttcctgcagcccctgagcccccccaagacccaccgccacagaggagcctgggtgcctgctggcagccgggagctggtggcccaccaccccaagctgctgctgcccccaggctacttccctgctggccgctacgtggtggtggccgagagccccctgcccccaggagagtgggagctgcggcgggccgcccctggccctgcctatgaggaggagggcacccccctgcgctaccagaggctggtgcccagccgcagcagaattgtgaggacccccagcctgaaggacagccctgctggccggggcctgagcaaggctgctgtgtctgaggagctgaagtggtggcatgagcgggcccggctgcggagcacccggccccacagcctggaccggcagggcgccttccgggtgcgcagcctgcccctgggccgggagggcttcggccgggccctgggcccccgggcccaggtgcccaccgtgtgtgtgctgcggcgcagcccagatggagcccctgtgcaggtgtttgtgcctgagaagggggagatcatcagccaggtgtag

SEQ ID NO: 197542 - DNA, 1992 bp, Artificial Sequence
  derived and/or modified sequence
atgctgcagatgcccaagctgaacgagatcccccccggccgggccggtaggcgcgaagcgagaggggaaggccgctggcctggacagaccggacctgaggccgccaggctcgaatggagggctcagggacaggcagggggggccagggctccatgggatagttgggggagctcaaggttgcccacccagcctggacctggctggagtcgctgtcccccgtccttgctgtgcgccttgtccttccaaaagtcaaccatggagtccaaggacgaggtttccgataccgacagtggtattattctacagagcggaccagattcccctgtgtccccaatgaaagagctaacacacgccgtgcataaacagcaacgcgctctggaggctagactggaggcatgtcttgaggagctgcgacgcctgtgccttcgtgaagcggagcttaccggaacgctgcccgccgaatacccactgaagcctggcgaaaaagctcccaaagttcggaggcggatcggagccgcatacaagctcgacgactgggcgttgcatagagaggacccactgtcctcactggaacggcagctggctctacagcttcaaatcacagaggctgcaagaagactctgtctggaagagaatttgagcaggcaggcccgccgccagcgaaagcactccatgctacaggaagagaagaaattgcaagagctccagcgatgtctggtcgagcggagaaggaattcggagccccctccagcggcggccctgccattgggcagagagttatccgcctccgacgatagcagcctctcagacggcctcctcctcgaagaggaagagtctcaggtccccaaaccacccccagagtcccctgctcctccctcgcgccctcttcccccccaaacactggaaggcctacagcctacagggcccgaggcgggctctcccgagcgggcccccgtgcagaactccccttggaaggagaccagcctcgatcacccgtatgagaaacccaggaaaagcagcgaaccttggtcggagtcttctagcccggctaccactccccaggatggccccagtgcatcctccctttggctcctcgaaccagcctcgtatcatgtggtaccaattcgtggagtacctgggcaatggcaagggcggaccagcgccccagccaccccagaaattcagggaaggaggggacagagtcagagcttacgtgtcgattcatttcgggctgggccagagggaagggggagaagcgcctttcctagacgtcgcccaactcattacactgtcacggtgccggactcctgctttcccgccactaagccccccctcccacacgccgcgtgccattcctgttccgaggacagtgggtctgacgtctccagtatttctcatcctacttccccaggttcatcttcccccgacatttcctttctgcaacccctaagtcctcccaaaactcatagacaccggggggcctgggtgcccgccgggagtagggagcttgtggcccaccatccgaagctcctgctgccccctggatacttcccggcagggcgctatgtggtcgtggctgaatctccactgcctccaggcgaatgggagctgcgacgcgctgctccaggcccagcctacgaagaagaagggaccccacttagatatcaacggctggtaccttctcggtcgcgtatcgtgaggaccccgtcacttaaggattctcccgcaggccgtggactgagtaaggcagccgtctcagaagagctgaaatggtggcatgaacgggcaaggctgcgatccactaggccacactccctcgatcgtcagggggccttccgagtgcgaagcctgcccttaggacgcgagggctttgggcgcgcacttgggccccgggcccaggtgccaacggtgtgcgttttgcgcagatcccctgatggggctcccgtgcaagtgttcgtgccggaaaagggcgagataatcagtcaggtgtag

SEQ ID NO: 197543 - DNA, 1992 bp, Artificial Sequence
  derived and/or modified sequence
atgctgcaaatgcccaagcttaacgaaattccgcctggacgggctggcagacgagaggctagaggcgaaggacgttggcccggacagactggccctgaagccgcaagacttgaatggcgagcccaggggcaagcgggtggcgctcgcgcaccgtgggatagctggggcagtagccgtctgcctacccagcctggacccggatggtcaaggtgcccaccgtcactgttgtgcgctctgagctttcagaaaagcacaatggagtccaaagatgaggtgagcgacaccgatagcggcattatcttgcaatccggaccagattcgccagtgagtcccatgaaagaactgacccatgctgttcacaagcagcaaagggcccttgaggcacggctggaagcttgcctcgaagagctgcggagactatgtcttcgggaggccgaacttaccgggaccttacctgccgagtaccccctgaagcccggtgagaaggcacctaaagtgagaaggaggattggcgcagcctacaagctggacgattgggcccttcaccgtgaggaccctctgagctccctggaacgacaactggccttgcagctgcagatcaccgaggcagccaggagactttgcctggaggagaacctctcaagacaggcccgacgccaacgcaaacactccatgctccaagaggagaagaaacttcaggaactccaacggtgtctggttgaaaggcggagaaattctgagccccctcccgctgctgccctccccctggggagagagttgtctgccagcgatgatagctcactcagcgatggactcctcttagaggaagaagaaagccaggtccctaagccacctcctgagagcccagctccaccctcgcggcctctccccccacagactctggagggacttcaacctaccggccctgaggccggttctccggagagagccccagtacaaaactcgccgtggaaagagacttctctcgaccacccttatgagaagcctcggaaaagctcagagccttggagcgagagtagtagcccggctactacaccacaggatggtccatcggcatcctctctgtggttgctggaacccgcatcttaccacgttgtaccaatcagaggagtgcctggccaatggcagggcaggacaagcgccccagcaacacccgagatccaaggcagaagagggcagtcccaatccttacgggtggactcattcagagccggtccggaaggacgcggaaggtccgcatttccgcgacgtcgcccaacacactataccgtcacagtgcctgactcctgtttccccgctactaagccaccattgccccatgctgcctgccattcatgttcagaggatagcgggtcagatgtatcctccatatcacatccaacttcccctggcagctcatcccccgatatttcattcctgcagccgcttagtccacccaagactcacaggcatcgcggagcctgggtgccagcgggttctcgtgaactggtggcccatcatccaaaactgctgttgcctccagggtacttccccgcagggaggtatgtagtggtggccgaatccccgctgccaccaggagagtgggagctccgccgagctgcccctggacccgcatatgaggaggaaggaacccccctcaggtaccaaaggctggttccttccaggtcccgcatcgttcggaccccttctcttaaggacagccctgcagggaggggccttagtaaagcagcagtcagcgaagagctcaagtggtggcatgaacgcgcacgactccggagtacaaggccgcacagtttagatcggcagggggcattcagagtgaggagcctgcctttaggcagggagggattcggacgcgctctaggcccacgcgctcaggtgccaactgtctgcgtcctgcgaagaagccctgacggggcaccagttcaagtgtttgtacccgagaagggtgaaatcatttctcaggtctag

SEQ ID NO: 197544 - DNA, 4298 bp, Artificial Sequence
  derived and/or modified sequence
ggggcaaaggggacagcctcgcccctcgagcggctgctcccgcagctcgctcacccctgcgggtacgtcgtcactcccgcgtgcggccccgtcccgactcttggatcggactcttcagtcccttcttgcgtcttcccctctttcctctgggccttggtatgccccaggggacagatgtcttgggatctttaacatttgggatgctgcaaatgccgaagttaaatgaaatacctccggggagggcaggccgcagggaggctcggggggagggaagatggcctggacaaacaggtcctgaagctgcgaggctggagtggagggcgcaggggcaggcgggcggcgccagagctccatgggacagctggggaagctccaggctacctacacaacctggcccaggctggtcacggtgtcccccctccctgctctgtgccctctccttccagaaatccaccatggagagtaaggatgaggtcagcgacaccgacagtggcatcatcctgcagtctggccccgacagcccggtctccccaatgaaggagctgacccatgcagtgcacaagcagcagagggccctggaagcgaggctggaggcctgcctggaggagctgaggagactctgccttcgggaagcggagctgacgggcaccttgccagcggagtatcccctcaaaccaggggaaaaggcccccaaggttcgccgcaggatcggagcggcttacaaactggatgactgggccttgcacagagaggaccccctaagcagcctggagcgccagctggccctgcagctgcagatcacagaggcagcccgtcggctgtgcctggaggagaacctcagcaggcaggctcggcggcagcggaagcactccatgctgcaggaggagaagaagctgcaggagctccagcgctgcctggtcgagcggcggcgcaatagcgagccacctccggctgctgctctccccctgggccgagagctcagtgcctctgatgacagctccctgtcagatgggctcctcctggaggaagaggaatcccaagtgccaaaacctcctccagagtctccagccccaccttctcggcctctcccaccccaaacccttgagggtctgcagccaacaggacctgaggctgggagcccagaacgggctccagtccagaacagcccctggaaggaaaccagcctggaccacccctatgagaagcccaggaagtcttctgagccctggagcgagtccagcagcccagccaccacaccacaggatgggcccagtgcctccagcctgtggcttctggagcctgcctcctaccacgtggttcccatccgtggtgttcctggccagtggcagggccgcaccagtgccccagccacccctgagatacaggggaggaggggccagtcgcagtctctgagggtggattccttccgggcgggtcctgagggccgaggtcgcagcgcctttccccgccgccgccccactcactacacggtgacagtgccagattcctgctttcccgcgaccaagcccccgctgccccacgccgcctgccactcctgctcagaagacagtggctctgacgtctccagcatctcccaccccacttcgccgggcagcagcagccccgacatctcctttctgcagcctctctcccctcccaagacccatcgtcaccgcggggcctgggtcccagccggcagcagagagctggtcgcccaccaccccaagctactgctgccgcctggctatttcccggcggggcggtacgtggtggtggctgagagccccctgccgcctggcgagtgggagctgcgccgcgcagccccgggccctgcttacgaggaggagggcactcccctgcgctaccagcgtctggtgccctcccgcagccgcatcgtgcggacgccctccctgaaggacagcccggcaggccgggggctcagcaaggccgccgtgtccgaggagctcaagtggtggcacgagcgtgcacgcctccggagcacccgcccccactcactggaccgccaaggagctttccgggtcaggagcctgccccttgggagagagggcttcggacgagccctgggaccccgggcacaggtgcccacagtttgtgtgctgcggagatcgcctgatggggcccctgtgcaagtctttgtacctgaaaaaggagagatcatcagccaggtgtaactctgcgccccacgctggaaaaaactgtttcatagaggggctgggctgagacccccccacccctgagtgcctctttcagctcccccatccccatcgcaggccgatgacctggagctgagaccttttattattttttttttacacgacttttttcagaagccctgacctaaggatttatatatgtggattgtcctcaatacccctgtgatatgattatgttttatcccccagagtttggcctactggacttaaggccttgcctgtctgactgacagcctctatctccttatataagacaagtggcaggggacgagtgaagcagagtgagccaccttgggagttctccaacgctctgtgctctggttctaagaaattccctggggaactgcccctggccctcctgtcccactattgctggaggctggacatggtacatactcatgcacatgactctcccccatttcccaggtctctgggtaccccagcctgggctgggggagaatctcttcccccttttctaatgtgctctgtgatgcacacaccaagtggtaggtcaaaggtcagtatatcccggtggtgtattgtcttgctagaccctgctattttcctgaccccctaaatcctctttagggacccagtcactataccctgtctatgccctgtgggctcccagacccctgagctttgagtcagtggcatcacagtttgtagcctcagggggtctggctgggggctggtccatgcttgtggttagtggacagcagccaccctttgacagctacctctgggcatctcaagggcttgcagccccactgctccttctaacattttgtttgtttttgagatggagtctcgctctgtcgcccaggctggaatgctgtagcaagatttcggctcactgcaacccccgtctcccgggttcaagcgaatctcctgcctcagccttccgagtagctgggattacaggcaagcaccaccatgcctgctaattttttatttttagtagagatggggtttcatcatgttggccaggctggtctcgaactcctgacctcaagtgatccacctgccttggcctttcaaagtgctgggattacaggcatgagccaccgcacctggcccttctaacgttttttcatcatagtcccaaaaaccaatactttacaagtggttttggaaaggcaccacttttgtggcatgttctggttgggagagggagtcacagttcctactccccccaccagctatgcttctgctctgagaaggtggttatttatacaaacatggacatactcactcccaagggctgatgagatgctgaattttctttgggggcattcattaattgtcccagctgcagcgactggagcaagtctggaagctgcctgtgctaagaccacccagctgtccctgggttctcatcctagggccttctttgcttccaggtcaggggacctgcttcaatgagaaagcaactgaattgaggctaggagaggtagggagagctgagttctgacttcacctgtgcagaactctctgcccccatgttacctggactggaacagactgtgaatatagcagaaggttccaagaactctggtgtctgacctagaagaggcacagttctctctactggaaagaaaacgatgtagccgattgcacaagggtgccaagggaagacccaggatggcccatcaaaggaacctgggggaggatgcaggaggctgaagggatgcacctggcatttctctcactgtgctcttaccgcatcagcaacccccaacttttgggcctactctgccccccatgcgtgaataccctgcttggatgctgtgcttttccggtttgtctctaagcccctttctccagggcatgttggtttccctggcctctcagtgtcctaactggagcccagagtgccttgttctgagccaggagacggctgagcactggccctccacacctaagcgtcctttacattaacttattggtcttgtataacacctggtgccattgccaagtggctgtgtcctcagctacagagctggaattgtgtggggtttagtgctaaatacttcaataaagtctgttttttgtgattggctg

SEQ ID NO: 197545 - DNA, 2197 bp, Artificial Sequence
  derived and/or modified sequence
attagttcagggaaggacttgctcacctgctcctcccctctgactcaagtcataacaagtaacctggttcccctggcccggcagcctgggagggacggcaaggtaggcaggtgagccgagacggacggacggccagcagctccgtcagctggagagagagcacaggcctgtggcttgggagaccctgaggcgacatgtgagggccctgagccccctgactggaagcaggggctgtttttcaactcctggactaaagcccagaagcagctggggaagctccaggctacctacacaacctggcccaggctggtcacggtgtcccccctccctgctctgtgccctctccttccagaaatccaccatggagagtaaggatgaggtcagcgacaccgacagtggcatcatcctgcagtctggccccgacagcccggtctccccaatgaaggagctgacccatgcagtgcacaagcagcagagggccctggaagcgaggctggaggcctgcctggaggagctgaggagactctgccttcgggaagcggagctgacgggcaccttgccagcggagtatcccctcaaaccaggggaaaaggcccccaaggttcgccgcaggatcggagcggcttacaaactggatgactgggccttgcacagagaggaccccctaagcagcctggagcgccagctggccctgcagctgcagatcacagaggcagcccgtcggctgtgcctggaggagaacctcagcaggcaggctcggcggcagcggaagcactccatgctgcaggaggagaagaagctgcaggagctccagcgctgcctggtcgagcggcggcgcaatagcgagccacctccggctgctgctctccccctgggccgagagctcagtgcctctgatgacagctccctgtcagatgggctcctcctggaggaagaggaatcccaagtgccaaaacctcctccagagtctccagccccaccttctcggcctctcccaccccaaacccttgagggtctgcagccaacaggacctgaggctgggagcccagaacgggctccagtccagaacagcccctggaaggaaaccagcctggaccacccctatgagaagcccaggaagtcttctgagccctggagcgagtccagcagcccagccaccacaccacaggatgggcccagtgcctccagcctgtggcttctggagcctgcctcctaccacgtggttcccatccgtggtgttcctggccagtggcagggccgcaccagtgccccagccacccctgagatacaggggaggaggggccagtcgcagtctctgagggtggattccttccgggcgggtcctgagggccgaggtcgcagcgcctttccccgccgccgccccactcactacacggtgacagtgccagattcctgctttcccgcgaccaagcccccgctgccccacgccgcctgccactcctgctcagaagacagtggctctgacgtctccagcatctcccaccccacttcgccgggcagcagcagccccgacatctcctttctgcagcctctctcccctcccaagacccatcgtcaccgcggggcctgggtcccagccggcagcagagagctggtcgcccaccaccccaagctactgctgccgcctggctatttcccggcggggcggtacgtggtggtggctgagagccccctgccgcctggcgagtgggagctgcgccgcgcagccccgggccctgcttacgaggaggagggcactcccctgcgctaccagcgtctggtgccctcccgcagccgcatcgtgcggacgccctccctgaaggacagcccggcaggccgggggctcagcaaggccgccgtgtccgaggagctcaagtggtggcacgagcgtgcacgcctccggagcacccgcccccactcactggaccgccaaggagctttccgggtcaggagcctgccccttgggagagagggcttcggacgagccctgggaccccgggcacaggtgcccacagtttgtgtgctgcggagatcgcctgatggggcccctgtgcaagtctttgtacctgaaaaaggagagatcatcagccaggtgtaactctgcgccccacgctggaaaaaactgtttcatagaggggctgggctgagacccccccacccctgagtgcctctttcagctcccccatccccatcgcag

SEQ ID NO: 197546 - DNA, 708 bp, Artificial Sequence
  derived and/or modified sequence
ccggggagaggggccatccccgcgcgacccgcagcgccgcacagcgagggggagggcgcctgcggggaggacagggtcgggggagcgcccttccgcaggctcctttcattcttccacttaggggtctccaggaatgaaaactggccccagccaggccagagcgcgcgaatgaaaggcggcactgggaccaagagagaagcttcgtcccgcctgggctgcggaaactggcggcgccaggggtgtcccaccgcgcgggcgtccgaaagcggggcaaaggggacagcctcgcccctcgagcggctgctcccgcagctcgctcacccctgcggaaatccaccatggagagtaaggatgaggtcagcgacaccgacagtggcatcatcctgcagtctggccccgacagcccggtctccccaatgaaggagctgacccatgcagtgcacaagcagcagagggccctggaagcgaggctggaggcctgcctggaggagctgaggagactctgccttcgggaagcggagctgacgggcaccttgccagcggagtatcccctcaaaccaggggaaaaggcccccaaggttcgccgcaggatcggagcggcttacaaactggatgactgggccttgcacagagaggaccccctaagcagcctggagcgccagctggccctgcagctgcagatcacagaggcagcccgtcggctgtgcc

SEQ ID NO: 197547 - protein, 488 aa, Artificial Sequence
  derived and/or modified sequence
MPGGRRGPSRQQLSRSALPSLQTLVGGGCGNGTGLRNRNGSAIGLPVPPITALITPGPVRHCQIPDLPVDGSLLFEFLFFIYLLVALFIQYINIYKTVWWYPYNHPASCTSLNFHLIDYHLAAFITVMLARRLVWALISEATKAGAASMIHYMVLISARLVLLTLCGWVLCWTLVNLFRSHSVLNLLFLGYPFGVYVPLCCFHQDSRAHLLLTDYNYVVQHEAVEESASTVGGLAKSKDFLSLLLESLKEQFNNATPIPTHSCPLSPDLIRNEVECLKADFNHRIKEVLFNSLFSAYYVAFLPLCFVKSTQYYDMRWSCEHLIMVWINAFVMLTTQLLPSKYCDLLHKSAAHLGKWQKLEHGSYSNAPQHIWSENTIWPQGVLVRHSRCLYRAMGPYNVAVPSDVSHARFYFLFHRPLRLLNLLILIEGSVVFYQLYSLLRSEKWNHTLSMALILFCNYYVLFKLLRDRIVLGRAYSYPLNSYELKAN

SEQ ID NO: 197548 - protein, 112 aa, Artificial Sequence
  derived and/or modified sequence
MPGGRRGPSRQQLSRSALPSLQTLVGGGCGNGTGLRNRNGSAIGLPVPPITALITPGPVRHCQIPDLPVDGSLLFEFLFFIYLLVALFIQYINIYKTVWWYPYNHPASCTSL

SEQ ID NO: 197549 - DNA, 1467 bp, Artificial Sequence
  derived and/or modified sequence
atgcccggcggcagaagaggccccagcagacagcagctgagcagaagcgccctgcccagcctgcagaccctggtgggcggcggctgcggcaacggcaccggcctgagaaacagaaacggcagcgccatcggcctgcccgtgccccccatcaccgccctgatcacccccggccccgtgagacactgccagatccccgacctgcccgtggacggcagcctgctgttcgagttcctgttcttcatctacctgctggtggccctgttcatccagtacatcaacatctacaagaccgtgtggtggtacccctacaaccaccccgccagctgcaccagcctgaacttccacctgatcgactaccacctggccgccttcatcaccgtgatgctggccagaagactggtgtgggccctgatcagcgaggccaccaaggccggcgccgccagcatgatccactacatggtgctgatcagcgccagactggtgctgctgaccctgtgcggctgggtgctgtgctggaccctggtgaacctgttcagaagccacagcgtgctgaacctgctgttcctgggctaccccttcggcgtgtacgtgcccctgtgctgcttccaccaggacagcagagcccacctgctgctgaccgactacaactacgtggtgcagcacgaggccgtggaggagagcgccagcaccgtgggcggcctggccaagagcaaggacttcctgagcctgctgctggagagcctgaaggagcagttcaacaacgccacccccatccccacccacagctgccccctgagccccgacctgatcagaaacgaggtggagtgcctgaaggccgacttcaaccacagaatcaaggaggtgctgttcaacagcctgttcagcgcctactacgtggccttcctgcccctgtgcttcgtgaagagcacccagtactacgacatgagatggagctgcgagcacctgatcatggtgtggatcaacgccttcgtgatgctgaccacccagctgctgcccagcaagtactgcgacctgctgcacaagagcgccgcccacctgggcaagtggcagaagctggagcacggcagctacagcaacgccccccagcacatctggagcgagaacaccatctggccccagggcgtgctggtgagacacagcagatgcctgtacagagccatgggcccctacaacgtggccgtgcccagcgacgtgagccacgccagattctacttcctgttccacagacccctgagactgctgaacctgctgatcctgatcgagggcagcgtggtgttctaccagctgtacagcctgctgagaagcgagaagtggaaccacaccctgagcatggccctgatcctgttctgcaactactacgtgctgttcaagctgctgagagacagaatcgtgctgggcagagcctacagctaccccctgaacagctacgagctgaaggccaactag

SEQ ID NO: 197550 - DNA, 1467 bp, Artificial Sequence
  derived and/or modified sequence
atgcctggaggaaggcggggtccgtccagacagcagctaagccgttctgcattaccctcgctgcagactttggtgggtgggggatgtggcaatgggaccggccttcgaaatcgtaatggatcagctatcggtctgcccgttccacctattactgcactcatcacccctggaccagtgagacactgccagatccccgatctgcctgtggacggatctctactcttcgagtttcttttttttatctatctgctcgtggctctcttcatccagtatataaacatttacaaaaccgtgtggtggtacccctacaaccaccccgcgagctgtacgagtctgaactttcatcttattgactaccaccttgctgcctttataaccgtgatgttagcccggagactggtgtgggctcttatatctgaggcaactaaggctggagccgcctcgatgatccactacatggtcctgatcagtgctcgtttggtcttgctaaccctatgtggatgggtactgtgttggacgttagtgaacctgttcagatctcattctgtcctgaacctgctatttttgggctatccctttggagtgtatgttccactttgctgcttccatcaggactcccgtgcgcatctactgctcactgactacaactacgtagttcagcacgaagccgtggaagaatcagcatctaccgttggagggctcgccaagagtaaagatttcctttctctgcttctggaaagcttgaaagaacaatttaataacgctacacccattcccacccacagctgcccactcagtccagacctgattcgaaatgaagtggaatgtctgaaggccgactttaatcataggataaaggaggtgctgttcaattctctcttctccgcctattatgtggcattcttgcctttgtgcttcgtgaagtccacccagtactatgacatgagatggagttgcgagcatttgattatggtctggatcaacgcctttgttatgctgactacccagttgttaccaagcaaatactgcgacctccttcacaagtcagctgcccatcttggcaaatggcagaaacttgagcacgggtcatactctaatgccccccagcatatctggtccgagaacactatatggcctcagggggtgctggtgaggcattccaggtgcctgtatcgggccatgggaccctataatgtcgccgttccatcagatgtttcacacgcaagattttacttcctgtttcatcgcccattgagacttttgaaccttttgatactaatcgagggatcagtggtgttctaccaactttactctctgctccgatccgagaagtggaatcacacactgtcaatggcgctcatcttgttttgtaattactatgttctgtttaaattactgcgggaccggattgttctcggccgcgcctacagttaccctttaaattcctatgagctgaaagcaaattag

SEQ ID NO: 197551 - DNA, 1467 bp, Artificial Sequence
  derived and/or modified sequence
atgcctgggggcagaagaggccccagccggcagcagctgagccgcagcgccctgcccagcctgcagaccctggtgggcggcggctgtggaaatggaacaggcctgaggaacagaaatggaagtgccatcggcctgcctgtgccccccatcacagccctgatcaccccaggccctgtgcgccactgccagatcccagacctgcctgtggatggcagcctgctgtttgagttcctgttcttcatctacctgctggtggccctcttcatccagtacatcaacatctacaagacagtgtggtggtacccctacaaccacccagccagctgcaccagcctgaacttccacctgattgactaccacctggccgccttcatcaccgtgatgctggcccggcggctggtgtgggccctgatcagcgaggccaccaaggccggggccgcctccatgatccactacatggtgctgatcagcgcccggctggtgctgctgaccctgtgtggctgggtgctgtgctggaccctggtgaacctcttccgcagccacagcgtgctgaacctgctcttcctgggctacccctttggagtgtatgtgcccctgtgctgcttccaccaggacagccgggcccacctgctgctgacagactacaactacgtggtgcagcatgaagctgtggaggagagcgccagcacagtgggcggcctggccaagagcaaggacttcctgagcctgctgctggagagcctgaaggagcagttcaacaatgccacccccatccccacccacagctgccccctgagcccagacctgatcagaaatgaggtggagtgcctgaaggctgacttcaaccaccgcatcaaggaggtgctcttcaacagcctcttcagcgcctactacgtggccttcctgcccctgtgctttgtgaagagcacccagtactatgacatgcgctggagctgtgagcacctgatcatggtgtggatcaatgcctttgtgatgctgaccacccagctgctgcccagcaagtactgtgacctgctgcacaagtctgctgcccacctgggcaagtggcagaagctggagcacggcagctacagcaatgccccccagcacatctggagcgagaacaccatctggccccagggcgtgctggtgcgccacagccgctgcctgtaccgggccatgggcccctacaacgtggccgtgcccagtgatgtgtcccatgcccgcttctacttcctgttccaccggcccctgcggctgctgaacctgctgatcctgattgagggctctgtggtgttctaccagctgtacagcctgctgcggtctgagaagtggaaccacaccctgtccatggccctgatcctcttctgcaactactacgtgctcttcaagctgctgcgggaccgcatcgtgctgggccgggcctacagctaccccctgaacagctatgagctgaaggccaactag

SEQ ID NO: 197552 - DNA, 1467 bp, Artificial Sequence
  derived and/or modified sequence
atgcccggcggccggcggggccccagccggcagcagctgagccggtctgcgcttccctccttacagacactggttggtggcgggtgtgggaacggaacgggcttacggaatcgcaatggctctgctatcggattgccagttccccctatcacagccctaataacgcccgggcctgttcgccattgtcagatcccagacttgccagtggacggaagcctcctgttcgagtttttgttttttatatacctcctcgtcgctctgttcatacagtatattaacatttataaaacggtgtggtggtatccatacaatcaccctgcttcatgtacctccctgaactttcaccttattgattaccatttggccgctttcatcaccgtgatgctggcaaggcggctggtttgggcactcatctctgaggccactaaggctggtgccgctagcatgattcactacatggttttgatttcagctcgcctggtcctgttgaccctttgcggatgggttctgtgttggacgttggtaaacctgttccggagccactccgtcctgaatctgttgttcctcggatacccctttggggtgtacgtcccgctttgttgtttccatcaggacagtcgcgcgcacctcctgctgactgactacaactatgtggtgcagcacgaagccgtcgaagaatcagccagcacagttgggggattagccaaatctaaagatttcctgagtctgcttcttgagagcttaaaggaacaatttaacaacgcgactccgatccccactcattcctgtcctctaagcccagatctaattcggaacgaagttgagtgtctaaaagccgacttcaaccatagaattaaagaggtgctgttcaactccctgtttagtgcgtattacgtcgcattcctgccgttatgtttcgtgaagtcaacccaatactacgatatgaggtggagctgtgagcaccttattatggtctggatcaatgcctttgttatgctcactacgcagttgctgccctccaagtactgcgatctgctgcacaaatcagcagcccatttaggaaagtggcagaaactggagcatggtagttattcgaatgctccacagcatatttggtccgaaaacacaatctggcctcaaggagtgctggtcaggcatagcagatgcctatatcgggccatgggaccttacaacgtagcagtaccgagcgacgtgtcacatgcccgtttttattttctgtttcatcggcccctgagactcctaaacctgttgattctcatcgaaggttccgtggtcttttatcagctctatagcttacttcggagcgagaaatggaatcacacattgagtatggcccttattctcttttgcaattattacgtactttttaagttgctgcgagatcgcatagtgctgggtcgggcctacagctaccccttaaactcctatgagctcaaagcgaactag

SEQ ID NO: 197553 - DNA, 1467 bp, Artificial Sequence
  derived and/or modified sequence
atgcccggtggacggcgtgggccttcaaggcagcaactcagcaggtccgccttacctagcctccagactctggtgggcggtggttgcgggaacggcaccgggctccggaaccgcaatggtagcgccattggccttcctgtaccaccaatcacggccctgatcacgcccggacccgtaagacactgtcagatccccgacctaccagtggacggctccctgttgttcgaattcctattctttatttatctcctggtggccttatttatacagtacattaatatttacaagacagtgtggtggtatccttacaatcaccccgcatcctgcacatctcttaattttcacttgatcgactatcacctagcggcttttattactgtgatgctggctagacgcctcgtttgggcactgatctcagaagctacaaaggccggagcggcatccatgattcactatatggtcttgatttcagcacgtctagtgctgctgacactgtgtggatgggtgttatgttggacgctggtgaatctgtttagaagccattctgttctgaatctgctcttcctggggtatcccttcggtgtgtacgtgcccctttgttgcttccaccaagatagtcgcgctcacctgctgctgactgactacaactatgtagttcaacacgaagccgtcgaggagtccgcctcaacagtaggcggacttgccaaatccaaagactttctctctctcctgttagagagtttaaaagagcagttcaacaatgcaacccccatccctacacactcatgcccgcttagccccgacctgattcgaaacgaggtcgagtgccttaaagccgacttcaaccaccggatcaaggaagtcctttttaactctctgttttccgcgtactacgtggctttcctgcccctatgcttcgtcaagagcacccaatactatgacatgcggtggtcctgtgaacacctgattatggtctggataaatgcgttcgtcatgctgaccacacagctgttgcctagcaaatactgtgatctgctgcacaagagtgccgcacatttaggtaaatggcagaagttagagcacggatcttactccaacgctcctcagcacatttggtcagagaataccatctggccccaaggagtgctggtcaggcactctcgttgcttgtatcgagcgatgggtccgtacaatgtggcagtgccgtcagatgtgtcccacgccaggttttacttcctgttccaccggcctctgcggctgttgaatctgctgattctcattgaagggtctgttgtcttttatcagctctattctctcctgcggagtgaaaaatggaatcacaccctgtccatggccttgatcctgttctgcaattactacgtccttttcaaactgcttcgggacagaatcgtgctcggaagagcatattcctatccgctcaacagttatgagctcaaggccaactag

SEQ ID NO: 197554 - DNA, 4369 bp, Artificial Sequence
  derived and/or modified sequence
gcactcgcggctggggcagaccgcggtcgcgtagctgacgtcatcgccgtgcgctgccacgtctgctcagctccgcggtaatggaggctagggatgggtgctgaagtatcaggctctggctctagctttagctctggcactggaactgcgtcggagtctgggtctgagtctggcagcccgaagcctggacaccttttcttgattctctaggcgggggctgcctgcgtccaagcagctggtttgcagcgttccaacgctgggagggagttcccttacctggggtccagtctgtaaagttgtcgccgctttctagggaccccgccccaccggctgggactcttccatgcagttgaaactggttgacaaccattaacctgggttgcaactacaggtggcactggaagcagactggttcctggacatgcccggtggaaggaggggccctagtcggcaacagctaagccgttcagctttaccttctttgcagactttggttggtggaggctgtggcaatggaacaggcttgagaaacaggaatggtagtgctattggccttccagtcccacctatcacagccttaatcaccccaggtcctgttcgtcattgccaaattcctgacttgcctgtggatgggagcctactctttgaattcctttttttcatctacctgttggttgctcttttcattcagtacatcaacatttataaaacagtgtggtggtatccttacaatcatcctgcttcttgtacatcactgaattttcatctcattgattatcatctggcagcattcatcacagtgatgcttgcgaggaggcttgtatgggctctcatctcagaggctactaaggcaggtgcagcatcaatgattcactacatggttctgatatcagctcgcttggtactactcactttgtgtggatgggtactttgttggaccctcgtcaatctctttcgaagccattcagtcctcaatctccttttccttggctacccgtttggtgtttatgttcctctttgctgttttcatcaagatagtagagcacatcttcttctcacagactacaactatgtggttcagcacgaggcagtagaggaaagtgcctcgactgtgggaggcttggccaaatccaaagactttctctccttgttgctggagtcgctaaaagaacagtttaataatgccacacccatccccacccacagttgtcccctatctccagacctcattcgcaatgaagtagaatgtctgaaagcagatttcaaccacagaatcaaggaggttctcttcaactccctcttcagtgcctactatgttgcatttctccccctgtgttttgtgaagagtacccagtactatgacatgcgctggtcatgtgagcacctcattatggtgtggatcaatgcttttgtcatgctcaccacgcaactgttgccatccaaatactgtgatttgctacataaatcagctgctcacctgggcaagtggcagaagttggaacatgggtcctacagcaatgctccacagcacatttggtcagaaaatacaatatggcctcaaggggtgctggtgcggcacagcagatgtttatatagagccatggggccttacaacgtggcagtgccttcagatgtatctcatgcccgcttttatttcttatttcatcgaccattaaggctgttaaatctgctcatccttattgagggcagtgtcgtcttctatcagctctattccttgctgcggtcggagaagtggaaccacacactttccatggctctcatcctcttctgcaactactatgttttatttaaacttctccgggacagaatagtattaggcagggcatactcctacccactcaacagttatgaactcaaggcaaactaagctgcctctcaacaatgagggagaactcagataaaaatattttcatacgttctatttttttcttgtgatttttataaatatttaagatattttatattttgtatactattatgttttgaaagtcgggaagagtaagggatattaaatgtatccgtaaacaaggtgatgtgatctttcatgtgttagtatattcgaataatatacatatgagaggtatgcctgtccagtaaagagattgatttgtttgtatggctctggaataactcattcgtttatgaacacatctcatgtattacttgacacagtacctttggtatgtctgcttttctttcaatcctcattatctttagccctcagctggccagtacttattgctaaagaaagggagatcaatggagttgcctaccagcacccattctcttttagttcagctggctaatagtattggaatacattgggaaaagagtgggttaaagtcctaggtggggttctctttgttgcctaccaggagaaagcagtaggcttcctttctaagatacggactcagctggtctattttaccctgtgacatttaaatatacttttgaataagctactatcctgaggctgagggttttgctgccacttttcctgtgtttccacttctgcttccaaagattttcctcttagttgtttgaaataatactttgccagacaggaagtctttagactgcccacattcatgaagaagatgatgtgtggctggatcagtaggagaagctgagtgcaaatgccatgtgggctagagtatgggaaggttgaaaattccaagtaactgggagagtgggcaagtcctcagctgaacaatcttggatgtagtctagcagcaacccacctacaatggcgttatgtttggagttatgaggggaagtgaaagataagaattacctacagctttgtactcagataatttatatccaaaatttgtgttttaaatttcatactccagaactttcatgtttatgagtattagccttttaagttatgggaggtgatatacttagtccattgatgttgtcacttgtcatctaaacttatgagaccttgtcttagagaatctaaaatatattgtcatatgttttctgtgctgagtttggtttgttacactgtgaagcttttggtgaaacaaaataagacttatgaagtaaaaagaccaatcatgtcgttgacaagctggctctgaaaataattcttgcagaagagttcctgaaaggcttcaccaaggggaagtattgtgaggagtgtttgtaaaaccaaggtacccaatatcagttttatgtttaaatcaataattgtttctttaaatattttgatgtgtatactttttttttaagttaacattatttggcattcagtctgagtctgttcaaccattcaacaaatatatattaaccagtaggcactatattaggccctggggatatagcagtgaatgagaaatgcaaaggtcctacttgcacagagcttacaatatgcgtgggggtgggggagttaggtggtgcagaaaatacagcaaataaatttatgtgtaatataacattccctggtagtagtgataagtgtagcaaagggaaatcaggacaaggaaatagtggtaagaatagcactgctagaaggcatctttgaggagatgatttttaagcaaagaaaaagcaagactgaatcatataaatagctttggggagaattccatgttacagtagcagaaagggcagtgccctgaggtggggacaagttggtatattggaagaatagcaagaaaatatattaggttagttgctttttaaagtagttcagcctaaatatagtggttcttgaggtaggggtgggaagggtagggaatctgccatctttctattctttctgtaggatcttgaaaatatgcttctcttggcagcaacattttcatgagattactcagcagttgagagcaaaatgggtggcatgggcacagagatatctcatcaaaattgccccaacttggctccagcttgggaaagtaacccagaaaaccctgattagagataacagaccagtcttatgaactaatatgatgccccttctggcttgatctgtcttggtcctatcctaagggaatagcacagaaccagatgctggcttggctaaataagtaagtggatataagaaataaataaaaattaattttggctaatggaattgcaaagttcctcctaccctcacctccagatatggcagcatacggggcataagaccgtttagttcaacgtgttctacacattccagctgttttttgtttgtttgttttgttgttttgtttttgtaggggccacgttcatggaagagagaaaaattactagttacccggatatcctattatagttcatgtaacagaagggacactatatttgctcactgatagtagaaaaatgtgtaatcattaaagaatgaccttttttgtaa

SEQ ID NO: 197555 - protein, 179 aa, Artificial Sequence
  derived and/or modified sequence
MVQAWYMDDAPGDPRQPHRPDPGRPVGLEQLRRLGVLYWKLDADKYENDPELEKIRRERNYSWMDIITICKDKLPNYEEKIKMFYEEHLHLDDEIRYILDGSGYFDVRDKEDQWIRIFMEKGDMVTLPAGIYHRFTVDEKNYTKAMRLFVGEPVWTAYNRPADHFEARGQYVKFLAQTA

SEQ ID NO: 197556 - DNA, 540 bp, Artificial Sequence
  derived and/or modified sequence
atggtgcaggcctggtacatggacgacgctcctggagatccccgccagccacaccgccccgaccctgggcggcccgtggggctcgagcaattgcggagactgggggtcctctattggaagctggacgcagacaaatacgagaacgaccccgagttggagaaaatccgcagggagcgcaattactcctggatggacatcatcactatttgtaaggacaaattaccaaactacgaggagaaaataaaaatgttctacgaagagcatttacacctggacgacgagattaggtacatcctggacgggagtgggtactttgacgtgagagacaaagaagatcagtggatcagaatcttcatggagaagggcgacatggtgactctgcctgccgggatctaccatcgattcacggttgacgaaaagaattacacaaaggcaatgcgcctcttcgtgggagagcccgtgtggacagcctacaaccggccagccgatcactttgaagcccgcgggcagtacgtaaagttcctggcccagactgcttag

SEQ ID NO: 197557 - DNA, 540 bp, Artificial Sequence
  derived and/or modified sequence
atggtgcaggcctggtacatggatgatgcccctggggacccccggcagccccacaggccagaccccggccggcctgtgggcctggagcagctgcggcggctgggcgtgctgtactggaagctggatgctgacaagtatgaaaatgaccctgagctggagaagatccggcgggagaggaactacagctggatggacatcatcaccatctgcaaggacaagctgcccaactatgaggagaagatcaagatgttttatgaggagcacctgcacctggatgatgagatccgctacatcctggatggcagcggctactttgatgtgcgggacaaggaggaccagtggatccgcatcttcatggagaagggggacatggtgaccctgcctgctggcatctaccaccgcttcaccgtggatgagaagaactacaccaaggccatgaggctgtttgtgggggagcctgtgtggacagcctacaacagacctgctgaccactttgaggcccggggccagtatgtgaagttcctggcccagacagcctag

SEQ ID NO: 197558 - DNA, 540 bp, Artificial Sequence
  derived and/or modified sequence
atggtgcaggcctggtacatggacgacgcccccggcgacccccggcagccccacaggcccgaccccgggcgaccagttggtctggaacagctgcggcggctgggtgtgctttattggaagctggatgctgacaaatacgaaaacgatcccgaactggagaagattagacgcgagcgcaactattcgtggatggacattatcacaatctgcaaagacaaattgccaaattatgaggaaaaaatcaagatgttttatgaagagcacctacatctcgatgatgaaatacgctatatcttggatggcagtggatacttcgatgtgagggacaaggaagatcagtggatcaggattttcatggaaaaaggcgatatggtcaccttgccggccggcatctatcatcggttcacagtggacgagaaaaattacaccaaggctatgcgattgttcgtcggagaaccggtgtggacagcttacaaccggccagcggatcacttcgaagcccggggtcagtacgttaaatttctggcacagactgcttag

SEQ ID NO: 197559 - DNA, 540 bp, Artificial Sequence
  derived and/or modified sequence
atggtgcaggcctggtacatggacgacgccccaggcgatccacgccaaccccaccggcctgacccaggcagaccggttggcttggagcagctgaggagattgggagttttatattggaaactcgatgcagacaagtacgagaatgacccagagctcgaaaagatccgacgagaacggaattatagctggatggacatcattacaatttgcaaggacaaactgccgaactatgaggaaaaaataaagatgttctacgaagagcatctacacctcgacgatgagattagatacatcttggacggctctggatattttgatgttcgcgataaggaggatcaatggatccgaatttttatggagaaaggcgatatggtcacactcccagccggaatctatcacagatttaccgtcgacgagaagaattacacaaaagccatgagactgtttgtcggcgaaccggtctggaccgcctacaatagaccagcagatcatttcgaggcacgcggacaatatgtaaagttcctggctcagactgcttag

SEQ ID NO: 197560 - DNA, 1830 bp, Artificial Sequence
  derived and/or modified sequence
tggcgaacggctggccccgggccgcgggcctcaggcaggtccgagggtgcccaggacagggtcggggcttgaatgcctttgcttccgaaaacagcggagccgtggggcctcccccgcgccggccctgcctccaaccagccgcccaatcccggctcccatgcgcgtccacgcctccctataagataaagcgcggccgacgggctccgagcgcggcccctgggttcgaacacggcacccgcactgcgcgtcatggtgcaggcctggtatatggacgacgccccgggcgacccgcggcaaccccaccgccccgaccccggccgcccagtgggcctggagcagctgcggcggctcggggtgctctactggaagctggatgctgacaaatatgagaatgatccagaattagaaaagatccgaagagagaggaactactcctggatggacatcataaccatatgcaaagataaactaccaaattatgaagaaaagattaagatgttctacgaggagcatttgcacttggacgatgagatccgctacatcctggatggcagtgggtacttcgatgtgagggacaaggaggaccagtggatccggatcttcatggagaagggagacatggtgacgctccccgcggggatctatcaccgcttcacggtggacgagaagaactacacgaaggccatgcggctgtttgtgggagaaccggtgtggacagcgtacaaccggcccgctgaccattttgaagcccgcgggcagtacgtgaaatttctggcacagaccgcctagcagtgctgcctgggaactaacacgtgcctcgtaaaggtccccaatgtaatgactgagcagaaaatcaatcactttctctttgcttttagaggatagccttgaggctagattatctttcctttgtaagattatttgatcagaatattttgtaatgaaaggatctagaaagcaacttggaagtgtaaagagtcaccttcattttctgtaactcaatcaagactggtgggtccatggccctgtgttagttcatgcattcagttgagtcccaaatgaaagtttcatctcccgaaatgcagttccttagatgcccatctggacgtgatgccgcgcctgccgtgtaagaaggtgcaatcctagataacacagctagccagatagaagacacttttttctccaaaatgatgccttggggtggggagtggtagggggaagagctcccaccctaaggggcacacactgagttgcttatgccacttccttgttcaaaataaagtaactgccttaatcttatactcatggcttggagttaccttatattcaggtatatgtgatattttgcctggtttgttaaaattgccccatttagattccttctataattgttcttatagataagtaatttatatatgagctgtgttagtattttttcagtgtgagatctctggattctttcacaataaagctgttgaattttaacaggagtattagtacataaattttctactcaacaattccgagataggattatgcctagtttgtcatatcacagaaaaactccaagttaacttcatgttttggaagggcaggtcgtttttaaagtatttctttttttaactggatgaaaaatcttcatgttaggattaattttcttaatcacctccacactgtacagaggaaactcaagccttaaatgtttaagtaaactctgtctcagttttaggattaaaatacccaccggtggtgtgatgatgccatataccgcagggcttgcttctgtcaagtgtgactctatctcagtaattaaaataagtgctgatctac

SEQ ID NO: 197561 - DNA, 540 bp, Artificial Sequence
  derived and/or modified sequence
atggtgcaggcctggtacatggacgacgcccccggcgaccccagacagccccacagacccgaccccggcagacccgtgggcctggagcagctgagaagactgggcgtgctgtactggaagctggacgccgacaagtacgagaacgaccccgagctggagaagatcagaagagagagaaactacagctggatggacatcatcaccatctgcaaggacaagctgcccaactacgaggagaagatcaagatgttctacgaggagcacctgcacctggacgacgagatcagatacatcctggacggcagcggctacttcgacgtgagagacaaggaggaccagtggatcagaatcttcatggagaagggcgacatggtgaccctgcccgccggcatctaccacagattcaccgtggacgagaagaactacaccaaggccatgagactgttcgtgggcgagcccgtgtggaccgcctacaacagacccgccgaccacttcgaggccagaggccagtacgtgaagttcctggcccagaccgcctag

SEQ ID NO: 197562 - protein, 204 aa, Artificial Sequence
  derived and/or modified sequence
MGEAEVGGGGAAGDKGPGEAATSPAEETVVWSPEVEVCLFHAMLGHKPVGVNRHFHMICIRDKFSQNIGRQVPSKVIWDHLSTMYDMQALHESEILPFPNPERNFVLPEEIIQEVREGKVMIEEEMKEEMKEDVDPHNGADDVFSSSGSLGKASEKSSKDKEKNSSDLGCKEGADKRKRSRVTDKVLTANSNPSSPSAAKRRRT

SEQ ID NO: 197563 - DNA, 615 bp, Artificial Sequence
  derived and/or modified sequence
atgggcgaagcagaagtggggggagggggagccgctggtgataaagggcccggggaggccgcaaccagtccagctgaagagaccgtggtctggagccccgaagtggaggtttgtctgtttcacgctatgctgggtcataagccagtcggggtgaaccggcacttccacatgatttgcatccgggacaagttttctcagaacattggacgacaggtacccagtaaggtaatctgggaccacctctcgaccatgtacgacatgcaagcccttcatgaatctgaaatcctccctttccctaatccagagcgaaattttgtgctgcctgaggaaattatccaggaggtgcgtgaaggcaaggttatgatagaggaagagatgaaagaagagatgaaggaggatgtggacccgcacaacggagcggatgatgttttctcctcttcaggaagcctgggaaaggcatccgagaagtctagcaaagataaggagaaaaactcatctgacttagggtgcaaagagggcgcggacaagcggaagaggtctcgcgttacagacaaagtcttgacagctaactctaatccgtcatcaccaagcgccgctaagcggaggaggacgtag

SEQ ID NO: 197564 - DNA, 615 bp, Artificial Sequence
  derived and/or modified sequence
atgggagaggccgaggtgggcggcggcggggccgccggggacaagggccctggagaggccgccaccagccctgctgaggagaccgtggtgtggagccctgaggtggaggtgtgcctcttccacgccatgctgggccacaagcctgtgggcgtgaacagacacttccacatgatctgcatccgggacaagttcagccagaacatcggccggcaggtgcccagcaaggtgatctgggaccacctgagcaccatgtatgacatgcaggccctgcatgaaagtgagatcctgcccttccccaaccctgagaggaactttgtgctgcctgaggagatcatccaggaggtgcgggagggcaaggtgatgattgaggaggagatgaaggaggagatgaaggaggatgtggacccccacaacggggctgatgatgtgttcagcagcagcggcagcctgggcaaggccagcgagaagagcagcaaggacaaggagaagaacagcagtgacctgggctgcaaggagggcgctgacaagaggaagaggagccgggtgacagacaaggtgctgacagccaacagcaaccccagcagccccagcgctgccaagagaagaagaacatag

SEQ ID NO: 197565 - DNA, 615 bp, Artificial Sequence
  derived and/or modified sequence
atgggcgaggccgaggtgggcggcggcggcgccgccggcgacaagggacccggcgaggccgctacctctccagcggaggagaccgtcgtttggagtccagaggtggaggtgtgcctttttcatgccatgctggggcataaacctgtgggagtaaacagacatttccatatgatttgcatccgggataagttttcacagaacattggtagacaggtacctagcaaagtcatttgggaccacctgagcacaatgtacgacatgcaggcacttcacgagtctgaaatcctgcccttcccaaacccagaaaggaactttgttctccctgaagaaatcatccaggaagtgagggagggcaaagtgatgatcgaggaagaaatgaaggaggagatgaaagaggacgtagacccacataacggcgctgacgacgtgttttcttcctcagggtccctaggcaaggctagtgagaagtcaagtaaggacaaggagaagaattcctctgatctagggtgtaaggagggtgccgacaagagaaaacggtcccgggtgacggacaaggtactgacggctaacagtaatcctagtagtccttcggctgccaagcggaggagaacctag

SEQ ID NO: 197566 - DNA, 615 bp, Artificial Sequence
  derived and/or modified sequence
atgggggaagcggaagtgggtggcggaggagctgccggagataagggcccaggggaggcagctacttctccagctgaagagaccgtggtgtggtctcctgaagtggaggtctgtttgttccacgctatgttgggtcataagcctgtgggagtgaaccgacatttccatatgatatgtatcagggacaagttcagccagaacataggtcgccaggtcccttcgaaagtgatctgggaccatctgagtacgatgtatgatatgcaagcactgcatgagagtgagatccttcccttccccaatcccgaacgcaacttcgttctgcccgaagaaataattcaggaagtgcgggagggcaaagttatgatagaggaagagatgaaggaggaaatgaaggaagatgtggacccacacaacggggctgatgacgtcttcagcagcagtggctccctcggaaaggcgagcgaaaagtcctccaaggacaaagagaagaattcaagcgacctcggatgtaaggagggagcagacaaacgtaagcggagtcgcgttaccgacaaggtgctcaccgcgaatagtaatccatcctccccctctgcagcaaaaagaagaaggacatag

SEQ ID NO: 197567 - DNA, 1636 bp, Artificial Sequence
  derived and/or modified sequence
agtgcgcctgcgcggagctcgtggccgcgcctgctcccgccgggggctccttgctcggccgggccgcggccatgggagaggccgaggtgggcggcgggggcgccgcaggcgacaagggcccgggggaggcggccaccagcccggcggaggagacagtggtgtggagccccgaggtggaggtgtgcctcttccacgccatgctgggccacaagcccgtcggtgtgaaccgacacttccacatgatttgtattcgggacaagttcagccagaacatcgggcggcaggtcccatccaaggtcatctgggaccatctgagcaccatgtacgacatgcaggcgctgcatgagtctgagattcttccattcccgaatccagagaggaacttcgtccttccagaagagatcattcaggaggtccgagaaggaaaagtgatgatagaagaggagatgaaagaggagatgaaggaagacgtggacccccacaatggggctgacgatgttttttcatcttcagggagtttggggaaagcatcagaaaaatccagcaaagacaaagagaagaactcctcagacttggggtgcaaagaaggcgcagacaagcggaagcgcagccgggtcaccgacaaagtcctgaccgcaaacagcaacccttccagtcccagtgctgccaagcggcgccgcacgtagaccctcagccctggtggcggcagagaagcgggcgaggcactgtggtcgctgagggggttggctgggtctgagtgccaccccccaggccacagtgataccatcccagtgccatgagcccacactgcccgccctcaggctctcaggtgaacgtggccgtcagcggggaaacgtgtgtgtcagttggaccatgtgggaccctgatggacctgaaagaccaggatcggtccagctcagatattgagggctctgaagcctagttctgtcttctctggagcagctgtggcttccccgtggctgcttggtgacatggattagcgctacgtgggctgcagcatttgggatccaggctacctagaggggcatcgggccagggaaaacctcggattagcaagcaataaaaacatgacctcactcttcctcaaaggagcccctggtcttccctgtgtgactcagttctttccatctgtttgtcccgctgcaagcctctttctgcgctgactgtgacattggaacgtggccttcctgtcaccccctccgtgccacgcactgaaggccacccccacccacctgggaaactaagaactggatattttgcctcattcacttgtactgtaacaatgtatataatttggttggtatttcactatttaatttttaagaagcctattttactagtgttttatatgaacaaagtactgcagaagttaaacctgtgttgtattttttctgagatgttttgctttaagagatactttttgctcagtttttatatgccagatacagagaatttgtagcggttatttttgtatgatctagtaacttgcaaacagaccaaatggatgagaggcggggaccgtgcagctgtcggctgatgaggaggcggccgccccagtgctgatggagatgccactttcgtgtgactgcgaacattaaagcacaaaaaaatccaa

SEQ ID NO: 197568 - DNA, 615 bp, Artificial Sequence
  derived and/or modified sequence
atgggcgaggccgaggtgggcggcggcggcgccgccggcgacaagggccccggcgaggccgccaccagccccgccgaggagaccgtggtgtggagccccgaggtggaggtgtgcctgttccacgccatgctgggccacaagcccgtgggcgtgaacagacacttccacatgatctgcatcagagacaagttcagccagaacatcggcagacaggtgcccagcaaggtgatctgggaccacctgagcaccatgtacgacatgcaggccctgcacgagagcgagatcctgcccttccccaaccccgagagaaacttcgtgctgcccgaggagatcatccaggaggtgagagagggcaaggtgatgatcgaggaggagatgaaggaggagatgaaggaggacgtggacccccacaacggcgccgacgacgtgttcagcagcagcggcagcctgggcaaggccagcgagaagagcagcaaggacaaggagaagaacagcagcgacctgggctgcaaggagggcgccgacaagagaaagagaagcagagtgaccgacaaggtgctgaccgccaacagcaaccccagcagccccagcgccgccaagagaagaagaacctag

SEQ ID NO: 197569 - protein, 484 aa, Artificial Sequence
  derived and/or modified sequence
MWYVSTRGVAPRVNFEGALFSGYAPDGGLFMPEELPQLDRGTLCQWSTLSYPGLVKELCALFIGSELLPKDELNDLIDRAFSRFRHREVVHLSRLRNGLNVLELWHGVTYAFKDLSLSCTTQFLQYFLEKREKHVTVVVGTSGDTGSAAIESVQGAKNMDIIVLLPKGHCTKIQELQMTTVLKQNVHVFGVEGNSDELDEPIKTVFADVAFVKKHNLMSLNSINWSRVLVQMAHHFFAYFQCTPSLDTHPLPLVEVVVPTGAAGNLAAGYIAQKIGLPIRLVVAVNRNDIIHRTVQQGDFSLSEAVKSTLASAMDIQVPYNMERVFWLLSGSDSQVTRALMEQFERTQSVNLPKELHSKLSEAVTSVSVSDEAITQTMGRCWDENQYLLCPHSAVAVNYHYQQIDRQQPSTPRCCLAPASAAKFPEAVLAAGLTPETPAEIVALEHKETRCTLMRRGDNWMLMLRDTIEDLSRQWRSHALNTSQ

SEQ ID NO: 197570 - DNA, 1455 bp, Artificial Sequence
  derived and/or modified sequence
atgtggtatgtcagtacccggggagtggccccacgcgtgaatttcgaaggagccctgttctccggctacgcacccgatggagggctgttcatgccagaggaactgcctcagttagacaggggaaccttgtgccagtggagtaccctctcctatcccggtctggtgaaagaactctgtgcgctgtttatcggttcagaactgcttcctaaagatgagctgaacgacctgatagatagggctttttcacgcttccgccacagggaagtggttcacctgtcccgtctgagaaatggcctgaacgttctcgagctctggcatggagtcacctatgccttcaaagacctctcactgtcatgtactacacaatttctccaatactttctggagaaaagagagaaacacgtgactgtggtggtaggaacctctggcgacacgggatccgctgccatcgaaagcgtgcagggtgccaaaaatatggacataattgtactactgccaaaaggtcactgtaccaaaattcaggaactccagatgaccaccgttctcaagcagaatgtgcacgtgttcggagttgagggaaactctgacgagctggacgagcccattaagactgtctttgctgatgttgctttcgtgaagaagcataacctcatgtcgctgaatagtattaattggagcagagttctggtgcaaatggcccatcattttttcgcctacttccagtgcaccccatcgttggatactcaccccctgcctttggttgaggtggtggtaccgacaggagctgcaggaaatcttgctgctgggtacatcgcccaaaaaattggcttaccaattcgtttggtggtggcggtcaaccgaaacgacattatccacagaaccgtgcaacagggcgatttttcgctgtcagaagctgttaagagtacactggccagtgccatggatatacaggtgccctacaatatggagcgagtgttttggttattgagtggaagcgattcacaagtgacacgtgcgctcatggagcaattcgaaagaacccagagcgttaacctgccaaaggaactgcactcaaaactgtctgaggcagtgacttcagtctcggtctcggacgaggcgattacgcaaaccatgggcagatgctgggacgaaaatcagtacctgctctgtccacattccgcagtggccgtcaactatcattatcagcaaatagatcggcaacagcccagcactcccaggtgctgcttggccccagcaagcgccgcaaaatttcccgaagccgtgctcgccgctgggttgactcctgaaactccggctgaaatcgtcgccctcgagcacaaggaaacccgctgcaccctgatgaggcggggagacaattggatgctcatgctccgcgatacgatagaagacttatctcgccagtggcggtctcacgcgctgaacacaagccagtag

SEQ ID NO: 197571 - DNA, 1455 bp, Artificial Sequence
  derived and/or modified sequence
atgtggtacgttagcactagaggagtggcacctagagtgaatttcgaaggcgctttgttttctggatatgcaccggacggcggtttgtttatgcctgaggagcttccccaattggatagagggactctgtgccaatggtcaaccttaagctaccctggcctggtgaaggagctgtgtgcactgttcatcggcagcgagcttttaccaaaagacgagttgaatgacctcatagatagagctttcagcagatttcggcacagagaagtcgtacacttgagcagattgaggaatgggctgaacgtgctggagctgtggcatggggtcacttacgccttcaaggatctgagtctgtcttgcacgacacaattcctgcagtactttttggagaagagagaaaaacacgttacagtggtagtcggcacatccggtgacactgggtctgccgctattgaaagcgttcaaggggctaagaacatggacatcattgtgctgctgcctaagggacattgcacaaagattcaggagctgcagatgaccacggtgctaaagcaaaacgtgcacgttttcggcgttgaagggaattcagacgaactcgacgaacctatcaagaccgtctttgccgatgttgcctttgtgaagaaacacaacctgatgtcactcaattcaataaactggagcagggtgctggtgcagatggcacaccatttcttcgcttactttcaatgtacaccaagtctggacactcaccctctgccactagttgaggtcgttgtccccacgggagccgcagggaaccttgccgcaggctacatcgcacaaaaaatcggcctgccaatcaggctggtcgtggccgtgaatagaaacgatattattcaccgcactgtgcagcaaggggacttctccctgtccgaggccgtgaagagcactctggcttccgctatggacattcaggttccctacaatatggagagagtcttctggttgctatctggcagcgatagtcaagtgacgcgagcccttatggaacaatttgagagaacccagagtgtgaatctcccgaaagaactccacagcaaactctcggaggcggttacctccgtgagtgtgagcgatgaagctatcacccagaccatgggtcgctgctgggatgagaatcagtacctcctgtgtccccacagtgcagtggccgtgaactaccactaccaacagattgaccgtcaacaaccaagtactcctcgatgctgtctggctcccgctagtgcagcaaagttcccagaagcagtcctggccgctgggctgactccagagactcccgctgaaatcgtggctttagaacataaggagacacggtgcaccctgatgcgccgtggagacaactggatgctgatgctgagggacacaatcgaggatctttccaggcaatggcgcagtcatgcacttaataccagtcagtag

SEQ ID NO: 197572 - DNA, 1455 bp, Artificial Sequence
  derived and/or modified sequence
atgtggtatgtatccaccaggggtgtggcccctagagtcaatttcgagggcgccctcttctctggctacgctcctgacgggggtctctttatgcccgaagaactgccccaactggatcgcggcacgctttgccagtggtcaactctgtcatatcctgggctggttaaagaactgtgcgcgctgtttattgggtctgaactcctgcctaaagacgagctgaacgacttgatcgatagagccttcagtcggttccgacatagggaggtcgtccacctttccagattacgcaacggcctgaatgtgctagaactgtggcatggtgtaacctacgccttcaaggacttatctcttagctgcactacccaattcctccagtactttcttgaaaaacgggagaaacatgtcacagtcgttgtagggacatccggtgacaccgggagtgcagcgatagagtccgtccagggagcgaaaaacatggacataattgttctgctgcccaaaggtcattgcacaaaaatacaagaactgcagatgacgaccgttctaaagcagaatgtccacgttttcggggtggagggcaatagcgacgaattagacgagccgatcaaaacagtttttgcagacgttgcgttcgtgaagaaacataatctgatgtctcttaactccattaattggtctcgggtgttagtgcagatggctcaccacttctttgcttatttccaatgcactcctagtctcgacactcaccccttacccctggtagaggtggtagtgccaacaggcgcggcaggcaacctggcagctggttacatcgcgcagaaaattggccttccaattaggttagtcgttgccgtcaatcggaacgatataattcacagaacggttcagcagggtgactttagcctctcggaggcagttaagagcacccttgccagcgctatggatatacaggttccctataacatggagcgcgttttctggcttctaagtggatccgactctcaggtgacccgcgctctgatggagcaattcgagaggacacagtccgtaaaccttccaaaggagcttcactcaaagctctccgaggccgtaacctctgtatctgtttctgatgaagccattacccagacgatgggaagatgctgggacgagaatcaatatcttctctgtccccactcagccgtagcagtgaattatcattaccagcagatcgatagacagcagccatccacccctaggtgctgtttagctcctgcctctgcggctaaatttcccgaggctgtcctggctgcaggtttaacccctgaaactccagccgaaatagtggcgctggaacataaggagacacgatgtactctgatgaggagaggagataactggatgttgatgctccgggatactatagaggacttatctcggcagtggagaagtcacgcgttaaacacctcccagtag

SEQ ID NO: 197573 - DNA, 1455 bp, Artificial Sequence
  derived and/or modified sequence
atgtggtacgtttcaactcgcggagtcgcgccccgcgtgaattttgagggcgccttgttttccggatacgcccccgacggaggcctttttatgcccgaagaactcccccagctggataggggaacgctttgtcaatggtcaactttatcttaccccggcctggttaaggaactttgcgccctgtttatcggaagtgaattattgcctaaggatgagctgaacgacctgatcgaccgagctttctcacgtttccgtcacagggaagtcgtgcacctctcaagactccggaacggattgaatgtgctggagctgtggcacggcgtgacatacgccttcaaagacctatccctctcctgtactactcagttcctccaatactttttagagaaaagagaaaaacacgtcacagtagtcgtgggaacctctggggacacagggtcagctgccatagaatctgtccagggagctaagaacatggacatcatagttctgctgcccaagggccactgtacaaagatccaagagctgcaaatgaccacagtcctaaagcagaacgtccacgtcttcggggtcgagggaaattctgatgaactggatgagcctatcaaaacagtctttgcggatgtggccttcgtgaagaaacacaacctcatgtccctgaatagtataaactggagtcgggtgctggtgcagatggcccaccacttttttgcttacttccagtgcactcccagtctcgacactcaccctctgcctctggtggaggtggtagtacctaccggcgcagctggcaatctggccgcaggctatatcgctcaaaaaattgggctacccatcaggctcgtggtggccgtgaaccgtaatgacatcatccatcgcaccgtccagcaaggagacttttcactctcagaagcagtgaagtctactctcgctagtgctatggatatccaggtgccatacaacatggaaagagtcttttggttgctgtcgggatccgatagccaagtgacccgggccctcatggaacagtttgaacgcactcagtcagtgaacctgcccaaagaacttcacagtaaactgagtgaagccgtgaccagcgtttccgtctccgacgaagctataacccagactatgggacggtgctgggacgagaatcagtacttgctgtgtccacattccgcagtcgccgtcaactatcattatcagcagatcgaccgccagcaaccaagtacacctcggtgttgtctggctccagcttccgccgctaaattcccagaggcagtcctggccgccggactgaccccggagactcccgctgagatcgtggctctagaacacaaagagacacgctgcaccttgatgagacggggcgataactggatgttaatgctgagggatacgatagaagatctctcacggcagtggcggagccatgctctgaacacctcacaatag

SEQ ID NO: 197574 - DNA, 1455 bp, Artificial Sequence
  derived and/or modified sequence
atgtggtatgtctccaccagaggtgtagcacctcgagtgaattttgagggcgctttattttcaggctacgctcccgacggagggctgttcatgcccgaggaattaccgcagctggacagaggaaccttgtgtcagtggagcactcttagttatccgggcctagtgaaagaactgtgtgccctgttcatcggttccgagctgctaccaaaagacgagctgaacgatttgattgatcgcgctttctcccgcttccgccaccgcgaagtagtgcaccttagtcgactgcgcaatggactcaacgtgctggagctctggcacggagttacctatgcctttaaagatctctccctgtcatgtacaacccagtttctgcaatactttttagaaaagcgagagaaacatgttaccgtagtcgtgggaaccagcggggataccggatcagcagccatcgagtcagtgcaaggagcaaagaatatggatattatcgtcctgctgcctaagggccactgtactaaaattcaggaactccagatgacaaccgtccttaaacagaacgtccatgtctttggggtcgagggaaattccgatgaactagacgagcccatcaagaccgtgtttgccgatgtcgcatttgttaaaaaacacaacctcatgtccttaaattctatcaactggagccgggttttggtgcaaatggcacaccattttttcgcttattttcagtgtacgccttctctcgatacacaccccctccccctcgttgaagtcgtggtgccaaccggagccgccgggaaccttgctgcgggatatattgctcagaagatcggactccccatccgtttggtcgttgccgttaaccgtaatgacatcatacatagaacagtgcagcagggcgatttttccctgtctgaagctgtcaagtctacactagcatccgccatggacattcaagtcccctacaacatggaacgggtgttttggcttttgtccgggagcgattcccaagtcacccgcgctcttatggaacagttcgagcgtacccagtcagttaatttgcccaaggagctccattctaagctatctgaggccgtaacctccgtgtctgtatccgacgaggccataacccaaaccatgggtcgctgctgggatgagaaccagtacttgctatgtccacattctgccgtggccgtgaactaccattatcaacagatcgacagacaacagccctccaccccccgatgttgcctggccccagcctccgccgcaaaattccccgaagcagtactggccgccggcctgacccccgaaacgcccgcagaaatagtggctctggaacacaaagaaactcgatgtacgctgatgaggaggggcgataattggatgctaatgctccgagacacgattgaggacctgagccgtcagtggaggtcacatgctttgaataccagccagtag

SEQ ID NO: 197575 - DNA, 1455 bp, Artificial Sequence
  derived and/or modified sequence
atgtggtacgtttcaactcgcggagtcgcgccccgcgtgaattttgagggcgccttgttttccggatacgcccccgacggaggcctttttatgcccgaagaactcccccagctggataggggaacgctttgtcaatggtcaactttatcttaccccggcctggttaaggaactttgcgccctgtttatcggaagtgaattattgcctaaggatgagctgaacgacctgatcgaccgagctttctcacgtttccgtcacagggaagtcgtgcacctctcaagactccggaacggattgaatgtcttggagctgtggcacggtgttacatacgctttcaaggacttgtccctcagctgcacaacccagttcttacagtatttcttagagaagcgagagaaacatgtgacggtcgtcgtgggaacatccggtgatacagggagcgctgcaatcgaatccgtgcagggagcgaaaaacatggacatcattgtcttattaccaaagggccattgcactaagattcaggaattacaaatgaccactgtacttaaacaaaatgttcacgtatttggtgtcgaaggaaattccgacgagctggatgagccaataaaaacagtgtttgcagatgtagcattcgtaaaaaagcataacctgatgtctctcaactcaatcaactggagtagggttcttgtgcagatggcccatcacttttttgcctactttcagtgcactccctctctcgatactcatccactccccctggtagaagtcgtggtgcctacgggagccgccggaaatctcgctgccggatacattgcgcaaaagattggtctccccatccgccttgtagttgccgtgaacaggaacgacattattcacaggacggtgcaacagggtgacttctctcttagcgaggcagttaaaagtaccctcgcgagcgcaatggatatccaagtaccgtacaatatggaacgcgtgttctggttactatctggctcagattcccaggtgacgcgtgccttaatggaacaattcgagcgaacacagagcgtgaatctgccgaaagaactccattcaaaattatccgaggccgtgacctcagtatccgtgagcgatgaagccatcacacagacaatgggacgatgttgggatgagaaccagtacttactatgcccacattctgctgtagccgttaattaccattatcagcaaattgatagacagcaaccttccacacccaggtgttgtttggcacctgcttccgcagccaaatttccagaggctgtgctggccgctgggctgacccccgagactccggcagaaattgtcgcattagagcataaagagacacgctgtacgcttatgagacgaggagataattggatgctgatgcttagagacactatagaagacctgagtagacaatggcggtctcacgccctgaacacgtcccaatag

SEQ ID NO: 197576 - DNA, 1455 bp, Artificial Sequence
  derived and/or modified sequence
atgtggtacgtgagcaccagaggcgtggcccccagagtgaacttcgagggcgccctgttcagcggctacgcccccgacggcggcctgttcatgcccgaggagctgccccagctggacagaggcaccctgtgccagtggagcaccctgagctaccccggcctggtgaaggagctgtgcgccctgttcatcggcagcgagctgctgcccaaggacgagctgaacgacctgatcgacagagccttcagcagattcagacacagagaggtggtgcacctgagcagactgagaaacggcctgaacgtgctggagctgtggcacggcgtgacctacgccttcaaggacctgagcctgagctgcaccacccagttcctgcagtacttcctggagaagagagagaagcacgtgaccgtggtggtgggcaccagcggcgacaccggcagcgccgccatcgagagcgtgcagggcgccaagaacatggacatcatcgtgctgctgcccaagggccactgcaccaagatccaggagctgcagatgaccaccgtgctgaagcagaacgtgcacgtgttcggcgtggagggcaacagcgacgagctggacgagcccatcaagaccgtgttcgccgacgtggccttcgtgaagaagcacaacctgatgagcctgaacagcatcaactggagcagagtgctggtgcagatggcccaccacttcttcgcctacttccagtgcacccccagcctggacacccaccccctgcccctggtggaggtggtggtgcccaccggcgccgccggcaacctggccgccggctacatcgcccagaagatcggcctgcccatcagactggtggtggccgtgaacagaaacgacatcatccacagaaccgtgcagcagggcgacttcagcctgagcgaggccgtgaagagcaccctggccagcgccatggacatccaggtgccctacaacatggagagagtgttctggctgctgagcggcagcgacagccaggtgaccagagccctgatggagcagttcgagagaacccagagcgtgaacctgcccaaggagctgcacagcaagctgagcgaggccgtgaccagcgtgagcgtgagcgacgaggccatcacccagaccatgggcagatgctgggacgagaaccagtacctgctgtgcccccacagcgccgtggccgtgaactaccactaccagcagatcgacagacagcagcccagcacccccagatgctgcctggcccccgccagcgccgccaagttccccgaggccgtgctggccgccggcctgacccccgagacccccgccgagatcgtggccctggagcacaaggagaccagatgcaccctgatgagaagaggcgacaactggatgctgatgctgagagacaccatcgaggacctgagcagacagtggagaagccacgccctgaacaccagccagtag

SEQ ID NO: 197577 - DNA, 3649 bp, Artificial Sequence
  derived and/or modified sequence
attttctttcgctgtaccttactgccttgctcgctcctgccctcactcctgcgatggtttctttggcagctcagtcgtagcgtttaagtctggtcctatgaaggcctttctgttactccacggtcttgggcagtttgcgttggctctaactcttaccacagaattgcagaaattcctctctttattgagggcaccgctagcacctgccccccgaccctggttctgttttgtgaaatactgcctgctttgcttatccactgcagttaacttttggagttacccatatttcatctctttgacatggactcccatacggagtgaccttgtatcctaggttgccagagagagagttctggcttataccattgtcccagcataatcactttcaaaagattcatggtttgtatgatcaagtttgtctctgtctctaagtgagatacacttaatatttgtagttaagagagtggcacgtggcagcccacgtgagacttgcacgggggcccacagatgtcagagccacagactaggaaatgagaattcctccaggtcagtgctcatatgcctcatgtaggtagagagctttgggtggctttgcccttagagggcaggggatcccctcccaccctggcacagaaagtccaagctaatactgagagctatgtctagtcaaattcatccccatagttactgtggggcgtcaaagccagggcccctaaattcactgtcatgatccagaagaaggtgttcagagttcaagcccagctccttgacatggcatctggctcctgggaaagtaactgatgtggaagtgtgaccagtgttaggcctaaggggtcctgggcttccccaggaaccagagaactcagtccatgcagggccagttagttttaaagactgcatatcagcacttataacggtcctaggattaggctaagaggtagaacactggttatccactaggatgaccaaccatcttagtttgcctgggattgaggggtttcctaggacatgggacttgcagttttaagaccagaaaactcctgggcgaactgggatgagttggtcaccctcttctcaaccctggctgcacgttagactctcttgaggagcctctcatttagagtctaatttaattgattcaggtagttgtattttttttaacgctctgaggttgattccaacaagctaccacagttgagaactactaggctgtagacagtgtttccaataaccattgaagatgtttggtttttgagcagaagtggaccgagacgtccctgaaaggggtgtatgactctgtgcgttggtctttcgccttagcaagagggatatcaagctggcagttgcctactattgctattatctgtccccaccgccaggccttctttctcattggtgaggaccaagctttctcttttcccggcatgctccgataccctctccctgaagacaggaggtcagtggaattgcctcattttgattggtggaatcatgatttacacagttgtagatgaagctggcatgagacttgatacaggactgccatctctaggtctgggacatgtgccccggagactggtggtctagaggctaactgtgagactgtgtgtgctttggctttgcccggtggggtgtgggagcttggagaccaggtgcttctgggactgtcctctctgcaggcctccaggatcatgtggtatgtcagcaccaggggcgtagccccacgggtcaactttgagggggccctcttctctggctatgcacctgacgggggcctctttatgcctgaagagctcccacagttggacagagggaccctgtgccagtggagcacactctcctatcctggcctggtgaaggagctgtgtgccctcttcattggctctgagctccttccaaaagatgaattaaatgatctgatcgaccgagccttcagcagattccgtcacagagaagtggtccatctgtccaggttgaggaatgggctgaacgtgttggagctgtggcatggcgtcacatatgcatttaaggacctgtccctgtcctgcacaacacagttcctgcagtacttcctggagaagagggagaagcacgtcactgtggttgtaggaacatctggggacacaggaagtgctgccattgagagtgttcaaggggcaaagaacatggacattatcgttctgctgcccaaaggtcactgcacaaagattcaggagctccagatgacaacggtgctgaagcagaacgtacatgtgtttggagtggagggaaacagcgatgagctcgatgagccgatcaagactgtgtttgccgatgtggcttttgtcaagaagcacaatctgatgagcctgaattcgatcaactggtcccgggtcctggtgcagatggcccatcacttctttgcttacttccagtgtacgccatccttggacacacatcccctacccctggtggaggtggttgtgccaacaggggctgccggtaaccttgcagctgggtacattgctcaaaagataggcctgcccatccgtctggtcgtggcagtgaaccgcaatgacatcatccacaggactgtccagcagggagacttctctctctctgaggctgttaaatcaaccttggcatcagctatggacattcaggtgccctacaacatggagagggtgttctggctgctctctggctctgacagccaggtgacaagagccctcatggagcagtttgaaaggacccaaagtgtgaatctgcccaaggaactgcacagcaagctttcagaggcagtgacatccgtgtcagtgtcggatgaagccatcacccagaccatgggccgctgctgggatgagaaccagtacttgctgtgcccccactcagcggtggccgtgaactaccattaccagcagatagacaggcagcagcccagcactccccggtgctgcctcgcccctgcctctgcagccaagttcccggaagctgtcctggctgctggcctgacccctgagactcccgcggagatcgtagccctggagcacaaggagacacgctgcaccctgatgcggagaggtgacaactggatgctgatgcttcgggacaccattgaggaccttagccgacagtggaggagtcatgccctcaacacctcccagtagcctggctggaggtggctttctttaggcttcagatcccaggaagatgcaccttctgagctgccttgtgcaccctccccattaagcgtaggttaggaggtttccgggaggctgctcagctggatctggagccagctggctttgctccgttccctggctagtctgtgcctggtcaccagggaggctgagtgaggggctgtgaacagttgccggaagcaccccctccctccccggcccgtgcagcagtgtctgagctgtagtgaaagtttcagggcctgcaaaagaagaggcttgggcacaggactgaccatggctccaggggtttaggaccccagacctgtgaaggtgggagcagctcaccaccttcacgcaggctttgtatgttctctgagccttagttgattttggcccccaaaccaaatccaaaggttctggcccaccttgtcagaggcttccaccctgctcacatgttgggaatccctggaataaaatgcttgttcagtgtg

SEQ ID NO: 197578 - DNA, 1455 bp, Artificial Sequence
  derived and/or modified sequence
atgtggtatgtcagtacaaggggggtagccccaagggttaacttcgaaggggccctcttcagtggctacgcacccgatggtggactgttcatgcctgaggagctcccccagctcgaccggggcacgctgtgtcagtggagcactctgagctaccccgggctcgtgaaggagttatgtgctcttttcattggcagtgagctgcttcctaaggacgagctaaatgacttgattgacagagccttctcccgatttcgccacagagaggtcgtgcatcttagtcgcctgcgcaacggccttaatgtgctggagttatggcacggagttacttatgcctttaaggacctcagtctgtcctgcaccactcagttccttcagtattttctcgaaaagagagaaaagcatgtgaccgtggtcgtaggtacatcgggcgataccggtagcgctgccatcgagagcgttcagggcgcaaagaacatggatattatcgtccttcttcctaagggccactgcaccaaaatccaagaactgcaaatgaccacggtccttaagcagaatgtgcatgtgttcggggtggaaggcaatagcgatgagctcgatgagcctattaaaacggtctttgccgatgtggctttcgttaagaaacacaacctcatgtcgctcaatagtatcaactggagtcgggtgttggttcagatggcacaccacttctttgcatactttcagtgtaccccctcgttggacacccatcccctgccactggtggaggtggtggtgcccacaggagctgcagggaacctagctgccggatacatcgctcagaagataggattgcctattaggttagttgtggctgtgaatagaaatgatatcatccaccgcacagtgcaacagggtgatttttcgttgtccgaagctgtgaagtcaacacttgcttcagccatggacattcaggtcccctacaatatggagagagtcttttggcttctctcagggtctgacagtcaggtgactagggctcttatggaacagttcgagcgcacgcaatccgttaacttgcctaaagagttgcactctaaactatccgaggcggtcacctcggtgagcgtgagcgacgaagccatcacgcagactatggggcgatgctgggacgaaaatcaatatctgctgtgcccccacagcgctgtggctgtcaactaccactaccaacagatcgaccgacaacagccatctacaccacgctgctgcttagctcctgcttcagctgccaaatttcctgaggctgtactggctgccgggctcactcctgaaacacctgcggaaatcgttgccctggagcataaggaaactagatgcactctgatgcgcaggggcgataattggatgctcatgctgagagacacgattgaggacctgagtcgtcagtggcgcagtcacgctctcaacacatcccaatag

SEQ ID NO: 197579 - DNA, 1455 bp, Artificial Sequence
  derived and/or modified sequence
atgtggtatgtgagtacaaggggtgttgccccaagagtgaattttgagggggctctcttcagcggctacgcccctgatggcggtctgtttatgcccgaggaactcccacagttggatagaggaacactttgtcagtggagcacgctttcctaccccggactcgtgaaagaactgtgcgccctgtttattgggtctgagctcctccctaaagatgagctgaacgatctcattgaccgagctttctcccgcttcagacatcgcgaagtggtgcatctgtctcggttacgcaatggccttaacgtacttgagctatggcacggcgtaacatacgcattcaaagacctgagcttatcttgcacgacccagttcctacaatactttttagagaagagggagaaacacgtgaccgtggtcgtcggcacttctggggacacaggaagtgctgccattgagagcgtgcagggagccaagaacatggacataatagttctacttcccaaagggcattgtacaaagatccaggagctgcagatgactacagtactgaaacagaacgtgcacgtctttggggttgaggggaatagcgacgaactggatgagcccattaagacagtcttcgccgatgtggcctttgttaaaaagcacaacctcatgtcactaaacagtatcaactggtcacgggtcctggtacagatggctcatcacttctttgcctattttcagtgcacccccagtctcgatacccatcctttgcccttagtggaggtggtggtgcccaccggcgccgcgggcaacctggcagccggctacatcgctcagaagataggcctgccaatcagactggttgtggctgtcaaccgcaatgacataatccacaggaccgtgcagcaaggggactttagcctgtctgaggctgtaaagtccaccttggcatccgccatggacattcaggtaccttacaacatggagcgcgtgttttggctgctctccgggtccgattcccaagtgacaagggctttaatggaacagtttgagagaactcagagcgtcaacctccctaaggaactccattcaaaacttagcgaagcggtgacaagcgtaagtgtgagtgatgaggccatcacccaaacaatggggcggtgctgggacgagaaccagtatctgctgtgtccacatagcgctgtggccgtaaactaccactaccagcagattgatagacagcagccaagcacacccaggtgttgcctggcacctgcatcagccgcgaaatttccagaggccgtcttagcagcaggattgacacccgagacacctgcagagattgtggccctcgagcacaaagagacccggtgcacgctgatgagacggggggacaactggatgctgatgctccgggacactattgaagatctgtcacgacagtggcgttcacacgcactgaatacgtcccagtag

SEQ ID NO: 197580 - DNA, 2111 bp, Artificial Sequence
  derived and/or modified sequence
agctccggccccgaccggaagccccaccgcaccgtcagggacgcggactcgggagtgcgcacattcgcagcccgggcagccctgctgcgcaccgggcctcgcgccccgcgccccgcgccccgcgccccgcgccccgcaccggcctccaggatcatgtggtatgtcagcaccaggggcgtagccccacgggtcaactttgagggggccctcttctctggctatgcacctgacgggggcctctttatgcctgaagagctcccacagttggacagagggaccctgtgccagtggagcacactctcctatcctggcctggtgaaggagctgtgtgccctcttcattggctctgagctccttccaaaagatgaattaaatgatctgatcgaccgagccttcagcagattccgtcacagagaagtggtccatctgtccaggttgaggaatgggctgaacgtgttggagctgtggcatggcgtcacatatgcatttaaggacctgtccctgtcctgcacaacacagttcctgcagtacttcctggagaagagggagaagcacgtcactgtggttgtaggaacatctggggacacaggaagtgctgccattgagagtgttcaaggggcaaagaacatggacattatcgttctgctgcccaaaggtcactgcacaaagattcaggagctccagatgacaacggtgctgaagcagaacgtacatgtgtttggagtggagggaaacagcgatgagctcgatgagccgatcaagactgtgtttgccgatgtggcttttgtcaagaagcacaatctgatgagcctgaattcgatcaactggtcccgggtcctggtgcagatggcccatcacttctttgcttacttccagtgtacgccatccttggacacacatcccctacccctggtggaggtggttgtgccaacaggggctgccggtaaccttgcagctgggtacattgctcaaaagataggcctgcccatccgtctggtcgtggcagtgaaccgcaatgacatcatccacaggactgtccagcagggagacttctctctctctgaggctgttaaatcaaccttggcatcagctatggacattcaggtgccctacaacatggagagggtgttctggctgctctctggctctgacagccaggtgacaagagccctcatggagcagtttgaaaggacccaaagtgtgaatctgcccaaggaactgcacagcaagctttcagaggcagtgacatccgtgtcagtgtcggatgaagccatcacccagaccatgggccgctgctgggatgagaaccagtacttgctgtgcccccactcagcggtggccgtgaactaccattaccagcagatagacaggcagcagcccagcactccccggtgctgcctcgcccctgcctctgcagccaagttcccggaagctgtcctggctgctggcctgacccctgagactcccgcggagatcgtagccctggagcacaaggagacacgctgcaccctgatgcggagaggtgacaactggatgctgatgcttcgggacaccattgaggaccttagccgacagtggaggagtcatgccctcaacacctcccagtagcctggctggaggtggctttctttaggcttcagatcccaggaagatgcaccttctgagctgccttgtgcaccctccccattaagcgtaggttaggaggtttccgggaggctgctcagctggatctggagccagctggctttgctccgttccctggctagtctgtgcctggtcaccagggaggctgagtgaggggctgtgaacagttgccggaagcaccccctccctccccggcccgtgcagcagtgtctgagctgtagtgaaagtttcagggcctgcaaaagaagaggcttgggcacaggactgaccatggctccaggggtttaggaccccagacctgtgaaggtgggagcagctcaccaccttcacgcaggctttgtatgttctctgagccttagttgattttggcccccaaaccaaatccaaaggttctggcccaccttgtcagaggcttccaccctgctcacatgttgggaatccctggaataaaatgcttgttcagtgtg

SEQ ID NO: 197581 - DNA, 1455 bp, Artificial Sequence
  derived and/or modified sequence
atgtggtacgtgtccacccggggcgtggccccccgggtgaactttgaaggagccctcttcagcggctacgccccagatggcggcctcttcatgcctgaggagctgccccagctggaccggggcaccctgtgccagtggagcaccctgagctacccaggcctggtgaaggagctgtgtgccctcttcatcggcagcgagctgctgcccaaggatgagctgaatgacctgattgaccgggccttcagccgcttccgccaccgggaggtggtgcacctgagccggctgagaaatggcctgaatgtgctggagctgtggcacggcgtgacctacgccttcaaggacctgagcctgagctgcaccacccagttcctgcagtacttcctggagaagcgggagaagcacgtgacagtggtggtgggcaccagcggggacaccggcagcgctgccatcgagagcgtgcagggcgccaagaacatggacatcatcgtgctgctgcccaagggccactgcaccaagatccaggagctgcagatgaccaccgtgctgaagcagaatgtgcacgtgtttggagtggagggcaacagtgatgagctggatgagcccatcaagacagtgtttgctgatgtggcctttgtgaagaagcacaacctgatgagcctgaacagcatcaactggagccgggtgctggtgcagatggcccaccacttctttgcctacttccagtgcacccccagcctggacacccaccccctgcccctggtggaggtggtggtgcccaccggggctgctggcaacctggccgccggctacatcgcccagaagattggcctgcccatccggctggtggtggccgtgaacagaaatgacatcatccacaggacagtgcagcagggcgacttcagcctgtctgaggccgtgaagagcaccctggccagcgccatggacatccaggtgccctacaacatggagagggtcttctggctgctgagcggcagtgacagccaggtgacccgggccctgatggagcagtttgagaggacccagagcgtgaacctgcccaaggagctgcacagcaagctgtctgaggccgtgacctctgtgtctgtgtctgatgaggccatcacccagaccatgggccgctgctgggatgagaaccagtacctgctgtgcccccacagcgctgtggccgtgaactaccactaccagcagattgaccggcagcagcccagcaccccccgctgctgcctggccccagccagcgctgccaagtttcctgaggccgtgctggccgccggcctgaccccagagaccccagctgagatcgtggccctggagcacaaggagacccgctgcaccctgatgagaagaggagacaactggatgctgatgctgcgggacaccatcgaggacctgagccggcagtggaggagccacgccctgaacaccagccagtag

SEQ ID NO: 197582 - DNA, 1455 bp, Artificial Sequence
  derived and/or modified sequence
atgtggtacgtgagcacccggggcgtggccccccgggtgaacttcgaaggggctctgttcagtggatacgctcccgatgggggcctcttcatgcctgaagaacttccccagctggatcggggaaccctgtgtcaatggtccaccctgtcgtacccaggactggtaaaggagctgtgcgctctgtttatcggctctgaactgctaccgaaggatgagctgaatgacctgatcgacagagcctttagcagattccgacatcgggaggtggtgcatctgagtcgtctgaggaatggtctcaacgtgttggaactttggcacggagttacttacgctttcaaagatcttagtctgtcctgcacaactcaatttctacaatactttttggagaagcgggagaagcatgtaactgtcgtggtcggtacttcgggcgacacaggaagcgcggcaattgaaagcgtccaaggcgcaaagaatatggacatcatcgtgctcctgcccaagggccattgtacaaaaattcaggagctgcagatgaccacagtactcaagcagaatgtccacgtcttcggcgtggaagggaactctgacgaactggatgaaccgattaaaacggtcttcgcagatgtggcctttgtcaagaaacataatctgatgagtttgaatagcattaattggagcagagtgttggttcagatggcacaccatttctttgcatactttcagtgcacaccctcacttgatacacatccactgcctttggttgaagtggtggtaccaaccggggctgcgggcaatctcgccgcaggctacatcgcacaaaagatcggcctccctatcagattggtggtcgcagtgaaccggaacgatattatccataggactgtgcagcagggagactttagcttaagcgaagctgtcaaatccacacttgcttcagctatggacatacaggtgccttataacatggagagggttttttggctgcttagcggtagtgacagccaggtaactcgagctttaatggagcagtttgagcgaactcagtcagtgaatctcccaaaggaactgcattctaaactcagcgaggccgtgacttctgtgtcagtgtcggacgaggctattactcagaccatggggaggtgctgggatgagaatcaatatctcctgtgtccgcactccgccgtagctgtgaattaccactatcagcaaatagatcgtcagcaaccctcaaccccaaggtgttgtctggcacccgcgagcgccgcgaaattccctgaagccgttctggctgctggtctaacaccagaaaccccagcggaaatcgttgcattggagcataaagaaactaggtgcacactcatgaggcggggagacaactggatgctgatgctcagagataccatcgaagacctgtctaggcaatggcgtagccacgccctgaacacgtcgcagtag

SEQ ID NO: 197583 - DNA, 1455 bp, Artificial Sequence
  derived and/or modified sequence
atgtggtacgtgagcacccggggcgtggccccccgggtgaacttcgagggagcattattttcaggctatgccccagacggcgggctcttcatgccggaagaattgcctcagctggatcgagggaccctgtgccagtggagtactctttcatacccaggcttggttaaggaactttgtgcactgttcatagggtcagaactattacctaaggatgaactgaacgacctgattgaccgggcctttagcagatttaggcaccgcgaagtagtccacctcagtcgacttaggaacggactcaacgtcctggaattatggcacggggtgacctacgccttcaaggacttgtcacttagctgtactacgcagttcctccaatattttcttgaaaaaagggagaagcatgtcacagttgtggtcggaacaagtggggatacaggcagcgcagcaatcgagagcgtccagggggctaagaatatggacattatcgtcctccttccaaaaggccattgtacaaaaatccaagagttgcagatgaccaccgtcctgaagcagaacgtccatgtgttcggcgtggagggtaacagcgatgagctggacgagcccattaaaacagtgttcgccgacgtggctttcgtcaagaagcacaacctgatgagtctcaacagcatcaactggagtcgggtgctggtgcagatggctcatcacttcttcgcttacttccagtgtactccatcgctggacacacatccgttgccgctcgtggaagtcgtcgttccgaccggcgccgccggaaatctcgccgctgggtatattgcgcagaaaatcggtctgcccattcgcctcgtggtggccgtcaaccggaacgacataattcaccgcacagtgcaacagggtgacttttccttgagcgaggcagtgaaatccactctggcatcagccatggacatccaggtgccttacaatatggagagagtcttctggctcctctctggcagtgattcccaagtcaccagggcactgatggagcagttcgagcgcactcagtctgtgaatctgcccaaggaattacacagtaaattaagtgaggccgttaccagcgtttcagtgagcgatgaggccatcactcagacaatgggaagatgttgggatgaaaatcagtacctgctttgtccccactcagccgtggcagtgaactatcactaccagcagatcgatagacagcagccttcaacaccccgctgctgccttgcccccgcaagcgctgctaagttcccagaggccgtgctggctgcaggcctaacaccagagaccccagccgagatcgtggccctggagcacaaggagacccgctgtacactcatgagaagaggcgacaactggatgctcatgctgcgggacacaattgaggacctctcacgtcaatggcgtagccatgcgctgaatacctcacagtag

SEQ ID NO: 197584 - RNA, 1455 nt, Artificial Sequence
  derived and/or modified sequence
augugguauguauccaccagggguguggccccuagagucaauuucgagggcgcccucuucucuggcuacgcuccugacgggggucucuuuaugcccgaagaacugccccaacuggaucgcggcacgcuuugccaguggucaacucugucauauccugggcugguuaaagaacugugcgcgcuguuuauugggucugaacuccugccuaaagacgagcugaacgacuugaucgauagagccuucagucgguuccgacauagggaggucguccaccuuuccagauuacgcaacggccugaaugugcuagaacuguggcaugguguaaccuacgccuucaaggacuuaucucuuagcugcacuacccaauuccuccaguacuuucuugaaaaacgggagaaacaugucacagucguuguagggacauccggugacaccgggagugcagcgauagaguccguccagggagcgaaaaacauggacauaauuguucugcugcccaaaggucauugcacaaaaauacaagaacugcagaugacgaccguucuaaagcagaauguccacguuuucgggguggagggcaauagcgacgaauuagacgagccgaucaaaacaguuuuugcagacguugcguucgugaagaaacauaaucugaugucucuuaacuccauuaauuggucucggguguuagugcagauggcucaccacuucuuugcuuauuuccaaugcacuccuagucucgacacucaccccuuaccccugguagaggugguagugccaacaggcgcggcaggcaaccuggcagcugguuacaucgcgcagaaaauuggccuuccaauuagguuagucguugccgucaaucggaacgauauaauucacagaacgguucagcagggugacuuuagccucucggaggcaguuaagagcacccuugccagcgcuauggauauacagguucccuauaacauggagcgcguuuucuggcuucuaaguggauccgacucucaggugacccgcgcucugauggagcaauucgagaggacacaguccguaaaccuuccaaaggagcuucacucaaagcucuccgaggccguaaccucuguaucuguuucugaugaagccauuacccagacgaugggaagaugcugggacgagaaucaauaucuucucuguccccacucagccguagcagugaauuaucauuaccagcagaucgauagacagcagccauccaccccuaggugcuguuuagcuccugccucugcggcuaaauuucccgaggcuguccuggcugcagguuuaaccccugaaacuccagccgaaauaguggcgcuggaacauaaggagacacgauguacucugaugaggagaggagauaacuggauguugaugcuccgggauacuauagaggacuuaucucggcaguggagaagucacgcguuaaacaccucccaguag

SEQ ID NO: 197585 - RNA, 1455 nt, Artificial Sequence
  derived and/or modified sequence
augugguacguuucaacucgcggagucgcgccccgcgugaauuuugagggcgccuuguuuuccggauacgcccccgacggaggccuuuuuaugcccgaagaacucccccagcuggauaggggaacgcuuugucaauggucaacuuuaucuuaccccggccugguuaaggaacuuugcgcccuguuuaucggaagugaauuauugccuaaggaugagcugaacgaccugaucgaccgagcuuucucacguuuccgucacagggaagucgugcaccucucaagacuccggaacggauugaaugugcuggagcuguggcacggcgugacauacgccuucaaagaccuaucccucuccuguacuacucaguuccuccaauacuuuuuagagaaaagagaaaaacacgucacaguagucgugggaaccucuggggacacagggucagcugccauagaaucuguccagggagcuaagaacauggacaucauaguucugcugcccaagggccacuguacaaagauccaagagcugcaaaugaccacaguccuaaagcagaacguccacgucuucggggucgagggaaauucugaugaacuggaugagccuaucaaaacagucuuugcggauguggccuucgugaagaaacacaaccucaugucccugaauaguauaaacuggagucgggugcuggugcagauggcccaccacuuuuuugcuuacuuccagugcacucccagucucgacacucacccucugccucugguggaggugguaguaccuaccggcgcagcuggcaaucuggccgcaggcuauaucgcucaaaaaauugggcuacccaucaggcucgugguggccgugaaccguaaugacaucauccaucgcaccguccagcaaggagacuuuucacucucagaagcagugaagucuacucucgcuagugcuauggauauccaggugccauacaacauggaaagagucuuuugguugcugucgggauccgauagccaagugacccgggcccucauggaacaguuugaacgcacucagucagugaaccugcccaaagaacuucacaguaaacugagugaagccgugaccagcguuuccgucuccgacgaagcuauaacccagacuaugggacggugcugggacgagaaucaguacuugcuguguccacauuccgcagucgccgucaacuaucauuaucagcagaucgaccgccagcaaccaaguacaccucgguguugucuggcuccagcuuccgccgcuaaauucccagaggcaguccuggccgccggacugaccccggagacucccgcugagaucguggcucuagaacacaaagagacacgcugcaccuugaugagacggggcgauaacuggauguuaaugcugagggauacgauagaagaucucucacggcaguggcggagccaugcucugaacaccucacaauag

SEQ ID NO: 197586 - RNA, 1455 nt, Artificial Sequence
  derived and/or modified sequence
augugguaugucuccaccagagguguagcaccucgagugaauuuugagggcgcuuuauuuucaggcuacgcucccgacggagggcuguucaugcccgaggaauuaccgcagcuggacagaggaaccuugugucaguggagcacucuuaguuauccgggccuagugaaagaacugugugcccuguucaucgguuccgagcugcuaccaaaagacgagcugaacgauuugauugaucgcgcuuucucccgcuuccgccaccgcgaaguagugcaccuuagucgacugcgcaauggacucaacgugcuggagcucuggcacggaguuaccuaugccuuuaaagaucucucccugucauguacaacccaguuucugcaauacuuuuuagaaaagcgagagaaacauguuaccguagucgugggaaccagcggggauaccggaucagcagccaucgagucagugcaaggagcaaagaauauggauauuaucguccugcugccuaagggccacuguacuaaaauucaggaacuccagaugacaaccguccuuaaacagaacguccaugucuuuggggucgagggaaauuccgaugaacuagacgagcccaucaagaccguguuugccgaugucgcauuuguuaaaaaacacaaccucauguccuuaaauucuaucaacuggagccggguuuuggugcaaauggcacaccauuuuuucgcuuauuuucaguguacgccuucucucgauacacacccccucccccucguugaagucguggugccaaccggagccgccgggaaccuugcugcgggauauauugcucagaagaucggacuccccauccguuuggucguugccguuaaccguaaugacaucauacauagaacagugcagcagggcgauuuuucccugucugaagcugucaagucuacacuagcauccgccauggacauucaaguccccuacaacauggaacggguguuuuggcuuuuguccgggagcgauucccaagucacccgcgcucuuauggaacaguucgagcguacccagucaguuaauuugcccaaggagcuccauucuaagcuaucugaggccguaaccuccgugucuguauccgacgaggccauaacccaaaccaugggucgcugcugggaugagaaccaguacuugcuauguccacauucugccguggccgugaacuaccauuaucaacagaucgacagacaacagcccuccaccccccgauguugccuggccccagccuccgccgcaaaauuccccgaagcaguacuggccgccggccugacccccgaaacgcccgcagaaauaguggcucuggaacacaaagaaacucgauguacgcugaugaggaggggcgauaauuggaugcuaaugcuccgagacacgauugaggaccugagccgucaguggaggucacaugcuuugaauaccagccaguag

SEQ ID NO: 197587 - RNA, 1455 nt, Artificial Sequence
  derived and/or modified sequence
augugguacguuucaacucgcggagucgcgccccgcgugaauuuugagggcgccuuguuuuccggauacgcccccgacggaggccuuuuuaugcccgaagaacucccccagcuggauaggggaacgcuuugucaauggucaacuuuaucuuaccccggccugguuaaggaacuuugcgcccuguuuaucggaagugaauuauugccuaaggaugagcugaacgaccugaucgaccgagcuuucucacguuuccgucacagggaagucgugcaccucucaagacuccggaacggauugaaugucuuggagcuguggcacgguguuacauacgcuuucaaggacuugucccucagcugcacaacccaguucuuacaguauuucuuagagaagcgagagaaacaugugacggucgucgugggaacauccggugauacagggagcgcugcaaucgaauccgugcagggagcgaaaaacauggacaucauugucuuauuaccaaagggccauugcacuaagauucaggaauuacaaaugaccacuguacuuaaacaaaauguucacguauuuggugucgaaggaaauuccgacgagcuggaugagccaauaaaaacaguguuugcagauguagcauucguaaaaaagcauaaccugaugucucucaacucaaucaacuggaguaggguucuugugcagauggcccaucacuuuuuugccuacuuucagugcacucccucucucgauacucauccacucccccugguagaagucguggugccuacgggagccgccggaaaucucgcugccggauacauugcgcaaaagauuggucuccccauccgccuuguaguugccgugaacaggaacgacauuauucacaggacggugcaacagggugacuucucucuuagcgaggcaguuaaaaguacccucgcgagcgcaauggauauccaaguaccguacaauauggaacgcguguucugguuacuaucuggcucagauucccaggugacgcgugccuuaauggaacaauucgagcgaacacagagcgugaaucugccgaaagaacuccauucaaaauuauccgaggccgugaccucaguauccgugagcgaugaagccaucacacagacaaugggacgauguugggaugagaaccaguacuuacuaugcccacauucugcuguagccguuaauuaccauuaucagcaaauugauagacagcaaccuuccacacccagguguuguuuggcaccugcuuccgcagccaaauuuccagaggcugugcuggccgcugggcugacccccgagacuccggcagaaauugucgcauuagagcauaaagagacacgcuguacgcuuaugagacgaggagauaauuggaugcugaugcuuagagacacuauagaagaccugaguagacaauggcggucucacgcccugaacacgucccaauag

SEQ ID NO: 197588 - protein, 485 aa, Artificial Sequence
  derived and/or modified sequence
MGPKAKKSGSKKKKVTKAERLKLLQEEEERRLKEEEEARLKYEKEEMERLEIQRIEKEKWHRLEAKDLERRNEELEELYLLERCFPEAEKLKQETKLLSQWKHYIQCDGSPDPSVAQEMNTFISLWKEKTNETFEEVIEKSKVVLNLIEKLKFILLETPPCDLQDKNIIQYQESILQLQELLHLKFGVATEILLKQASTLADLDSGNMEKVIKDENVTLYVWANLKKNPRHRSVRFSETQIGFEIPRILATSDIAVRLLHTHYDHVSALHPVSTPSKEYTSAVTELVKDDVKNVEKAISKEVEEESKQQERGSHLIQEEEIKVEEEQGDIEVKMSSAEEESEAIKCEREMKVLSETVSAAQLLLVENSSEKPDFFEDNVVDLCQFTTLGGVYHLDILELPPQCKPVKGWMIVEILKEGLQKYTYPPETTEEFETENAFPPIEVTLEVHENVIFFEDPVVVRWMLKVNIGELMASAMYPTNQKKDL

SEQ ID NO: 197589 - protein, 138 aa, Artificial Sequence
  derived and/or modified sequence
MPASATAAWHCPPLCLPPLPASAPTSPPNPATRPAPGPGRRARCPQSAHPAPTRGALTFWAPGSWPRVLLVPRSPGPVLRAPRLPHPAARARRRAWHGARLPGSPARAGRTFQRGLVSNSWAHAIFLPRPPNVLELQV

SEQ ID NO: 197590 - DNA, 1784 bp, Artificial Sequence
  derived and/or modified sequence
acacgcgtcctcccctcggcggggaggccggctaggggcaggcgggcagcgatgcctgcgtcggccacagctgcctggcactgccctcctttgtgcctgcctcctctgccagcctccgctccaacctccccccccaaccccgcaacgaggcctgctcctgggcccggccgcagggcccgttgcccacagagcgcccaccctgcgcccacccggggtgccctcaccttctgggcccctggctcctggcctcgggtcctgctggtgcccaggtcgcccggccccgtcctccgtgctccgcgtttgccccaccctgctgcccgagctcggcggcgagcctggcacggtgccaggctgcctgggagcccagcccgggcagggcgaactttccagcgagggttggtctcaaactcctgggctcatgcaatcttcctgcctcggcctcccaatgtgctggaattacaggtatgagctaccgcgctcagcccaaacccagggctcttaaccaccctactatgtactgtgctggcccccggtcaagggagagaactcacgtcaggcaaaaatgttttacagagaggcagctaagtcttttccacagtggatgacacagtccccctcacaaaccaccccacagatccaaccccaaggaactctgcttctacgtgtgcccttggggcaagggatgcaaagcaccaggcgatggagctcagaggatggcactcttccagagagctgtgtgtctctgggaaagctaacacacctctctgagcctgtcagcagatgcacaggcctgtgcacagagctctgcggagaccacgccgacatcgccgcacacccaccctcctgctcatgggacagaccattcacacctgcttcaccaccagccacaggcttgtcggaaggagcagactcttctccacggacaagccactgcccctttgagggcctcagcttccttaccctatgagatgaggaaacagatcttcacttgccacaggacttggggggatgaaaaggtaacctccgtaaagctgcccctggtgtggggaagccaccccatagatgacattgcccgccctccccctaggcccagagctctacagagtcctcaagctggtgtccctccaggctaaaacacttccaccccctgggcagtgcactacagggtggtggggaaggggccatctgtggaagaaacacagggcctggcctggggtcctgggcaagacctctgtgacctcagtttccccagatccctccaggtgtgaccttgtagatggcctctattctggattcacagctgctgaggaggaggaagaggacactgaaggcattccttcagtcccctggggaggttcagatgctcagactccctgataccacctttcctgggcagaataaagtccccaagatgtccaagccctaatccctggagcctgggaaagtgttacctcccagaccaaagggactttgtaggtgtgtgattgagttgaagatctgcagtgagagggtagcctggattagccacgtgtgcccaaaagcagagactccttcccagccgtggtcagagacagaacaaggggacgctgctggctttaaagacggaagaagggacgaggagccaaggagtgcaagtgccgccagaggccagaaaaggcaagggatggatttttcccctggagttccaggaggaaccagccctgccaacacctggattttagttctgggaccccacctcagacatctgacccccttgactgtaaggtaataaatgtgcgttgctt

SEQ ID NO: 197591 - DNA, 2817 bp, Artificial Sequence
  derived and/or modified sequence
acacgcgtcctcccctcggcggggaggccggctaggggcaggcgggcagcgatgcctgcgtcggccacagctgcctggcactgccctcctttgtgcctgcctcctctgccagcctccgctccaacctccccccccaaccccgcaacgaggcctgctcctgggcccggccgcagggcccgttgcccacagagcgcccaccctgcgcccacccggggtgccctcaccttctgggcccctggctcctggcctcgggtcctgctggtgcccaggtcgcccggccccgtcctccgtgctccgcgtttgccccaccctgctgcccgagctcggcggcgagcctggcacggtgccaggctgcctgggagcccagcccgggcagggcgaactttccagcgagggttggtctcaaactcctgggctcatgcaatcttcctgcctcggcctcccaatgtgctggaattacaggtatgagctaccgcgctcagcccaaacccagggctcttaaccaccctactatgtactgtgctggcccccggtcaagggagagaactcacgtcaggcaaaaatgttttacagagaggcagctaagtcttttccacagtggatgacacagtccccctcacaaaccaccccacagatccaaccccaaggaactctgcttctacgtgtgcccttggggcaagggatgcaaagcaccaggcgatggagctcagaggatggcactcttccagagagctgtgtgtctctgggaaagctaacacacctctctgagcctgttgctacagctttaccatcagcgatgtgactgcaagccttctcagctgcctgtcagcagatgcacaggcctgtgcacagagctctgcggagaccacgccgacatcgccgcacacccaccctcctgctcatgggacagaccattcacacctgcttcaccaccagccacaggcttgtcggaaggagcagactcttctccacggacaagccactgcccctttgagggcctcagcttccttaccctatgagatgaggaaacagatcttcacttgccacaggacttggggggatgaaaaggtaacctccgtaaagctgcccctggtgtggggaagccaccccatagatgacattgcccgccctccccctaggcccagagctctacagagtcctcaagctggtgtccctccaggctaaaacacttccaccccctgggcagtgcactacagggtggtggggaaggggccatctgtggaagaaacacagggcctggcctggggtcctgggcaagacctctgtgacctcagtttccccagatccctccaggtgtgaccttgtagatggcctctattctggattcacagctgctgaggaggaggaagaggacactgaaggcattccttcagtcccctggggaggttcagatgctcagactccctgataccacctttcctgggcagaataaagtccccaagatgtccaagccctaatccctggagcctgggaaagtgttacctcccagaccaaagggactttgtaggtgtgtgattgagttgaagatctgcagtgagagggtagcctggattagccacgtgtgcccaaaagcagagactccttcccagccgtggtcagagacagaacaaggggacgctgctggctttaaagacggaagaagggacgaggagccaaggagtgcaagtgccgccagaggccagaaaaggcaagggatggatttttcccctggagttccaggaggaaccagccctgccaacacctggattttagttctgggaccccacctcagacatctgacccccttgactgtaaggtaataaatgtgcgttgcttaagccactgagtcagccataagttgttacatggctgccacaggaaactaacaggccctcccctctggccccaacatgcccagctgcctgtgaaggggaagaaggatggcacaaggcacggccctcatcgatgtgttcacacaccttgctcccctactgagctggccctggggctgcagacctgatccctgctctcaggagccttcgccagctgagagacgcccgcagagcctcccctccactgcggaggctcgaaccttccctcctgctgctgctgccccatcctctcctcttcctcctgctgctgtttgttgagtgctccctgtgagtaggcaccaggctagtgtcctcctcccaaccccagcctcataggctcagcggtcaggccacccgagcagtcacattgtagacccctgaatcctgcccatggtttggcaggacaaagggccttttctgcttcagagtcacaaatgtgtcctcctcacaataagggtggcatggaggtccctgggccagtgcctcagcctattgagcctggggtccttgtctgtacagggggatgaaggtagcacctcacagatggcgataaacccagccagtgcagggcaggcagtcagcgctccaaactcgcttcaagtctttgcctatgctgccaatcaagtcagctgtgggaagagtcaggtttttctcttgaaagtcagggccgggcacggtggctcatgcctgtaatcccagcactttgggaggctgaggtgggtagatcacaaggtcaggagaccgagaccatcctggctaacacagtgaaaccctgtctctactaaaaatacaaaaaattagccgggcatggtggcacgcacctgtagtcccacctacttgggaggctgaggcaggagaatcacttgaacctgggaggcagaggtttgcagtgaaccgagatcacgccactgcactccagccctggacgacagtgagactctatctc

SEQ ID NO: 197592 - DNA, 417 bp, Artificial Sequence
  derived and/or modified sequence
atgcccgccagcgccaccgccgcctggcactgcccccccctgtgcctgccccccctgcccgccagcgcccccaccagcccccccaaccccgccaccagacccgcccccggccccggcagaagagccagatgcccccagagcgcccaccccgcccccaccagaggcgccctgaccttctgggcccccggcagctggcccagagtgctgctggtgcccagaagccccggccccgtgctgagagcccccagactgccccaccccgccgccagagccagaagaagagcctggcacggcgccagactgcccggcagccccgccagagccggcagaaccttccagagaggcctggtgagcaacagctgggcccacgccatcttcctgcccagaccccccaacgtgctggagctgcaggtgtag

SEQ ID NO: 197593 - DNA, 417 bp, Artificial Sequence
  derived and/or modified sequence
atgccggcatcagctacagccgcctggcattgtcctcccctgtgcctgcctccactgcccgcgtccgcccctaccagccctcccaaccccgccacgcgaccagctcctgggccaggtcggcgcgcacgatgcccacagagcgcgcatccagcacccacccggggagcactcactttctgggcccccgggtcttggccacgggttctgctggttccaagatcaccaggacccgtcctgcgtgctccgcgcttaccccatccggctgctagagcaaggcgccgggcttggcacggcgctaggctgccaggtagccctgccagggcaggccgaacattccagcgaggattagttagcaactcatgggcccacgcaattttcctccccagaccacccaacgtgttggaactccaggtgtag

SEQ ID NO: 197594 - DNA, 417 bp, Artificial Sequence
  derived and/or modified sequence
atgccagcaagcgctactgctgcatggcactgcccccccctgtgtctgccaccgttacctgcctccgcaccaacatcccctcccaacccagcgactcgcccagcccccggccccgggcggagagctcggtgtcctcaaagcgcacacccagctccgacccgtggagccctgactttctgggctcctggcagttggccccgggtactgctagtgcctcgttcacctggccccgtactgcgagcccccagactcccccaccccgccgctagggcgcgtaggcgggcatggcacggggcccggttaccaggctcaccggcccgagctggtcggacattccaacggggcctggttagtaattcgtgggcacacgccatcttcctgccgcgcccccccaacgtcttggagcttcaagtctag

SEQ ID NO: 197595 - DNA, 417 bp, Artificial Sequence
  derived and/or modified sequence
atgcctgccagcgccacagctgcctggcactgcccccccctgtgcctgccccccctgcctgccagcgcccccaccagcccccccaacccagccaccaggcctgcccctggccctggccggcgggcccgctgcccccagagcgcccacccagcccccaccaggggggccctgaccttctgggcccctggctcctggccccgggtgctgctggtgcccaggagccctggccctgtgctgcgggccccccggctgccccaccctgctgcccgggccaggagaagagcctggcatggagcccggctgcccggcagccctgcccgggccggccgcaccttccagaggggcctggtgagcaacagctgggcccacgccatcttcctgccccggccccccaacgtgctggagctgcaggtgtag

SEQ ID NO: 197596 - DNA, 417 bp, Artificial Sequence
  derived and/or modified sequence
atgcccgccagcgccaccgccgcctggcactgcccccccctgtgcttgcctccccttccggcctctgcccccacctcacccccaaatcctgcgactaggccagctcccggacccggaagaagagctcggtgtccccagagtgcacacccagcacccacacgcggtgccttaacgttctgggctccagggagctggccaagagttctccttgtgcctcggtccccaggcccggtcctgcgcgcgccaaggctgcctcaccctgccgctcgggccaggaggcgcgcctggcacggcgcgagactgcctggatccccagcccgggcgggtcggacctttcaacgcggattagtttcgaactcctgggctcacgccatctttctacctcgtccccccaatgtgcttgagcttcaggtgtag

SEQ ID NO: 197597 - DNA, 417 bp, Artificial Sequence
  derived and/or modified sequence
atgcccgccagcgccaccgccgcctggcactgcccccccctgtgcctgcccccacttcctgcctcggctccaacgagtccaccaaatcccgcaacgcggcccgccccaggacctggtagacgggcacggtgtcctcagtctgcccatcctgcccctacccggggtgcattgactttctgggccccagggagctggccaagggtcttgctggtgccgcgtagcccgggtcccgtcctgcgcgcccccaggttgccccatccagctgcccgagccagaagacgggcttggcacggggccagactacccggatctccagctcgggccggcaggaccttccaacgagggctggtgagcaattcatgggcccacgctatattcctgccacggccccccaatgtgctggaactgcaggtttag

SEQ ID NO: 197598 - DNA, 417 bp, Artificial Sequence
  derived and/or modified sequence
atgccggcatccgcaaccgcggcttggcactgcccaccattgtgtctcccgcctctcccagcgtctgctccaacaagtcctcccaatcccgctacgcggcctgcacccggtccaggacggagagcccgttgcccccagagtgctcaccctgctcctacacggggagccctgacattttgggccccaggctcctggcctcgggtcctgcttgtgcctcgcagcccgggacctgtcttgagggctccaagactgccacatcccgcagcaagggctcgcagacgagcctggcacggcgcacgcctgccaggctccccagcgcgagctgggagaacgtttcaaaggggcctcgtttccaactcttgggctcacgccatttttctgcctcggccacctaacgttctcgagctccaagtgtag

SEQ ID NO: 197599 - DNA, 417 bp, Artificial Sequence
  derived and/or modified sequence
atgccagccagtgctaccgcggcttggcactgtcctcccctttgcctcccccctttgccagcatcagcccctaccagcccccctaacccagcaacacgcccagcccctggccctgggcgacgggctcggtgcccacaatcagctcatccggctcctactagaggagccctaacattctgggccccaggcagctggccacgcgttctgctggtaccacgcagcccgggaccagtgttaagggctcctcggctccctcaccccgctgcccgagctagacggagggcctggcacggcgctcgtctgccaggatccccggctagggcaggcagaacctttcaacgcggtctagtcagcaacagctgggcacacgcaatctttttgcctaggccaccgaacgtgctggaattgcaggtgtag

SEQ ID NO: 197600 - DNA, 297 bp, Artificial Sequence
  derived and/or modified sequence
atgggcctcatctacaagtgcctgcctgagaaggtgacagtgaacatcgagacccgctgcctgcccggggtcttccagggcagccagcaccagtgggaccagtgggtgagcccccgctggctgcacctgctgccccccctgagcgccctggccggctgccccaccagcgcccgggccgccaccctgtggggcagccctggccccccccagatgggcccccactgcaggaccctgagcaagggcggggcccagagcctgccccggcaggcccggccccgggcctgtggctcctggtag

SEQ ID NO: 197601 - DNA, 635 bp, Artificial Sequence
  derived and/or modified sequence
gagagcgcgcccgggcggccagcgccgagcgcgcggagctggcgtggggagacacggcaggaaaggcgagtcggagtgggtgatgagaggccgggagagcccgtccgagccggagagaccggagagaagggagcgagcgactgtgcggcgctcacgctgccagagcccgggcggagtgcagtcgcctccaaagccttagagcggcgccccagtcactgcagctcttcaccctagagctgtgccctgggaccacagagaccaagagcatggaaatcggctgagaggatatagacctgcagctaactggatttgatttataagagagaaatctgcagtcaatgcccactcttgccacactgctaatatggaaaacagaatgttcaataggatatggtctgataaatagtgatgattgaagatgctgctccaatacatgtgaaatcaatgggagatatctgctgtctgaagatctttcagagcttttctcgacaagctcccctgtaagaaatcggaggtatattctaccattatacagtctttctcaagtggatataaatacgtttgcctcactgtaaccagacaactagacaactaatgtgggaccatggcactgcccagatgcacgtggccaaatt

SEQ ID NO: 197602 - protein, 164 aa, Artificial Sequence [sequence omitted]

SEQ ID NO: 197603 - DNA, 495 bp, Artificial Sequence
  derived and/or modified sequence
atgaccgccagcgcccagcccagaggcagaagacccggcgtgggcgtgggcgtggtggtgaccagctgcaagcaccccagatgcgtgctgctgggcaagagaaagggcagcgtgggcgccggcagcttccagctgcccggcggccacctggagttcggcgagacctgggaggagtgcgcccagagagagacctgggaggaggccgccctgcacctgaagaacgtgcacttcgccagcgtggtgaacagcttcatcgagaaggagaactaccactacgtgaccatcctgatgaagggcgaggtggacgtgacccacgacagcgagcccaagaacgtggagcccgagaagaacgagagctgggagtgggtgccctgggaggagctgccccccctggaccagctgttctggggcctgagatgcctgaaggagcagggctacgaccccttcaaggaggacctgaaccacctggtgggctacaagggcaaccacctgtag

SEQ ID NO: 197604 - DNA, 495 bp, Artificial Sequence
  derived and/or modified sequence
atgacagcatcagcccagcctcgggggcgacgccccggagtaggtgtgggtgtggtggttacgagttgcaaacatcctcggtgtgttcttctaggtaagcgcaaggggagcgtgggggccggatcattccagttgcccggcggccatctagaatttggagaaacctgggaggagtgcgctcaacgggagacatgggaagaggcagcacttcatctcaagaacgtgcactttgcttccgtcgtgaactccttcatcgaaaaagagaactaccactatgtgactattctaatgaagggagaggtggacgtaacccatgactccgaacccaagaatgtcgagccagagaagaacgagtcatgggaatgggtgccctgggaggagttacctcctctggaccagttattctgggggctgcgctgtctgaaagaacaggggtacgaccccttcaaggaagatctgaaccatctggttgggtacaaaggtaaccacctgtag

SEQ ID NO: 197605 - DNA, 495 bp, Artificial Sequence
  derived and/or modified sequence
atgacagccagcgcccagccccggggccggcggcctggggtgggcgtgggcgtggtggtgaccagctgcaagcacccccgctgtgtgctgctgggcaagaggaaaggatctgtgggcgccggcagcttccagctgcccggcggccacctggagtttggagagacctgggaggagtgtgcccagcgggagacctgggaggaggccgccctgcacctgaagaatgtgcactttgcctctgtggtgaacagcttcatcgagaaggagaactaccactacgtgaccatcctgatgaagggggaggtggatgtgacccatgattctgagcccaagaatgtggagcctgagaagaatgaatcctgggagtgggtgccctgggaggagctgccccccctggaccagctgttctggggcctgcgctgcctgaaggagcagggctatgaccccttcaaggaggacctgaaccacctggtgggctacaagggcaaccacctgtag

SEQ ID NO: 197606 - DNA, 495 bp, Artificial Sequence
  derived and/or modified sequence
atgaccgccagcgcccagccccggggccggcggcccggcgtgggcgtcggcgtggtagttacatcatgtaagcatccgcggtgtgtgttgctgggaaagaggaaagggtccgttggcgccggttcctttcagctccccggcgggcaccttgaatttggggaaacatgggaggaatgtgcgcagcgagaaacttgggaggaggctgctcttcatttaaaaaatgtacacttcgcctcagttgtgaactcctttatagagaaggagaactatcactatgtgacgatcctcatgaagggtgaggtcgatgttacccacgattcagagcctaagaacgttgaaccagagaagaacgaaagttgggaatgggtcccctgggaggaactgccgccactcgatcagttgttctggggccttcgctgtctcaaagagcagggctatgatcctttcaaagaagatctcaaccacctggtcggctacaagggcaaccacctctag

SEQ ID NO: 197607 - DNA, 2022 bp, Artificial Sequence
  derived and/or modified sequence
attccccaacctgatagccctccgcgacgcattacgcaccgcggacagctggagaggccgaggcgctctcgctttgatttcggcgcctccgccctcgcggggagagattggctgcggccgcgggacggggtagtgagcgcgtcacttcctgccgctgccaggcgcgtcctcccgcgcgctatgacggccagcgcacagccgcgcgggcggcggccaggagtcggagtcggagtcgtggtgaccagctgcaagcatccgcgttgcgtcctcctggggaagaggaaaggctcggttggagctggcagtttccaactccctggaggtcatctggagttcggtgaaacctgggaagaatgtgctcaaagggaaacctgggaagaagcagctcttcacctgaaaaatgttcactttgcctcagttgtgaattctttcattgagaaggagaattaccattatgttactatattaatgaaaggagaagtggatgtgactcatgattcagaaccaaagaatgtagagcctgaaaaaaatgaaagttgggagtgggttccttgggaagaactacctcccctggaccagcttttctggggactgcgttgtttaaaagaacaaggctatgatccatttaaagaagatctgaaccatctggtgggatacaaaggaaatcatctctaggtggccgagaagatttgattttctttaaaaagacaagaataaggtctggttagggaatgaaaaatgtatacatttcggaacaactccattttatctaaaaaagttcttgtgattgccagtttatttgcagtctcttaatgtatcccccactctttcagccagtacttgagaaaatttttctgaaatatgtcattgaattgtattccagacacagaatacatgataaatactgatattatgggtaatctgctttccatatttacctatgatatttactgtgcagtttgtcattactagcttgcatggagtaggatgcagtcaaatttgccttagtgtttctgttcaaatagagacctgaattcaaatattgtagtttaggttcaaacagagtatggctgttgcaaaatttaccaaatttgttgattacctcttttattaaagaaatgttggggagagggtaatatattgtgacaatttttgcaacttacagggaataggacaggtcattagggtgtatttcccaggtttccaattgagaatctaaaccaagagaagtgagacaaaccatctaatatctgtatcatgctattaataggctgtgatgttgagtttctcacttactctttctgaggtccagggtccttatatgaagagattcatatatatgaagagattcgtctagagcagtggttgtcaaagtgtggtctgggggggcctcaagagcctttcaagggtattctaggtcaaagctgtttttataacactaagacatcatttcactatttatagcttttccttttttttatttgagaaggagtcttgctctgttgcccacattggagtgcagtggcacgatctcagctcattgcagcctccgccacctgggttcaagcaattctcctacctcagcttcccgagtagctgggattataggcacccaccaccacacctggctaatttttgtatttttagtggagacggggtttcaccatgttggccaggctggtctggaactcctgagctcaagtgatctgcccatctcagcctcccaaagtgctgggattacaggtatgagccacaacgcccagccatcatttatctttttcactcattttttcatgagtatgcagaggagttttcaagaggctatctggtgtgatattgtaataggctgaatgcaaaagcagatacaagattccagctttcgtctgtcatcagacattgaagagatttggagaaatgtaaagcagcagtactcttctcactaatttttgttgtggttagttagaaaaatggttatttttagtgggttttaatatgtgaaaaaaataaaattagctatttgcc

SEQ ID NO: 197608 - DNA, 495 bp, Artificial Sequence
  derived and/or modified sequence
atgacagccagcgcccaacctagaggccgacggcctggagtgggtgtgggagtcgtggttaccagttgtaaacatccaagatgtgtacttctgggcaaacggaaagggtcagtcggcgcaggaagcttccaactgccagggggacacctggagtttggcgagacatgggaggagtgcgcccagagagagacttgggaagaggccgctctgcatctgaagaatgtacacttcgcgtccgtggtgaatagtttcattgagaaagaaaactatcattacgtgaccatcttgatgaagggtgaggtggatgtcacacatgactcagagccgaaaaatgttgaacccgagaaaaacgagagctgggagtgggtgccatgggaagagcttcctcccttggatcagctgttttggggactgagatgtctgaaggaacagggctacgatcctttcaaggaggatcttaatcatctggtggggtataaaggtaaccatttgtag

SEQ ID NO: 197609 - protein, 184 aa, Artificial Sequence
  derived and/or modified sequence
MVRKLKFHEQKLLKQVDFLNWEVTDHNLHELRVLRRYRLQRREDYTRYNQLSRAVRELARRLRDLPERDQFRVRASAALLDKLYALGLVPTRGSLELCDFVTASSFCRRRLPTVLLKLRMAQHLQAAVAFVEQGHVRVGPDVVTDPAFLVTRSMEDFVTWVDSSKIKRHVLEYNEERDDFDLEA

SEQ ID NO: 197610 - protein, 31 aa, Artificial Sequence [sequence omitted]

SEQ ID NO: 197611 - DNA, 555 bp, Artificial Sequence
  derived and/or modified sequence
atggtgagaaagctcaaatttcatgagcagaaactactgaaacaggtggactttttaaactgggaggttacggatcacaacctgcacgagttgcgcgtccttcgaagataccggctccagcgccgtgaggattacactcgctataatcagctgtctcgcgctgttcgcgaactggctaggaggctgcgggatctgcccgaaagggatcagtttcgagtgagggcctctgccgcgctccttgacaagctctacgccctgggcctggtgcccactaggggcagcttggagttatgcgacttcgtgaccgcaagctctttttgccgtagaaggctccccacagtgctgctaaagctcagaatggcgcaacatctacaagcagcggttgcttttgtggagcagggccatgtgagggtgggaccagatgttgtgaccgatcccgcatttttagtgaccagatccatggaggacttcgtcacctgggtcgattctagtaaaataaaaaggcacgtcctggagtataatgaagagagggatgacttcgacctcgaggcctag

SEQ ID NO: 197612 - DNA, 555 bp, Artificial Sequence
  derived and/or modified sequence
atggtgagaaagttgaaattccacgagcagaaactgcttaagcaggttgacttcctgaattgggaggtgaccgatcataatctacacgaactgagagtgctccgcaggtacaggctccaaagaagagaagactacacccgatacaatcagctgtctagagcagtgagggagttggctaggagactcagagatctccccgaacgggaccagtttagagtgcgcgcaagcgccgcactactggataagttgtatgcgcttgggctggtgcccacaagaggttctcttgagctgtgtgacttcgtgacagcctcctcattttgccggcggcggcttccaacggtgttgttaaaactcaggatggcccagcatctgcaggctgctgtggccttcgtcgaacaggggcatgtccgcgttggccccgacgtggtgaccgacccagccttccttgtgacccggtcgatggaggatttcgtgacctgggtggacagctctaagatcaagcggcacgtgttggaatataatgaagaacgcgacgacttcgatttagaggcatag

SEQ ID NO: 197613 - DNA, 96 bp, Artificial Sequence
  derived and/or modified sequence
atggaagacttcgttacctgggtggattccagcaagattaagcgtcacgtgctagaatacaacgaagagagggatgacttcgaccttgaagcttag

SEQ ID NO: 197614 - DNA, 2028 bp, Artificial Sequence
  derived and/or modified sequence
aaaatagaagagactcactctgaaaccaccattccagaaacccgggcagggctcggctgtccctctggctcccagattcttttggcggctctcgctttgggaggctctcacattcctctgcagatctgccccttcctccttcctcctcttgctcctgggccactgggttttcaaaaatccggaaaatccaagaggggcaaggagaaaagcagcagccgcctgaatcgagtccaagggtggatgtgtccggcttcacaacgagccaggccgggaaaacaaggactgaggcttacacaacaggccgccaactcttcgaccccggctgcgcagccggagcccccgccggctcgggcgccctctccccgccccagaagtggccagccccaaccccggaggaaggagggggcgcgacgaggctgtcgggcgacttctagccactcgctgagtggtctcttttgtttgcctaattcctcagcagtttctgagcctgacgctgaccctgctctgaatcccaggaaccccgtccaaaggtaaccccagcagaaaccggttcctcacccgggacttacgacccccgatcaccaccctcgcgtgcacgcacacactcaacagtttggagtttggagagtgagctccggcgagcagatggcgcggccagccgtctgtccgtccgtcctcctctccgccctgcggggcccggccagtggggggcgggctgcgcccccagcctgccttccccggcgctcgcagaccctccgctccgccagcgagaaggcagctccaaaacaaaaaggcgattccgggaggtggcgtcctgaggaaggaggggatcgccaaaggggagggtcccaggccgtccaggtcttggggcgccgcggcggaaatcgcgcggatgccagaacgcgctctcagcttcgggtcctgcggctgcggctgccgccatcatggtgcggaagcttaagttccacgagcagaagctgctgaagcaggtggacttcctgaactgggaggtcaccgaccacaacctgcacgagctgcgcgtgctgcggcgttaccggctgcagcggcgggaggactacacgcgctacaaccagctgagccgtgccgtgcgtgagctggcgcggcgcctgcgcgacctgcccgaacgcgaccagttccgcgtgcgcgcttcggccgcgctgctggacaagctgtatgctctcggcttggtgcccacgcgcggttcgctggagctctgcgacttcgtcacggcctcgtccttctgccgccgccgcctccccaccgtgctcctcaagctgcgcatggcgcagcaccttcaggctgccgtggcctttgtggagcaagggcacgtacgcgtgggccctgacgtggttaccgaccccgccttccttgtcacgcgcagcatggaggactttgtcacttgggtggactcgtccaagatcaagcggcacgtgctagagtacaatgaggagcgcgatgacttcgatctggaagcctagcggatctcccactttgcatggctgtcttttacagatgggaaaactgaggcctgatgctggagattctatgagggtgctctcctcaagggtatcagacggtcgtaggttcttaagaatttgattcatcagtggcaggccatgcatagagccacgggaggtgcgtccttgttttccagggaatgttcttagaacttggactactgattattaattgactgtgccttgggaaacagtgggaagtaacttggtgcagcactggggtattgttggcttcttgtgttggaaactttgtaatgtaaaaggaaaaactggaaatccccacgccctgtttccctttatcgtcttgtggttggactggttcaattcgtttaactcgaattcttgctcctggccgtggttaagctgtgtacagatgatggagagtttggcctcaagtttttataaactgagcgagactagtgttcaggatctcctcccttgtttaaatgtcaataaatgccccaactgctttgtaagtgcaactttttaa

SEQ ID NO: 197615 - DNA, 1031 bp, Artificial Sequence
  derived and/or modified sequence
cgcgctctcagcttcgggtcctgcggctgcggctgccgccatcatggtgcggaagcttaagttccacgagcagaagctgctgaagcaggtggacttcctgaactgggaggtcaccgaccacaacctgcacgagctgcgcgtgctgcggcgttaccggctgcagcggcgggaggactacacgcgctacaaccagctgagccgtgccgtgcgtgagctggcgcggcgcctgcgcgacctgcccgaacgcgaccagttccgcgtgcgcgcttcggccgcgctgctggacaagctgtatgctctcggcttggtgcccacgcgcggttcgctggagctctgcgacttcgtcacggcctcgtccttctgccgccgccgcctccccaccgtgctcctcaagctgcgcatggcgcagcaccttcaggctgccgtggcctttgtggagcaagggcacgtacgcgtgggccctgacgtggttaccgaccccgccttccttgtcacgcgcagcatggaggactttgtcacttgggtggactcgtccaagatcaagcggcacgtgctagagtacaatgaggagcgcgatgacttcgatctggaagcctagcggatctcccactttgcatggctgtcttttacagatgggaaaactgaggcctgatgctggagattctatgagggtgctctcctcaagggtatcagacggtcgtaggttcttaagaatttgattcatcagtggcaggccatgcatagagccacgggaggtgcgtccttgttttccagggaatgttcttagaacttggactactgattattaattgactgtgccttgggaaacagtgggaagtaacttggtgcagcactggggtattgttggactggttcaattcgtttaactcgaattcttgctcctggccgtggttaagctgtgtacagatgatggagagtttggcctcaagtttttataaactgagcgagactagtgttcaggatctcctcccttgtttaaatgtcaataaatgccccaactgctttgtaag

SEQ ID NO: 197616 - DNA, 631 bp, Artificial Sequence
  derived and/or modified sequence
gcggatgccagaacgcgctctcagcttcgggtcctgcggctgcggctgccgccatcatggtgcggaagcttaagttccacgagcagaagctgctgaagcaggtggacttcctgaactgggaggtcaccgaccacaacctgcacgagctgcgcgtgctgcggcgttaccggctgcagcggcgggaggactacacgcgctacaaccagctgagccgtgccgtgcgtgagctggcgcggcgcctgcgcgacctgcccgaacgcgaccagttccgcgtgcgcgcttcggccgcgctgctggacaagctgtatgctctcggcttggtgctcctcaagctgcgcatggcgcagcaccttcaggctgccgtggcctttgtggagcaagggcacgtacgcgtgggccctgacgtggttaccgaccccgccttccttgtcacgcgcagcatggaggactttgtcacttgggtggactcgtccaagatcaagcggcacgtgctagagtacaatgaggagcgcgatgacttcgatctggaagcctagcggatctcccactttgcatggctgtcttttacagatgggaaaactgaggcctgatgctggagattctatgagggtgctctcctcaagggtatcag

SEQ ID NO: 197617 - DNA, 555 bp, Artificial Sequence
  derived and/or modified sequence
atggtgaggaagctgaagttccacgagcagaagctgctgaagcaggtggacttcctgaactgggaggtgacagaccacaacctgcacgagctgcgggtgctgcggcgctaccgcctgcagaggcgggaggactacacccgctacaaccagctgagcagagctgtgcgggagctggcccggcggctgcgggacctgcctgagcgggaccagttccgggtgcgggccagcgctgccctgctggacaagctgtatgccctgggcctggtgcccacccggggcagcctggagctgtgtgactttgtgacagccagcagcttctgcagaagaaggctgcccaccgtgctgctgaagctgaggatggcccagcacctgcaggccgctgtggcctttgtggagcagggccacgtgcgggtgggcccagatgtggtgacagatcctgccttcctggtgaccaggtccatggaggactttgtgacctgggtggacagcagcaagatcaagagacatgtgctggagtacaatgaggagagagatgactttgacctggaggcctag

SEQ ID NO: 197618 - DNA, 96 bp, Artificial Sequence
  derived and/or modified sequence
atggaggactttgtgacctgggtggacagcagcaagatcaagagacatgtgctggagtacaatgaggagagagatgactttgacctggaggcctag

SEQ ID NO: 197619 - DNA, 555 bp, Artificial Sequence
  derived and/or modified sequence
atggtgcggaagctgaagttccacgagcagaagctgctgaagcaggtggactttctgaactgggaggtgacagatcataatcttcacgaactgcgtgtgctcaggcgatacagactgcagagaagagaagactacacccgatacaatcagctgagtcgggctgtccgtgaactcgctcgtcgactgcgtgacttacctgaaagggaccagttccgagtgagagcatctgcagcactgttggacaagctttatgcgctgggccttgttcctacgcgaggctccttagaactttgcgacttcgtgactgcaagctccttttgccgtcgccgcctccccacagtgctgctgaaactgagaatggcccaacacctgcaggcagctgtcgcctttgttgagcagggccacgtcagagtgggccccgatgtggttaccgatcccgcattcctggtcactcggtccatggaggactttgtgacttgggttgattcgtccaaaattaagcggcatgttttagaatataatgaggaacgggacgacttcgatctggaggcctag

SEQ ID NO: 197620 - DNA, 555 bp, Artificial Sequence
  derived and/or modified sequence
atggtgcggaagctgaagttccacgagcagaagctgctgaagcaggtagactttctgaactgggaagtaactgaccataatctacatgagctgcgagtcttgcggcggtaccggttgcagcggcgggaggactatacaaggtataaccagctgtctcgagctgtccgcgaactggccaggaggctgcgcgacttgcccgaacgggaccaatttcgagtgcgcgcctccgcggctctcctcgacaaattgtacgccttgggattggtccctaccaggggctctctggagctttgtgacttcgtgacagcatctagtttttgtcggcgcagacttccaaccgttcttttgaagctcaggatggcacaacacctgcaggcagcagtggcctttgtggaacagggacatgtgcgggtgggaccggatgtcgtgaccgaccccgcttttctggtgaccagatcaatggaagacttcgtgacatgggtggactcctcaaagataaagcgccacgtgctagaatacaatgaagagcgcgatgattttgaccttgaggcctag

SEQ ID NO: 197621 - DNA, 96 bp, Artificial Sequence
  derived and/or modified sequence
atggaggacttcgtgacctgggtggacagcagcaagatcaagcggcacgtcttagagtataacgaagaacgcgacgattttgacctggaagcctag

SEQ ID NO: 197622 - DNA, 555 bp, Artificial Sequence
  derived and/or modified sequence
atggtccgcaaactcaagtttcatgagcaaaaattgttgaaacaagttgacttcttgaactgggaggttacagatcataatctgcacgagctgagggtccttcggagatatagactgcagcggagagaagactacactcgctacaaccagctgagtcgtgctgtcagagagttagcacgtcgcctccgcgatctccccgagcgcgaccagttccgagttagggcaagcgcagctctcttggacaagctttatgctctcggtctcgtgccaacacgaggctctttggagctatgcgactttgtcactgccagtagcttctgccgcagaagactacctactgtgttgctcaaactgagaatggcacagcacctgcaagctgcggtggcatttgtagaacaggggcacgtgcgtgtcggccctgacgtggtgaccgatcctgctttcctggtgactagatctatggaagatttcgtgacgtgggtagactcttcaaagattaagaggcacgtgctcgagtacaacgaagaaagagacgattttgatcttgaggcttag

SEQ ID NO: 197623 - DNA, 555 bp, Artificial Sequence
  derived and/or modified sequence
atggtgagaaagctcaagttccacgagcaaaagctactgaaacaggtcgatttcctcaactgggaggtaacagaccacaacctccatgagctcagagtcctcagacgctatcggctgcagaggcgtgaagactatactcgctacaatcagctgagccgggctgtccgagaactcgctaggagactccgggatctgccagagagagatcagttccgggtcagagcttcagctgcattgctggacaagctgtacgctttagggctcgtcccaacaaggggcagcttggagctttgcgacttcgtgacagcgtcttctttctgcagacggagactgccaacagtgctactgaagctcaggatggctcagcatcttcaagccgcagtagcttttgttgagcaaggacatgtaagagtgggcccagacgtcgttactgatccggcttttctagtgacccgtagcatggaggacttcgtgacatgggtggatagttccaagatcaagagacacgttctggaatacaacgaagagcgcgatgacttcgatctggaagcatag

SEQ ID NO: 197624 - DNA, 96 bp, Artificial Sequence
  derived and/or modified sequence
atggaagatttcgtgacttgggttgattcgtctaagataaagaggcatgttctcgagtataatgaagaaagggatgactttgatcttgaagcatag

SEQ ID NO: 197625 - DNA, 555 bp, Artificial Sequence
  derived and/or modified sequence
atggtgagaaagctgaagttccacgagcagaagctgctgaagcaggtggacttcctgaactgggaggtgaccgaccacaacctgcacgagctgagagtgctgagaagatacagactgcagagaagagaggactacaccagatacaaccagctgagcagagccgtgagagagctggccagaagactgagagacctgcccgagagagaccagttcagagtgagagccagcgccgccctgctggacaagctgtacgccctgggcctggtgcccaccagaggcagcctggagctgtgcgacttcgtgaccgccagcagcttctgcagaagaagactgcccaccgtgctgctgaagctgagaatggcccagcacctgcaggccgccgtggccttcgtggagcagggccacgtgagagtgggccccgacgtggtgaccgaccccgccttcctggtgaccagaagcatggaggacttcgtgacctgggtggacagcagcaagatcaagagacacgtgctggagtacaacgaggagagagacgacttcgacctggaggcctag

SEQ ID NO: 197626 - DNA, 96 bp, Artificial Sequence
  derived and/or modified sequence
atggaggacttcgtgacctgggtggacagcagcaagatcaagagacacgtgctggagtacaacgaggagagagacgacttcgacctggaggcctag

SEQ ID NO: 197627 - protein, 134 aa, Artificial Sequence
  derived and/or modified sequence
MTEEPIKEILGAPKAHMAATMEKSPKSEVVITTVPLVSEIQLMAATGGTELSCYRCIIPFAVVVFIAGIVVTAVAYSFNSHGSIISIFGLVVLSSGLFLLASSALCWKVRQRSKKAKRRESQTALVANQRSLFA

SEQ ID NO: 197628 - DNA, 405 bp, Artificial Sequence
  derived and/or modified sequence
atgaccgaggagcccatcaaggagatcctgggcgcccccaaggcccacatggccgccaccatggagaagagccccaagagcgaggtggtgatcaccaccgtgcccctggtgagcgagatccagctgatggccgccaccggcggcaccgagctgagctgctacagatgcatcatccccttcgccgtggtggtgttcatcgccggcatcgtggtgaccgccgtggcctacagcttcaacagccacggcagcatcatcagcatcttcggcctggtggtgctgagcagcggcctgttcctgctggccagcagcgccctgtgctggaaggtgagacagagaagcaagaaggccaagagaagagagagccagaccgccctggtggccaaccagagaagcctgttcgcctag

SEQ ID NO: 197629 - DNA, 405 bp, Artificial Sequence
  derived and/or modified sequence
atgactgaggagcctatcaaagaaattctgggcgcccctaaggctcacatggccgccactatggagaagtctcctaagagcgaggtcgtcatcacaaccgtccccctggtaagtgaaatccagctcatggctgcaactggaggtacagagctctcttgttaccggtgtatcattccgtttgcagtggtagtctttatagctggcatcgtcgtcacagctgttgcatattctttcaattctcacgggtctattattagcattttcggtttggttgtgctgtccagtgggctttttctgttggcaagctcggccctttgttggaaagttaggcagcggagtaagaaggctaaacggagagagtctcaaaccgccttggtcgcaaatcagaggtcactattcgcctag

SEQ ID NO: 197630 - DNA, 405 bp, Artificial Sequence
  derived and/or modified sequence
atgaccgaggaaccaattaaggaaatcctcggggcacctaaagcccacatggccgcgaccatggagaagagcccgaagagcgaagtggtgattacaaccgtacccttggtgagcgagattcagctgatggctgcgaccggcggcactgagttatcctgttatcggtgtatcatcccctttgccgtggtggtctttattgctgggatcgtggtcaccgcggtggcctattcttttaattctcatgggagcatcatttctatttttgggctggtcgttctctcatccgggctctttctgctcgctagcagcgcattgtgctggaaggtgcggcaacgatccaagaaggcaaaaaggcgcgaatctcagactgctttggtggccaatcagagatctctgttcgcatag

SEQ ID NO: 197631 - DNA, 405 bp, Artificial Sequence
  derived and/or modified sequence
atgaccgaggagcctatcaaagaaatcctgggggcgcccaaagcacacatggccgcaaccatggaaaaatcacccaaatctgaagtcgtcatcaccacagtccccctggtatcagagatccagctcatggccgccaccggaggtaccgagctgtcctgctatcggtgtatcatcccgttcgccgtcgtggtgtttatcgctgggattgtggttactgcagtcgcctattcattcaacagtcatggttccattatcagcatatttgggttggtcgtgctgtcttctggtctctttctactggcctcatccgcattgtgttggaaggttagacagcgctccaaaaaagcaaagagacgggagagccaaacagcacttgtggctaatcaacgtagcctattcgcctag

SEQ ID NO: 197632 - DNA, 405 bp, Artificial Sequence
  derived and/or modified sequence
atgacagaggagcccatcaaggagatcctgggcgcccccaaggcccacatggccgccaccatggagaagagccccaagtctgaggtggtgatcaccaccgtgcccctggtgtctgagatccagctgatggccgccaccggcggcacagagctgagctgctaccgctgcatcatcccctttgctgtggtggtgttcatcgccggcatcgtggtgacagctgtggcctacagcttcaacagccacggcagcatcatcagcatcttcggcctggtggtgctgagcagcggcctcttcctgctggccagcagcgccctgtgctggaaggtgcggcagaggagcaagaaggccaagaggcgggagagccagacagccctggtggccaaccagaggagcctgtttgcctag

SEQ ID NO: 197633 - DNA, 405 bp, Artificial Sequence
  derived and/or modified sequence
atgaccgaggagcccatcaaggagatcctgggcgcccccaaggcccatatggccgcaactatggaaaaatctcctaagtctgaggtggtcattacaaccgtgccactggtcagcgaaatccagctgatggccgctactgggggaactgagttatcttgctatcggtgcatcatccctttcgctgtagttgttttcattgctggtatcgtggtgaccgctgtggcttatagttttaatagtcacggctcaattatatctatctttggccttgtggtcctgagtagcggactctttctgttagcttccagcgccctatgctggaaagttaggcagcgaagcaagaaggcaaagcgaagagaaagccagactgcactggtggctaaccagcgttcgctgtttgcttag

SEQ ID NO: 197634 - DNA, 405 bp, Artificial Sequence
  derived and/or modified sequence
atgaccgaggagcccatcaaggagatcctgggcgcccccaaggcccatatggctgccacaatggagaagtctcccaaatctgaggtagtgattactaccgtccccctggtcagtgaaatacagctgatggccgctacaggggggaccgaactatcatgttaccgttgcataatcccatttgccgtggtggtcttcatcgctggcatcgtcgtgacagctgtggcttactcatttaattcacatggatccattattagcatttttggcttggtagtcttgagctcgggcctgtttctgctggcttcgtcggctctgtgttggaaagtcagacagcgttctaagaaggctaagcggcgtgagtcacagacagctctcgtggccaatcaacgttcacttttcgcatag

SEQ ID NO: 197635 - DNA, 405 bp, Artificial Sequence
  derived and/or modified sequence
atgaccgaggagcccatcaaggagatcctgggcgcccccaaggcccacatggcagcgactatggagaagtcgccgaagagtgaggtggtaattaccactgtgccgctggtttctgagatccaactaatggctgccactggcggtaccgaactgagttgttatcgctgcatcatacctttcgcggtggtagtgttcattgccggcatcgtggtgacagccgttgcctattctttcaattcccatggctccatcattagcattttcggcctcgtggtactgtcatctggactgtttttgttggcgtccagtgctctgtgttggaaggtgagacagcgaagtaagaaggccaagcgccgggaatcccaaacagccctggtggccaatcagaggtccttatttgcttag

SEQ ID NO: 197636 - DNA, 405 bp, Artificial Sequence
  derived and/or modified sequence
atgaccgaggaaccgataaaggagatcctcggtgctccaaaggcacacatggcagccaccatggagaagtccccaaagtccgaggtggtgatcacgacggtgccgctggtaagcgaaatccagttaatggctgccacagggggaacagagctgtcctgctaccgttgtatcatccccttcgccgtcgtcgtctttattgcaggcattgtcgtgacggctgtggcttattccttcaattcccatggttcaattatttcaattttcgggctcgtagtactctcttccggcctcttcctgctggctagtagcgccctctgctggaaagtccggcaacgctcaaagaaagctaaaaggagagagtcccaaaccgcgctagtggctaatcaaaggagccttttcgcctag

SEQ ID NO: 197637 - DNA, 405 bp, Artificial Sequence
  derived and/or modified sequence
atgactgaggaacctataaaggagatcctgggtgcccctaaagcccacatggccgctacgatggagaagtctccaaagtctgaagtagttattaccactgtgcctcttgtgtctgagatccagcttatggcagctacaggagggactgaactctcctgctaccggtgtattatccctttcgccgttgtggtgtttatcgctggcatcgtagtgacggctgttgcctattcattcaattcccacggatctatcatctctatcttcgggctggtcgtgctctcaagtggattgttcctgctcgccagcagtgccctgtgctggaaggtaagacagagaagcaaaaaggcaaaacggagagaatctcaaactgcactagtggccaatcagaggagtctgtttgcatag

SEQ ID NO: 197638 - DNA, 405 bp, Artificial Sequence
  derived and/or modified sequence
atgactgaagaacctataaaagagatcttaggagctcccaaggcccatatggctgctactatggagaagtcccctaaaagcgaagttgtaataaccaccgtgcccctagtgtctgaaatccagttgatggctgcgacaggcggtacagagctgtcttgctacagatgtatcattccgttcgccgtagtggtctttattgccggtattgtcgtgaccgccgtcgcttactccttcaactcccacggttccattatttccatcttcggcctggtggtgctgagctcaggactcttccttcttgcaagctccgccctttgctggaaagtgcggcaacggtccaaaaaagctaagcggcgagagtcccagacagctctggtcgcaaatcaaaggtctttgtttgcgtag

SEQ ID NO: 197639 - DNA, 2251 bp, Artificial Sequence
  derived and/or modified sequence
cagttgcttctacaaaacccgtgaaagttctctgtccaaaagccttgttggtcccgcggtacatgcttcctgttcccagagagattcacccttgggctttcctatcagtcttccctaaagttggctgctcctgtgtcctgtcacataaaactgtgaaccgaggtctccgacttacgtcatgtcagtcacagcagggtgaggctccacaagtgtgagttctggcccctgctgctttcctttcaaatgcagtttacagtttattatggtattggacaccccatgctccttactgcattggctttgggtaagaaggagtgaaaattagtgtgcgaacctgaaaacctagaatttctgattgggactgaagaaaacctttgtgctgcagtcagtccccgagccagacgcctgtgactctcttcacatggaaatagatgactatccacagtaaaagcaaaattaaaaagtgacttgtgaaaaatatcctccatgctcctcttaccaagcctgcaacttaaaacctatggtttaaactgtgctttcaattatctggaggaggccagcactgatgagcccatcctgagccagtcattttaaggccagtgctacctaactgagacaaggctaatctggtcgccttgctgttagaggctctttcccagaagttggacgaagaggctcaggcgttgctgtttcttgtcttccaagtcaagtggttactctggtaatggattgcctctctccgagctttcaccctggtgagactgtccagatctagtctgtaaacccagcttagaagcactgttgtaaaaatgactgaagagcccatcaaggagatcctgggagccccaaaggctcacatggcagcgacgatggagaagagccccaagagtgaagttgtgatcaccacagtccctctggtcagtgagattcagttgatggctgctacagggggtaccgagctctcctgctaccgctgcatcatcccctttgctgtggttgtcttcatcgccggcatcgtggtcaccgcggtggcttacagcttcaattcccatgggtctattatctccatctttggcctggttgttctgtcatctggactttttttactagcctccagtgccttgtgctggaaagtgagacaaaggagcaagaaagccaagagacgggagagtcaaacagctctcgtggcaaatcagagaagcttgtttgcttgagactgaatacgaccaaatgggccattgggcctggaaaacgtgctctgactttgtcacccaattcacccagaaccatggtgggagagaacagacttggcgttggagcagactggaagaatgggggtgggagggtggaggggcttctcctttgtgaggaatgactcatgtcttctttaacgacaaacttaaccctaagggctacttctgagactgaaaaatcagctttctatttacatgaaacactttgggggtcatgggagtgcacagcattagacagtatttggttcaccctgtaaagtagccaagaaaagatgagaaaaatcaagataggcctggcacactagacatttgcctccaaaagaaataacctacagtcttaagatgtatcataaaaatgttctgccaaggatctaaattaccttgggtttcgcatatgtctatgaaattctgtgataatttttttcaatacattgattcactggcgtctgttttcattttatacttttaataactcatcactggtggtactttatcttgaaaagtaatattttttatattttaacattggacagtgttagccagttgtaatgatgtatcagaagtaaagaaaaacccattaaagttatagctaatagatgctgttgggggttaaattaatagtaaaataatccaatatagcacttttgatgatttttatataaaagtcaactgtacatttcattcagaataataaatacttattgctgctaaaacttcttaaatggttgtttctgctatagttatttctattgcagttccaaattgccatcttcccttgtctcatttgcaagttctcaattgtatttctctcaaatggacaggttccttctttactggaggatttttgtttttatcatattggtttttcattacttctgaatagtcttaattacgtttactaaattctaaaggatttctgtgctattataattaggaaatcaacgtctttggtcaggaactttataatgtgctattaaatgtatattacatttttgtgg

SEQ ID NO: 197640 - DNA, 1753 bp, Artificial Sequence
  derived and/or modified sequence
gtcatttaggaacagaggtagcctgaaagaagcaggaactccaggatcccaaaccagagcagaccctatagtaaagtatttttacatcttttcctttccccagaagagatccctaacctattgttttattgacagccttgctgttagaggctctttcccagaagttggacgaagaggctcaggcgttgctgtttcttgtcttccaagtcaagtggttactctggtaatggattgcctctctccgagctttcaccctggtgagactgtccagatctagtctgtaaacccagcttagaagcactgttgtaaaaatgactgaagagcccatcaaggagatcctgggagccccaaaggctcacatggcagcgacgatggagaagagccccaagagtgaagttgtgatcaccacagtccctctggtcagtgagattcagttgatggctgctacagggggtaccgagctctcctgctaccgctgcatcatcccctttgctgtggttgtcttcatcgccggcatcgtggtcaccgcggtggcttacagcttcaattcccatgggtctattatctccatctttggcctggttgttctgtcatctggactttttttactagcctccagtgccttgtgctggaaagtgagacaaaggagcaagaaagccaagagacgggagagtcaaacagctctcgtggcaaatcagagaagcttgtttgcttgagactgaatacgaccaaatgggccattgggcctggaaaacgtgctctgactttgtcacccaattcacccagaaccatggtgggagagaacagacttggcgttggagcagactggaagaatgggggtgggagggtggaggggcttctcctttgtgaggaatgactcatgtcttctttaacgacaaacttaaccctaagggctacttctgagactgaaaaatcagctttctatttacatgaaacactttgggggtcatgggagtgcacagcattagacagtatttggttcaccctgtaaagtagccaagaaaagatgagaaaaatcaagataggcctggcacactagacatttgcctccaaaagaaataacctacagtcttaagatgtatcataaaaatgttctgccaaggatctaaattaccttgggtttcgcatatgtctatgaaattctgtgataatttttttcaatacattgattcactggcgtctgttttcattttatacttttaataactcatcactggtggtactttatcttgaaaagtaatattttttatattttaacattggacagtgttagccagttgtaatgatgtatcagaagtaaagaaaaacccattaaagttatagctaatagatgctgttgggggttaaattaatagtaaaataatccaatatagcacttttgatgatttttatataaaagtcaactgtacatttcattcagaataataaatacttattgctgctaaaacttcttaaatggttgtttctgctatagttatttctattgcagttccaaattgccatcttcccttgtctcatttgcaagttctcaattgtatttctctcaaatggacaggttccttctttactggaggatttttgtttttatcatattggtttttcattacttctgaatagtcttaattacgtttactaaattctaaaggatttctgtgctattataattaggaaatcaacgtctttggtcaggaactttataatgtgctattaaatgtatattacatttttgtgg

SEQ ID NO: 197641 - DNA, 1962 bp, Artificial Sequence
  derived and/or modified sequence
cagttgcttctacaaaacccgtgaaagttctctgtccaaaagccttgttggtcccgcggtacatgcttcctgttcccagagagattcacccttgggctttcctatcagtcttccctaaagttggctgctcctgtgtcctgtcacataaaactgtgaaccgaggtctccgacttacgtcatgtcagtcacagcagggtgaggctccacaagtgtgagttctggcccctgctgctttcctttcaaatgcagtttacagtttattatggtattggacaccccatgctccttactgcattggctttgggtaagaaggagtgaaaattagtgtgcgaacctgaaaacctagaatttctgattgggactgaagaaaacctttgtgctgcagtcagtccccgagccagacgcctgtgactctcttcacatggaaatagatgactatccacagtaaaagcaaaattaaaaagtgacttgtgaaaaatatcctccatgctcctcttaccaagcctgcaacttaaaacctatggtttaaactgtgctttcaattatctggaggaggccagcactgatgagcccatcctgagccagtcattttaaggccagtgctacctaactgagacaaggctaatctggtcgccttgctgttagaggctctttcccagaagttggacgaagaggctcaggcgttgctgtttcttgtcttccaagtcaagtggttactctggtaatggattgcctctctccgagctttcaccctggtgagactgtccagatctagtctgtaaacccagcttagaagcactgttgtaaaaatgactgaagagcccatcaaggagatcctgggagccccaaaggctcacatggcagcgacgatggagaagagccccaagagtgaagttgtgatcaccacagtccctctggtcagtgagattcagttgatggctgctacagggggtaccgagctctcctgctaccgctgcatcatcccctttgctgtggttgtcttcatcgccggcatcgtggtcaccgcggtggcttacagcttcaattcccatgggtctattatctccatctttggcctggttgttctgtcatctggactttttttactagcctccagtgccttgtgctggaaagtgagacaaaggagcaagaaagccaagagacgggagagtcaaacagctctcgtggcaaatcagagaagcttgtttgcttgagactgaatacgaccaaatgggccattgggcctggaaaacgtgctctgactttgtcacccaattcacccagaaccatggtgggagagaacagacttggcgttggagcagactggaagaatgggggtgggagggtggaggggcttctcctttgtgaggaatgactcatgtcttctttaacgacaaacttaaccctaagggctacttctgagactgaaaaatcagctttctatttacatgaaacactttgggggtcatgggagtgcacagcattagacagtatttggttcaccctgtaaagtagccaagaaaagatgagaaaaatcaagataggcctggcacactagacatttgcctccaaaagaaataacctacagtcttaagatgtatcataaaaatgttctgccaaggatctaaattaccttgggtttcgcatatgtctatgaaattctgtgataatttttttcaatacattgattcactggcgtctgttttcattttatacttttaataactcatcactggtggtactttatcttgaaaagtaatattttttatattttaacattggacagtgttagccagttgtaatgatgtatcagaagtaaagaaaaacccattaaagttatagctaatagatgctgttgggggttaaattaatagtaaaataatccaatatagcacttttgatgatttttatataaaagtcaactgtacatttcattcagaataataaatacttattgctgct

SEQ ID NO: 197642 - protein, 498 aa, Artificial Sequence
  derived and/or modified sequence
MAAAAGPGAALSPRPCDSDPATPGAQSPKDDNEDNSNDGTQPSKRRRMGSGDSSRSCETSSQDLGFSYYPAENLIEYKWPPDETGEYYMLQEQVSEYLGVTSFKRKYPDLERRDLSHKEKLYLRELNVITETQCTLGLTALRSDEVIDLMIKEYPAKHAEYSVILQEKERQRITDHYKEYSQMQQQNTQKVEASKVPEYIKKAAKKAAEFNSNLNRERMEERRAYFDLQTHVIQVPQGKYKVLPTERTKVSSYPVALIPGQFQEYYKRYSPDELRYLPLNTALYEPPLDPELPALDSDGDSDDGEDGRGDEKRKNKGTSDSSSGNVSEGESPPDSQEDSFQGRQKSKDKAATPRKDGPKRSVLSKSVPGYKPKVIPNAICGICLKGKESNKKGKAESLIHCSQCENSGHPSCLDMTMELVSMIKTYPWQCMECKTCIICGQPHHEEEMMFCDMCDRGYHTFCVGLGAIPSGRWICDCCQRAPPTPRKVGRRGKNSKEG

SEQ ID NO: 197643 - DNA, 1497 bp, Artificial Sequence
  derived and/or modified sequence
atggcagcagccgccgggcccggcgctgccctgagtccccgcccttgcgacagcgaccccgccacccccggcgcccaatctcccaaagatgacaacgaagacaattctaacgacgggacccagccctccaagaggcgccgcatggggtccggggacagttctcggagctgtgaaacctccagccaggatctgggtttctcttactatccagctgaaaaccttatcgagtataaatggccccccgatgaaaccggtgagtactatatgctccaggaacaggttagtgaatatcttggggtaacgagcttcaaacgcaagtatcctgacctggagcgacgcgacctgtctcacaaagaaaaactctatctgagagagctcaacgttatcactgagacccagtgcacgttaggcctcactgcactgcggagtgacgaagtgatagatctgatgatcaaagaatatccggcaaagcacgccgaatacagcgtgatcttacaggagaaggagaggcaacgtatcaccgaccactacaaagagtacagccagatgcaacagcaaaatactcagaaggtcgaggcaagcaaggtccccgaatacattaagaaagctgccaaaaaggctgccgagttcaacagcaacctgaaccgcgaacgaatggaagagcgacgcgcctattttgacctgcagacgcacgttatccaggtcccacagggcaagtataaggtcctcccgactgagcggacaaaagtgtccagctaccctgttgcactaatacctggacaattccaagaatattataaacgatactccccagacgagctgcggtacctacccttgaacaccgctctgtacgagccacccctggatcccgagctgcctgctctcgatagcgacggcgattcagatgacggagaggatggtaggggggatgaaaaacgcaaaaataaggggacatcggactctagcagtgggaatgtgtcggagggagaatccccaccagattctcaggaagacagctttcagggccgtcagaaaagcaaggacaaggccgctacccctagaaaggacggccctaaaagatccgtgctgtctaaatccgtgcccggttataagcctaaagttattccaaatgcaatatgcggcatttgtctcaaggggaaagagtcaaacaaaaagggcaaggccgagtcactgatccattgtagtcaatgtgagaacagcggccaccctagctgcttggatatgactatggaacttgttagcatgataaagacgtatccttggcagtgcatggagtgcaaaacctgtatcatatgtgggcagccacaccatgaggaggaaatgatgttttgcgatatgtgcgacagagggtaccatacattttgcgtcggacttggggcaatcccatcaggcagatggatttgtgattgctgtcagagagctccacccacgcctcgcaaggtcggacggagagggaagaactcgaaggagggttag

SEQ ID NO: 197644 - DNA, 1497 bp, Artificial Sequence
  derived and/or modified sequence
atggctgctgctgctggccctggagctgccctgagcccccggccctgtgacagcgaccctgccacccctggggcccagagccccaaggatgacaatgaagacaacagcaatgatggcacccagcccagcaagagaagaaggatgggcagcggggacagcagccgcagctgtgagaccagcagccaggacctgggcttctcctactacccagctgagaacctgattgagtacaagtggcccccagatgagaccggggagtactacatgctgcaggagcaggtgtctgagtacctgggcgtgaccagcttcaagaggaagtacccagacctggagcggcgggacctgagccacaaggagaagctgtacctgcgggagctgaatgtcatcacagagacccagtgcaccctgggcctgacagccctgcggagtgatgaggtgattgacctgatgatcaaggagtacccagccaagcatgctgagtacagcgtcatcctgcaggagaaggagcggcagaggatcacagaccactacaaggagtacagccagatgcagcagcagaacacccagaaggtggaggccagcaaggtgcctgagtacatcaagaaggccgccaagaaggctgctgagttcaacagcaacctgaaccgggagaggatggaggagcggcgggcctactttgacctgcagacccacgtgatccaggtgccccagggcaagtacaaggtgctgcccacagagaggaccaaggtgagcagctaccctgtggccctgatccctggccagttccaggagtactacaagcgctacagcccagatgagctgcgctacctgcccctgaacacagccctgtatgagccccccctggaccctgagctgcctgccctggacagtgatggagacagtgatgatggagaagatggaagaggagatgagaagaggaagaacaagggcaccagtgacagcagcagtggaaatgtgtctgagggggagagccccccagacagccaggaggacagcttccagggccggcagaagagcaaggacaaggccgccacccccaggaaggatggccccaagaggtctgtgctgagcaagtctgtgcccggctacaagcccaaggtgatccccaatgccatctgtggcatctgcctgaagggcaaggagagcaacaagaagggcaaggccgagagcctcatccactgcagccagtgtgaaaattctggccaccccagctgcctggacatgaccatggagctggtgtccatgatcaagacctacccctggcagtgcatggagtgcaagacctgcatcatctgtggccagccccaccacgaggaggagatgatgttctgtgacatgtgtgaccggggctaccacaccttctgtgtgggcctgggcgccatccccagcggccgctggatctgtgactgctgccagagggccccacccacccccaggaaggtgggccggcggggcaagaacagcaaggagggctag

SEQ ID NO: 197645 - DNA, 1497 bp, Artificial Sequence
  derived and/or modified sequence
atggccgccgccgccggccccggcgccgccctgagcccccggccctgcgatagtgatcccgcaacccctggcgcccagagccctaaggacgacaatgaagataattccaatgacgggactcaacctagcaaacggcggagaatggggagcggggacagtagtcgctcatgtgagacctctagccaagaccttggcttctcctactatcctgcagaaaacttaatcgagtataagtggcctcccgatgaaacaggtgagtattatatgctgcaagaacaagtttccgaatatctcggcgtgacatcgtttaaaaggaaatatccagatctggagcggcgagatctgagtcacaaggagaagttgtaccttcgggaactcaatgttatcaccgagacacaatgcactctgggcttgaccgctctgaggtccgatgaggtcatcgacctcatgatcaaagaatatcctgcgaagcatgccgaatattccgtgattcttcaggagaaggaaagacagcggatcaccgaccattataaggagtactcccagatgcagcagcagaatacacagaaggttgaggcctcaaaggtcccagagtacatcaaaaaggccgcaaaaaaggctgccgagttcaatagcaacctgaaccgagaacggatggaggagcgtcgggcatacttcgatctacaaacacatgtgatacaggtgccccaaggcaagtataaggtactccctaccgagcgcacaaaagtttctagctacccagtcgctttgattccagggcagtttcaggaatactataaacgctatagccctgacgagctaagatatctcccccttaataccgcgctctacgagccccccctggacccggagctgcccgcgctcgactccgacggtgactcagacgatggagaagacgggcgaggagacgagaagaggaaaaacaaaggcacttctgattccagtagtgggaacgtcagcgagggggaaagtccccccgacagccaggaagattcatttcagggcaggcagaagagtaaggacaaggctgcaactccccggaaggacgggcccaaacgctctgtcctgagcaagtccgtgcctggatataaaccaaaagttatccccaacgctatctgtggaatctgcctgaagggaaaagagtcaaacaaaaagggcaaggctgaaagcctaatccactgcagtcagtgtgaaaacagcggccaccccagttgcctcgacatgacaatggagcttgtctcaatgatcaagacatatccctggcagtgtatggaatgtaagacttgtatcatttgtggccagcctcaccatgaggaagaaatgatgttttgtgacatgtgcgataggggctaccatacattctgcgtgggcctcggagcaattcccagtggtcgatggatttgcgactgctgtcagcgggccccacccaccccaagaaaggttggccggaggggcaagaacagcaaagagggatag

SEQ ID NO: 197646 - DNA, 1719 bp, Artificial Sequence
  derived and/or modified sequence
gggggcggggccggggcggcggggggcccgcgcggcggcggcggcggcggcggcggcagcggcggcggcggccgggacaaggcggaggcgacggcggcggcggcggcgcggggcgctcgggctgatggcggcggcggccgggcccggggctgcgctgtccccgcggccgtgcgacagcgacccagccacccccggagcgcagtccccgaaggatgataatgaagataattcaaatgatgggacccagccatccaaaaggaggcgaatgggctcaggagatagttctaggagttgtgaaacttcaagtcaagatcttggttttagttactatccagcagaaaacttgatagagtacaaatggccacctgatgaaacaggagaatactatatgcttcaagaacaagtcagtgaatatttgggtgtgacctcctttaaaaggaaatatccagatttagagcgacgagatttgtctcacaaggagaaactctacctgagagagctaaatgtcattactgaaactcagtgcactctaggcttaacagcattgcgcagtgatgaagtgattgatttaatgataaaagaatatccagccaaacatgctgagtattctgttattctacaagaaaaagaacgtcaacgaattacagaccattataaagagtattcccaaatgcaacaacagaatactcagaaagttgaagccagtaaagtgcctgagtatattaagaaagctgccaaaaaagcagcagaatttaatagcaacttaaaccgggaacgcatggaagaaagaagagcttattttgacttgcagacacatgttatccaggtacctcaagggaagtacaaagttttgccaacagagcgaacaaaggtcagttcttacccagtggctctcatccccggacagttccaggaatattataagaggtactcaccagatgagctgcggtatctgccattaaacacagccctgtatgagccccctctggatcctgagctccctgctctagacagtgatggtgattcagatgatggcgaagatggtcgaggtgatgagaaacggaaaaataaaggcacttcggacagctcctctggcaatgtatctgaaggggaaagccctcctgacagccaggaggactctttccagggaagacagaaatcaaaagacaaagctgccactccaagaaaagatggtcccaaacgttctgtactgtccaagtcagttcctgggtacaagccaaaggtcattccaaatgctatatgtggaatttgtctgaagggtaaggagtccaacaagaaaggaaaggctgaatcacttatacactgctcccaatgtgagaatagtggccatccttcttgcctggatatgacaatggagcttgtttctatgattaagacctacccatggcagtgtatggaatgtaaaacatgcattatatgtggacaaccccaccatgaagaagaaatgatgttctgtgatatgtgtgacagaggttatcatactttttgtgtgggccttggtgctattccatcaggtcgctggatttgtgactgttgtcagcgggcccccccaacacccaggaaagtgggcagaagggggaaaaacagcaaagagggataaaatagtttttgactctaatactgtatatgcatttaagtggaatatttggtgccatttacaacattattttcatgccaataaaagattttttttgcaaa

SEQ ID NO: 197647 - DNA, 1497 bp, Artificial Sequence
  derived and/or modified sequence
atggctgccgctgccggacccggagcagcattaagccctcggccttgcgattccgatcccgcaacacccggtgcccagagcccaaaagatgacaatgaggacaactcaaacgatgggacacagccctctaaacgcaggcggatgggctccggggacagcagccggagttgcgagacctccagtcaggacttaggttttagctactacccagctgaaaatcttatcgaatataagtggcctcccgatgagacgggagaatactatatgctgcaggaacaggtgagcgaatacctgggcgtgacttccttcaagcggaagtatcccgacctcgaaaggcgggacctgtctcacaaggagaagctttaccttcgagaactgaacgttattacagagacccagtgcactcttggcctgaccgcgctgaggtctgatgaggttattgatctgatgataaaggagtatcccgctaaacatgccgagtacagcgttatcctgcaggagaaggagagacagcggattactgatcactataaagagtatagtcagatgcagcaacagaatacccagaaagtcgaggcttcaaaagtgcccgaatatattaagaaggcagcaaaaaaggccgctgaatttaactctaaccttaatcgcgagcgaatggaggaaaggcgggcatatttcgacctgcaaacccatgtgatccaagtgcctcaaggaaagtacaaggttctgcctactgagaggacaaaggtatctagttaccctgtagcgcttatccctggtcagtttcaggaatactataaacgatatagcccagacgagctgcgctacctccccttgaataccgcgctttacgagccacccctggatcctgagctgccagctctggattccgacggggatagtgacgatggtgaagacgggagaggagacgagaagcgcaagaacaagggcacatcagactcctcatctgggaacgtgtccgagggtgagagccctcctgattcccaggaggattctttccaaggcaggcagaagagcaaagacaaagccgctactccgagaaaggatggacctaagcggagcgtactgagcaagagtgtccctggttacaaacccaaagtgattcccaacgcaatttgcgggatctgcttaaaaggaaaagaaagcaacaagaaaggaaaggctgaaagtcttattcactgctcgcagtgtgaaaattccggacatccttcttgtctggacatgaccatggagttggtgagcatgattaagacctatccatggcagtgtatggagtgcaagacttgtatcatctgcggtcagccacaccacgaggaggagatgatgttctgtgatatgtgcgatcggggttatcatacgttctgcgtgggattgggagcaattccaagcggaaggtggatctgcgactgttgtcagcgggcacctcctacaccaagaaaggttgggagacgcggaaagaacagcaaggagggttag

SEQ ID NO: 197648 - DNA, 1497 bp, Artificial Sequence
  derived and/or modified sequence
atggccgccgccgccggccccggcgccgccctgagccccagaccctgcgacagcgaccccgccacccccggcgcccagagccccaaggacgacaacgaggacaacagcaacgacggcacccagcccagcaagagaagaagaatgggcagcggcgacagcagcagaagctgcgagaccagcagccaggacctgggcttcagctactaccccgccgagaacctgatcgagtacaagtggccccccgacgagaccggcgagtactacatgctgcaggagcaggtgagcgagtacctgggcgtgaccagcttcaagagaaagtaccccgacctggagagaagagacctgagccacaaggagaagctgtacctgagagagctgaacgtgatcaccgagacccagtgcaccctgggcctgaccgccctgagaagcgacgaggtgatcgacctgatgatcaaggagtaccccgccaagcacgccgagtacagcgtgatcctgcaggagaaggagagacagagaatcaccgaccactacaaggagtacagccagatgcagcagcagaacacccagaaggtggaggccagcaaggtgcccgagtacatcaagaaggccgccaagaaggccgccgagttcaacagcaacctgaacagagagagaatggaggagagaagagcctacttcgacctgcagacccacgtgatccaggtgccccagggcaagtacaaggtgctgcccaccgagagaaccaaggtgagcagctaccccgtggccctgatccccggccagttccaggagtactacaagagatacagccccgacgagctgagatacctgcccctgaacaccgccctgtacgagccccccctggaccccgagctgcccgccctggacagcgacggcgacagcgacgacggcgaggacggcagaggcgacgagaagagaaagaacaagggcaccagcgacagcagcagcggcaacgtgagcgagggcgagagcccccccgacagccaggaggacagcttccagggcagacagaagagcaaggacaaggccgccacccccagaaaggacggccccaagagaagcgtgctgagcaagagcgtgcccggctacaagcccaaggtgatccccaacgccatctgcggcatctgcctgaagggcaaggagagcaacaagaagggcaaggccgagagcctgatccactgcagccagtgcgagaacagcggccaccccagctgcctggacatgaccatggagctggtgagcatgatcaagacctacccctggcagtgcatggagtgcaagacctgcatcatctgcggccagccccaccacgaggaggagatgatgttctgcgacatgtgcgacagaggctaccacaccttctgcgtgggcctgggcgccatccccagcggcagatggatctgcgactgctgccagagagccccccccacccccagaaaggtgggcagaagaggcaagaacagcaaggagggctag

SEQ ID NO: 197649 - protein, 670 aa, Artificial Sequence
  derived and/or modified sequence
MMEEEELEFVEELEAVLQLTPEVQLAIEQVFPSQDPLDRADFNAVEYINTLFPTEQSLANIDEVVNKIRLKIRRLDDNIRTVVRGQTNVGQDGRQVKEITRDIKQLDHAKRHLTTSITTLNHLHMLAGGVDSLEAMTRRRQYGEVANLLQGVMNVLEHFHKYMGIPQIRQLSERVKAAQTELGQQILADFEEAFPSQGTKRPGGPSNVLRDACLVANILDPRIKQEIIKKFIKQHLSEYLVLFQENQDVAWLDKIDRRYAWIKRQLVDYEEKYGRMFPREWCMAERIAVEFCHVTRAELAKIMRTRAKEIEVKLLLFAIQRTTNFEGFLAKRFSGCTLTDGTLKKLESPPPSTNPFLEDEPTPEMEELATEKGDLDQPKKPKAPDNPFHGIVSKCFEPHLYVYIESQDKNLGELIDRFVADFKAQGPPKPNTDEGGAVLPSCADLFVYYKKCMVQCSQLSTGEPMIALTTIFQKYLREYAWKILSGNLPKTTTSSGGLTISSLLKEKEGSEVAKFTLEELCLICNILSTAEYCLATTQQLEEKLKEKVDVSLIERINLTGEMDTFSTVISSSIQLLVQDLDAACDPALTAMSKMQWQNVEHVGDQSPYVTSVILHIKQNVPIIRDNLASTRKYFTQFCVKFANSFIPKFITHLFKCKPISMVGAEQVRWT

SEQ ID NO: 197650 - protein, 422 aa, Artificial Sequence
  derived and/or modified sequence
MMEEEELEFVEELEAVLQLTPEVQLAIEQVFPSQDPLDRADFNAVEYINTLFPTEQSLANIDEVVNKIRLKIRRLDDNIRTVVRGQTNVGQDGRQKKLESPPPSTNPFLEDEPTPEMEELATEKGDLDQPKKPKAPDNPFHGIVSKCFEPHLYVYIESQDKNLGELIDRFVADFKAQGPPKPNTDEGGAVLPSCADLFVYYKKCMVQCSQLSTGEPMIALTTIFQKYLREYAWKILSGNLPKTTTSSGGLTISSLLKEKEGSEVAKFTLEELCLICNILSTAEYCLATTQQLEEKLKEKVDVSLIERINLTGEMDTFSTVISSSIQLLVQDLDAACDPALTAMSKMQWQNVEHVGDQSPYVTSVILHIKQNVPIIRDNLASTRKYFTQFCVKFANSFIPKFITHLFKCKPISMVGAEQVRWT

SEQ ID NO: 197651 - DNA, 2013 bp, Artificial Sequence
  derived and/or modified sequence
atgatggaggaggaggagctggagttcgtggaggagctggaggccgtgctgcagctgacccccgaggtgcagctggccatcgagcaggtgttccccagccaggaccccctggacagagccgacttcaacgccgtggagtacatcaacaccctgttccccaccgagcagagcctggccaacatcgacgaggtggtgaacaagatcagactgaagatcagaagactggacgacaacatcagaaccgtggtgagaggccagaccaacgtgggccaggacggcagacaggtgaaggagatcaccagagacatcaagcagctggaccacgccaagagacacctgaccaccagcatcaccaccctgaaccacctgcacatgctggccggcggcgtggacagcctggaggccatgaccagaagaagacagtacggcgaggtggccaacctgctgcagggcgtgatgaacgtgctggagcacttccacaagtacatgggcatcccccagatcagacagctgagcgagagagtgaaggccgcccagaccgagctgggccagcagatcctggccgacttcgaggaggccttccccagccagggcaccaagagacccggcggccccagcaacgtgctgagagacgcctgcctggtggccaacatcctggaccccagaatcaagcaggagatcatcaagaagttcatcaagcagcacctgagcgagtacctggtgctgttccaggagaaccaggacgtggcctggctggacaagatcgacagaagatacgcctggatcaagagacagctggtggactacgaggagaagtacggcagaatgttccccagagagtggtgcatggccgagagaatcgccgtggagttctgccacgtgaccagagccgagctggccaagatcatgagaaccagagccaaggagatcgaggtgaagctgctgctgttcgccatccagagaaccaccaacttcgagggcttcctggccaagagattcagcggctgcaccctgaccgacggcaccctgaagaagctggagagccccccccccagcaccaaccccttcctggaggacgagcccacccccgagatggaggagctggccaccgagaagggcgacctggaccagcccaagaagcccaaggcccccgacaaccccttccacggcatcgtgagcaagtgcttcgagccccacctgtacgtgtacatcgagagccaggacaagaacctgggcgagctgatcgacagattcgtggccgacttcaaggcccagggcccccccaagcccaacaccgacgagggcggcgccgtgctgcccagctgcgccgacctgttcgtgtactacaagaagtgcatggtgcagtgcagccagctgagcaccggcgagcccatgatcgccctgaccaccatcttccagaagtacctgagagagtacgcctggaagatcctgagcggcaacctgcccaagaccaccaccagcagcggcggcctgaccatcagcagcctgctgaaggagaaggagggcagcgaggtggccaagttcaccctggaggagctgtgcctgatctgcaacatcctgagcaccgccgagtactgcctggccaccacccagcagctggaggagaagctgaaggagaaggtggacgtgagcctgatcgagagaatcaacctgaccggcgagatggacaccttcagcaccgtgatcagcagcagcatccagctgctggtgcaggacctggacgccgcctgcgaccccgccctgaccgccatgagcaagatgcagtggcagaacgtggagcacgtgggcgaccagagcccctacgtgaccagcgtgatcctgcacatcaagcagaacgtgcccatcatcagagacaacctggccagcaccagaaagtacttcacccagttctgcgtgaagttcgccaacagcttcatccccaagttcatcacccacctgttcaagtgcaagcccatcagcatggtgggcgccgagcaggtgagatggacctag

SEQ ID NO: 197652 - DNA, 2013 bp, Artificial Sequence
  derived and/or modified sequence
atgatggaggaggaagagctcgagttcgtggaagagctggaggcagtgctgcagcttacccctgaggtgcagctggccatagaacaggtcttcccatctcaagatcctctggatcgcgccgattttaacgccgtcgagtacataaatacgctgtttcctacagagcagagtctggccaatatagacgaagtggtcaataagattagattgaagattcgtaggctggacgacaacattaggaccgttgtgaggggccagactaatgttggccaggacggtagacaggttaaggaaataactcgtgatatcaagcagctcgaccatgcaaaacggcaccttactacatccatcacgactctgaatcatctgcatatgctggcgggtggagtggatagcctggaggctatgacccgtaggagacagtacggcgaggtggccaacttactgcagggagtcatgaatgtcctcgaacacttccacaaatatatgggaattccacagatacgtcagctgagtgagcgggtaaaagccgctcagaccgaacttggacagcagattcttgctgacttcgaagaggcatttcctagtcaggggacgaaaagaccaggcgggccatccaatgtacttcgcgatgcttgtctggtggctaacattctggacccaaggataaagcaagaaatcattaagaaatttattaaacagcacctgtcagagtatctggtgctttttcaggaaaaccaagacgtcgcatggctggataagattgatagacgctacgcttggatcaagagacagttagtcgattacgaggaaaaatatggacggatgtttcctagagagtggtgtatggctgagcggatcgctgtcgaattttgccacgtgacccgcgcggaactggcaaagataatgcgcactcgggcgaaggaaattgaggtgaaattgctgctgtttgccatccagcgcaccaccaactttgagggttttctagcaaaacggtttagtggatgtacccttaccgatgggacactgaagaaacttgaatcaccccctccgagcaccaatcccttcctggaagatgagccaacacctgaaatggaagaactcgccaccgagaagggagatctggatcagcctaagaagcctaaagcccccgataacccattccacgggatcgtatccaagtgcttcgagccacatttgtacgtgtatattgaaagccaggataaaaatctcggtgagctgattgaccgtttcgtagctgacttcaaggcccagggtcctcccaagccgaacactgatgaaggtggagccgtcctaccaagctgcgcagatctcttcgtttactacaagaagtgcatggtgcagtgcagccaacttagcaccggtgaacctatgatagccctgacgaccatctttcagaagtacttgagggaatatgcatggaaaatcttatcgggaaatctacctaagactacaacctcttccggcgggctgacaatatcgtccctgctgaaggaaaaagagggtagtgaagtggccaaatttacgcttgaggaactctgtctgatctgtaatatcctctcaaccgcagagtactgcctcgctactacacaacagcttgaggaaaaacttaaggaaaaggtagatgtcagcctgatagaacggattaacctcacaggcgaaatggacaccttttcaacagttatctctagctctatccagctgctggtccaagatttagatgccgcatgtgatcctgccctgactgctatgagtaagatgcagtggcagaacgtggaacatgtgggcgaccagtccccttacgtgactagcgtcatcctccatattaaacaaaacgtgcccattattagagataacctcgccagcacgcggaaatatttcacccagttctgtgtcaagtttgccaactcttttatacccaaatttattacccatctgtttaagtgtaaacccatctcaatggtaggagcagagcaggtgagatggacctag

SEQ ID NO: 197653 - DNA, 2013 bp, Artificial Sequence
  derived and/or modified sequence
atgatggaggaggaggagctggagtttgtggaggagctggaggccgtgctgcagctgaccccagaggtgcagctggccatcgagcaggtgttccccagccaggaccccctggacagagctgacttcaatgctgtggagtacatcaacaccctcttccccacagagcagagcctggccaacattgatgaggtggtgaacaagatccggctgaagatccggcggctggatgacaacatcagaacagtggtgcggggccagaccaacgtgggccaggacggccggcaggtgaaggagatcacccgggacatcaagcagctggaccacgccaagaggcacctgaccaccagcatcaccaccctgaaccacctgcacatgctggccggcggcgtggacagcctggaggccatgacccggcggcggcagtacggggaggtggccaacctgctgcagggcgtgatgaatgtgctggagcacttccacaagtacatgggcatcccccagatccggcagctgtctgagcgggtgaaggccgcccagacagagctgggccagcagatcctggccgactttgaggaggccttccccagccagggcaccaagaggcctgggggccccagcaatgtgctgagagatgcctgcctggtggccaacatcctggacccccgcatcaagcaggagatcatcaagaagttcatcaagcagcacctgtctgagtacctggtgctcttccaggagaaccaggatgtggcctggctggacaagattgacagaagatatgcctggatcaagaggcagctggtggactatgaggagaagtatggccgcatgttcccccgggagtggtgcatggccgagagaattgctgtggagttctgccacgtgaccagggctgagctggccaagatcatgaggacccgggccaaggagattgaggtgaagctgctgctgtttgccatccagaggaccaccaactttgagggcttcctggccaagcgcttcagcggctgcaccctgacagatggcaccctgaagaagctggagagccccccacccagcaccaaccccttcctggaggatgagcccaccccagagatggaggagctggccacagagaagggggacctggaccagcccaagaagcccaaggccccagacaaccccttccatggaattgtgtccaagtgctttgagccccacctgtatgtgtacatcgagagccaggacaagaacctgggggagctgattgacagatttgtggccgacttcaaggcccagggcccccccaagcccaacacagatgaaggaggagctgtgctgcccagctgtgccgacctgtttgtgtactacaagaagtgcatggtgcagtgcagccagctgagcactggagagcccatgattgccctgaccaccatcttccagaagtacctgcgggagtatgcctggaagatcctgagcggcaacctgcccaagaccaccaccagcagcggcggcctgaccatcagcagcctgctgaaggagaaggagggcagcgaggtggccaagttcaccctggaggagctgtgcctgatctgcaacatcctgagcacagctgagtactgcctggccaccacccagcagctggaggagaagctgaaggagaaggtggatgtgtccctgattgagcgcatcaacctgactggagagatggacaccttcagcaccgtcatcagcagcagcatccagctgctggtgcaggacctggatgctgcctgtgaccctgccctgacagccatgagcaagatgcagtggcagaatgtggagcacgtgggggaccagagcccctacgtgaccagcgtcatcctgcacatcaagcagaatgtgcccatcatccgggacaacctggccagcaccaggaagtacttcacccagttctgtgtgaagtttgccaacagcttcatccccaagttcatcacccacctgttcaagtgcaagcccatctccatggtgggcgctgagcaggtgcgctggacctag

SEQ ID NO: 197654 - DNA, 2013 bp, Artificial Sequence
  derived and/or modified sequence
atgatggaggaggaggagctggagttcgtggaggagctggaggccgtgttgcagttgactcctgaagttcagttggccatcgagcaggtgttcccgagccaggaccctctggaccgcgccgacttcaacgcagtggagtatattaacacccttttccctactgaacaaagcttagctaatattgatgaagtggtgaataagattcgcctcaaaatcaggcgcctggatgataatatacggaccgtcgttcgcggccaaacaaacgttggacaggacggcaggcaggtcaaggagattacccgtgacatcaagcagctggatcatgccaaacgtcacctcaccacctcgataaccacattgaatcatctgcacatgttggccggcggtgtggacagcctggaggcaatgaccaggagacgccaatacggggaggttgctaatctgttgcagggcgtgatgaacgttctggagcactttcataagtacatgggaatcccccagatcagacagctgagcgagagagttaaggcagctcaaaccgagctggggcaacaaatcttggccgatttcgaagaggctttccccagtcagggcaccaaaaggcccggtggccccagcaacgtgctgagggatgcctgtcttgttgctaatatcttagatccgcgcatcaagcaggagattattaagaagtttattaagcagcacttatccgagtacctggtgctctttcaggaaaaccaagacgtggcttggctggataagatagatcggagatacgcttggatcaagcggcagttggtcgactacgaagaaaagtatggccgcatgttcccccgcgaatggtgtatggccgagaggattgccgtggaattttgccacgttacgagagctgaactggctaagattatgcggacccgcgctaaggagatcgaagtgaaattgctgctgttcgcaattcagcggactactaattttgaaggattcctcgccaagagattttctggctgtacgttaaccgacggtacactgaaaaagctggagtctccacctccctcgacaaatcccttcctagaggatgagccaaccccagagatggaagagctggcaaccgaaaaaggagacctcgatcagcccaaaaaacctaaggcgccggataaccctttccacgggatcgtttccaaatgttttgagcctcacttgtacgtttacatcgaatcccaggataaaaaccttggggagctcatagaccggtttgtcgctgactttaaggcccagggacctcctaagcctaataccgacgaaggcggcgccgtcctgccttcatgtgccgacctgttcgtgtactataaaaaatgcatggtgcaatgttctcaattatcaacaggggagccaatgattgcccttactactatctttcagaaatatctgcgcgaatacgcctggaaaattttgtctggcaatttgcctaagacaacaacgagtagcgggggcctgactatttcttctctcttgaaggaaaaagagggcagcgaggttgccaagtttacccttgaggagctgtgcttgatctgcaatatcctgagtacagccgaatattgcttggccacgacccagcaactggaagaaaaactcaaggaaaaagtggacgtcagcttaatcgagcgaatcaatttgacgggcgaaatggacacattctctacagtcatctcctcaagcattcagctcctggtccaagaccttgatgccgcttgtgaccccgccttgacagcgatgtctaagatgcagtggcagaatgtcgagcacgtgggcgaccagtctccatacgtgacctctgtgattttgcatattaagcagaacgtaccgataatccgggataacttggcttctacaagaaagtacttcacacagttctgcgtgaagtttgctaactcgttcatacccaagtttatcacccacctctttaaatgcaaaccgatctccatggtgggagcagaacaggttcggtggacttag

SEQ ID NO: 197655 - DNA, 2013 bp, Artificial Sequence
  derived and/or modified sequence
atgatggaggaggaagaactcgaattcgtagaagagttagaggcagtcctgcagctgaccccagaggtacagctggcgattgagcaggtctttccttcccaagatcccctggatcgcgctgactttaatgcggtggagtacatcaacactctgtttccaacagagcagtcgctggcgaatattgatgaagtcgttaacaagatcagactgaagatacgaaggctggatgataatatacgaacagtcgtacggggtcagacgaatgtgggacaagatgggagacaggtgaaagagattacgcgagacataaagcagttggatcacgccaagcgccatctcaccacctctatcactaccctgaaccatctgcatatgctcgcgggtggcgtcgattcgctcgaggccatgacccgcaggcgtcagtatggcgaggtggctaaccttcttcaaggggtaatgaatgtgctggaacatttccataaatacatggggattcctcagatcaggcagctgtccgagcgggtgaaggctgcccaaactgagttgggacagcagatattggcagattttgaagaggcgtttccctcccagggaacaaaaagaccaggagggccttccaacgtcctccgggacgcctgcctcgtcgctaacatcctggacccgagaattaaacaagaaatcatcaaaaaatttatcaagcagcatcttagcgaatatctggtgcttttccaggaaaaccaggatgttgcttggctggacaagatagaccgaaggtatgcctggatcaagcgccagttagtggactacgaggagaagtacggtaggatgttccctagagagtggtgcatggccgaacgcatcgccgtggagttttgtcacgtcacccgcgctgaactggcaaagatcatgaggacacgtgcaaaggagatcgaagtcaagctcctgctgtttgccatccagcgcaccacaaacttcgagggctttttagctaaaaggtttagcggctgtacacttaccgacggaactctgaagaaacttgagtcccccccaccatctactaaccccttccttgaagacgagccaacccccgagatggaagagttggccaccgagaaaggagatctggatcagcctaagaagcccaaggctccagacaacccgttccatggaattgtcagtaaatgcttcgagccacacctgtatgtgtacatcgaatcccaggacaagaatcttggagagctgatcgaccgctttgtggccgactttaaggcccaagggcctccgaagccaaacaccgatgaaggcggtgccgtcctgccgtcctgcgcagatctattcgtttattacaaaaagtgcatggtccagtgcagtcagctgtccaccggggagccaatgatcgccctgactactatattccagaagtatctgagggaatacgcatggaaaatcctaagtggtaacctccccaaaacaaccactagcagcggaggtctgacgatctccagcctgttgaaggaaaaagaggggtcagaggtggcgaaattcacgttagaggagctctgcctcatctgcaacatcctttcaacagccgagtactgtctcgctacgacacagcagctcgaggagaagctcaaggagaaagtcgatgtttcattgatagaacggattaacctaaccggcgagatggacacattttccacagttatttcttcctcaatacaactgctggttcaggacttggacgcagcatgtgatcccgctcttactgccatgtccaagatgcaatggcaaaatgtggagcacgtgggcgaccaatccccctacgtaacaagcgtaatccttcatatcaagcaaaatgtacccataatcagggataatttggcttccactcgcaagtattttacccagttctgcgtgaaattcgctaacagttttatacctaagtttatcacacacctgttcaagtgcaagccaatatctatggttggtgccgaacaggtgcgctggacttag

SEQ ID NO: 197656 - DNA, 2694 bp, Artificial Sequence
  derived and/or modified sequence
gaagtgccggagcggctgacagagcggctgacggagccgggctcaccaggtcgctgccgcgagggagttgctgtgctggggcctgggtggcggctggaggcctgagttgggctcgcggcgggggtcggcagggggccgggtggcggaatgatggaggaggaggaactggagttcgtggaggagctggaagccgtgctgcagctcacgcccgaggtgcagctggccatcgagcaggtgtttccaagccaggaccctctagatcgagcagatttcaatgctgttgagtatatcaataccctgttcccaaccgagcaatctctggcgaacatagacgaagtcgtgaacaaaattaggctgaaaataaggagactggatgacaatattcgaactgttgtaagaggtcagacgaacgtggggcaggatggacggcaagtgaaagaaatcacccgtgatattaagcaattagatcacgccaaacgccacctgaccacctcaatcaccacactgaaccacctgcacatgctggcaggaggtgtcgactccctcgaagccatgaccaggcgaagacaatacggagaagttgctaatctccttcagggtgtgatgaatgtcctggagcacttccacaagtatatggggattccgcagatccggcagctttccgaaagagtgaaggctgcacagactgagttaggacagcaaatcctggcagattttgaagaagcgtttccttcccagggcaccaagagaccaggaggacccagcaatgttctacgagatgcatgtctggttgctaatattctagatcccaggatcaaacaggaaatcatcaaaaagtttattaaacagcatctgtcagagtatctggtactttttcaagaaaaccaagatgttgcctggctggacaaaatcgacagacgctatgcctggataaaacgccagcttgtggactatgaggagaaatacggccgcatgtttccacgtgagtggtgcatggctgagaggattgcggtggaattttgccatgtgacaagggcagaacttgccaagattatgcgtaccagagcgaaggaaattgaagtgaaattgcttctttttgctattcaaagaacaactaactttgaggggtttcttgcaaaacgcttctccggctgcaccctgaccgatgggaccctgaaaaagcttgagtctccacccccatctaccaatcccttcctggaagatgagccaacaccagagatggaggaactggcaacggagaaaggagatttagatcaaccaaagaagcctaaagccccagacaatccatttcatggcattgtttccaagtgttttgagcctcatctctacgtgtatatcgaatcccaagacaagaacctcggagagctgatagatcggtttgtggctgatttcaaagcccaggggccacctaagcccaacactgatgaagggggtgccgtgctccccagctgcgccgacctctttgtctactacaagaagtgcatggtgcaatgctctcagctcagtactggggagcccatgatcgccctgaccaccattttccagaagtacctccgagaatacgcctggaaaatcctctctggcaacctgcccaaaaccacaaccagcagtggaggactgactatcagcagcctcctcaaggaaaaggagggctcagaagtagccaagttcactctggaggagctctgcctcatctgtaacatcctgagcacggcagagtactgtctggccaccacccagcagctagaagaaaaactcaaagaaaaagtggatgtaagtctgattgaacgaatcaatctgactggagagatggacacgttcagcaccgtcatctccagcagtattcagctgctggttcaggatctggatgctgcctgtgatcctgccctgactgccatgagcaagatgcagtggcagaacgtggagcacgttggtgaccagagcccctacgtcacctctgtcattctgcacatcaagcagaacgtccccatcatccgtgacaacctggcttccacacgcaagtacttcactcagttctgcgttaaatttgcaaactccttcattcccaaattcatcacccacctcttcaagtgcaagccaattagcatggtgggagcagaacaggtgagatggacgtagtatcaggcatttgcctggcagcttttgttgtagatcaagcacatattcttctagtccagatctacttggcaggaataaaattgatgatgtcccctgtttggggacagtataatgactcacccggaaggtttcttaattcgttcttccatttatttttaaaaattttgtttgaacgcctactaagttctgggtgcagggtataacacagcaagcaccatggaaaggtccctgctcctagtgctcacactccaataagaagaagtggctgggccgggcacagcggctcacgctgtaaccccagcatttcgggaggcctgggcaggcagatcacctggggtaaggaatttgagagcagcctggccaacatggtgaaatcccatctctactaaaaatacaaaaattagctgggcatgggggcaggctactggggaggctgaggcaggagaatcacttgaacccgggaggtggaggttgcagtgagccgatatcacaccactgcactccagcctgggtgacaaagtgagactccatctc

SEQ ID NO: 197657 - protein, 319 aa, Artificial Sequence
  derived and/or modified sequence
MLGRSLREVSAALKQGQITPTELCQKCLSLIKKTKFLNAYITVSEEVALKQAEESEKRYKNGQSLGDLDGIPIAVKDNFSTSGIETTCASNMLKGYIPPYNATVVQKLLDQGALLMGKTNLDEFAMGSGSTDGVFGPVKNPWSYSKQYREKRKQNPHSENEDSDWLITGGSSGGSAAAVSAFTCYAALGSDTGGSTRNPAAHCGLVGFKPSYGLVSRHGLIPLVNSMDVPGILTRCVDDAAIVLGALAGPDPRDSTTVHEPINKPFMLPSLADVSKLCIGIPKVTFSFHYFTEILSSPIESTDLGGGLGGFESLLCHFY

SEQ ID NO: 197658 - protein, 528 aa, Artificial Sequence
  derived and/or modified sequence
MLGRSLREVSAALKQGQITPTELCQKCLSLIKKTKFLNAYITVSEEVALKQAEESEKRYKNGQSLGDLDGIPIAVKDNFSTSGIETTCASNMLKGYIPPYNATVVQKLLDQGALLMGKTNLDEFAMGSGSTDGVFGPVKNPWSYSKQYREKRKQNPHSENEDSDWLITGGSSGGSAAAVSAFTCYAALGSDTGGSTRNPAAHCGLVGFKPSYGLVSRHGLIPLVNSMDVPGILTRCVDDAAIVLGALAGPDPRDSTTVHEPINKPFMLPSLADVSKLCIGIPKEYLVPELSSEVQSLWSKAADLFESEGAKVIEVSLPHTSYSIVCYHVLCTSEVASNMARFDGLQYGHRCDIDVSTEAMYAATRREGFNDVVRGRILSGNFFLLKENYENYFVKAQKVRRLIANDFVNAFNSGVDVLLTPTTLSEAVPYLEFIKEDNRTRSAQDDIFTQAVNMAGLPAVSIPVALSNQGLPIGLQFIGRAFCDQQLLTVAKWFEKQVQFPVIQLQELMDDCSAVLENEKLASVSLKQ

SEQ ID NO: 197659 - DNA, 960 bp, Artificial Sequence
  derived and/or modified sequence
atgctgggcagaagcctgagagaggtgagcgccgccctgaagcagggccagatcacccccaccgagctgtgccagaagtgcctgagcctgatcaagaagaccaagttcctgaacgcctacatcaccgtgagcgaggaggtggccctgaagcaggccgaggagagcgagaagagatacaagaacggccagagcctgggcgacctggacggcatccccatcgccgtgaaggacaacttcagcaccagcggcatcgagaccacctgcgccagcaacatgctgaagggctacatccccccctacaacgccaccgtggtgcagaagctgctggaccagggcgccctgctgatgggcaagaccaacctggacgagttcgccatgggcagcggcagcaccgacggcgtgttcggccccgtgaagaacccctggagctacagcaagcagtacagagagaagagaaagcagaacccccacagcgagaacgaggacagcgactggctgatcaccggcggcagcagcggcggcagcgccgccgccgtgagcgccttcacctgctacgccgccctgggcagcgacaccggcggcagcaccagaaaccccgccgcccactgcggcctggtgggcttcaagcccagctacggcctggtgagcagacacggcctgatccccctggtgaacagcatggacgtgcccggcatcctgaccagatgcgtggacgacgccgccatcgtgctgggcgccctggccggccccgaccccagagacagcaccaccgtgcacgagcccatcaacaagcccttcatgctgcccagcctggccgacgtgagcaagctgtgcatcggcatccccaaggtgaccttcagcttccactacttcaccgagatcctgagcagccccatcgagagcaccgacctgggcggcggcctgggcggcttcgagagcctgctgtgccacttctactag

SEQ ID NO: 197660 - DNA, 1587 bp, Artificial Sequence
  derived and/or modified sequence
atgctgggcagaagcctgagagaggtgagcgccgccctgaagcagggccagatcacccccaccgagctgtgccagaagtgcctgagcctgatcaagaagaccaagttcctgaacgcctacatcaccgtgagcgaggaggtggccctgaagcaggccgaggagagcgagaagagatacaagaacggccagagcctgggcgacctggacggcatccccatcgccgtgaaggacaacttcagcaccagcggcatcgagaccacctgcgccagcaacatgctgaagggctacatccccccctacaacgccaccgtggtgcagaagctgctggaccagggcgccctgctgatgggcaagaccaacctggacgagttcgccatgggcagcggcagcaccgacggcgtgttcggccccgtgaagaacccctggagctacagcaagcagtacagagagaagagaaagcagaacccccacagcgagaacgaggacagcgactggctgatcaccggcggcagcagcggcggcagcgccgccgccgtgagcgccttcacctgctacgccgccctgggcagcgacaccggcggcagcaccagaaaccccgccgcccactgcggcctggtgggcttcaagcccagctacggcctggtgagcagacacggcctgatccccctggtgaacagcatggacgtgcccggcatcctgaccagatgcgtggacgacgccgccatcgtgctgggcgccctggccggccccgaccccagagacagcaccaccgtgcacgagcccatcaacaagcccttcatgctgcccagcctggccgacgtgagcaagctgtgcatcggcatccccaaggagtacctggtgcccgagctgagcagcgaggtgcagagcctgtggagcaaggccgccgacctgttcgagagcgagggcgccaaggtgatcgaggtgagcctgccccacaccagctacagcatcgtgtgctaccacgtgctgtgcaccagcgaggtggccagcaacatggccagattcgacggcctgcagtacggccacagatgcgacatcgacgtgagcaccgaggccatgtacgccgccaccagaagagagggcttcaacgacgtggtgagaggcagaatcctgagcggcaacttcttcctgctgaaggagaactacgagaactacttcgtgaaggcccagaaggtgagaagactgatcgccaacgacttcgtgaacgccttcaacagcggcgtggacgtgctgctgacccccaccaccctgagcgaggccgtgccctacctggagttcatcaaggaggacaacagaaccagaagcgcccaggacgacatcttcacccaggccgtgaacatggccggcctgcccgccgtgagcatccccgtggccctgagcaaccagggcctgcccatcggcctgcagttcatcggcagagccttctgcgaccagcagctgctgaccgtggccaagtggttcgagaagcaggtgcagttccccgtgatccagctgcaggagctgatggacgactgcagcgccgtgctggagaacgagaagctggccagcgtgagcctgaagcagtag

SEQ ID NO: 197661 - DNA, 2158 bp, Artificial Sequence
  derived and/or modified sequence
actagcgaccggtgacctctttttcccccttgcctggctcctgtggtggcaggctgggcacgaggaccatgctgggccggagcctccgagaagtttctgcggcactgaaacaaggccaaattacaccaacagagctctgtcaaaaatgtctctctcttatcaagaagaccaagtttctaaatgcctacattactgtgtcagaagaggtggccttaaaacaagctgaagaatcagaaaagagatataagaatggacagtcacttggggatttagatggaattcctattgcagtaaaagacaatttcagcacttctggcattgagacaacatgtgcatcaaatatgctgaaaggttatataccaccttataatgctacagtagttcagaagttgttggatcagggagctctactaatgggaaaaacaaatttagatgagtttgctatgggatctgggagcacagatggtgtatttggaccagttaaaaacccctggagttattcaaaacaatatagagaaaagaggaagcagaatccccacagcgagaatgaagattcagactggctgataactggaggaagctcaggtgggagtgcagctgctgtatcggcgttcacatgctacgcggctttaggatcagatacaggaggatcgaccagaaatcctgctgcccactgtgggcttgttggtttcaaaccaagctatggcttagtttcccgtcatggtctcattcccctggtgaattcgatggatgtgccaggaatcttaaccagatgtgtggatgatgcagcaattgtgttgggtgcactggccggacctgaccccagggactctaccacagtacatgaacctattaataaaccattcatgcttcccagtttggcagatgtgagcaaactatgtataggaattccaaaggtaactttttcctttcattactttacagaaatactgtcaagtccaatagagagcacagacttgggaggcggattgggtgggtttgaatctctgctctgccacttttattaatcatgtgagttgagtatgtgacttaatctcttttagctcaatttccccatctgtaaaataggaataataaaaatactgacttcagagaggtttgtgaggatcaattagacagtcatgttaagtctgtaaattgtttctgtaatgggcaagatagcaaatattttagattttgtggaccatgcagtctttatcataactgcttaactgccattatagtgagaaagcagccacagacaatatgtaaatgaaaaagtgtgtctctgttccaataaaactttattttcaaaaaccagctggcttgtcacatctggcctatgggccatagtttgcccatccctaatgtaaagaaaggactttagcccaaagccacaacttgcatagtaatgcctcaaaaaatgttaacatctttactgttattattattactactgcatctattacagtagcaattgagtaatgaatacatgaatgttataatgttaaattactaaccttttaaaaatattaagcattgcaatatattaatactttaaatcttttaggaagataagttaccctgcagaataatgaagtttcacaacctcagcactgttggtgtttggggctggtaattgtttgttgtgggagactgtcctgtgcattgtaagatgtttagtagcatccctggcctctacccctacatgcaagtagtaccccaccaccaaaaccacaatcccacaaccaaaaatgtctgcagacattgtcaagtgtctcctggttagggaaaaggagacaaaagtaacccccaggtaagaccactgctatagagaaatactaccttatttaaaatcttccattaaggtaatatatgtaaggccaggtgcgtacacctgtaatcccagcaccttgggaagccaaggcaggaggatcgcttgagatcaggagtttgagaccagcctgggcaacatacagagccctatgtctacaaaaagttttaaaaaaattgtggggtgtggtggtgtgcacctgtggtcctagctgtttgggaggctgaggggggaggattgcttgagtccaggaggttgagactgccgtgagccatgattgcaccactgcactccaccctaggtgacagagcaagaccctatctc

SEQ ID NO: 197662 - DNA, 4106 bp, Artificial Sequence
  derived and/or modified sequence
agtgacaattaaagatggctgcgcccatgtaacatcactagcgaccggtgacctctttttcccccttgcctggctcctgtggtggcaggctgggcacgaggaccatgctgggccggagcctccgagaagtttctgcggcactgaaacaaggccaaattacaccaacagagctctgtcaaaaatgtctctctcttatcaagaagaccaagtttctaaatgcctacattactgtgtcagaagaggtggccttaaaacaagctgaagaatcagaaaagagatataagaatggacagtcacttggggatttagatggaattcctattgcagtaaaagacaatttcagcacttctggcattgagacaacatgtgcatcaaatatgctgaaaggttatataccaccttataatgctacagtagttcagaagttgttggatcagggagctctactaatgggaaaaacaaatttagatgagtttgctatgggatctgggagcacagatggtgtatttggaccagttaaaaacccctggagttattcaaaacaatatagagaaaagaggaagcagaatccccacagcgagaatgaagattcagactggctgataactggaggaagctcaggtgggagtgcagctgctgtatcggcgttcacatgctacgcggctttaggatcagatacaggaggatcgaccagaaatcctgctgcccactgtgggcttgttggtttcaaaccaagctatggcttagtttcccgtcatggtctcattcccctggtgaattcgatggatgtgccaggaatcttaaccagatgtgtggatgatgcagcaattgtgttgggtgcactggccggacctgaccccagggactctaccacagtacatgaacctattaataaaccattcatgcttcccagtttggcagatgtgagcaaactatgtataggaattccaaaggaatatcttgtaccggaattatcaagtgaagtacagtctctttggtccaaagctgctgacctctttgagtctgagggggccaaagtaattgaagtatcccttcctcacaccagttattcaattgtctgctaccatgtattgtgcacatcagaagtggcatcgaatatggcaagatttgatgggctacaatatggtcacagatgtgacattgatgtgtccactgaagccatgtatgctgcaaccagacgagaagggtttaatgatgtggtgagaggaagaattctctcaggaaactttttcttattaaaagaaaactatgaaaattattttgtcaaagcacagaaagtgagacgcctcattgctaatgactttgtaaatgcttttaactctggagtagatgtcttgctaactcccaccaccttgagtgaggcagtaccatacttggagttcatcaaagaggacaacagaacccgaagtgcccaggatgatatttttacacaagctgtaaatatggcaggattgccagcagtgagtatccctgttgcactctcaaaccaagggttgccaataggactgcagtttattggacgtgcgttttgtgaccagcagcttcttacagtagccaaatggtttgaaaaacaagtacagtttcctgttattcaacttcaagaactcatggatgattgttcagcagtccttgaaaatgaaaagttagcctctgtctctctaaaacagtaaacatatcttacaaattaaaatgacttttaggctgggtgcagtggctcacacctgtaatcccagcactttgggaggccaaggcgagcggatcatgaggtcagaagatctagaacagcctggtcaacatggtgaaaccccgtctctactaaaaatacaaaaattagccaggcttagtggcgggcatctgtagtcccagctactcaggaggctgaggcaggagaatcacttgaaccctggaggtggaggttgcagtgagccgagatcatgccactgcactgcactccagcctgggtgacaaagcaagactgtgtctcaaaataaataaataaaataaaataaaatgacgtacagagattctatattctagagagtcaaatggtcttgctcaattcttgtaattaggttcttgttaatacagtcattccatggaattactttttaaaattcctgtgacaattaataataaataacgtgtcagcatttagtaagcatccactaagtgtacaatacttctacaataacacaagatacctgttcctcaaagacaatgcattctgccataatgttcattaaagagtttacagtaaaaataagattagggataaacttctcaaaaattgtacatctgtgtaactaaagcactaacaaaaacatgaatagtccttctagaggtaacttggatagcctaggcaggcaacttatcatgtggtgaaggccgcctcaggggttgttaaaaatgcacagaaacaattgagtgcgattattggcttctgagcgctgagcagagcaggtggaagaggaactttgagcacaggaggaaatgcaaccagtcagggcccagaatcatgcaaatctcaggggtatgcctctctggggaggagctccacttgcagggactccttttatttccctaagaaagagctgaaatgactgagaactttcctttcctccttagagttacaattttacttctgctattccggagcccatgcctagaagccagaacaactccatgttacactgagttcatgctcctatttactgatcacaaatgagctcattaatgtcatcgaaacatttattgtaacctaacagaccatcacagattggaaacttggtagatagcagagcatggtattagtgaaaaaggttcaaaatacacaagtaacatacactctgaaaaacatgcagataatttgctgatgaagcagaagaggggatgcgcatggcaagaacttgccttaccccagattctctatatctcatggtttccttttcctcttgactgtctttacgagtgttttttatttgggaccctcgagcccagagatattaatggatatctgtattcaatatttgacaaaatctaatggaaaccatccatttactcatgataaggcttcatcactggatttctgtgtcttcactagaacaccattgtcatctcatattgatcaggtattttaatctagcacttacatattgttgataaatgaaagctgaattgttacttaataaattcactttgtttagtaaaaaaaaattgttttctaaatatgacgttcatgaagagaaaataatgagtcagaatcatctgcagaaccactggaatgtttcatcgtcacctgttagttttcataaacagttttctgtcctctctgagatcctcccgctcccaaatactcaacctgattaacttcacataaaagtcttatgtgccaggcttagtaatattcctatagattttgactctgaatccctgaaagaggaagaaatccatgagagaaaattgcattactttatagcaagaggaaaccgttttaagttttttaattgctcagacaccacaacatcctagatggaggaaaccattttagttgaaggagcaaatatgatgtcaaaagcaagtaaataaacaaaccgttgccccaatctgtttttatgtaatgaatttaaaaaaaaagagagagagagagagatgggctctccctgtgttgcccaggctagtctcaaactcctgggctcaagtgatctgcctccctcagcctcccaaagtgctgagattaaagacgtgagccaccacacctggccgaaataataatattcaatattatatattcaatgatattattcagtattcaatattatttcaaataatattaaatctcttgttcctgtatctctacatgagctgcactaataatttgaatctggaaattaaaaagtgaaacatttaccgttctcatatactgatacccaactaccatgaaatgatacctaatttgtttttcttttctcttcatttttactcttaatctagtaggtctcattttgccaagtcactgtctgggaatttaagtggcaaatactttctttgtctcagctaattaaactctaaaattattagcaacagaa

SEQ ID NO: 197663 - DNA, 960 bp, Artificial Sequence
  derived and/or modified sequence
atgctgggcaggtctctgcgggaggtctccgcggctctgaagcaagggcagattacccctacagagctctgtcagaaatgtctcagccttataaaaaagacgaagtttcttaatgcctatatcaccgtatccgaggaagtggccctgaaacaggccgaggaatcagagaagcgctataaaaacggccagtccctcggtgatctggacggcatcccaattgcagtcaaggacaatttttcaacttcgggaattgagacaacctgcgcgtctaacatgctgaagggttacatacctccatacaatgctactgttgtgcagaaattactggatcaaggggccctcctgatggggaagaccaaccttgacgaattcgccatgggcagcggcagcacggatggggtcttcgggcctgttaagaacccatggtcgtactcaaagcagtacagagagaagagaaagcagaacccgcactctgaaaatgaggatagcgattggctgattaccggaggttcttccggaggctctgctgccgctgtgtctgcttttacctgctatgctgccttaggaagcgatactggtggaagcacaagaaatccggctgcacattgcgggttggtcggcttcaaaccaagctacggcctggttagccgtcacggtctgataccgctcgtgaattcaatggacgttccagggattttgacaagatgcgtggacgacgcggccattgtgctaggagccctagcaggtccagacccccgggatagcactactgtgcacgagccgattaacaaaccattcatgttaccgtctttggccgacgtgagcaagctgtgcataggcattccaaaggttactttctcttttcactactttacagagatcctctcgtctcccattgagtcaaccgacttgggcgggggattgggaggatttgaaagtctcctgtgccacttctactag

SEQ ID NO: 197664 - DNA, 1587 bp, Artificial Sequence
  derived and/or modified sequence
atgcttggcagatcgctccgggaagtgtcagcagccctgaaacagggtcaaatcacccctaccgagctttgtcagaagtgcctcagtcttatcaagaagactaagttcctgaatgcatacatcactgttagtgaggaggtagctctgaaacaagcggaggagagtgaaaaacgttacaagaacggtcaatccctgggcgatctagatggcatcccaattgcagtgaaggataatttcagtaccagtggtatcgagaccacttgtgcaagtaacatgttgaagggctacataccaccctacaacgctactgtggttcaaaagcttctcgatcagggagctctcctcatgggaaagacaaacttggacgagttcgcaatgggcagcggcagtacggacggagtcttcgggcctgtgaagaacccctggtcttattctaaacagtaccgggagaagcggaaacagaatccacatagcgaaaacgaagactctgattggctaatcactggaggttccagtggcggctccgcagcagcagtgtccgcattcacttgctacgctgccttagggtctgatacaggagggtccaccaggaatccagccgcgcattgtggcctcgttggcttcaagccaagttacgggcttgtgtcacgtcatggtttgatcccgctcgtcaactccatggacgtgcctggcatcctcacacggtgcgtcgacgacgccgcaatcgttctcggggcactcgccggccccgacccaagggactccactacagtgcacgagcctattaataaaccttttatgctaccttcccttgccgatgttagtaaactatgtatcggcatcccaaaggagtatctggtgcctgagctgtcttcggaagttcagtcactgtggagcaaagccgcggaccttttcgagagcgaaggcgccaaagtgatcgaagtgagcttgcctcacacgtcttactcaatcgtgtgctatcacgtgttatgtactagcgaggtggcgtccaacatggcccgcttcgatgggctccagtacggtcatcgctgcgacattgacgtctccaccgaagctatgtatgcagcgacgcgtagagaagggttcaacgacgtcgttagaggccggatcctctccggaaacttcttcctgctgaaagaaaactacgagaactacttcgtcaaggcacagaaggtgcggagactgatcgccaatgactttgtgaatgccttcaacagcggagtggatgtactgctaactcccaccactctttctgaagctgtgccctatctggaatttattaaggaggacaaccggacgagatcagcacaggacgacatctttactcaggcagtcaatatggcagggctccctgccgtctctatccctgtcgctctcagcaatcagggactccccatcggcctgcagtttatcgggcgcgccttttgtgaccaacagttgctcactgtggcaaaatggtttgagaaacaggtgcagtttcccgtcatccagctccaggagttgatggacgactgtagcgctgtactcgaaaacgagaaactcgcaagcgtcagtttgaagcagtag

SEQ ID NO: 197665 - DNA, 960 bp, Artificial Sequence
  derived and/or modified sequence
atgctgggccgcagcctgcgggaggtgtctgctgccctgaagcagggccagatcacccccacagagctgtgccagaagtgcctgagcctcatcaagaagaccaagttcctgaatgcctacatcaccgtgtctgaggaggtggccctgaagcaggccgaggagagcgagaagcgctacaagaatggccagagcctgggggacctggatggcatccccatcgctgtgaaggacaacttcagcaccagcggcatcgagaccacctgtgccagcaacatgctgaagggctacatccccccctacaatgccaccgtggtgcagaagctgctggaccagggcgccctgctgatgggcaagaccaacctggatgaatttgccatgggcagcggcagcacagatggagtgtttggacctgtgaagaacccctggagctacagcaagcagtaccgggagaagaggaagcagaacccccacagtgaaaatgaagattctgactggctgatcaccggcggcagcagcggcggcagcgctgctgctgtgtctgccttcacctgctacgccgccctgggcagtgacaccggcggcagcaccagaaatcctgctgcccactgcggcctggtgggcttcaagcccagctatggcctggtgagccgccacggcctcatccccctggtgaacagcatggatgtgcccggcatcctgacccgctgtgtggatgatgctgccatcgtgctgggcgccctggccggccctgacccccgggacagcaccaccgtgcatgagcccatcaacaagcccttcatgctgcccagcctggctgatgtgtccaagctgtgcatcggcatccccaaggtgaccttctccttccactacttcacagagatcctgagcagccccatcgagagcacagacctgggcggcggcctgggcggctttgagagcctgctgtgccacttctactag

SEQ ID NO: 197666 - DNA, 1587 bp, Artificial Sequence
  derived and/or modified sequence
atgctgggccgcagcctgcgggaggtgtctgctgccctgaagcagggccagatcacccccacagagctgtgccagaagtgcctgagcctcatcaagaagaccaagttcctgaatgcctacatcaccgtgtctgaggaggtggccctgaagcaggccgaggagagcgagaagcgctacaagaatggccagagcctgggggacctggatggcatccccatcgctgtgaaggacaacttcagcaccagcggcatcgagaccacctgtgccagcaacatgctgaagggctacatccccccctacaatgccaccgtggtgcagaagctgctggaccagggcgccctgctgatgggcaagaccaacctggatgaatttgccatgggcagcggcagcacagatggagtgtttggacctgtgaagaacccctggagctacagcaagcagtaccgggagaagaggaagcagaacccccacagtgaaaatgaagattctgactggctgatcaccggcggcagcagcggcggcagcgctgctgctgtgtctgccttcacctgctacgccgccctgggcagtgacaccggcggcagcaccagaaatcctgctgcccactgcggcctggtgggcttcaagcccagctatggcctggtgagccgccacggcctcatccccctggtgaacagcatggatgtgcccggcatcctgacccgctgtgtggatgatgctgccatcgtgctgggcgccctggccggccctgacccccgggacagcaccaccgtgcatgagcccatcaacaagcccttcatgctgcccagcctggctgatgtgtccaagctgtgcatcggcatccccaaggagtacctggtgcctgagctgagcagcgaggtgcagagcctgtggagcaaggctgctgacctgtttgaaagtgaaggagccaaggtgattgaggtgtccctgccccacaccagctacagcatcgtgtgctaccacgtgctgtgcaccagcgaggtggccagcaacatggccaggtttgatggcctgcagtatggccaccgctgtgacattgatgtgtccacagaggccatgtatgctgccacccggcgggagggcttcaatgatgtggtgcggggccgcatcctgagcggcaacttcttcctgctgaaggaaaattatgagaactactttgtgaaggcccagaaggtgcggcggctgattgccaatgactttgtgaatgccttcaacagcggcgtggatgtgctgctgacccccaccaccctgtctgaggccgtgccctacctggagttcatcaaggaggacaacagaaccaggtctgcccaggatgacatcttcacccaggccgtgaacatggccggcctgcctgctgtgtccatccctgtggccctgagcaaccagggcctgcccatcggcctgcagttcatcggccgggccttctgtgaccagcagctgctgactgtggccaagtggtttgagaagcaggtgcagtttcctgtgatccagctgcaggagctgatggatgactgcagcgctgtgctggagaatgagaagctggcctctgtgtccctgaagcagtag

SEQ ID NO: 197667 - DNA, 960 bp, Artificial Sequence
  derived and/or modified sequence
atgctgggccggagcctgcgggaggtgagcgccgccctgaagcaggggcagatcactccaacagagctgtgccagaaatgtctatccctgattaaaaagactaagttcttaaatgcttatattacagtgagtgaggaagtggctctgaagcaggccgaggagagcgagaaacgctataaaaatggccagagcctgggtgatctggacggcattccaatcgctgtgaaggacaacttctccacctcaggcatcgagaccacctgcgccagtaatatgcttaagggctacattcctccatacaatgccaccgtcgtccaaaagcttcttgaccagggggctctgttgatgggcaagactaacctagacgaatttgcaatgggatccggatccacagacggtgtatttggaccagtgaagaacccttggtcctactctaagcagtacagagagaagcgtaaacagaacccacactccgaaaacgaagacagcgactggcttatcactggcgggtcatccgggggatcggctgccgctgtcagcgcttttacttgttacgctgctctcggtagcgatacaggcggcagcacgcgcaaccctgccgcccactgcggactagtaggtttcaaaccgagctatgggctcgtatccagacatggcctaatcccacttgtgaactctatggatgtgccaggcatactcacccggtgtgtggacgacgctgctatcgttttgggcgccctggctgggcccgacccgagggattcaacgaccgtgcatgagcccattaataaaccctttatgctgcccagtctcgctgacgtctccaaactgtgcattggcatccctaaggtcaccttctctttccactactttactgagattctatctagccctattgaaagcaccgatttgggaggaggcctgggaggcttcgaaagcctgttgtgtcatttttattag

SEQ ID NO: 197668 - DNA, 1587 bp, Artificial Sequence
  derived and/or modified sequence
atgctgggccggagcctgcgggaggtgagcgccgccctgaagcaggggcagattaccccaacagagttatgtcaaaagtgcctgagcctgattaaaaagacaaaattcttgaatgcatacattacggtgagtgaggaggtggccctgaaacaggccgaagagtccgagaaacgttataagaacggacagtcactgggggacctggatggcattcccatagcagtcaaagataatttcagcacctctggtatcgagactacttgtgctagcaacatgctcaaggggtatatccctccttacaacgccactgtggtgcagaaactcctggatcagggagccctcctgatggggaagaccaatctagacgaattcgcaatgggatctggaagtactgatggggtctttggcccagtgaaaaatccctggagttattctaagcagtacagggagaaacgaaagcaaaacccacatagtgagaacgaagacagcgattggctaattacaggcggaagttccggtggttctgcagcagctgtctcagcttttacatgctatgccgctctggggagcgacaccgggggctcgaccaggaacccggctgctcactgcggcctagtgggattcaaaccctcctatggattggtgtcccggcacggtctcatccctctcgtgaattcaatggacgtgcccggaattctcacgcgctgcgtcgacgatgccgccatcgtactgggtgccctggctgggcctgacccccgtgacagcaccacggttcacgagccaattaataaaccctttatgctccccagtctagcagacgtcagtaaactgtgcattggaatccccaaagagtacctcgttcccgaactgagctcggaagttcagagcctctggtctaaagctgccgatcttttcgagagcgagggagctaaggtcattgaggtgtcactgcctcacacttcctactcaatcgtttgttaccatgtgctctgcacaagcgaggtagcctctaacatggcacgctttgacggcctccaatacgggcacagatgtgatattgatgtgagcaccgaggctatgtacgcggccaccagacgggaagggttcaacgacgtcgtgagagggcgtatccttagtggaaatttctttttgttgaaggaaaactacgaaaactacttcgtaaaggcccaaaaggtcaggcggctgatcgcgaatgacttcgtgaatgcctttaattccggcgttgatgtgctgctgacgccaaccacactgtctgaagctgtgccgtatctcgagttcataaaggaagacaaccgaaccagatcagcccaggacgacatttttactcaggccgtgaacatggccggtctacccgctgtgtctattcctgtggccctgagtaatcaagggctcccgatagggctccaattcatcggacgagccttttgtgatcaacagctgctgacggtagccaagtggttcgaaaaacaggtacagttcccagtgattcagcttcaggagctgatggacgactgttcggccgtactagagaatgaaaagctggcttccgtctccctgaagcaatag

SEQ ID NO: 197669 - DNA, 960 bp, Artificial Sequence
  derived and/or modified sequence
atgcttggacgctctctacgggaggtgagcgcagctctgaagcagggtcagattaccccgactgaactgtgccaaaagtgtctttctctgatcaagaaaaccaagttcctcaacgcctacattaccgtcagtgaagaggtggctctaaagcaagccgaagaaagtgagaaacgctacaaaaacggtcagtctctgggtgacttagacggcatcccaatagccgtgaaagataacttcagcaccagtggcatcgaaaccacgtgcgcctcaaacatgctcaagggttacattccaccctataatgctacagttgttcaaaagctgctggaccagggtgcgttgctgatggggaagacaaatctggacgaattcgcaatgggctccggctccaccgatggcgtctttgggcctgttaaaaacccttggtcctatagtaagcagtatagagaaaagcggaaacagaaccctcacagcgagaatgaagatagcgattggttaattaccggaggaagttccggtggatcagccgcagccgtgtccgcttttacctgctacgctgcattgggcagcgatacaggcggtagcacccgcaaccccgcagcgcactgtggactggtaggttttaaacccagctacggactcgtgagcagacacggcctgatccccctggtcaacagtatggatgtaccgggtattcttactagatgcgtggatgacgcagccattgtgctgggcgcactggcgggacctgatcctcgcgactcaaccacagtgcatgagccaataaataagccattcatgcttcctagtctggccgatgtgagtaaactgtgcatcggaataccaaaagtgacattttcattccattattttactgagattctgtctagccctatcgaaagcacagatctcgggggagggctggggggttttgagagcctgctgtgccacttttactag

SEQ ID NO: 197670 - DNA, 1587 bp, Artificial Sequence
  derived and/or modified sequence
atgctcggcaggtctctacgagaggtttccgcagcccttaagcagggccaaattacacctaccgagctttgccagaaatgtttgtccttgattaagaaaaccaagtttctgaatgcctatattaccgtgagcgaagaagtggcactgaagcaagcagaagagtccgaaaaacggtataaaaatggccaatctctgggggacctggatgggatacccattgccgtgaaagacaatttttccacaagcgggatcgagacgacatgcgccagcaacatgctcaagggctatattccaccttacaacgccaccgtagtccaaaagctactggatcaaggcgctcttctcatgggtaagacaaatttggacgagttcgccatgggcagcgggagcactgacggtgtctttggcccagtgaaaaacccatggtcctacagcaagcagtatcgcgagaaaaggaagcaaaacccccattccgagaacgaggatagtgactggctgatcaccgggggttcttccggagggagcgccgctgctgtgtcagccttcacctgttacgcggcactgggctcagatacgggcggatcgacaaggaacccagccgcacattgcggcttggtcggttttaagccatcctatgggctcgtctcacgtcatggcttgatacctcttgtgaacagcatggatgttcctggcatcttaacgagatgtgtggacgacgctgcgattgtcctcggcgcattggccggtccggacccgagggattctacaaccgtccacgagcctataaataaacccttcatgctgcctagtttagccgatgtctccaaactgtgtataggaattccaaaagaatatctggtgcccgagctgtctagtgaggtgcagtcactatggtcgaaggccgctgatttgtttgaaagtgagggagccaaggtgatcgaagtgtccctgccacatacgtcatattccattgtctgctatcatgtgctttgcaccagcgaggttgccagcaacatggcccgtttcgacgggctgcagtacggccacaggtgtgatattgacgtatctactgaggccatgtatgccgctacaaggagagaaggctttaatgatgtggtgcgcggaaggattctctctgggaatttttttctgttaaaggagaattatgagaattattttgtaaaggctcaaaaggtgcggagactgatcgccaacgatttcgtgaatgcttttaatagcggagtggacgtgttgcttacccccacaacattgagtgaggctgtgccttacctcgaattcatcaaagaggataataggacaaggagtgcccaggatgacattttcacccaggccgtgaatatggctggcttacctgccgtgtcgattcccgtggctctcagcaatcaggggctcccgattggactgcagtttatcggacgcgctttctgtgaccagcagctgctgacggttgccaagtggtttgaaaaacaggttcagttcccggtgattcaactgcaagaattgatggacgactgctccgctgtattggagaacgagaagttagcatccgtgtctctgaagcagtag

SEQ ID NO: 197671 - protein, 581 aa, Artificial Sequence
  derived and/or modified sequence
MLCNKEFLGGHIVRHAQAHQKKGSFACVICGRKFRNRGLMQKHLKNHVKKIQRQQIAAAQQDDQEVTALEEINCSSSSISFENGNSDSKDLEVETLTASSEGNKEVIPEHVAEFIEIPISVPEDVIENVIENGSPNNSLNNVFKPLTECGDDYEEEEDEEGDYEEDDYDLNQETSVIHKINGTVCHPKDIYATDQEGNFKCPALGCVRIFKRIGFLNKHAMTVHPTDLNVRQTVMKWSKGKCKFCQRQFEDSQHFIDHLNRHSYPNVYFCLHFNCNESFKLPFQLAQHTKSHRIFQAQCSFPECHELFEDLPLLYEHEAQHYLSKTPESSAQPSETILWDVQTDSNPNQEKDSSSNEKQTISLPVSTSKSRKESTEPKTCIESMEKKTDSLVQNGNERSDDTVSNISLIDQKMPDIEPNSENNCSSSDIVNGHSEIEQTPLVSSDPALKIDTNRIRTENGSILPSVVPQEHNTLPVSQAPSKPNLTSEHTSYGLILTKPYVRPLPPSYLDERYLSMPKRRKFLTDRVDACSDQDNVYKKSVKRLRCGKCLTTYCNAEALEAHLAQKKCQTLFGFDSDDESA

SEQ ID NO: 197672 - DNA, 1746 bp, Artificial Sequence
  derived and/or modified sequence
atgctgtgcaacaaggagttcctgggcggccacatcgtgagacacgcccaggcccaccagaagaagggcagcttcgcctgcgtgatctgcggcagaaagttcagaaacagaggcctgatgcagaagcacctgaagaaccacgtgaagaagatccagagacagcagatcgccgccgcccagcaggacgaccaggaggtgaccgccctggaggagatcaactgcagcagcagcagcatcagcttcgagaacggcaacagcgacagcaaggacctggaggtggagaccctgaccgccagcagcgagggcaacaaggaggtgatccccgagcacgtggccgagttcatcgagatccccatcagcgtgcccgaggacgtgatcgagaacgtgatcgagaacggcagccccaacaacagcctgaacaacgtgttcaagcccctgaccgagtgcggcgacgactacgaggaggaggaggacgaggagggcgactacgaggaggacgactacgacctgaaccaggagaccagcgtgatccacaagatcaacggcaccgtgtgccaccccaaggacatctacgccaccgaccaggagggcaacttcaagtgccccgccctgggctgcgtgagaatcttcaagagaatcggcttcctgaacaagcacgccatgaccgtgcaccccaccgacctgaacgtgagacagaccgtgatgaagtggagcaagggcaagtgcaagttctgccagagacagttcgaggacagccagcacttcatcgaccacctgaacagacacagctaccccaacgtgtacttctgcctgcacttcaactgcaacgagagcttcaagctgcccttccagctggcccagcacaccaagagccacagaatcttccaggcccagtgcagcttccccgagtgccacgagctgttcgaggacctgcccctgctgtacgagcacgaggcccagcactacctgagcaagacccccgagagcagcgcccagcccagcgagaccatcctgtgggacgtgcagaccgacagcaaccccaaccaggagaaggacagcagcagcaacgagaagcagaccatcagcctgcccgtgagcaccagcaagagcagaaaggagagcaccgagcccaagacctgcatcgagagcatggagaagaagaccgacagcctggtgcagaacggcaacgagagaagcgacgacaccgtgagcaacatcagcctgatcgaccagaagatgcccgacatcgagcccaacagcgagaacaactgcagcagcagcgacatcgtgaacggccacagcgagatcgagcagacccccctggtgagcagcgaccccgccctgaagatcgacaccaacagaatcagaaccgagaacggcagcatcctgcccagcgtggtgccccaggagcacaacaccctgcccgtgagccaggcccccagcaagcccaacctgaccagcgagcacaccagctacggcctgatcctgaccaagccctacgtgagacccctgccccccagctacctggacgagagatacctgagcatgcccaagagaagaaagttcctgaccgacagagtggacgcctgcagcgaccaggacaacgtgtacaagaagagcgtgaagagactgagatgcggcaagtgcctgaccacctactgcaacgccgaggccctggaggcccacctggcccagaagaagtgccagaccctgttcggcttcgacagcgacgacgagagcgcctag

SEQ ID NO: 197673 - DNA, 1746 bp, Artificial Sequence
  derived and/or modified sequence
atgctgtgcaataaggagttccttggtgggcacatagtgagacacgcacaggcacatcagaaaaaagggtctttcgcctgcgtaatctgcggtcgaaaatttcggaaccggggtctaatgcaaaagcaccttaagaaccacgtaaagaagatccaaagacaacagattgccgccgcacagcaggatgatcaggaagtcacggctctggaggagattaactgctcgtcgagttctatttccttcgaaaacggcaatagcgattcaaaagatctagaggtggaaacactcactgctagcagtgaggggaacaaagaagtgataccagaacatgtggccgagttcattgaaattcctatctccgtgcccgaagatgtcattgagaatgtgattgagaacggctctccaaataatagtttgaacaatgtattcaagcctctcaccgaatgcggcgacgactatgaggaggaagaggatgaagaaggagactacgaagaggacgattatgacctaaaccaggaaacaagcgtcatccataagatcaatggtactgtctgtcaccccaaagatatttacgcaaccgaccaggagggaaactttaaatgtcccgccttgggttgtgttcgaatatttaagcgtattggatttctaaataagcatgcaatgacagtacatcctaccgatctgaatgttcgtcaaactgttatgaaatggtccaagggaaagtgtaaattttgtcagcggcagtttgaggattcgcagcacttcatcgaccaccttaacaggcatagctaccctaacgtttatttttgcttgcattttaactgcaacgaatccttcaaactccctttccagctggcgcaacacacaaaatcccatagaatttttcaggcacagtgttcattccctgaatgccacgagctgttcgaggatcttcctctgctctacgaacatgaggcacagcactacctctctaaaactcctgaatcctcagcacagcccagcgagactatactatgggatgtgcaaaccgatagcaaccccaaccaggaaaaggatagttccagcaacgagaagcaaacaatttcactgcctgtgtcgacgtcaaaatcccggaaggaatcaacggagcccaagacatgtatcgaatcaatggagaagaagaccgattcactggtgcaaaatggaaatgaacgatccgacgataccgtttcaaacatttcgttaatcgatcaaaaaatgcccgacatagaacccaactctgagaacaactgttccagctcagatattgtgaatggacatagcgaaattgaacagacccctttggtcagtagcgatccagctcttaagatagatacgaatagaatccgaaccgagaacggttcgatattgccgagtgtggtgccacaggagcataatacgctgcctgtttcacaggcaccgagcaagcccaatctgacaagcgaacatacttcttatggcctgattctgaccaaaccatacgttaggcctttgccgcctagttatctcgacgaacggtatctgagcatgcctaagcgcaggaagtttctgacagatagagtcgatgcgtgctctgaccaagacaacgtctacaagaaatcagtgaaacgcctgcggtgcggcaaatgtctgactacttactgtaacgctgaggctctggaggcccacttggcacagaagaagtgccagacgctatttggcttcgattctgatgacgagtccgcctag

SEQ ID NO: 197674 - DNA, 1746 bp, Artificial Sequence
  derived and/or modified sequence
atgctgtgcaacaaggagttcctgggcggccacatcgtgagacatgcccaggcccaccagaagaagggcagctttgcctgtgtgatctgtggcaggaagttcaggaacagaggcctgatgcagaagcacctgaagaaccacgtgaagaagatccagaggcagcagattgctgctgcccagcaggatgaccaggaggtgacagccctggaggagatcaactgcagcagcagcagcatcagctttgaaaatggaaacagcgacagcaaggacctggaggtggagaccctgacagccagcagcgagggcaacaaggaggtgattcctgagcacgtggccgagttcatcgagatccccatctctgtgcctgaagatgtgattgaaaatgtgattgaaaatggcagccccaacaacagcctgaacaacgtgttcaagcccctgacagaatgtggagatgattatgaggaggaggaggatgaggagggggactatgaagaagatgattatgacctgaaccaggagaccagcgtcatccacaagatcaatggaacagtgtgccaccccaaggacatctatgccacagaccaggagggcaacttcaagtgcccagccctgggctgtgtgcgcatcttcaagagaattggcttcctgaacaagcacgccatgacagtgcaccccacagacctgaatgtgcggcagacagtgatgaagtggagcaagggcaagtgcaagttctgccagaggcagtttgaggacagccagcacttcatcgaccacctgaacagacacagctaccccaacgtgtacttctgcctgcacttcaactgcaatgaaagcttcaagctgcccttccagctggcccagcacaccaagagccaccgcatcttccaggcccagtgcagcttcccagaatgtcatgagctgtttgaggacctgcccctgctgtatgaacatgaggcccagcactacctgagcaagaccccagagagcagcgcccagcccagcgagaccatcctgtgggatgtgcagacagacagcaaccccaaccaggagaaggacagcagcagcaatgagaagcagaccatcagcctgcctgtgtccaccagcaagagcaggaaggagagcacagagcccaagacctgcattgaatccatggagaagaagacagacagcctggtgcagaatggaaatgaaagaagtgatgacacagtgagcaacatcagcctgattgaccagaagatgccagacatcgagcccaacagcgagaacaactgcagcagcagtgacatcgtgaatggccacagcgagattgagcagacccccctggtgtccagtgaccctgccctgaagattgacaccaaccgcatcagaacagaaaatggcagcatcctgcccagcgtggtgccccaggagcacaacaccctgcctgtgtcccaggcccccagcaagcccaacctgaccagcgagcacaccagctatggcctcatcctgaccaagccctacgtgcggcccctgcccccatcctacctggatgagcgctacctgtccatgcccaagaggaggaagttcctgacagacagagtggatgcctgcagcgaccaggacaacgtgtacaagaagtctgtgaagaggctgcgctgtgggaagtgcctgaccacctactgcaatgctgaggccctggaggcccacctggcccagaagaagtgccagaccctgtttggatttgacagtgatgatgagagcgcctag

SEQ ID NO: 197675 - DNA, 1746 bp, Artificial Sequence
  derived and/or modified sequence
atgctgtgcaacaaggagttcctgggcggccacatcgtgcggcacgcccaggcccaccagaagaaaggctccttcgcctgcgttatatgcggcaggaagtttagaaatcggggcttgatgcagaaacacctaaaaaaccatgttaagaaaatacagagacagcagattgctgcagcccagcaggatgatcaggaggtgactgcgctagaagagatcaattgcagttcctcttccatttcctttgagaatggcaacagcgactcaaaggatttggaagtcgagacactcaccgcttcctccgaggggaacaaggaggttatcccagagcacgtggctgagtttattgaaattccgatttcagtgcctgaagacgttatagagaacgtaattgaaaacggctcaccgaacaatagcctaaacaacgtcttcaaaccactgacagagtgcggagatgattatgaagaggaagaagatgaagaaggcgactacgaggaagatgactacgacctaaaccaagaaacttccgtgatccacaagattaacgggaccgtatgtcacccaaaagacatttacgctaccgaccaggagggcaattttaagtgccccgcgttgggctgcgtgcggatctttaaaagaattggctttctgaacaaacatgccatgaccgttcacccaacagacctcaatgtgagacagaccgttatgaaatggtcaaagggcaaatgcaaattttgtcagcgccagttcgaggactcccaacattttattgatcacctgaataggcactcctatcccaatgtatatttctgcctgcatttcaactgtaacgaatccttcaagctaccatttcagcttgctcagcacactaaaagccatcggatatttcaggcccagtgcagctttcctgagtgccacgaattatttgaggatctccctcttctgtatgaacacgaggcccagcattacctatccaaaactccagagtcaagtgctcagcccagcgaaacgattttgtgggatgtgcagaccgacagcaacccaaaccaggaaaaagattcttcaagtaatgagaagcagaccatctcactgcctgtctccacttctaaatctaggaaagaaagcactgaaccaaagacttgcatcgagtcaatggaaaagaagactgattccctggtgcaaaatggcaatgagcgatccgatgataccgtgagcaatataagcctgattgaccagaagatgcctgacatcgaacctaattccgagaacaactgttcttcatcagacatcgtgaacggccatagcgagattgagcagactcctctggtgagttcggatccagccctgaaaattgacactaaccgaataaggactgagaacgggtccattctaccctcagttgtgccccaagaacataatactctcccagtatcccaggctcctagcaaacctaaccttacttcagagcacacaagttacggactgattttgactaaaccgtacgtccggccccttccaccgagctatctggacgaaagatacttgagtatgcccaaacgcagaaaattcctaactgaccgcgttgatgcctgtagtgatcaggacaatgtgtacaagaaatccgtgaagcggcttcgctgcggaaagtgtctcacgacttattgcaacgctgaggcactggaggcccatctcgcccagaagaaatgtcagaccctgtttgggtttgatagcgacgacgagtccgcttag

SEQ ID NO: 197676 - DNA, 1746 bp, Artificial Sequence
  derived and/or modified sequence
atgctatgtaacaaagagttcttgggagggcatattgtgcggcatgctcaagcccaccaaaaaaaaggaagcttcgcttgcgtgatttgcggcagaaagtttcgcaacaggggcctcatgcagaagcaccttaaaaatcacgttaaaaagatccagagacagcagattgctgcagcacagcaggatgatcaggaagttaccgctctggaagagatcaactgttcatctagctcaattagttttgagaatggtaattccgactcaaaggacctggaagttgaaacccttacagcttccagcgaagggaacaaagaggtgattcctgagcacgtggccgagtttattgagatcccaatcagtgttccggaggatgtaatagagaacgttatagaaaatggcagtccgaataatagtctgaacaacgtattcaaacccctgacagaatgcggggatgattatgaagaagaggaggatgaagagggggattatgaggaggatgactatgatctgaatcaggaaactagcgtgatccataagatcaacggcacagtgtgtcacccaaaggatatatacgccacagatcaggaggggaatttcaaatgccctgccttgggttgtgtcagaatattcaagcgtatcggattcctgaacaagcacgcaatgaccgtgcatcccacggacctcaacgtgcgccagacggtcatgaagtggtctaaaggcaaatgcaagttttgtcagcgccagttcgaggatagccaacacttcattgaccacctgaaccgccattcttatccaaatgtttatttttgcctgcactttaattgcaacgaatctttcaagctgccttttcagctagctcagcacaccaagtcccaccgcatattccaggcccagtgctccttcccggagtgtcacgagctctttgaggatctccctctcctgtacgaacatgaagctcagcattaccttagcaagactccagagagttctgcacaaccaagcgaaaccattctttgggatgtgcagactgactctaacccgaaccaggagaaggactcaagcagtaatgagaaacagaccatttcattaccagtctctacctccaaatccagaaaagagagcactgaaccaaaaacatgcatagaaagcatggaaaaaaagaccgactcccttgtacagaatggtaatgaaagatcagacgatacggtttctaacattagcctcatcgaccagaaaatgccagatatcgagcctaattctgaaaacaactgcagcagctccgatatcgtgaacggtcactcggagatcgaacagacgccactggtgagctctgaccctgcattgaaaatcgacactaatcggattagaaccgagaacggaagcatcctgccctccgtcgtgccgcaagaacacaacacgttaccggtctcccaggcaccttccaaacctaacctgacctcagaacatacaagttacggactgatattgaccaaaccgtacgtgagacccttacccccttcatatttggatgagagatatcttagcatgccaaagcggagaaagtttcttacggatcgcgtagatgcttgctccgatcaagacaacgtgtacaaaaaaagtgtcaagagactgcgttgtggcaaatgcttgactacgtattgcaacgctgaggctctggaggcccatctggcccagaaaaaatgccagacactgttcggctttgacagcgatgacgaatccgcgtag

SEQ ID NO: 197677 - DNA, 4966 bp, Artificial Sequence
  derived and/or modified sequence
ctggaaaataatgcaggtaatctaaaaaggacggaggaacagcaaggtttggatgaagggtttgactctcttacagatcagagcactggagagactgatcctgatgatgtatctggagtgcagcctaaaggtcatattaatacgaagaaaaatcttacagctctcagtacttccaaagtagatcacaatgtcccaaggcatcgttgtatgttatgtaacaaggaatttttaggtggtcacattgtaaggcatgcccaggctcatcagaaaaaaggcagttttgcatgtgtaatatgtggtaggaaatttagaaacagaggacttatgcagaagcatttgaagaatcatgttaagaagatacagaggcagcaaattgctgcagctcaacaggatgatcaggaagtcactgctttggaagaaataaattgttctagttcttccatttcatttgaaaatgggaattctgatagtaaggatttggaagtggagacacttactgcttctagtgaaggaaacaaagaagtcatccctgagcatgtggctgaattcattgaaattcccataagtgtaccagaagatgttattgaaaatgttattgaaaatggcagtcctaataattctttaaataatgttttcaagcctttaactgaatgtggggatgattatgaggaggaagaggatgaagaaggtgattatgaagaagatgattatgacctgaatcaagaaacttcagtaattcataaaatcaatggaactgtgtgccatccaaaagacatatatgccacagatcaagaaggaaactttaagtgtcctgctcttggttgtgtccggatatttaaaagaattgggtttctaaataaacatgcaatgaccgtacatccaaccgatttaaatgtgcgacaaacagtaatgaagtggagcaaaggaaaatgcaaattttgtcaaaggcaatttgaagattctcaacattttatagaccaccttaatagacatagctatccaaatgtgtatttttgtttgcattttaattgcaacgagtcgtttaagctgccgttccagcttgcccagcacacaaaaagtcacaggatatttcaggctcagtgtagttttccagaatgccatgagctttttgaagatcttcctctgctgtatgaacatgaagctcaacactatttaagtaaaacaccagagtcatctgcacaaccaagtgaaacaattctttgggatgttcagacagactcaaatcctaatcaggaaaaagactcatctagtaatgagaaacaaactattagtctgccagtttctactagcaaatcaaggaaagagtctacagaaccaaagacatgtatagaaagtatggaaaagaaaacagacagtttagttcagaatggaaacgaacgttctgatgacactgtttcaaatataagcttgatagaccaaaagatgcctgacatagagccaaattctgaaaataattgtagtagtagtgatatagtcaatggacacagtgaaatagagcaaacacctttagtttcatcagatcctgctttgaaaattgatacaaacagaatcaggacagaaaatggttccattttgcccagtgttgtaccacaagaacacaacaccttgccagtatctcaggcaccttccaaaccaaatctgacaagtgaacatacttcatatggcttaattttaacaaaaccatacgtcagaccattgcctcccagttaccttgatgaacggtatcttagtatgccaaaacgcagaaaatttctgactgatagagtagatgcctgttctgatcaagataacgtgtataaaaaatcagtgaaaagattaagatgtggcaaatgcctgaccacctactgtaatgcagaagcacttgaggctcatcttgcacaaaagaaatgtcagacactctttggatttgattcagatgatgaaagtgcctgatgaaaacggttcagaaagatctgtcaatcaagcagtagtgtgaaaaaagcactataagaaaatgcatcatcagtttgctatttccctgatggccttaattttagagtggtcttggattactaaagataaagacaaagcacattttctagaatgaactcacagagatgtgctggcttagactccaaaaggattataaaactcccaaagtaccagttttccagaaaaccacattttacagtttatgatgattaatagcagcagcatgttcagtttcgcttatatgagaaacatgtttaggcaactagtcagaaaaccagctatggccttacagaaagggaaaaattaacccattattaaaaagtgtgtgtggggaggggggctggtttacaatattaaaccatttaaagtattttattctacaaatggggtttgttttcttgtcatgcataatcagattatgtcccctcccttctggttaaacatggtttaaggaaccgctgctgtttggtttgtgattgatttagaaacttatacattaacttaccacagtgctatcaattaaagattgtaacaggtttccagatgattaattaggtcaaagttcaatgaatggcacgccagcattgaaaattaaaaaacaaaacaaaaaaaaccacagtgctttgctaataagctcttgatagaacctcccactaaccacttttgtggtacaaattagttaacatttaaagggcagcagtgtcaataaaatagaaaaaaaccgatcagtactctggggagagatgaaaggaatctaagactttacaggctttgtagttgaaggaaaacactgaattgcaaattattcaatgtgaataatggtaaaagcacactgggatacttctgtttgtgtatatgttgggacattgcttgatgattcatagtaaggtcctttagacattaatgtgagttatctaagtacagtcctattaaaataactggctcaaaaaatcagctaagaatcaggttgagaaatcattcattttattctattaggagaggtaattccaaaataagccatactattcctgtttttttaattcattagtgatgactctggtctgaacagtaatttttatatgtaaaaggaagtatttacacaaaacatttgcacaagaacacagtaagagatacattcaagcattgttttccttagtgatgttattttcctaagaagattttaacttaataaagtgttaaaacaataaatatttttaaaaataccctctcagatgttttccatttgtccattattgaaaggaagatgcttaaagacttccttttactaatagtgtgtaaatctaaaacagggattaaaataacaaaaaggcagtgtttcaaaacagatctcctaatgtcccaatgtcaaatattccagttattctaaataataaaatctttgttcaaggcagataatctcatcagaccctattagagcttcttgaatgaggctattacggaagtggggaatttcttccaggtagcatccatattttattaaattaggatttccagatcatgatagatcagatgatttttttttaatttcccggttttattggtttatcatcagcattcactactatgcaatgatggtcataagtccattccaaatttaaatttgtttctgttatgtagcctatattaggctgtggaatttacatttaggtaactaaacacagctcataattaaaatcttttctttaaggtcagctaaaaaaaatgtttcctgtatttcttgatactaaaaatgtaatgatttttattttagttcattctaaaagtatgtcttgtaataaaaagtctgtttggaaactggttcatttggacagtgaagtcttttgaaatatttctgctttgtacattttccagaagtttaatattttatcacattttccacaagttgtaacaattgatataaatccatgcccacaaagtattccattttcattacttttactgttcatgccaagatgtttcaaatatattccatttgtaatctgtctttaacttgaggtttatttctacttttgtgttgctaaaattatttctgcaagactgagatcaaactggtttatatataactaaatcaaggaatgttttataaaattctatttgaccacactgtcttaacctcggtttatatacttctcaaatagctattgaaagaatgtgttcattttattacatctgtcttttaaaacataaacctacatcattttgcttttatagggtgcataaacttccaacagttctaatttgagcgcttcagaagaaaaggaagcttgcttcttattcctcagattcttctttttttctgttttgaggatgtattcatcctacatggaccaagtttcaaatctttgtttttaaataaaaatttccttcaaaaaattaaatgttaaatttctgctgtgtgtcagtaaggtgaagaaaatagcaaatctgaatttttgctgctcagatattatggaggaggtaaaaaggggaatctccgtggacaaggacactggtactttgggctttagccatattcatttttttgaaaccaccaattatataatacttaaataatttatatcattgaacttgtgattcttttcaaatcacactgaaggttcagccgtactcctttcatgtttggtttaatactgttgtatggatgaaaaacctaaaagggatgatagtgtttattttttaatttatttggtactgtaaaacaccttttcagaatgagtaaatgctgcatatgcattttggagttgttaatatgtgaaagatattacagattcagcaagaaaggaaatttgtgcttccttgttgaatgttaaattattttactttgcattttataagagtacaaattaaaactgagccattgaactgcaataaatcaacaatagtgtctcatttcaagaaattttttgtactgtacatagatttgttcaataaaacgtccttgttggtaatcaag

SEQ ID NO: 197678 - protein, 538 aa, Artificial Sequence
  derived and/or modified sequence
MAQKPLRLLACGDVEGKFDILFNRVQAIQKKSGNFDLLLCVGNFFGSTQDAEWEEYKTGIKKAPIQTYVLGANNQETVKYFQDADGCELAENITYLGRKGIFTGSSGLQIVYLSGTESLNEPVPGYSFSPKDVSSLRMMLCTTSQFKGVDILLTSPWPKCVGNFGNSSGEVDTKKCGSALVSSLATGLKPRYHFAALEKTYYERLPYRNHIILQENAQHATRFIALANVGNPEKKKYLYAFSIVPMKLMDAAELVKQPPDVTENPYRKSGQEASIGKQILAPVEESACQFFFDLNEKQGRKRSSTGRDSKSSPHPKQPRKPPQPPGPCWFCLASPEVEKHLVVNIGTHCYLALAKGGLSDDHVLILPIGHYQSVVELSAEVVEEVEKYKATLRRFFKSRGKWCVVFERNYKSHHLQLQVIPVPISCSTTDDIKDAFITQAQEQQIELLEIPEHSDIKQIAQPGAAYFYVELDTGEKLFHRIKKNFPLQFGREVLASEAILNVPDKSDWRQCQISKEDEETLARRFRKDFEPYDFTLDD

SEQ ID NO: 197679 - DNA, 1617 bp, Artificial Sequence
  derived and/or modified sequence
atggcccagaagcccctgagactgctggcctgcggcgacgtggagggcaagttcgacatcctgttcaacagagtgcaggccatccagaagaagagcggcaacttcgacctgctgctgtgcgtgggcaacttcttcggcagcacccaggacgccgagtgggaggagtacaagaccggcatcaagaaggcccccatccagacctacgtgctgggcgccaacaaccaggagaccgtgaagtacttccaggacgccgacggctgcgagctggccgagaacatcacctacctgggcagaaagggcatcttcaccggcagcagcggcctgcagatcgtgtacctgagcggcaccgagagcctgaacgagcccgtgcccggctacagcttcagccccaaggacgtgagcagcctgagaatgatgctgtgcaccaccagccagttcaagggcgtggacatcctgctgaccagcccctggcccaagtgcgtgggcaacttcggcaacagcagcggcgaggtggacaccaagaagtgcggcagcgccctggtgagcagcctggccaccggcctgaagcccagataccacttcgccgccctggagaagacctactacgagagactgccctacagaaaccacatcatcctgcaggagaacgcccagcacgccaccagattcatcgccctggccaacgtgggcaaccccgagaagaagaagtacctgtacgccttcagcatcgtgcccatgaagctgatggacgccgccgagctggtgaagcagccccccgacgtgaccgagaacccctacagaaagagcggccaggaggccagcatcggcaagcagatcctggcccccgtggaggagagcgcctgccagttcttcttcgacctgaacgagaagcagggcagaaagagaagcagcaccggcagagacagcaagagcagcccccaccccaagcagcccagaaagcccccccagccccccggcccctgctggttctgcctggccagccccgaggtggagaagcacctggtggtgaacatcggcacccactgctacctggccctggccaagggcggcctgagcgacgaccacgtgctgatcctgcccatcggccactaccagagcgtggtggagctgagcgccgaggtggtggaggaggtggagaagtacaaggccaccctgagaagattcttcaagagcagaggcaagtggtgcgtggtgttcgagagaaactacaagagccaccacctgcagctgcaggtgatccccgtgcccatcagctgcagcaccaccgacgacatcaaggacgccttcatcacccaggcccaggagcagcagatcgagctgctggagatccccgagcacagcgacatcaagcagatcgcccagcccggcgccgcctacttctacgtggagctggacaccggcgagaagctgttccacagaatcaagaagaacttccccctgcagttcggcagagaggtgctggccagcgaggccatcctgaacgtgcccgacaagagcgactggagacagtgccagatcagcaaggaggacgaggagaccctggccagaagattcagaaaggacttcgagccctacgacttcaccctggacgactag

SEQ ID NO: 197680 - DNA, 2633 bp, Artificial Sequence
  derived and/or modified sequence
gattgttgcgcggtcgcatttttccggggagcgcggattcgcattcccaattttaggtggcagtcgcaacccatactattcggacagatggcacagaaaccgctgcgcctcttggcttgtggagatgttgaaggaaagtttgatattttattcaatagagttcaagcaattcagaagaaaagtggaaactttgatctgctgttgtgtgtaggaaatttctttggctccacccaagatgctgaatgggaggagtataagactggcatcaagaaagctcctattcagacatatgtgcttggtgctaataaccaggaaacagtaaaatatttccaggatgctgatggatgtgaattagctgaaaacattacttatctgggtcgtaaaggtatcttcactggaagctcggggctgcagattgtgtacctcagtgggacagaatccttaaatgagccagtaccaggttatagttttagtcccaaggatgtgtcttctctgagaatgatgctgtgtacaacctcccagtttaagggtgttgatatcttgctcacatccccatggcccaagtgtgtggggaactttgggaattcttctggagaagtggataccaaaaaatgtggttctgctttggtttccagtcttgccacgggcttgaaaccaagataccattttgctgctttggaaaagacctattatgagaggcttccatatcgaaaccatatcattctacaggaaaatgcacagcatgccacccggtttatagctctggcaaatgttggaaatccagaaaagaaaaagtatctttacgcgttcagtattgttcccatgaagctaatggatgcagcagaactggtaaaacagcctccggatgtcactgaaaacccttacagaaaatctgggcaggaagcatccataggaaagcaaattcttgcccctgtggaagaatcagcctgtcagtttttctttgatttaaatgaaaagcagggaaggaagcgttcatccacaggtagagatagcaaatcttctcctcatccaaagcagcctcgcaaacctcctcagcctccaggaccctgctggttttgccttgctagccctgaagtggaaaaacatttggtggtcaacatcggcacacattgctaccttgccctggccaaaggaggcttatctgatgaccatgtcctcatcctgcctattggacactaccagtcagtggtggagctttcagcagaggtggtagaagaggtggagaagtataaggccactctgagacggttctttaagagtcgagggaaatggtgtgttgtatttgagagaaattataagagccatcacctccagctacaggtcattcctgtcccaatcagctgctctactactgatgacattaaagatgccttcattacccaggcacaggagcagcagatagagctgttggaaatcccagagcactctgacatcaagcagattgcacagccaggagcagcatatttttatgttgaacttgacacaggagaaaagcttttccacagaattaaaaagaattttcctttgcagtttggaagggaggtcctggccagtgaagccatccttaatgttcctgataagtctgactggaggcagtgtcagatcagcaaggaagacgaggagaccctggctcgccgcttccggaaagactttgagccctatgactttactctggatgactaaaacaaagggaagaactttttatgaactccacaggaagtagtaaagcttttttttttttttaattaaaagaattttttttgagacaaagtctcgctctgtcacccaagcaggattgcagtggcataactgtggctcactgtagcctcaacctcctgggctctagagttcctcccacctcagcctcatgagtagctgggaccacaggcgcatgctaccatgcctggcaaacttttttgattttttatagagacaggagggtctccctgtgttgcccaggctggtctgtaatgcctaggctcaagggatcctctgccttggcttcttaacctgctgggattacaagcatgagacaccattcctggcctagaagcctatttttaaagaaactacaatctcccatggggactgtttccctgcctcttttgtgcagtcccatggaacttgcctacagcaagaggcctaagattgaatctttttggggaaaagtcattctaggatgaaaatcctatgttaaggccgggcgcagtggctcacgcctgtaatcccagtactttgggaagccgaggcaggtggatcacctgaggtgaggagtttgagaccagcctggccaacatggtgaaaccccgtctttactaaagctacaaaaattagctgggcgtggtgccaggcacttgtaatcccagctactcaggaggctgaggcaggagaattgcttgagcctgggaggtggaggttgcagtgagccaagatcgctccattgcactccagcctgggtgacagtgaaactccatctcaaaaataaaagaataaaagtatgtctgtcatccagctcctatgtctgttatccagctccaagtacagcttgtgtatatcaacattttcaaaaacctttaaactaccaaatgaaatccagatgtttttccatggtt

SEQ ID NO: 197681 - DNA, 2009 bp, Artificial Sequence
  derived and/or modified sequence
gcgcggtcgcatttttccggggagcgcggattcgcattcccaattttaggtggcagtcgcaacccatactattcggacagatggcacagaaaccgctgcgcctcttggcttgtggagatgttgaaggaaagtttgatattttattcaatagagttcaagcaattcagaagaaaagtggaaactttgatctgctgttgtgtgtaggaaatttctttggctccacccaagatgctgaatgggaggagtataagactggcatcaagaaagctcctattcagacatatgtgcttggtgctaataaccaggaaacagtaaaatatttccaggatgctgatggatgtgaattagctgaaaacattacttatctgggtcgtaaaggtatcttcactggaagctcggggctgcagattgtgtacctcagtgggacagaatccttaaatgagccagtaccaggttatagttttagtcccaaggatgtgtcttctctgagaatgatgctgtgtacaacctcccagtttaagggtgttgatatcttgctcacatccccatggcccaagtgtgtggggaactttgggaattcttctggagaagtggataccaaaaaatgtggttctgctttggtttccagtcttgccacgggcttgaaaccaagataccattttgctgctttggaaaagacctattatgagaggcttccatatcgaaaccatatcattctacaggaaaatgcacagcatgccacccggtttatagctctggcaaatgttggaaatccagaaaagaaaaagtatctttacgcgttcagtattgttcccatgaagctaatggatgcagcagaactggtaaaacagcctccggatgtcactgaaaacccttacagaaaatctgggcaggaagcatccataggaaagcaaattcttgcccctgtggaagaatcagcctgtcagtttttctttgatttaaatgaaaagcagggaaggaagcgttcatccacaggtagagatagcaaatcttctcctcatccaaagcagcctcgcaaacctcctcagcctccaggaccctgctggttttgccttgctagccctgaagtggaaaaacatttggtggtcaacatcggcacacattgctaccttgccctggccaaaggaggcttatctgatgaccatgtcctcatcctgcctattggacactaccagtcagtggtggagctttcagcagaggtggtagaagaggtggagaagtataaggccactctgagacggttctttaagagtcgagggaaatggtgtgttgtatttgagagaaattataagagccatcacctccagctacaggtcattcctgtcccaatcagctgctctactactgatgacattaaagatgccttcattacccaggcacaggagcagcagatagagctgttggaaatcccagagcactctgacatcaagcagattgcacagccaggagcagcatatttttatgttgaacttgacacaggagaaaagcttttccacagaattaaaaagaattttcctttgcagtttggaagggaggtcctggccagtgaagccatccttaatgttcctgataagtctgactggaggcagtgtcagatcagcaaggaagacgaggagaccctggctcgccgcttccggaaagactttgagccctatgactttactctggatgactaaaacaaagggaagaactttttatgaactccacaggaagtagtaaagcttttttttttttttaattaaaagaattttttttgagacaaagtctcgctctgtcacccaagcaggattgcatgagccaagatcgctccattgcactccagcctgggtgacagtgaaactccatctcaaaaataaaagaataaaagtatgtctgtcatccagctcctatgtctgttatccagctccaagtacagcttgtgtatatcaacattttcaaaaacctttaaactaccaaatgaaatccagatgtttttccatggttgagaa

SEQ ID NO: 197682 - DNA, 1617 bp, Artificial Sequence
  derived and/or modified sequence
atggctcagaagcctctgcgtctcctcgcctgcggagatgtggagggtaagtttgacatattatttaaccgtgtgcaggctattcagaagaaaagtggaaactttgacctactgctctgcgtgggaaacttcttcgggtccactcaagacgcagaatgggaggaatataagaccggcatcaagaaagcacccatacagacttacgtcctcggtgcaaataatcaagaaacagtgaagtatttccaggacgcagacggatgcgaattagctgaaaatataacctatctcggcaggaaaggtatcttcactggttccagtggtctgcagatcgtgtacctgagcggcaccgagtctctgaatgaaccagtaccaggatattcttttagtccaaaagatgtgtcctcgctccgcatgatgctgtgtaccacctctcaattcaaaggagtggacatcctgctgaccagcccatggcccaagtgcgtagggaattttggcaattcatcaggcgaagtagatacaaagaagtgcgggtccgctttggtaagctcactggcaacaggcctaaaaccaagatatcactttgctgccctagaaaagacctattacgagaggttgccatatcgcaatcatatcatcctgcaggagaatgcacagcacgccaccagatttatagccctagcgaacgtgggcaatcctgaaaaaaagaagtatctgtacgcattttcaatagtccctatgaagttgatggacgccgccgagctcgtgaagcagccgcccgatgtgacggagaacccatacaggaagtccggccaggaagcatccatcggtaaacaaatactggcaccagtggaagagtctgcgtgccagttcttttttgatctcaatgaaaaacaggggaggaagcggtcttccaccgggagagactctaagtcctcaccgcacccgaagcaaccccggaagcccccgcaaccacctggtccatgttggttctgcctggcttctccagaggtggaaaaacatctggtggtgaacatcggtacacattgctacctcgctctggcaaaaggtgggcttagcgatgaccacgtgctgattctgccaataggacactaccagtcagtagtcgaactatccgccgaggtggtcgaagaggtggagaaatacaaggcaacactgaggcgctttttcaaaagcaggggcaaatggtgcgtcgtgtttgaaagaaattacaaatcacaccacctccagcttcaggttattccagtgccgatttcttgcagcactactgacgatattaaggacgcttttatcactcaggctcaggaacagcaaatagagctcttagaaattccggagcatagtgacatcaaacagattgcgcagcctggagctgcttatttttatgtggaactggacactggggaaaaattgtttcaccggattaagaagaacttccccctccagttcggacgcgaagtgttagcctcagaggcgattctcaatgtacccgataaaagcgattggagacagtgccagataagcaaggaagacgaagagacgctggccagacggttccgcaaggacttcgaaccttatgatttcaccctcgatgactag

SEQ ID NO: 197683 - DNA, 1617 bp, Artificial Sequence
  derived and/or modified sequence
atggcacagaagcctttaagactattagcctgtggcgacgtggagggcaaatttgacatcctgttcaatagggtccaggcaattcagaagaagagtgggaacttcgacctgctgctgtgtgtgggcaacttcttcggcagcacacaggacgccgagtgggaagaatataagactggcatcaagaaagccccaattcagacatatgttcttggcgcaaataatcaggagaccgtaaagtacttccaagacgctgatggctgcgagctcgctgagaacatcacctacctcggaaggaaaggaattttcactggttcctctggacttcagatcgtttacttgtctgggaccgagtctctgaacgagcccgttcccggctatagcttttctccaaaggacgtttcctccctgcgcatgatgctgtgtacaacctcacagttcaagggcgtagacatcctgctgacctccccatggcctaagtgcgtcgggaatttcggtaattcatctggcgaagtggataccaaaaaatgcggttctgcactggtaagctccctagccacaggattgaagcccaggtaccattttgccgcacttgaaaaaacatactatgaaaggcttccttatcggaaccacattattcttcaggaaaatgcccagcacgcaacccgctttattgcactggccaatgttgggaaccccgagaagaagaagtatctgtacgctttctcaattgtgcctatgaagctcatggatgcagcagaattagtaaagcagccgcctgacgtcacagaaaatccataccgcaagagcggccaggaggcgagcattggtaaacagattctggctcccgtggaggaaagcgcctgtcagtttttcttcgacctcaacgagaaacagggtcgaaaacgctcttctacaggcagagactccaaaagcagcccccatcccaaacagccaagaaagccccctcagcctcctggcccctgttggttttgtctggcctctccagaggtggaaaagcacttagtcgtgaacattggtacccactgttacctagccctcgctaaaggaggtttaagcgatgatcacgtgctgatcctgccaatcgggcattaccaatctgtggtcgagttgtcggccgaggtggtggaagaagtggagaagtacaaagccacacttcggcgctttttcaaatctagaggcaaatggtgcgttgtattcgagcggaactacaaatctcatcacctccaactgcaggttatccccgtgccaatttcctgcagtaccactgatgatatcaaggacgctttcatcacgcaagcccaagagcagcagatcgagttgctggaaattcctgagcattcagatatcaagcaaatcgcccagcctggcgccgcctatttttatgtagaacttgatacaggagaaaaattgtttcaccgtataaagaaaaatttccctctgcagttcggcagagaggtgctggcgagcgaagccatcctgaacgtgcccgataaaagtgattggcgccagtgtcagattagtaaagaagacgaggagacactggctcggagatttcgaaaagacttcgagccatatgacttcacactagatgattag

SEQ ID NO: 197684 - DNA, 1617 bp, Artificial Sequence
  derived and/or modified sequence
atggcccagaagcccctgcggctgctggcctgtggagatgtggagggcaagtttgacatcctcttcaacagagtgcaggccatccagaagaagagcggcaactttgacctgctgctgtgtgtgggcaacttcttcggcagcacccaggatgctgagtgggaggagtacaagacaggcatcaagaaggcccccatccagacctacgtgctgggcgccaacaaccaggagaccgtgaagtacttccaggatgctgatggctgtgagctggccgagaacatcacctacctgggcaggaagggcatcttcaccggcagcagcggcctgcagatcgtgtacctgagcggcacagagagcctgaatgaacctgtgcccggctacagcttcagccccaaggatgtgagcagcctgaggatgatgctgtgcaccaccagccagttcaagggcgtggacatcctgctgaccagcccctggcccaagtgtgtgggcaactttggaaacagcagcggggaggtggacaccaagaagtgtggcagcgccctggtgagcagcctggccaccggcctgaagccccgctaccactttgctgccctggagaagacctactatgaaaggctgccctacagaaaccacatcatcctgcaggagaatgcccagcacgccacccgcttcatcgccctggccaacgtgggcaaccctgagaagaagaagtacctgtatgccttcagcatcgtgcccatgaagctgatggatgctgctgagctggtgaagcagcccccagatgtgacagagaacccctacaggaagagcggccaggaggccagcatcggcaagcagatcctggcccctgtggaggagagcgcctgccagttcttctttgacctgaatgagaagcagggcaggaagaggagcagcacaggccgggacagcaagagcagcccccaccccaagcagcccaggaagccaccccagcccccaggcccctgctggttctgcctggccagccctgaggtggagaagcacctggtggtgaacatcggcacccactgctacctggccctggccaagggcggcctgagtgatgaccacgtgctgatcctgcccatcggccactaccagagcgtggtggagctgtctgctgaggtggtggaggaggtggagaagtacaaggccaccctgcggcgcttcttcaagagccggggcaagtggtgtgtggtgtttgagaggaactacaagagccaccacctgcagctgcaggtgattcctgtgcccatcagctgcagcaccacagatgacatcaaggatgccttcatcacccaggcccaggagcagcagatcgagctgctggagatccctgagcacagcgacatcaagcagatcgcccagcccggggccgcctacttctacgtggagctggacacaggagagaagctgttccaccgcatcaagaagaacttccccctgcagtttggccgggaggtgctggccagcgaggccatcctgaatgtgcctgacaagagtgactggaggcagtgccagatcagcaaggaggatgaggagaccctggcccggcgcttcaggaaggactttgagccctatgacttcaccctggatgactag

SEQ ID NO: 197685 - DNA, 1617 bp, Artificial Sequence
  derived and/or modified sequence
atggcccagaagcccctgcggctgctggcctgcggcgacgtggagggaaaatttgacatactatttaatagggtgcaggctatacagaaaaagtcaggcaatttcgatttattactgtgcgtgggaaacttctttggctctacccaggacgccgagtgggaagagtataagactggtattaaaaaagcgcccattcaaacatacgtccttggcgcgaacaaccaggaaactgtcaagtattttcaggatgcggatggatgcgaactagccgagaatatcacctacctgggtcgaaaaggaatctttactggatctagtggcctgcagatagtctacctgtccggcacagaatcgcttaatgaacccgttcctggctacagcttcagccccaaggacgtaagcagcttgcggatgatgctgtgcacaactagtcagtttaaaggagtggatattttgcttacatcaccatggcccaagtgtgttggcaatttcggtaactctagcggagaggtcgacaccaagaagtgcgggagtgcattggtttcgtccttggcgactggtctgaagccgaggtatcatttcgcggccctggaaaagacttactatgaacgccttccttacagaaaccatatcattttgcaggaaaatgctcagcacgctacccggtttattgctctggctaatgtgggcaaccctgaaaaaaaaaagtacctgtatgcatttagcatcgtccctatgaaactgatggacgctgctgaattggtgaaacaacccccagatgtgaccgagaacccataccgcaagagtggtcaggaggcctccatcggaaaacagattctcgccccagtggaagagagcgcctgccagttctttttcgaccttaacgagaagcagggacgtaaaaggagtagcacaggccgggattctaagtccagccctcaccctaagcaaccccggaagcccccgcagccaccaggaccttgctggttctgcctggccagccctgaagtggagaagcacctggttgttaacattggaacacattgttatctcgcactcgccaagggaggcttgagtgatgaccacgtgttaattttgcctattggccattaccagtcagtggtagagttgagcgccgaggtcgtggaggaagtggagaagtataaggctaccctcaggagatttttcaagagtaggggcaaatggtgcgtagtctttgagcggaattataagagccaccatctccaacttcaggtcataccagtgcccatctcctgcagtaccacagatgatattaaggacgcctttatcacgcaagcacaggagcagcaaattgaactgctggagattccggaacatagtgatataaagcaaatcgcccagccaggcgctgcttacttttacgtcgagctggacaccggagaaaagcttttccataggattaaaaagaatttccctcttcagttcggcagagaagtattagcctcagaagctatactgaacgttcccgataagtccgattggagacagtgccagattagcaaagaagatgaggagactctcgccaggagatttcgaaaggacttcgagccttatgatttcacccttgacgattag

SEQ ID NO: 197686 - DNA, 1617 bp, Artificial Sequence
  derived and/or modified sequence
atggcccagaagcccctgcggctgctggcctgcggcgacgtggagggaaagtttgatattctcttcaatcgcgttcaggcaattcaaaaaaaaagcgggaacttcgacctattgctttgtgtgggaaatttctttggtagcacccaggacgccgaatgggaagaatacaagacgggtattaaaaaagcccctatacagacctacgttctgggggcaaataaccaggaaacagtgaagtacttccaggacgcggacggctgtgagttggccgagaatatcacatacttgggcaggaaaggcatctttacgggcagctccggattgcagatcgtgtacctgtctggtaccgagtctctgaatgagcctgtgcccgggtattcattctccccaaaggatgtgtcttctcttcgaatgatgctctgcaccacctctcagttcaagggcgtggacattttactgacaagtccgtggcccaagtgtgtggggaactttggaaactccagcggagaggttgacacgaaaaagtgtggttccgctcttgttagttcgttagccacaggactgaagccacggtatcacttcgcagctctggaaaagacctactatgaacggttgccctatcggaatcatatcattcttcaagagaatgcccaacatgccactagatttatagctcttgcgaatgtggggaatcctgaaaagaagaagtatctgtatgcattctctattgtccccatgaaactgatggatgccgccgaactagtgaagcagccccctgatgtaacagagaacccatatcgaaagtccgggcaggaggcctctattggaaagcagattttggcaccggttgaagagagtgcctgtcagtttttctttgatttaaacgagaagcagggaaggaagagaagctctactggccgtgattctaagagttccccccatccaaagcagcctcgcaaacctccacagccccccggaccttgttggttttgcctggcctcgcccgaagtggaaaagcacctcgtggtcaacatcggcactcactgctatttggcacttgcaaaaggagggctctctgatgatcatgtgctgattttaccgattgggcactatcagtctgttgtggagctttccgccgaagttgtagaagaggtggaaaagtacaaggccacgctaaggcggttctttaagagcaggggaaagtggtgcgttgtttttgaacggaattacaaatcccatcacctccagttgcaggtaattccagttccaatttcttgtagcactaccgatgacattaaagatgcttttattacccaggcacaggaacagcaaattgagttgctggagatccccgaacactcagatattaaacagattgctcagcctggggcagcgtacttctatgtcgaactggatacgggcgagaagctctttcatagaattaagaaaaatttccctctgcagttcgggagggaggtgctggcctccgaggctattctgaatgtgcctgacaagagcgactggagacaatgccagattagcaaagaggacgaggagacgctcgctcgccggtttcgcaaggattttgaaccttacgactttaccctagacgactag

SEQ ID NO: 197687 - DNA, 1617 bp, Artificial Sequence
  derived and/or modified sequence
atggcccagaagcctcttaggctgttggcttgtggtgacgtcgagggcaagtttgatattctgttcaaccgggtgcaagctatccagaagaaatccggaaactttgacttgctcctgtgcgttgggaacttttttgggtcaactcaagacgccgagtgggaagagtataaaaccgggataaaaaaggctcccatccagacgtacgtgttgggagcaaacaatcaagaaactgttaagtactttcaggatgcagatggatgcgagctcgcggagaatataacctacctagggcgtaagggaatcttcacgggtagcagcggacttcagattgtatatctctccggcaccgaaagcctgaatgaaccagttccaggatacagctttagtcccaaggatgtttccagcttgagaatgatgctgtgtaccacatctcagtttaaaggcgtggatattctgctgacttccccctggccaaagtgtgtgggaaatttcggcaattcctcaggggaagtggacacgaaaaagtgtggatccgccttagttagttctctcgctactggccttaagccaaggtatcatttcgcggctctagaaaagacctactacgaaaggctgccgtatcgtaatcacatcattctgcaggaaaatgctcagcacgcaacaaggtttatagccctcgcaaatgtcggtaatcccgagaagaaaaagtatctatatgctttttcaatagtgccgatgaaattgatggacgcggcagagctagtgaagcaaccacctgacgttacggagaacccttatcggaaatcaggacaggaagctagcattgggaagcagatcctggccccagtggaagagtcagcctgccaatttttctttgacctcaacgaaaaacagggtcgtaagcgctcaagcacgggtagagactctaaaagttcccctcacccaaagcaaccgaggaagcccccacagccgccaggcccttgctggttctgtctcgccagccccgaggttgaaaaacatctagtggtgaacatcggaacccactgctatctggcgcttgcaaaaggagggttgtcagatgaccacgtgctaatactgccaattgggcactatcaatctgttgtggagctatccgccgaggtggtagaggaagtggagaagtataaggctaccctgagaaggttttttaagtcacgtggcaagtggtgtgtagtgttcgagcgtaattacaaatcacatcacctccaactccaggttatcccggtcccaattagctgttcgactaccgatgacattaaagatgcattcattactcaggcacaggaacagcagattgagctactggagatccctgaacatagcgatattaagcagatagcacagccgggagctgcctatttctacgtcgaattggacacaggcgaaaagctgtttcacagaattaagaaaaactttccgctgcaattcggacgagaagtccttgcttcagaagctatcctcaacgtcccagacaagagtgactggagacagtgtcaaatcagtaaggaagatgaggaaactctggccaggcggttccggaaagattttgaaccctatgacttcacactcgacgattag

SEQ ID NO: 197688 - DNA, 1617 bp, Artificial Sequence
  derived and/or modified sequence
atggcgcagaagcccctgagactgttggcgtgcggcgatgtggaggggaaattcgatattctattcaaccgagtgcaggcgatccaaaagaagtctgggaacttcgacctgctactctgcgttggcaatttctttggaagcacacaagacgcagagtgggaggagtacaagaccgggatcaagaaggccccaatccagacttacgtgctgggggcaaataaccaggagactgtcaagtactttcaggatgcggacggatgtgaactagccgaaaacattacctacctaggccgtaaagggatctttaccggaagttccggcctgcagattgtctatttgagcggcacagagagcctcaatgagcctgttcccggttacagtttttcccccaaagatgtgtccagcctgcgcatgatgctctgcacaacatctcagttcaagggagtcgatatcttgctcacgtctccatggcccaagtgcgttggcaatttcggaaactcctctggggaggtggacactaaaaagtgcggatctgctttagtctcttcgttggctaccgggctgaagcccaggtaccatttcgcggctttggagaagacatactatgagcggttaccatatcggaaccacatcatcctgcaggagaacgcacaacatgcaacgaggttcattgctctggccaatgtggggaatccagagaagaagaagtatttatacgcttttagcattgtgcccatgaagttaatggacgctgctgagctggtcaaacaacctcccgatgtgaccgaaaatccgtaccgcaaaagcggacaagaggcctctatagggaagcagatccttgcccctgtggaagaatccgcctgccagtttttcttcgatttaaacgagaagcagggcaggaagagaagcagcacgggccgagattccaagtctagccctcatcccaagcaaccacgcaagccacctcagccaccgggtccctgttggttttgcctggcgagccctgaagttgagaagcacttggtcgtaaatatcggaactcactgctaccttgctctcgctaagggcggtctaagtgacgaccacgtgttgattctgccaattggacactatcaatcagtggtggaactttctgcggaagtggtagaagaggttgaaaaatataaagccacccttcgcaggttttttaagagcagaggaaaatggtgtgtggtcttcgagcggaactacaagtcgcatcatttacaactacaagttattccagtgcctatcagctgctcgacaaccgacgacataaaagatgcctttatcactcaggctcaggagcaacagattgaattgctggagatccctgagcacagcgacatcaagcaaatagctcagcccggagcggcttatttttatgtcgagctggatacgggagagaaactgttccatcgaatcaaaaaaaatttccccctgcagttcggtcgggaggtcttggcgtcagaggctatcctgaacgtacctgacaaatcagattggaggcagtgccagatcagtaaagaagacgaggaaacactggcgagaaggttcaggaaggatttcgaaccctatgactttactctggacgactag

SEQ ID NO: 197689 - protein, 654 aa, Artificial Sequence [sequence omitted]

SEQ ID NO: 197690 - protein, 612 aa, Artificial Sequence
  derived and/or modified sequence
MRNPNDEKYRSIRIGNTAFSTRLLPVRGAVECLFEMGFEEGETHLIFPKKASVEQLQKIRDLIAIERSSRLDGSNKSHKVKSSQQPAASTQLPTTPSSNPSGLNQHTRNRQGQSSDPPSASTVAADSAILEVLQSNIQHVLVYENPALQEKALACIPVQELKRKSQEKLSRARKLDKGINISDEDFLLLELLHWFKEEFFHWVNNVLCSKCGGQTRSRDRSLLPSDDELKWGAKEVEDHYCDACQFSNRFPRYNNPEKLLETRCGRCGEWANCFTLCCRAVGFEARYVWDYTDHVWTEVYSPSQQRWLHCDACEDVCDKPLLYEIGWGKKLSYVIAFSKDEVVDVTWRYSCKHEEVIARRTKVKEALLRDTINGLNKQRQLFLSENRRKELLQRIIVELVEFISPKTPKPGELGGRISGSVAWRVARGEMGLQRKETLFIPCENEKISKQLHLCYNIVKDRYVRVSNNNQTISGWENGVWKMESIFRKVETDWHMVYLARKEGSSFAYISWKFECGSVGLKVDSISIRTSSQTFQTGTVEWKLRSDTAQVELTGDNSLHSYADFSGATEVILEAELSRGDGDVAWQHTQLFRQSLNDHEENCLEIIIKFSDL

SEQ ID NO: 197691 - DNA, 1965 bp, Artificial Sequence
  derived and/or modified sequence
atggcagctgcagcactgggcagctccagcgggtcggccagcccagccgtggccgaactctgccagaatactccagaaaccttcttggaagccagtaaactgctcttgacctatgcagataatattttgagaaatcctaacgacgagaaatatcgatcaatacgaatcggaaacaccgcattcagtacccgcctgctgccggtcaggggtgctgtggagtgccttttcgagatgggctttgaggaaggggagactcacttgatcttccccaagaaagcgagcgtggaacaactgcagaagataagagacctgattgcaatagagagatcatcccggttggacggcagtaataaatctcataaggtaaaaagttcccagcaacctgccgcctctactcagctgccaaccaccccctcttccaacccatctggtctaaatcagcatactagaaacaggcagggacagagctctgaccctcccagcgcctctaccgtggccgccgatagcgccattctggaggtcctacaaagcaacattcagcacgtcctggtatatgagaatcccgccctccaggagaaagctctggcttgtattcctgtgcaagaactcaaaagaaaatcccaggagaagctgagcagagcccgcaagttggataaaggcatcaatatatccgatgaggacttcctgctgctcgagctgcttcactggtttaaggaagagttcttccattgggttaacaacgtgctctgctccaagtgcggagggcagacaagaagccgcgacaggagcctgctaccatctgacgatgagctgaagtggggtgctaaagaagttgaggatcactattgcgacgcctgccagttttccaaccgcttccccaggtacaacaaccctgaaaagctacttgaaaccagatgtggacggtgtggcgaatgggccaattgttttacattatgttgtcgcgcagtgggcttcgaggcacggtatgtatgggattacacagaccacgtttggaccgaggtatattcaccctcccaacaaagatggcttcactgcgatgcctgcgaagatgtctgcgataagcccttactttacgaaataggctggggtaagaagctgagttacgtgatagctttctcaaaagacgaggtggttgatgtcacatggcggtatagttgtaagcacgaagaagtcattgcccggcggactaaagtgaaggaagccttgctgcgtgacactattaacggtctgaataagcaacgtcagttattcctctccgaaaacaggcgaaaagaattgctgcagcgcattattgtggagttagtcgaatttatcagtccaaaaacgccgaagcccggggaactggggggccggatctccgggtccgtggcctggagggtagcccggggtgagatgggactacaaaggaaggagactcttttcataccctgcgaaaacgaaaagatatccaagcagttacacttgtgttacaatatcgtcaaagacaggtacgtccgcgtttcaaacaacaaccagaccattagcggttgggaaaatggcgtgtggaaaatggagagcatcttcaggaaagtcgagactgactggcacatggtctacttggcaaggaaagagggatccagcttcgcgtacattagctggaagtttgaatgcggcagtgtaggactgaaggtggactccatcagtatccggacctccagtcagacctttcaaaccggtaccgtggagtggaagcttcggagtgatactgcacaggtcgagctcacgggcgacaactcccttcattcatacgctgacttttcaggtgccacagaggtcatcctggaggccgagctgtctcgaggagatggagatgttgcatggcagcacacccagttatttcggcagtcgttgaatgaccacgaggaaaactgtcttgagattatcattaagttctccgatctgtag

SEQ ID NO: 197692 - DNA, 1965 bp, Artificial Sequence
  derived and/or modified sequence
atggctgctgctgccctgggcagcagcagcggcagcgccagccctgctgtggccgagctgtgccagaacaccccagagaccttcctggaggccagcaagctgctgctgacctatgctgacaacatcctgaggaaccccaatgatgagaagtaccgcagcatccgcatcggcaacacagccttcagcacccggctgctgcctgtgagaggagctgtggagtgcctgtttgagatgggctttgaggagggggagacccacctgatcttccccaagaaggcctctgtggagcagctgcagaagatccgggacctgattgccatcgagaggagcagccggctggatggcagcaacaagagccacaaggtgaagagcagccagcagcctgctgccagcacccagctgcccaccacccccagcagcaaccccagcggcctgaaccagcacaccaggaaccggcagggccagagcagtgaccccccatctgccagcacagtggccgctgacagcgccatcctggaggtgctgcagagcaacatccagcacgtgctggtgtatgagaacccagccctgcaggagaaggccctggcctgcatccctgtgcaggagctgaagaggaagagccaggagaagctgagccgggccaggaagctggacaagggcatcaacatcagtgatgaggacttcctgctgctggagctgctgcactggttcaaggaggagttcttccactgggtgaacaacgtgctgtgcagcaaatgtggcggccagaccaggagccgggacaggagcctgctgcccagtgatgatgagctgaagtggggcgccaaggaggtggaggaccactactgtgatgcctgccagttcagcaaccgcttcccccgctacaacaaccctgagaagctgctggagacccgctgtggccgctgtggggagtgggccaactgcttcaccctgtgctgcagagctgtgggctttgaggcccgctacgtgtgggactacacagaccacgtgtggacagaggtgtacagccccagccagcagcgctggctgcactgtgatgcctgtgaagatgtgtgtgacaagcccctgctgtatgaaattggctggggcaagaagctgtcctatgtgattgccttcagcaaggatgaggtggtggatgtgacctggagatacagctgcaagcatgaggaggtgattgcccggaggaccaaggtgaaggaggccctgctgcgggacaccatcaatggcctgaacaagcagaggcagctgttcctgtctgaaaatagaaggaaggagctgctgcagaggatcatcgtggagctggtggagttcatcagccccaagacccccaagccaggagagctgggcggccgcatcagcggctctgtggcctggagggtggcccggggggagatgggcctgcagaggaaggagaccctcttcatcccctgtgaaaatgagaagatcagcaagcagctgcacctgtgctacaacatcgtgaaggaccgctacgtgcgggtgagcaacaacaaccagaccatcagcggctgggagaatggagtgtggaagatggagagcatcttcaggaaggtggagacagactggcacatggtgtacctggccaggaaggagggcagcagctttgcctacatctcctggaagtttgaatgtggctctgtgggcctgaaggtggacagcatcagcatccgcaccagcagccagaccttccagacaggcaccgtggagtggaagctgcggagtgacacagcccaggtggagctgactggagacaacagcctgcacagctatgctgacttcagcggggccacagaggtgatcctggaggccgagctgagcagaggagatggagatgtggcctggcagcacacccagctgttccggcagagcctgaatgaccacgaggagaactgcctggagatcatcatcaagttcagtgacctgtag

SEQ ID NO: 197693 - DNA, 1965 bp, Artificial Sequence
  derived and/or modified sequence
atggccgccgccgccctgggcagcagcagcggcagcgccagccccgccgtagctgagctctgccagaacacccctgagacgttcctggaggctagcaaactgcttctgacctacgctgacaacatactccgaaatcctaatgacgaaaagtatcgcagcatcaggatcggaaatactgcattcagcactcggctgcttcccgttcgtggcgcggtggaatgcctttttgagatgggatttgaggagggagagacccacttgatctttcccaagaaggcgagtgtcgaacagctgcagaagatcagagacctgatcgccatagaacggtcatcaaggctagatggatctaacaagtcccacaaggtcaagagcagccaacagcctgcagcttctacccaactgccaacaactccctcctctaatccgtctggattgaatcagcatacccggaacagacaaggacagtcttccgaccccccaagtgcctcaaccgtggctgccgatagcgctatcctggaggtgctccaatctaatatccaacatgttctggtctacgagaatcccgctttgcaggaaaaggctttggcctgtatccctgtgcaggagttgaagagaaagagccaggagaaactcagccgtgcccggaaactggacaaagggattaacatttcagatgaagattttcttcttctggagctgctccattggttcaaagaagaattcttccattgggtcaataatgtcctgtgttccaaatgcggagggcaaacaaggtctagagatcgatcgctcctgccctcggatgatgaacttaagtggggggctaaggaagtggaggaccattactgcgacgcttgccagttttcgaatcgttttccaagatacaacaaccctgagaagctgctcgaaactaggtgcggaagatgtggggagtgggccaactgcttcaccttgtgctgtcgcgccgtcggttttgaagcaagatatgtctgggactatacagatcatgtgtggaccgaagtgtactcaccctctcaacaacgatggctgcattgcgacgcatgcgaagacgtttgcgacaaaccattgttgtatgagatcggttggggcaaaaagctatcatacgttatcgctttctcgaaagatgaggtcgtggatgttacctggcgctattcctgcaaacacgaagaagtgatcgcccgaagaacgaaggtgaaggaggccttactgagggacaccattaatgggctcaataagcaaaggcagctgttcctttctgaaaaccgtcgcaaagaattgttacaaagaatcatagtggagcttgtggaatttatatcacctaaaaccccaaaacccggggagctgggagggcgcatatccggtagcgttgcatggcgtgttgctcggggcgaaatgggcctgcagcgcaaagaaacactcttcatcccttgtgagaacgagaagatatccaagcaattacatctctgctataacatcgtcaaagataggtacgtgcgagtaagcaataacaatcagactatcagcgggtgggagaacggtgtgtggaaaatggagtcaatctttaggaaagttgagactgactggcatatggtctacctcgccaggaaggagggctcgtctttcgcttatatctcttggaagttcgagtgcggctccgtgggcttgaaggtggactccatttcaatcaggacttctagccaaacttttcagactggaacagtggagtggaaactgcggtccgatacggcccaagtcgagctgactggagacaatagcctgcacagctatgcagacttcagcggtgctacagaggtgatactggaagccgaattaagccgcggagacggtgatgtggcttggcagcacacacaacttttcaggcagtcactgaacgatcacgaagaaaactgtctcgaaattatcattaaatttagcgacctctag

SEQ ID NO: 197694 - DNA, 2473 bp, Artificial Sequence
  derived and/or modified sequence
gccggccgaggaccccgcccctgccggccgaggaccccgcccctgccggccgaggaccccgcccctgccggtggctgcggtagctgctgcgcgctgaggcgcctgctcagtgtgggacgcggagagcgaggggcggcggcggcgcccgctggcgctcaagcatggcggcggcggcattgggcagctcctcaggctcggcgtccccggccgtggctgagctctgccagaacaccccggagacctttttggaggcctccaagctgctgctcacctatgctgacaacatcctcagaaaccctaatgatgaaaaatatagatccatccggattggaaacacagccttttctactagactcttgcctgtcagaggagctgttgaatgtttatttgaaatgggctttgaagagggagaaacacatctcatctttcctaaaaaagcttcagtggagcagctgcaaaaaattcgtgacctgattgccatagagagaagtagcagactggatggctcaaataagagccacaaagtaaagtcatctcagcaacctgcagccagtacccagcttcctacaacaccatcttcaaatcccagtgggttaaaccagcacacaaggaaccgtcaagggcagtcatcagatccaccatctgcttcaacggttgctgctgactcagccattctagaagttcttcagtccaacattcagcatgtgctggtctatgaaaatcctgctcttcaggagaaagcgttggcttgtattccggtccaagaactaaaaaggaaatcacaagaaaagttatcgagagctagaaaattggataaaggtatcaatataagtgatgaggattttcttttgctggagcttttgcactggtttaaggaagaattttttcactgggtgaataacgttttgtgcagcaaatgtggtggacagactaggtctagagatagatcattactgcccagtgatgatgagctgaagtggggtgcaaaggaagtggaagatcattactgtgatgcctgccagttcagcaatcgattcccaagatataataaccctgagaaacttttggaaacaagatgtggacggtgtggcgagtgggccaattgttttacactgtgctgccgagctgtagggtttgaagctcgctatgtttgggattacacagaccatgtctggacagaagtctattctccttctcagcagcggtggctgcactgtgatgcatgtgaagatgtctgtgacaagccactcctttatgaaataggatggggcaagaagctttcctatgtcatagcattttcaaaagatgaggtagttgatgtcacttggcgatattcctgcaaacatgaagaggtgattgccagaagaactaaggttaaagaagcattacttcgagacactattaatgggcttaataagcagaggcaactgtttttgtcagaaaacagaaggaaagaacttctccagaggataattgtggagcttgttgaatttatatctcccaaaacccctaaacctggagaacttgggggaagaatatctgggtcagtggcttggagagtagcccgaggtgaaatgggtctacagagaaaagaaaccttgtttattccctgtgaaaatgagaagatttctaaacagctccacctttgttacaatattgtgaaagatcgttatgttcgagtttcaaataacaatcaaaccatttctggatgggagaatggcgtgtggaaaatggaatctatattcagaaaagttgaaacagactggcacatggtatatttggcccgaaaggaaggatcatcttttgcttatatttcctggaagtttgagtgtgggtcagttggcctaaaagtagatagcatttctattagaacaagtagtcaaacttttcagactggaacagtagaatggaaattgcgatctgatacagcacaagtagaactgacaggcgataacagtcttcactcctatgctgatttttctggtgccactgaagttattttggaagcagaattaagcagaggagatggtgatgtcgcttggcaacacacccagctgtttagacaaagcttaaatgaccatgaagaaaattgtttggagataattataaaattcagtgacctttgagaacctgaacattatagaaaagctggcaataatcaaggacttactgaagtagtctgttggttcagtgcatgcttagttggcagttaccaccctgtgctagcatatttcttttgctagctatccatcatgtaaccctcatgaaaattatctttatacgtggactataataaaatattgaattaaaacctttcttccatatgtgactataatttggagtaaagtcttgttgactcaatatgggattttaatctaaaactgtaagtatggttttaaaagttaaataatgatattcatgattaaatgctattcatgattatgataaaatcttgggcttatgatagtaattt

SEQ ID NO: 197695 - DNA, 2062 bp, Artificial Sequence
  derived and/or modified sequence
gctttcccacgcacgcgtcccgttcgactctctttccgccggttgactttaagccgcgtcaccttggctgaggtcagaccgtgggaggcggctgggtagctgtttgcgtgagcagagacgcccctctcggaacctcagtgactcgccgataatcgaggacctgccaataacgcgatgagaaaccctaatgatgaaaaatatagatccatccggattggaaacacagccttttctactagactcttgcctgtcagaggagctgttgaatgtttatttgaaatgggctttgaagagggagaaacacatctcatctttcctaaaaaagcttcagtggagcagctgcaaaaaattcgtgacctgattgccatagagagaagtagcagactggatggctcaaataagagccacaaagtaaagtcatctcagcaacctgcagccagtacccagcttcctacaacaccatcttcaaatcccagtgggttaaaccagcacacaaggaaccgtcaagggcagtcatcagatccaccatctgcttcaacggttgctgctgactcagccattctagaagttcttcagtccaacattcagcatgtgctggtctatgaaaatcctgctcttcaggagaaagcgttggcttgtattccggtccaagaactaaaaaggaaatcacaagaaaagttatcgagagctagaaaattggataaaggtatcaatataagtgatgaggattttcttttgctggagcttttgcactggtttaaggaagaattttttcactgggtgaataacgttttgtgcagcaaatgtggtggacagactaggtctagagatagatcattactgcccagtgatgatgagctgaagtggggtgcaaaggaagtggaagatcattactgtgatgcctgccagttcagcaatcgattcccaagatataataaccctgagaaacttttggaaacaagatgtggacggtgtggcgagtgggccaattgttttacactgtgctgccgagctgtagggtttgaagctcgctatgtttgggattacacagaccatgtctggacagaagtctattctccttctcagcagcggtggctgcactgtgatgcatgtgaagatgtctgtgacaagccactcctttatgaaataggatggggcaagaagctttcctatgtcatagcattttcaaaagatgaggtagttgatgtcacttggcgatattcctgcaaacatgaagaggtgattgccagaagaactaaggttaaagaagcattacttcgagacactattaatgggcttaataagcagaggcaactgtttttgtcagaaaacagaaggaaagaacttctccagaggataattgtggagcttgttgaatttatatctcccaaaacccctaaacctggagaacttgggggaagaatatctgggtcagtggcttggagagtagcccgaggtgaaatgggtctacagagaaaagaaaccttgtttattccctgtgaaaatgagaagatttctaaacagctccacctttgttacaatattgtgaaagatcgttatgttcgagtttcaaataacaatcaaaccatttctggatgggagaatggcgtgtggaaaatggaatctatattcagaaaagttgaaacagactggcacatggtatatttggcccgaaaggaaggatcatcttttgcttatatttcctggaagtttgagtgtgggtcagttggcctaaaagtagatagcatttctattagaacaagtagtcaaacttttcagactggaacagtagaatggaaattgcgatctgatacagcacaagtagaactgacaggcgataacagtcttcactcctatgctgatttttctggtgccactgaagttattttggaagcagaattaagcagaggagatggtgatgtcgcttggcaacacacccagctgtttagacaaagcttaaatgaccatgaagaaaattgtttggagataattataaaattcagtgacctttgagaacctgaacattatagaaaagctggcaataatcaaggacttactgaag

SEQ ID NO: 197696 - DNA, 1965 bp, Artificial Sequence
  derived and/or modified sequence
atggccgctgccgcattgggtagttcctcaggctccgcctcgcccgcagttgctgaactgtgtcagaataccccagagacctttttggaggcgagtaaattgttgttgacttacgcagacaatattctgagaaaccctaacgatgaaaaatatcggagcatacgcattgggaatacagcattttcaacacgcctactgcccgtgagaggggctgtcgaatgcctgtttgagatgggtttcgaggagggtgagactcatctgattttccccaagaaagcatccgtggaacagttgcagaaaatcagagatctcatcgcaatagagcggagttctcgactcgacggatccaataaatcccacaaggttaaatcaagtcagcagccagccgcaagtacccaattgcctacgactcctagttccaacccatcaggactgaaccaacacacccgcaacagacaagggcagagctccgacccgccttctgcaagcaccgtggccgcagattcggccatattggaggtcctccaaagcaatatccagcatgtcctggtatatgagaaccccgctctccaagagaaggccttagcatgcattcccgtccaggagctcaaacgcaagtctcaggaaaagctttcacgagcaagaaaactcgataagggcatcaacatcagcgatgaagactttctcctcctggagctgcttcattggtttaaggaggagtttttccactgggtaaataacgtgctttgttccaaatgtggtggtcaaacccgcagtcgcgaccgctccctcctgccatctgatgatgagctgaagtggggtgccaaggaggtagaagatcactactgcgacgcctgccagttctccaataggtttccacggtacaataatcccgaaaagctgctggaaacaaggtgcgggaggtgtggtgaatgggcgaactgctttacactgtgttgtcgcgctgtaggcttcgaggctagatatgtctgggactacaccgatcacgtctggaccgaggtctactcaccgtcccagcagcgctggttgcactgcgatgcttgcgaggatgtgtgcgacaaaccccttctttatgaaattggatgggggaagaaattatcatacgtgatcgcattctccaaagacgaggtagttgacgtgacctggcgctatagctgcaagcatgaggaggtgatcgcccgtcgtaccaaggtgaaggaggcactgttaagagacactatcaatgggttgaataagcagcgacagctttttctgtcagaaaatagacgaaaagagcttcttcaaagaattatcgtggaattagtggagttcatctctcctaagacccctaagcccggtgaacttggcggtcgaatcagtggcagtgtggcgtggagagttgcccgaggcgagatggggctacaacggaaggagacactgtttataccttgtgaaaatgaaaaaattagcaagcagctgcacctgtgctataacatcgttaaagaccgctacgttcgagtcagtaacaataaccagacgatttccgggtgggagaacggggtgtggaagatggagagcatctttaggaaagttgagactgactggcacatggtctatctggccagaaaggaaggtagctccttcgcctacatttcctggaagttcgagtgtggttcagtgggcctgaaggtggattctatatccattcggactagctcccaaaccttccagacaggtaccgtggaatggaaacttcggtcagatacagcccaggtggaactcactggagacaattctcttcactcctatgccgactttagcggagccactgaagttattctcgaggccgagctgagccgaggcgatggcgatgtggcttggcagcatactcaactgttcagacagagtctgaatgatcacgaggagaattgcctcgagattatcattaaatttagcgatctttag

SEQ ID NO: 197697 - DNA, 1965 bp, Artificial Sequence
  derived and/or modified sequence
atggccgccgccgccctgggcagcagcagcggcagcgccagccccgccgtggccgagctgtgccagaacacccccgagaccttcctggaggccagcaagctgctgctgacctacgccgacaacatcctgagaaaccccaacgacgagaagtacagaagcatcagaatcggcaacaccgccttcagcaccagactgctgcccgtgagaggcgccgtggagtgcctgttcgagatgggcttcgaggagggcgagacccacctgatcttccccaagaaggccagcgtggagcagctgcagaagatcagagacctgatcgccatcgagagaagcagcagactggacggcagcaacaagagccacaaggtgaagagcagccagcagcccgccgccagcacccagctgcccaccacccccagcagcaaccccagcggcctgaaccagcacaccagaaacagacagggccagagcagcgacccccccagcgccagcaccgtggccgccgacagcgccatcctggaggtgctgcagagcaacatccagcacgtgctggtgtacgagaaccccgccctgcaggagaaggccctggcctgcatccccgtgcaggagctgaagagaaagagccaggagaagctgagcagagccagaaagctggacaagggcatcaacatcagcgacgaggacttcctgctgctggagctgctgcactggttcaaggaggagttcttccactgggtgaacaacgtgctgtgcagcaagtgcggcggccagaccagaagcagagacagaagcctgctgcccagcgacgacgagctgaagtggggcgccaaggaggtggaggaccactactgcgacgcctgccagttcagcaacagattccccagatacaacaaccccgagaagctgctggagaccagatgcggcagatgcggcgagtgggccaactgcttcaccctgtgctgcagagccgtgggcttcgaggccagatacgtgtgggactacaccgaccacgtgtggaccgaggtgtacagccccagccagcagagatggctgcactgcgacgcctgcgaggacgtgtgcgacaagcccctgctgtacgagatcggctggggcaagaagctgagctacgtgatcgccttcagcaaggacgaggtggtggacgtgacctggagatacagctgcaagcacgaggaggtgatcgccagaagaaccaaggtgaaggaggccctgctgagagacaccatcaacggcctgaacaagcagagacagctgttcctgagcgagaacagaagaaaggagctgctgcagagaatcatcgtggagctggtggagttcatcagccccaagacccccaagcccggcgagctgggcggcagaatcagcggcagcgtggcctggagagtggccagaggcgagatgggcctgcagagaaaggagaccctgttcatcccctgcgagaacgagaagatcagcaagcagctgcacctgtgctacaacatcgtgaaggacagatacgtgagagtgagcaacaacaaccagaccatcagcggctgggagaacggcgtgtggaagatggagagcatcttcagaaaggtggagaccgactggcacatggtgtacctggccagaaaggagggcagcagcttcgcctacatcagctggaagttcgagtgcggcagcgtgggcctgaaggtggacagcatcagcatcagaaccagcagccagaccttccagaccggcaccgtggagtggaagctgagaagcgacaccgcccaggtggagctgaccggcgacaacagcctgcacagctacgccgacttcagcggcgccaccgaggtgatcctggaggccgagctgagcagaggcgacggcgacgtggcctggcagcacacccagctgttcagacagagcctgaacgaccacgaggagaactgcctggagatcatcatcaagttcagcgacctgtag

SEQ ID NO: 197698 - protein, 924 aa, Artificial Sequence
  derived and/or modified sequence
MSRSRQPPLVTGISPNEGIPWTKVTIRGENLGTGPTDLIGLTICGHNCLLTAEWMSASKIVCRVGQAKNDKGDIIVTTKSGGRGTSTVSFKLLKPEKIGILDQSAVWVDEMNYYDMRTDRNKGIPPLSLRPANPLGIEIEKSKFSQKDLEMLFHGMSADFTSENFSAAWYLIENHSNTSFEQLKMAVTNLKRQANKKSEGSLAYVKGGLSTFFEAQDALSAIHQKLEADGTEKVEGSMTQKLENVLNRASNTADTLFQEVLGRKDKADSTRNALNVLQRFKFLFNLPLNIERNIQKGDYDVVINDYEKAKSLFGKTEVQVFKKYYAEVETRIEALRELLLDKLLETPSTLHDQKRYIRYLSDLHASGDPAWQCIGAQHKWILQLMHSCKEGYVKDLKGNPGLHSPMLDLDNDTRPSVLGHLSQTASLKRGSSFQSGRDDTWRYKTPHRVAFVEKLTKLVLSQLPNFWKLWISYVNGSLFSETAEKSGQIERSKNVRQRQNDFKKMIQEVMHSLVKLTRGALLPLSIRDGEAKQYGGWEVKCELSGQWLAHAIQTVRLTHESLTALEIPNDLLQTIQDLILDLRVRCVMATLQHTAEEIKRLAEKEDWIVDNEGLTSLPCQFEQCIVCSLQSLKGVLECKPGEASVFQQPKTQEEVCQLSINIMQVFIYCLEQLSTKPDADIDTTHLSVDVSSPDLFGSIHEDFSLTSEQRLLIVLSNCCYLERHTFLNIAEHFEKHNFQGIEKITQVSMASLKELDQRLFENYIELKADPIVGSLEPGIYAGYFDWKDCLPPTGVRNYLKEALVNIIAVHAEVFTISKELVPRVLSKVIEAVSEELSRLMQCVSSFSKNGALQARLEICALRDTVAVYLTPESKSSFKQALEALPQLSSGADKKLLEELLNKFKSSMHLQLTCFQAASSTMMKT

SEQ ID NO: 197699 - protein, 140 aa, Artificial Sequence
  derived and/or modified sequence
MSRSRQPPLVTGISPNEGIPWTKVTIRGENLGTGPTDLIGLTICGHNCLLTAEWMSASKIVCRVGQAKNDKGDIIVTTKSGGRGTSTVSFKLLKPEKIGILDQSAVWVDEMNYYDMRTDRNKGIPPLSLRPANPLGIEIE

SEQ ID NO: 197700 - protein, 519 aa, Artificial Sequence
  derived and/or modified sequence
MLDLDNDTRPSVLGHLSQTASLKRGSSFQSGRDDTWRYKTPHRVAFVEKLTKLVLSQLPNFWKLWISYVNGSLFSETAEKSGQIERSKNVRQRQNDFKKMIQEVMHSLVKLTRGALLPLSIRDGEAKQYGGWEVKCELSGQWLAHAIQTVRLTHESLTALEIPNDLLQTIQDLILDLRVRCVMATLQHTAEEIKRLAEKEDWIVDNEGLTSLPCQFEQCIVCSLQSLKGVLECKPGEASVFQQPKTQEEVCQLSINIMQVFIYCLEQLSTKPDADIDTTHLSVDVSSPDLFGSIHEDFSLTSEQRLLIVLSNCCYLERHTFLNIAEHFEKHNFQGIEKITQVSMASLKELDQRLFENYIELKADPIVGSLEPGIYAGYFDWKDCLPPTGVRNYLKEALVNIIAVHAEVFTISKELVPRVLSKVIEAVSEELSRLMQCVSSFSKNGALQARLEICALRDTVAVYLTPESKSSFKQALEALPQLSSGADKKLLEELLNKFKSSMHLQLTCFQAASSTMMKT

SEQ ID NO: 197701 - DNA, 423 bp, Artificial Sequence
  derived and/or modified sequence
atgagcagaagcagacagccccccctggtgaccggcatcagccccaacgagggcatcccctggaccaaggtgaccatcagaggcgagaacctgggcaccggccccaccgacctgatcggcctgaccatctgcggccacaactgcctgctgaccgccgagtggatgagcgccagcaagatcgtgtgcagagtgggccaggccaagaacgacaagggcgacatcatcgtgaccaccaagagcggcggcagaggcaccagcaccgtgagcttcaagctgctgaagcccgagaagatcggcatcctggaccagagcgccgtgtgggtggacgagatgaactactacgacatgagaaccgacagaaacaagggcatcccccccctgagcctgagacccgccaaccccctgggcatcgagatcgagtag

SEQ ID NO: 197702 - DNA, 1560 bp, Artificial Sequence
  derived and/or modified sequence
atgctggacctggacaacgacaccagacccagcgtgctgggccacctgagccagaccgccagcctgaagagaggcagcagcttccagagcggcagagacgacacctggagatacaagaccccccacagagtggccttcgtggagaagctgaccaagctggtgctgagccagctgcccaacttctggaagctgtggatcagctacgtgaacggcagcctgttcagcgagaccgccgagaagagcggccagatcgagagaagcaagaacgtgagacagagacagaacgacttcaagaagatgatccaggaggtgatgcacagcctggtgaagctgaccagaggcgccctgctgcccctgagcatcagagacggcgaggccaagcagtacggcggctgggaggtgaagtgcgagctgagcggccagtggctggcccacgccatccagaccgtgagactgacccacgagagcctgaccgccctggagatccccaacgacctgctgcagaccatccaggacctgatcctggacctgagagtgagatgcgtgatggccaccctgcagcacaccgccgaggagatcaagagactggccgagaaggaggactggatcgtggacaacgagggcctgaccagcctgccctgccagttcgagcagtgcatcgtgtgcagcctgcagagcctgaagggcgtgctggagtgcaagcccggcgaggccagcgtgttccagcagcccaagacccaggaggaggtgtgccagctgagcatcaacatcatgcaggtgttcatctactgcctggagcagctgagcaccaagcccgacgccgacatcgacaccacccacctgagcgtggacgtgagcagccccgacctgttcggcagcatccacgaggacttcagcctgaccagcgagcagagactgctgatcgtgctgagcaactgctgctacctggagagacacaccttcctgaacatcgccgagcacttcgagaagcacaacttccagggcatcgagaagatcacccaggtgagcatggccagcctgaaggagctggaccagagactgttcgagaactacatcgagctgaaggccgaccccatcgtgggcagcctggagcccggcatctacgccggctacttcgactggaaggactgcctgccccccaccggcgtgagaaactacctgaaggaggccctggtgaacatcatcgccgtgcacgccgaggtgttcaccatcagcaaggagctggtgcccagagtgctgagcaaggtgatcgaggccgtgagcgaggagctgagcagactgatgcagtgcgtgagcagcttcagcaagaacggcgccctgcaggccagactggagatctgcgccctgagagacaccgtggccgtgtacctgacccccgagagcaagagcagcttcaagcaggccctggaggccctgccccagctgagcagcggcgccgacaagaagctgctggaggagctgctgaacaagttcaagagcagcatgcacctgcagctgacctgcttccaggccgccagcagcaccatgatgaagacctag

SEQ ID NO: 197703 - DNA, 423 bp, Artificial Sequence
  derived and/or modified sequence
atgtcacgatcccggcagccacctctagtaacaggcatttcaccaaatgaaggaatcccctggacaaaggtgaccataaggggggagaatttgggaactggccctactgatctcattgggcttaccatttgtggccataattgcctcctgaccgccgagtggatgtccgccagcaagatcgtttgtagggtaggccaggccaaaaacgacaaaggggacatcattgtaactaccaagagtggagggcgcggcacttccacagtgtcttttaaactactgaaacccgaaaaaataggaatcctcgaccaatccgccgtttgggttgacgagatgaattattacgacatgcgtaccgatcgtaacaagggcatccctcctctgtcccttagaccagccaatccccttggcattgaaatcgagtag

SEQ ID NO: 197704 - DNA, 1560 bp, Artificial Sequence
  derived and/or modified sequence
atgctggacttagacaacgacacaaggccctccgttctggggcatctctctcagacagcctctctgaagagaggcagttcttttcagagcgggcgcgacgacacatggcgctataaaacaccacaccgggtagctttcgtcgaaaaattaactaaactcgtgttgtcccagctgccgaatttctggaagctctggatttcctacgtgaacggatctctgtttagcgagactgctgagaaatcagggcagatcgagcggtccaaaaacgttcgtcaacggcagaatgacttcaagaagatgatacaggaggttatgcactctctagtaaagctgacccgtggggctctgcttcctctcagtatcagagatggagaagcaaagcagtatggtggatgggaggtcaaatgtgaactgtctggtcagtggctggcgcacgctatccagacagttaggctaacccacgaaagtctgaccgccttggagatacccaacgatttgctgcagactatccaggacttgatactagacctgcgagtgagatgcgtgatggccaccttgcagcatacagctgaggagatcaagcgattggctgaaaaggaagactggatagtggacaacgaaggcctgacttcgcttccctgtcagttcgagcagtgcattgtgtgttccctgcagtcactcaagggcgtgttagagtgtaaaccaggggaggcatccgtgttccaacaaccaaagacacaagaggaggtatgtcagctatccattaacattatgcaagtatttatctattgtctggagcagctcagcactaagcctgatgccgatatcgatacaacgcatctgagtgtagacgtgagttcgccagacctgttcggcagcattcacgaggacttttctttgacgtcagagcagcgtctgctgatagtgttatctaattgttgctatctagaaaggcataccttcctgaacatagcggagcacttcgagaagcataactttcaaggcatagaaaagataactcaggttagcatggcctccctaaaggagctggatcagcggctattcgagaactacatcgagttgaaggccgatccaatagtgggctctctagagcctggcatctacgctggctacttcgactggaaagattgtttgccgcctacgggcgtgagaaactacttgaaagaggcccttgtgaatattatcgcagtgcacgcggaggttttcactatttctaaagagctggtgcccagagtgctctccaaagtcattgaggcggtgagcgaggaactgtcccgacttatgcagtgtgtgtcatctttcagcaaaaatggtgccctgcaggcccggctcgagatttgcgccctacgagatacagtagcggtctacttgactcccgagagcaaatcttcctttaagcaggccctggaggccctgccccagctcagttctggggcagacaagaagctgctcgaagagctgctaaacaaatttaagagctcaatgcatttacagctgacgtgcttccaggcggcctcctccaccatgatgaaaacgtag

SEQ ID NO: 197705 - DNA, 4449 bp, Artificial Sequence
  derived and/or modified sequence
gtgaggtgccggcggctggcggccgcggagtcttcggcgagacctaccgggccctgtctgtgccggccgtgagctgcggcaggacggctggagattacttctctaacaggatcaccagtttgctccacaaagcacaatgtctcgatcacgacaacccccccttgtgaccggcatctctccaaatgaagggataccatggacgaaggtcacaatcaggggagaaaatctggggactggccccaccgacctcataggcttgaccatttgtggacataattgcctcctgacggcagaatggatgtctgcaagtaaaatagtatgtcgagtgggacaagccaaaaatgacaaaggagacattattgtcaccactaagtcaggtggcagaggaacctcaacagtctctttcaagctactcaaacctgagaaaataggcattttggatcagtctgctgtgtgggttgatgaaatgaattattatgatatgcgcactgacaggaacaaaggaattccgcccttgtccttacgtcctgctaacccgcttggcattgagattgaaaaaagtaaattttcgcagaaggacttagaaatgctattccatggaatgagtgctgattttacaagtgagaatttctcagcagcctggtatcttatagagaatcactcaaacaccagttttgagcagctcaaaatggcagtcaccaacctaaagagacaggctaacaagaagagtgagggcagcctggcctatgtgaaaggcggtctcagtacattcttcgaagcacaggatgccctctcagccatccatcaaaaactagaagcagatggaacggaaaaagtagaaggatccatgacgcagaaactggagaatgttctgaacagagcaagtaatactgcagacacattgtttcaagaagtattaggtcggaaagacaaggcagattccactagaaatgcactcaatgtgcttcagcgatttaagtttcttttcaaccttcctctaaatattgaaaggaatattcaaaagggtgattatgatgtggttattaatgattatgaaaaggccaagtcactttttgggaaaacggaggtgcaagttttcaagaaatattatgctgaagtagaaacaaggattgaagctttaagagaattacttctggataaattgcttgagacaccatcaactttacatgaccaaaaacgttacataaggtacctgtctgaccttcatgcgtctggtgaccctgcttggcaatgcattggagcccaacacaagtggatccttcagctcatgcacagttgcaaagagggctacgtgaaagatctgaaaggtaacccaggcctgcacagtcccatgttggatcttgataatgatacacgtccctcagtgttgggccatctcagtcagacagcgtccctgaagaggggcagcagctttcagtctggtcgagacgacacgtggagatacaaaactccccacagggtggcctttgttgaaaaattgacaaaactcgtcttgagccagctgcctaacttctggaaactctggatctcctacgttaatggaagcctcttcagtgagactgctgagaagtcaggccagattgaaagatcaaagaatgtaaggcaaagacaaaatgattttaagaaaatgattcaggaagtaatgcactccctggtgaagcttacccgcggagccctgcttcccctcagcatccgggatggggaagccaagcagtacggaggctgggaggtgaagtgcgagctctccggacagtggctcgctcacgccatccagactgtaagacttactcatgaatcgttgactgcccttgaaattcctaatgacctgttacagactatccaggatctcatcttggatctccgagtacgttgcgtaatggccacgttgcagcacacggcggaagaaataaagagattagctgaaaaagaagactggattgttgacaatgaaggactgacttctctaccatgtcagtttgaacagtgcatcgtgtgttctctgcagtcactgaagggggttctggagtgcaagccgggagaggccagtgtcttccaacaacctaaaacacaggaggaggtttgccagctaagcatcaatataatgcaggtttttatatactgtctggaacagttgagcaccaagcctgatgcagatatagatactacacatctctctgttgatgtttcttcccctgacttgtttggaagtatccatgaagacttcagcttgacctcagaacagcgccttttgatagtcctaagtaattgctgctatctagaacgtcacaccttcctaaatatcgcagaacattttgaaaagcacaacttccagggaatagaaaaaatcacacaggttagcatggcctcattgaaagaactagatcaaagactctttgaaaattacatcgagttgaaagcagatcccatcgttggctccttagaacctggaatttatgcaggatattttgattggaaggactgcctgcctccaacaggtgtcagaaactatttaaaagaagcactggtgaatataattgccgtgcatgcagaggtgttcaccatttccaaagaactggtccctcgggtactatccaaggtgatagaagcagtttctgaagagctcagtcgactgatgcagtgtgtttcatccttcagcaaaaatggagctttacaggcgagacttgaaatctgtgctttgagggacactgtggctgtttacctgacacccgaaagcaagtcaagttttaagcaggctttggaagccctgccccagctttccagtggagcagataaaaagttactggaagagctcctgaacaagttcaagagtagcatgcacttgcagctcacctgtttccaagcagcttcttcaaccatgatgaaaacataaatatctgccacataaaagaagtccaggaaaataacacgtaataagactgttcactctctaagtaccctaaaggtatttggtgtattaaacattgggtttgccatttttctcttttttcttcctctgacttcgaaaattgttggtatacatttcaaccaaaatgacctcatttgaaatgcccaggaagtatttgttttgccattcttactagatcagatcctgtatgactttaaaatacattttaaaatatattttgcatctcagcagaaggttgagtgctgcaggaagagctgcttctgcagggagttttctggaatggcgtggcacatattgaagcatttctcagtgtcccgttcacggaagcgcaggcagctcccacgacacacggagagactgactgatacgagatttggaaagctatgtagacatctttggagctcttactgtcctaaactgtacagctgtgcttaaaaccctcatttcatataaatggccttaagttttctaattcaagcgggtttttggaaaaatttatggtctccattaaaatacatattacaactggggtagattatttgtggtccaggtgtctgtgatttaactttgcgttttgctatctgatttttatttttcacagggctaagcatgagctttcattctcactcactcttaatttgtcgtgcgtcactacacatgcacgtgttgcagtccctgaggccctgtgtgttatctgtgatggagtgtgaatgtgtaacgggcactgtgttacactctgaggtgttggcggggcggtcgcagacttcagggtcccctaacggaaaggccaggctccgcgtggacggccaactccctgcccgctccttcagcaggtgactgtctctgccacttcttacctgctgaaggatcttgctcagtagctggaacaatgctgctgtcacacagtctcttctctgaaacttcaggatgctccttggtcaccaggcaatgggagctgtagaccagccgcatgcacttgccccacattcactgctgactggcttcactggaataggttcaggtcaccgggacttctctcagagtcagcggcccacccaactccctcataccgtcgcatctgaaaattttcagagaggaattctctttgtagtcggcttgtcagggttttcaagtttttctatggttatttttaaatctctttttttaaatgctaaaattaatgtcctcattaatgcaagtaattttagagcacagtgtagccatgtacagtttccattatttaaaataaataaatgtgttggttcatttggtgtatggggggacatcatggtaactggaaatgaaagtttaatctttcacaaatgtgcttgataaagctgttaagaattgtctttcctaagtatgttaactgttgtatctaactcaactgtgagctaagtttaaaaactgcaatcatgaatgtttgtgatattttaaatatctactacagcacattcagccaataaagaatctgcctttaatgtaagttgtaatttacttga

SEQ ID NO: 197706 - DNA, 720 bp, Artificial Sequence
  derived and/or modified sequence
gtgaggtgccggcggctggcggccgcggagtcttcggcgagacctaccgggccctgtctgtgccggccgtgagctgcggcaggacggctggagtaaatcttggtgccaataatggaacgaacactggacacaggactggggaagactggatttcagcttaggagaagaatactaagaagtttcagcagtggaatgcctactcttcttataaccggagtggaaacggaagcattttgtgagagggctggagggaagattacttctctaacaggatcaccagtttgctccacaaagcacaatgtctcgatcacgacaacccccccttgtgaccggcatctctccaaatgaagggataccatggacgaaggtcacaatcaggggagaaaatctggggactggccccaccgacctcataggcttgaccatttgtggacataattgcctcctgacggcagaatggatgtctgcaagtaaaatagtatgtcgagtgggacaagccaaaaatgacaaaggagacattattgtcaccactaagtcaggtggcagaggaacctcaacagtctctttcaagctactcaaacctgagaaaataggcattttggatcagtctgctgtgtgggttgatgaaatgaattattatgatatgcgcactgacaggaacaaaggaattccgcccttgtccttacgtcctgctaacccgcttggcattgagattgaaaa

SEQ ID NO: 197707 - DNA, 1835 bp, Artificial Sequence
  derived and/or modified sequence
gcggaagtgaggtgccggcggctggcggccgcggagtcttcggcgagacctaccgggccctgtctgtgccggccgtgagctgcggcaggacggctggaggtaacccaggcctgcacagtcccatgttggatcttgataatgatacacgtccctcagtgttgggccatctcagtcagacagcgtccctgaagaggggcagcagctttcagtctggtcgagacgacacgtggagatacaaaactccccacagggtggcctttgttgaaaaattgacaaaactcgtcttgagccagctgcctaacttctggaaactctggatctcctacgttaatggaagcctcttcagtgagactgctgagaagtcaggccagattgaaagatcaaagaatgtaaggcaaagacaaaatgattttaagaaaatgattcaggaagtaatgcactccctggtgaagcttacccgcggagccctgcttcccctcagcatccgggatggggaagccaagcagtacggaggctgggaggtgaagtgcgagctctccggacagtggctcgctcacgccatccagactgtaagacttactcatgaatcgttgactgcccttgaaattcctaatgacctgttacagactatccaggatctcatcttggatctccgagtacgttgcgtaatggccacgttgcagcacacggcggaagaaataaagagattagctgaaaaagaagactggattgttgacaatgaaggactgacttctctaccatgtcagtttgaacagtgcatcgtgtgttctctgcagtcactgaagggggttctggagtgcaagccgggagaggccagtgtcttccaacaacctaaaacacaggaggaggtttgccagctaagcatcaatataatgcaggtttttatatactgtctggaacagttgagcaccaagcctgatgcagatatagatactacacatctctctgttgatgtttcttcccctgacttgtttggaagtatccatgaagacttcagcttgacctcagaacagcgccttttgatagtcctaagtaattgctgctatctagaacgtcacaccttcctaaatatcgcagaacattttgaaaagcacaacttccagggaatagaaaaaatcacacaggttagcatggcctcattgaaagaactagatcaaagactctttgaaaattacatcgagttgaaagcagatcccatcgttggctccttagaacctggaatttatgcaggatattttgattggaaggactgcctgcctccaacaggtgtcagaaactatttaaaagaagcactggtgaatataattgccgtgcatgcagaggtgttcaccatttccaaagaactggtccctcgggtactatccaaggtgatagaagcagtttctgaagagctcagtcgactgatgcagtgtgtttcatccttcagcaaaaatggagctttacaggcgagacttgaaatctgtgctttgagggacactgtggctgtttacctgacacccgaaagcaagtcaagttttaagcaggctttggaagccctgccccagctttccagtggagcagataaaaagttactggaagagctcctgaacaagttcaagagtagcatgcacttgcagctcacctgtttccaagcagcttcttcaaccatgatgaaaacataaatatctgccacataaaagaagtccaggaaaataacacgtaataagactgttcactctctaagtaccctaaaggtatttggtgtattaaacattgggtttgccatttttctcttttttcttcctctgacttcgaaaattgttggtatacatttc

SEQ ID NO: 197708 - DNA, 423 bp, Artificial Sequence
  derived and/or modified sequence
atgagccgcagccggcagccccccctggtgacaggcatcagccccaatgaaggcatcccctggaccaaggtgaccatcagaggagagaacctgggcaccggccccacagacctgattggcctgaccatctgtggccacaactgcctgctgacagctgagtggatgtctgccagcaagatcgtgtgccgggtgggccaggccaagaatgacaagggggacatcatcgtgaccaccaagagcggcggccggggcaccagcacagtgtccttcaagctgctgaagccagagaagattggcatcctggaccagagcgctgtgtgggtggatgagatgaactactatgacatgaggacagacaggaacaagggcatcccccccctgagcctgcggcctgccaaccccctgggcattgaaattgaatag

SEQ ID NO: 197709 - DNA, 1560 bp, Artificial Sequence
  derived and/or modified sequence
atgctggacctggacaatgacacccggcccagcgtgctgggccacctgagccagacagccagcctgaagaggggcagcagcttccagagcggcagagatgacacctggagatacaagaccccccaccgggtggcctttgtggagaagctgaccaagctggtgctgagccagctgcccaacttctggaagctgtggatctcctatgtgaatggcagcctcttcagcgagacagctgagaagagcggccagatcgagaggagcaagaatgtgcggcagaggcagaatgacttcaagaagatgatccaggaggtgatgcacagcctggtgaagctgaccaggggggccctgctgcccctgagcatcagagatggagaggccaagcagtatggaggctgggaggtgaagtgtgagctgagcggccagtggctggcccacgccatccagacagtgcggctgacccatgagagcctgacagccctggagatccccaatgacctgctgcagaccatccaggacctgatcctggacctgcgggtgcgctgtgtgatggccaccctgcagcacacagctgaggagatcaagaggctggccgagaaggaggactggatcgtggacaatgaaggcctgaccagcctgccctgccagtttgagcagtgcatcgtgtgcagcctgcagagcctgaagggcgtgctggagtgcaagccaggagaggcctctgtgttccagcagcccaagacccaggaggaggtgtgccagctgagcatcaacatcatgcaggtgttcatctactgcctggagcagctgagcaccaagccagatgctgacatcgacaccacccacctgtctgtggatgtgagcagcccagacctgtttggcagcatccacgaggacttcagcctgaccagcgagcagaggctgctgattgtgctgagcaactgctgctacctggagcggcacaccttcctgaacattgctgagcactttgagaagcacaacttccagggcatcgagaagatcacccaggtgtccatggccagcctgaaggagctggaccagaggctgtttgagaactacatcgagctgaaggctgaccccatcgtgggcagcctggagcccggcatctatgccggctactttgactggaaggactgcctgccccccaccggggtgaggaactacctgaaggaggccctggtgaacatcatcgctgtgcacgccgaggtgttcaccatcagcaaggagctggtgccccgggtgctgagcaaggtgattgaggccgtgtctgaggagctgagccggctgatgcagtgtgtgagcagcttcagcaagaatggagccctgcaggcccggctggagatctgtgccctgcgggacacagtggccgtgtacctgaccccagagagcaagagcagcttcaagcaggccctggaggccctgccccagctgagcagcggggctgacaagaagctgctggaggagctgctgaacaagttcaagagctccatgcacctgcagctgacctgcttccaggccgccagcagcaccatgatgaagacctag

SEQ ID NO: 197710 - DNA, 423 bp, Artificial Sequence
  derived and/or modified sequence
atgagccggagccggcagccccccctggtgaccggcatcagccccaacgagggaatcccttggaccaaggtgaccattagaggcgagaatctgggcaccgggcccacagacctcataggactgacaatttgtgggcacaactgtttattgacggcagagtggatgagcgcttcaaagatcgtttgcagggtggggcaagcgaaaaatgacaagggcgacattatcgttacaactaagagtggaggcagagggaccagtaccgtatcgttcaaattgctgaaacctgagaagattggaattcttgatcagagcgcagtgtgggtggatgagatgaattactacgacatgagaaccgataggaacaagggcatcccccctttgtctctgcgtccggccaatccgttgggtatcgagatagaatag

SEQ ID NO: 197711 - DNA, 1560 bp, Artificial Sequence
  derived and/or modified sequence
atgctggacctggacaacgacacccggcccagcgtgctgggccacctttctcaaaccgccagtttaaagcgcggaagttcattccagagcgggcgtgatgacacatggcggtacaagacccctcaccgtgtcgcatttgtggaaaagttgacgaagctcgtgctgagccagctccccaatttctggaagctatggatctcatacgtaaacggatctcttttttctgagactgcagagaaatcggggcagatcgagagatctaagaatgtgcgacagcgacagaatgatttcaaaaagatgattcaggaagtcatgcacagtctcgtgaaacttactcgcggtgcactcctaccactttctattagagatggagaggcaaaacagtatggcggatgggaggtaaagtgtgagctgtccgggcaatggttagctcatgctattcaaactgtgaggctcacacacgagtctctgaccgccctggaaatcccaaatgatttgctgcagactatccaggatcttatattagacctccgggtgaggtgtgtcatggccaccctgcagcacactgcggaagagattaagcggctcgccgagaaggaagattggatcgtagataatgaggggctgacaagtctgccatgccagttcgaacagtgtattgtctgtagtctgcagagcctgaagggcgtcctcgaatgtaaaccaggggaggccagtgtattccaacagccaaagactcaggaggaggtctgccaattatccatcaatattatgcaagtctttatctactgtctggagcaactgtccacgaagccagacgcagatatcgatactacacatttgtcggttgatgtgagctctccggatttatttggctccatacatgaggacttttcgcttacctctgagcagaggcttttaattgtgctgagcaattgctgctatctggaacggcacacgtttctgaatatcgcagaacatttcgaaaagcacaacttccagggcatcgaaaaaatcacccaagtttctatggcttccctgaaagagttggatcagaggctatttgagaattacatagagctcaaagcagacccgatagtgggctctcttgaacccggcatctatgccggctatttcgactggaaggactgccttccaccaacaggcgtgcgaaactatctcaaggaagctctggttaacattattgctgtccatgcggaagtattcactatttcaaaagaactagtcccacgggttctcagtaaggtgatcgaggctgtgagtgaagaactgtctcgtctaatgcaatgtgtgagcagcttttctaaaaacggtgccctccaagcccgtctcgagatttgcgcccttcgggacactgtggcagtatatttaacacccgaaagcaagtctagcttcaaacaagccctggaggccctgccccagctgtctagcggcgccgataagaagctccttgaggagctgttgaataagtttaagtctagtatgcaccttcagctgacatgcttccaggcagctagtagcactatgatgaagacctag

SEQ ID NO: 197712 - DNA, 423 bp, Artificial Sequence
  derived and/or modified sequence
atgtcacggtcccggcagcccccactggtgaccggcatttcccccaatgagggcattccatggacgaaggtgaccattcgcggagagaacttaggcactggcccaactgatctgatcggcctcactatctgtggacataactgccttctgaccgccgagtggatgagcgcgtcaaaaatcgtgtgcagggtcggccaggccaagaacgacaagggcgacatcatcgtcaccacaaagagcggaggacgaggcacaagtactgtctctttcaaactattgaaacctgagaagataggcatcctcgaccagtccgccgtgtgggtggatgagatgaattattacgatatgcgcaccgacaggaacaaagggatcccccctctcagcctgcggcctgcgaaccccctcggaatagaaattgaatag

SEQ ID NO: 197713 - DNA, 1560 bp, Artificial Sequence
  derived and/or modified sequence
atgttggacctggataatgacacaaggccgtcggttctggggcatctgagtcaaacggcttcactgaagaggggaagtagcttccaatctgggagagatgacacatggaggtacaaaacgcctcaccgggtggcttttgtcgagaaactaaccaagctggttttatcacagctgccaaatttttggaagctgtggatctcctacgtgaatggatcactttttagtgagaccgcagaaaaaagcggccagatagagaggagtaagaacgtgcgacagcggcagaacgattttaaaaaaatgatacaggaggtgatgcacagccttgtaaagcttacacgcggtgctctgttgccactcagcatcagggatggggaggccaagcagtatggtggctgggaggttaaatgcgagctcagcgggcagtggctcgctcatgctatccagacagtcagactgactcacgagtcactgaccgctctcgagatccctaacgatcttctgcagacgatccaagacttaatattggatcttcgtgtgcgatgcgttatggccacactgcagcatacagcagaggagatcaagcgactcgccgagaaagaggactggattgtggacaatgaggggctgacaagtctcccatgccagtttgaacagtgcattgtctgtagccttcaaagcctcaagggagtcctcgagtgcaagcccggtgaggcatcagtgttccagcagcctaagacccaggaagaggtctgtcagctcagcataaatataatgcaggttttcatttactgtctcgaacagctgtccacaaagccagacgccgacatcgatacaacacatctgagcgtggatgtcagtagtcctgatctgttcgggagcatacatgaggattttagtctcacatccgagcagcggctgctgatcgtcctgagcaactgttgctaccttgagcgccacacatttctaaacatcgccgaacactttgaaaaacataactttcagggtattgaaaaaatcacccaggtctcaatggcatccctaaaagagctcgatcagaggttatttgagaactacattgagctcaaggccgatcccatcgtcggcagccttgagccaggcatctatgcagggtacttcgactggaaagactgtctgccccctaccggagtgagaaattacctgaaggaagcgctcgtgaatataatcgctgtgcacgcggaagtctttacaatatcaaaggagctggttcctcgagtactctccaaggtcattgaggcggtgagcgaagagctttcacggctcatgcagtgtgtctccagttttagcaaaaacggcgcactgcaggccagactggagatatgcgcactgcgggacaccgtcgcagtatatctgacccccgagagcaaatctagctttaagcaagccctggaggctctaccgcagctctctagcggtgcagacaaaaaattactcgaggagttattaaataagtttaaaagctcaatgcacttgcagctgacctgctttcaggccgcaagcagtactatgatgaaaacttag

SEQ ID NO: 197714 - DNA, 2775 bp, Artificial Sequence
  derived and/or modified sequence
atgagtaggagtcgccagccaccactggtgacaggcatctcaccgaacgagggcattccctggacaaaagtcacaataagaggggagaacctcggcacaggcccaaccgatctgatcgggttaaccatttgcggccataactgcttgctgaccgcagagtggatgtccgctagcaagatcgtttgtagggtggggcaagctaaaaacgacaagggggacataattgtgaccaccaaatctggagggcgtggaaccagtactgtgtcattcaagcttttgaagcccgagaaaattggaattctggaccagtccgctgtctgggtggatgagatgaactactacgatatgaggacggatcggaataagggcatcccacctctgtcattaaggccggccaatcccttaggaattgagatagagaaatcaaaattttctcaaaaggacttagagatgctgtttcatggaatgtctgccgactttacatcggagaatttttccgctgcatggtacctgatcgagaaccacagcaacaccagcttcgaacagcttaaaatggccgttactaatctcaagcgccaagcgaataagaaaagcgagggaagccttgcttacgtgaagggcgggttgagcacatttttcgaagcacaagacgctctgtctgccattcaccagaaactggaagcagatggtacagaaaaggtagagggatctatgacacaaaagctcgaaaatgttctaaatagagcttccaacactgcagacacactattccaggaggtgctgggccgtaaagataaggctgactcgacacgcaatgctcttaatgtgctccagcgattcaagtttctgttcaatttgccgctgaatatagagcggaacatccaaaaaggagactacgatgtggtgatcaacgattatgaaaaagctaaatctctttttggcaaaaccgaggtgcaggtcttcaaaaagtattacgctgaggtcgagacccgaatcgaagctctgagggagctgctcctggacaagctgttagaaactcctagcaccctgcacgaccaaaagcgctacattagatacttgtccgatctgcatgcctctggtgaccctgcgtggcagtgcatcggcgctcagcataaatggattctgcagttaatgcacagttgcaaagaaggctacgtgaaggatctgaaagggaatcccggactccactcccctatgcttgacctggataacgataccagaccctctgttctcggtcatcttagccagactgccagtctaaaaagaggctcatcatttcagtccggtcgtgacgacacatggaggtacaaaactcctcatcgggtcgccttcgtagagaagctgaccaagttagtgttatcccaactgccaaatttctggaagctgtggatatcctacgtcaatggcagtcttttctcagagaccgccgaaaaatcgggccagattgaacggtccaagaacgtgaggcagcgccagaacgactttaaaaaaatgattcaagaggttatgcatagcctagtgaagctcacccgtggcgcgcttttgccacttagcattagagacggcgaagccaagcagtatggagggtgggaagtgaaatgtgaactgagcgggcagtggctggcccacgccatacaaacagtgcgcctcactcacgaatcactgaccgccctcgaaataccaaatgatttgctgcagaccatccaggatctcattctggacctccgggtccgttgtgtgatggccaccttgcagcacaccgctgaggagatcaagcgcttggccgagaaagaggactggatagtggataacgaaggtctgacctctctgccttgtcaattcgaacaatgcatcgtctgcagcctccagtcattaaaaggtgtcctcgagtgcaagccgggcgaagcgagcgtgttccagcaacctaaaacccaggaggaggtgtgtcagctttcaatcaatatcatgcaagtgttcatttattgtctcgagcaactgtcaaccaagccagacgccgatattgataccacccacctgtctgtggatgtctcttccccagatctgtttggctcaattcatgaagacttctctctgacctccgaacagagactgctcattgtgctctcgaactgctgttacttggagagacacacattcttgaacatcgctgagcattttgagaaacacaatttccaaggcatcgagaagatcacacaggtgagtatggcttcgctcaaagaactggatcagcgcctgttcgagaattatattgagctgaaggctgatcctatagtggggtctctggagccaggcatatatgcaggctatttcgattggaaggattgcttgccgcctactggtgtgcggaactatctgaaggaggcactcgttaatattatcgccgtgcatgctgaagtctttacaataagcaaggagctcgtgccacgagtgttatccaaggtcatagaggcggtctcagaggagctttccaggctgatgcagtgcgtgagttcttttagtaagaatggtgccctccaagctcgtcttgaaatttgtgccctccgagacactgtcgccgtctacctgactccggagagcaagtcttccttcaaacaggcactggaggcacttccacagctgagctcaggggccgacaaaaaactcctggaggagctcctgaataaatttaaatctagcatgcacctacagcttacatgtttccaggctgcctcatctaccatgatgaaaacttag

SEQ ID NO: 197715 - DNA, 2775 bp, Artificial Sequence
  derived and/or modified sequence
atgagccgcagccggcagccccccctggtgacaggcatcagccccaatgaaggcatcccctggaccaaggtgaccatcagaggagagaacctgggcaccggccccacagacctgattggcctgaccatctgtggccacaactgcctgctgacagctgagtggatgtctgccagcaagatcgtgtgccgggtgggccaggccaagaatgacaagggggacatcatcgtgaccaccaagagcggcggccggggcaccagcacagtgtccttcaagctgctgaagccagagaagattggcatcctggaccagagcgctgtgtgggtggatgagatgaactactatgacatgaggacagacaggaacaagggcatcccccccctgagcctgcggcctgccaaccccctgggcattgaaattgagaagagcaagttcagccagaaggacctggagatgctgttccacggcatgtctgctgacttcaccagcgagaacttctctgctgcctggtacctgattgagaaccacagcaacaccagctttgagcagctgaagatggctgtgaccaacctgaagaggcaggccaacaagaagtctgagggcagcctggcctacgtgaagggcggcctgagcaccttctttgaggcccaggatgccctgagcgccatccaccagaagctggaggctgatggaacagagaaggtggagggctccatgacccagaagctggagaatgtgctgaacagagccagcaacacagctgacaccctcttccaggaggtgctgggcaggaaggacaaggctgacagcaccagaaatgccctgaatgtgctgcagcgcttcaagttcctgttcaacctgcccctgaacatcgagaggaacatccagaagggggactatgatgtggtgatcaatgactatgagaaggccaagagcctgtttgggaagacagaggtgcaggtgttcaagaagtactatgcagaggtggagacccgcatcgaggccctgcgggagctgctgctggacaagctgctggagacccccagcaccctgcatgaccagaagcgctacatccgctacctgagtgacctgcacgccagcggggaccctgcctggcagtgcatcggggcccagcacaagtggatcctgcagctgatgcacagctgcaaggagggctacgtgaaggacctgaagggcaaccctggcctgcacagccccatgctggacctggacaatgacacccggcccagcgtgctgggccacctgagccagacagccagcctgaagaggggcagcagcttccagagcggcagagatgacacctggagatacaagaccccccaccgggtggcctttgtggagaagctgaccaagctggtgctgagccagctgcccaacttctggaagctgtggatctcctatgtgaatggcagcctcttcagcgagacagctgagaagagcggccagatcgagaggagcaagaatgtgcggcagaggcagaatgacttcaagaagatgatccaggaggtgatgcacagcctggtgaagctgaccaggggggccctgctgcccctgagcatcagagatggagaggccaagcagtatggaggctgggaggtgaagtgtgagctgagcggccagtggctggcccacgccatccagacagtgcggctgacccatgagagcctgacagccctggagatccccaatgacctgctgcagaccatccaggacctgatcctggacctgcgggtgcgctgtgtgatggccaccctgcagcacacagctgaggagatcaagaggctggccgagaaggaggactggatcgtggacaatgaaggcctgaccagcctgccctgccagtttgagcagtgcatcgtgtgcagcctgcagagcctgaagggcgtgctggagtgcaagccaggagaggccagcgtcttccagcagcccaagacccaggaggaggtgtgccagctgagcatcaacatcatgcaggtgttcatctactgcctggagcagctgagcaccaagccagatgctgacatcgacaccacccacctgtctgtggatgtgagcagcccagacctgtttggcagcatccacgaggacttcagcctgaccagcgagcagaggctgctgattgtgctgagcaactgctgctacctggagcggcacaccttcctgaacattgctgagcactttgagaagcacaacttccagggcatcgagaagatcacccaggtgtccatggccagcctgaaggagctggaccagaggctgtttgagaactacatcgagctgaaggctgaccccatcgtgggcagcctggagcccggcatctatgccggctactttgactggaaggactgcctgcccccaactggagtgaggaactacctgaaggaggccctggtgaacatcatcgctgtgcatgctgaggtgttcaccatcagcaaggagctggtgccccgggtgctgagcaaggtgattgaagctgtgtctgaggagctgagccggctgatgcagtgtgtgtcctccttcagcaagaatggagccctgcaggcccggctggagatctgtgccctgcgggacacagtggccgtgtacctgaccccagagagcaagagcagcttcaagcaggccctggaggccctgccccagctgagcagtggagctgacaagaagctgctggaggagctgctgaacaagttcaagagctccatgcacctgcagctgacctgcttccaggccgccagcagcaccatgatgaagacctag

SEQ ID NO: 197716 - DNA, 2775 bp, Artificial Sequence
  derived and/or modified sequence
atgagccggagccggcagccccccctggtgaccggcatcagccccaacgagggcatcccatggaccaaggtgaccattcgaggggaaaacctgggtacggggcccaccgacttgatcgggctcacgatatgcgggcacaattgcctgttaaccgctgagtggatgagcgcttccaagatcgtgtgtcgcgtcggccaggccaagaatgataaaggcgatatcatcgttaccaccaaatcaggaggacgtggcaccagcacagtaagctttaagctgctcaagcccgagaagataggcatcctcgatcagtctgccgtgtgggtggacgagatgaattattacgacatgcggaccgacaggaataaaggaatcccgcctctgtctctgcggccagctaacccactcgggattgagattgaaaaaagtaagttttcccagaaagacctcgagatgttatttcacgggatgtctgcagatttcactagcgagaatttttccgccgcatggtacctaatcgaaaatcactctaatacatctttcgagcaactgaaaatggccgtgaccaacctaaaaaggcaggccaataagaaatcagagggatccctggcgtacgttaagggaggtctgtcgacttttttcgaggcccaggacgcactgtctgctatacatcaaaaattagaagccgacggcaccgagaaggtggagggttctatgacacaaaaactggaaaatgtgctcaaccgtgcatcgaacacagcggatactctgtttcaggaggtgctgggacgtaaagataaggctgactcaacacgcaatgccttgaatgttctacagcgcttcaaattcctttttaacctcccgttgaatatcgagagaaacattcaaaaaggcgactatgatgttgtgattaatgattatgagaaggctaagtctcttttcgggaagaccgaggtccaggtttttaaaaagtactatgccgaggttgagacccggatcgaagctctccgtgaactgctgttagacaaactcttggagaccccctctaccttgcacgatcagaagaggtatatcagatacttgtctgacttgcatgcaagcggcgatccagcgtggcagtgtattggagcacagcacaagtggatcctccaactaatgcatagttgtaaggaggggtacgtgaaagatcttaaagggaacccgggacttcactccccaatgctggatctcgataatgacacccggccgtccgtgttggggcatctgagccaaaccgcctctctgaaacgcgggagtagctttcagagcggaagggacgacacctggaggtataaaacgccacatagggtagcctttgtcgagaagctcactaagcttgttctgagccaactacccaatttctggaaactctggatctcctatgtaaacggaagcctgttctctgaaacagctgagaagagcggccaaattgaaagaagtaaaaacgtgcggcagaggcagaacgacttcaagaagatgatccaggaagtgatgcatagcttagtgaaactgacgcggggcgctctgctgcccctgtccatacgagacggcgaagcaaagcaatacggcggctgggaggtcaagtgtgagctgtctggccagtggctggcccacgcaatacagacggtgcgcctaactcacgagtccctaacggcccttgagatacccaatgacttgctgcagaccatccaggatcttattctcgatctgagggtgaggtgcgtcatggccactctgcagcacactgcggaagagataaagagactggccgagaaggaagactggattgttgataatgagggcctaacctccttgccttgtcagtttgagcagtgtatcgtatgtagccttcaaagccttaagggagttctggagtgtaaaccaggcgaggcgtccgtgttccagcagccaaagacccaggaagaagtgtgtcagctgagtatcaacattatgcaggtcttcatttactgtctcgaacagctgtccactaagcctgatgctgacattgatactacccacctatcggttgacgtttctagcccagaccttttcggttctatacacgaagatttcagcttgacctccgaacagcgactcctgattgtgctcagcaactgctgctacctcgagaggcatacttttttaaatatagcagaacactttgagaaacacaactttcagggcatcgagaaaattactcaggtatccatggcgagcctgaaggaactggaccagcgcctgttcgagaactacatcgaactcaaagctgaccccattgtaggcagtcttgagccagggatttatgccggttatttcgactggaaagattgcctgcctcccaccggggtccgcaactacttgaaagaagcactcgtgaatattattgctgtgcacgccgaggtcttcaccattagcaaagagttagtccctcgagttttgagcaaggtgattgaggcagtgtccgaagagctgtcgaggctcatgcaatgcgttagctctttcagcaaaaatggggccctacaggctcgcctcgaaatctgcgctttacgggacaccgtcgcggtgtacctgactcctgaatccaagagctctttcaaacaggccctggaggccctgccacagctgagttccggggccgacaagaaacttctggaagaactgcttaataagttcaagtcttcaatgcatttacaattaacttgttttcaggcagcctcatctacgatgatgaaaacttag

SEQ ID NO: 197717 - DNA, 2775 bp, Artificial Sequence
  derived and/or modified sequence
atgagtcgctctaggcaacctcccctcgtgactggaatcagcccgaacgagggcattccttggactaaggttacaattagaggcgagaacctgggcaccggtcctactgatctgattggcctgacgatttgcgggcacaattgcttgcttacagcagagtggatgagcgctagcaaaatagtttgtcgcgtaggccaggctaagaatgataaaggagacatcattgttactaccaagagcggagggagggggacaagcacggtgagcttcaagctgctgaaacctgagaaaatcggaatcctcgatcagagcgcagtttgggtggatgagatgaattactacgatatgaggacagaccggaacaaaggtattccaccactgtcgctgaggcccgctaatcctttaggtatcgagatcgagaaatccaagttttcccagaaggatctcgagatgttgtttcacggcatgagcgctgacttcacttccgaaaatttcagcgctgcatggtacctgatagagaatcactcaaatactagttttgagcagctgaagatggcagtgaccaacttgaaacggcaagccaacaaaaagtcagaggggtctcttgcttatgtcaaaggagggctcagtactttcttcgaggctcaggacgcactcagtgctatacaccagaaacttgaagcagacggcacagaaaaagtggaaggaagcatgacccagaagctggagaacgtgctgaatcgagcaagtaatactgccgacacgttgttccaggaagtgctgggccgaaaagacaaagctgactccaccagaaatgcccttaacgtgttgcagcgcttcaagttcctgttcaaccttcctctgaatatcgagcgaaatattcagaagggtgactatgatgttgttattaacgattacgagaaggccaagagcctattcggcaagactgaggtccaggtctttaaaaagtattacgcagaagtggagaccagaattgaagcactgagggaactgcttcttgataagttgttggaaaccccctccacgttacacgatcagaagagatacatcaggtacctctcagacctgcacgcttctggcgaccccgcttggcaatgcattggcgcacagcacaagtggatcttgcaactcatgcacagttgcaaggagggttacgtgaaggacttaaagggaaatccaggactccactcccccatgctggacctcgacaacgataccagaccttcagtcctgggtcacttgtcccagacagcctccctcaagcgcggatcctctttccagagcggccgagatgacacctggcggtacaagaccccccatagagtggctttcgtggaaaagctcacaaagctggtgttatctcagctccccaatttctggaagctatggatcagctacgtgaacggctcgttatttagtgagaccgccgagaaaagcgggcagattgagcggtcgaaaaatgtccgccagagacaaaacgatttcaagaagatgattcaggaggtgatgcattctctcgtcaaactgacccgaggcgctctgctccccttgtccataagagatggtgaggcaaagcaatatggcggatgggaagtgaagtgcgaattatctggacagtggctggcccacgccatccagaccgtacggctgactcacgagtctttgaccgcccttgaaatacctaacgatctgctgcagactatccaggatctcattctcgatctgagggtgagatgtgtcatggccacgctgcagcatacagcagaggaaatcaaaagactagccgaaaaggaggattggatcgtcgacaacgagggactgaccagtctgccatgtcagttcgagcagtgtattgtgtgttctctgcagtccctaaaaggggtactggaatgcaaacctggcgaagcctctgtgttccagcagcctaaaactcaggaagaggtgtgtcagctatccattaatattatgcaggtattcatctactgtctagaacaactgtctactaagccagacgctgacatcgacactacccacctttcagtcgacgtgtcctctcctgacctgtttgggagtattcatgaagacttctccttgacctctgagcagcggctcctcatcgttttgtccaattgttgctatctggaaaggcacacttttctcaatattgcagaacattttgagaaacacaactttcagggaattgagaagattacccaggtcagcatggcatcactgaaagaactggatcagagactctttgaaaattacattgagctgaaggccgaccctatcgtcggaagccttgagccaggcatttatgccggatattttgattggaaggactgtcttcccccaacgggcgttaggaactatctcaaagaagccctcgtgaatattatcgccgtccatgcagaggtttttaccatttctaaggagctggtgccacgagtgctgtccaaggtgattgaagccgtgtccgaggaactgagtagattgatgcaatgtgtctccagctttagtaagaacggggctcttcaggctagactcgaaatctgcgcactgcgggatacagtggccgtgtacctcacaccagagtctaaaagctcattcaaacaggcgctggaagccctgccccagctgagctccggagctgacaagaaacttctagaagaactgctcaacaaattcaaatcatctatgcacctccagctgacctgtttccaggcggctagtagcaccatgatgaagacctag

SEQ ID NO: 197718 - DNA, 2775 bp, Artificial Sequence
  derived and/or modified sequence
atgagcagaagcagacagccccccctggtgaccggcatcagccccaacgagggcatcccctggaccaaggtgaccatcagaggcgagaacctgggcaccggccccaccgacctgatcggcctgaccatctgcggccacaactgcctgctgaccgccgagtggatgagcgccagcaagatcgtgtgcagagtgggccaggccaagaacgacaagggcgacatcatcgtgaccaccaagagcggcggcagaggcaccagcaccgtgagcttcaagctgctgaagcccgagaagatcggcatcctggaccagagcgccgtgtgggtggacgagatgaactactacgacatgagaaccgacagaaacaagggcatcccccccctgagcctgagacccgccaaccccctgggcatcgagatcgagaagagcaagttcagccagaaggacctggagatgctgttccacggcatgagcgccgacttcaccagcgagaacttcagcgccgcctggtacctgatcgagaaccacagcaacaccagcttcgagcagctgaagatggccgtgaccaacctgaagagacaggccaacaagaagagcgagggcagcctggcctacgtgaagggcggcctgagcaccttcttcgaggcccaggacgccctgagcgccatccaccagaagctggaggccgacggcaccgagaaggtggagggcagcatgacccagaagctggagaacgtgctgaacagagccagcaacaccgccgacaccctgttccaggaggtgctgggcagaaaggacaaggccgacagcaccagaaacgccctgaacgtgctgcagagattcaagttcctgttcaacctgcccctgaacatcgagagaaacatccagaagggcgactacgacgtggtgatcaacgactacgagaaggccaagagcctgttcggcaagaccgaggtgcaggtgttcaagaagtactacgccgaggtggagaccagaatcgaggccctgagagagctgctgctggacaagctgctggagacccccagcaccctgcacgaccagaagagatacatcagatacctgagcgacctgcacgccagcggcgaccccgcctggcagtgcatcggcgcccagcacaagtggatcctgcagctgatgcacagctgcaaggagggctacgtgaaggacctgaagggcaaccccggcctgcacagccccatgctggacctggacaacgacaccagacccagcgtgctgggccacctgagccagaccgccagcctgaagagaggcagcagcttccagagcggcagagacgacacctggagatacaagaccccccacagagtggccttcgtggagaagctgaccaagctggtgctgagccagctgcccaacttctggaagctgtggatcagctacgtgaacggcagcctgttcagcgagaccgccgagaagagcggccagatcgagagaagcaagaacgtgagacagagacagaacgacttcaagaagatgatccaggaggtgatgcacagcctggtgaagctgaccagaggcgccctgctgcccctgagcatcagagacggcgaggccaagcagtacggcggctgggaggtgaagtgcgagctgagcggccagtggctggcccacgccatccagaccgtgagactgacccacgagagcctgaccgccctggagatccccaacgacctgctgcagaccatccaggacctgatcctggacctgagagtgagatgcgtgatggccaccctgcagcacaccgccgaggagatcaagagactggccgagaaggaggactggatcgtggacaacgagggcctgaccagcctgccctgccagttcgagcagtgcatcgtgtgcagcctgcagagcctgaagggcgtgctggagtgcaagcccggcgaggccagcgtgttccagcagcccaagacccaggaggaggtgtgccagctgagcatcaacatcatgcaggtgttcatctactgcctggagcagctgagcaccaagcccgacgccgacatcgacaccacccacctgagcgtggacgtgagcagccccgacctgttcggcagcatccacgaggacttcagcctgaccagcgagcagagactgctgatcgtgctgagcaactgctgctacctggagagacacaccttcctgaacatcgccgagcacttcgagaagcacaacttccagggcatcgagaagatcacccaggtgagcatggccagcctgaaggagctggaccagagactgttcgagaactacatcgagctgaaggccgaccccatcgtgggcagcctggagcccggcatctacgccggctacttcgactggaaggactgcctgccccccaccggcgtgagaaactacctgaaggaggccctggtgaacatcatcgccgtgcacgccgaggtgttcaccatcagcaaggagctggtgcccagagtgctgagcaaggtgatcgaggccgtgagcgaggagctgagcagactgatgcagtgcgtgagcagcttcagcaagaacggcgccctgcaggccagactggagatctgcgccctgagagacaccgtggccgtgtacctgacccccgagagcaagagcagcttcaagcaggccctggaggccctgccccagctgagcagcggcgccgacaagaagctgctggaggagctgctgaacaagttcaagagcagcatgcacctgcagctgacctgcttccaggccgccagcagcaccatgatgaagacctag

SEQ ID NO: 197719 - protein, 360 aa, Artificial Sequence
  derived and/or modified sequence
MPKFKQRRRKLKAKAERLFKKKEASHFQSKLITPPPPPPSPERVGISSIDISQSRSWLTSSWNFNFPNIRDAIKLWTNRVWSIYSWCQNCITQSLEVLKDTIFPSRICHRELYSVKQQFCILESKLCKLQEALKTISESSSCPSCGQTCHMSGKLTNVPACVLITPGDSKAVLPPTLPQPASHFPPPPPPPPLPPPPPPLAPVLLRKPSLAKALQAGPLKKDGPMQITVKDLLTVKLKKTQSLDEKRKLIPSPKARNPLVTVSDLQHVTLKPNSKVLSTRVTNVLITPGKSQMDLRKLLRKVDVERSPGGTPLTNKENMETGTGLTPVMTQALRRKFQLAHPRSPTPTLPLSTSSFDEQN

SEQ ID NO: 197720 - DNA, 1083 bp, Artificial Sequence
  derived and/or modified sequence
atgcccaagttcaagcagagaagaagaaagctgaaggccaaggccgagagactgttcaagaagaaggaggccagccacttccagagcaagctgatcaccccccccccccccccccccagccccgagagagtgggcatcagcagcatcgacatcagccagagcagaagctggctgaccagcagctggaacttcaacttccccaacatcagagacgccatcaagctgtggaccaacagagtgtggagcatctacagctggtgccagaactgcatcacccagagcctggaggtgctgaaggacaccatcttccccagcagaatctgccacagagagctgtacagcgtgaagcagcagttctgcatcctggagagcaagctgtgcaagctgcaggaggccctgaagaccatcagcgagagcagcagctgccccagctgcggccagacctgccacatgagcggcaagctgaccaacgtgcccgcctgcgtgctgatcacccccggcgacagcaaggccgtgctgccccccaccctgccccagcccgccagccacttcccccccccccccccccccccccccctgccccccccccccccccccctggcccccgtgctgctgagaaagcccagcctggccaaggccctgcaggccggccccctgaagaaggacggccccatgcagatcaccgtgaaggacctgctgaccgtgaagctgaagaagacccagagcctggacgagaagagaaagctgatccccagccccaaggccagaaaccccctggtgaccgtgagcgacctgcagcacgtgaccctgaagcccaacagcaaggtgctgagcaccagagtgaccaacgtgctgatcacccccggcaagagccagatggacctgagaaagctgctgagaaaggtggacgtggagagaagccccggcggcacccccctgaccaacaaggagaacatggagaccggcaccggcctgacccccgtgatgacccaggccctgagaagaaagttccagctggcccaccccagaagccccacccccaccctgcccctgagcaccagcagcttcgacgagcagaactag

SEQ ID NO: 197721 - DNA, 1083 bp, Artificial Sequence
  derived and/or modified sequence
atgccgaaatttaaacagagacggcgcaagctcaaagctaaggcagagagattgtttaaaaaaaaggaagcctcacatttccagtccaagctcattacccctcctcccccgcctccttctccagagcgagtcggtattagttccattgacattagccagtctcggtcttggctgacttcctcctggaatttcaatttccccaacataagagatgctataaagctgtggaccaatcgggtctggtccatctactcctggtgccaaaactgcataacccagtcgttggaggtgctgaaggatacaatattcccaagtcgcatctgtcatcgcgagctctatagcgtcaagcaacaattttgcattctcgaatcaaaactgtgtaaactccaggaggcattgaaaacaatatcagagtcgagctcttgtccaagctgtggacagacttgtcacatgagcggcaaattgacaaacgtgcccgcctgtgtgctgattactccaggcgactctaaggccgtattgccgccaactctgcctcagccggcctcccactttccgccacctccccctccaccgccgctccctcccccaccacctccactggcacctgtgctactcaggaagccatcactcgctaaagcgttgcaggctggacccctcaagaaggatgggcctatgcaaatcaccgtgaaggacctcctaaccgtgaagctcaaaaagacgcagtctctcgacgaaaaacggaaactcataccctcaccgaaagcacggaacccgctggtcacagtgtcagacttacaacatgtgacccttaaacctaattcgaaggtcctttctactagggtgacaaacgtactgatcacaccaggaaaatctcagatggatctgaggaaactgttaaggaaagtggatgtggagaggtcccccggggggacgcctctcacaaacaaagagaatatggaaaccggaacggggttgacccccgtcatgacccaggctctgcgcagaaagttccagctggcacatccaagatcaccaacgcccacacttccactgtcaacttcatcctttgatgaacaaaactag

SEQ ID NO: 197722 - DNA, 1083 bp, Artificial Sequence
  derived and/or modified sequence
atgcccaagttcaagcagaggaggaggaagctgaaggccaaggccgagcggctcttcaagaagaaggaggccagccacttccagagcaagctgatcaccccacctcctcctccacccagccctgagcgggtgggcatcagcagcattgacatcagccagagccgctcctggctgaccagctcctggaacttcaacttccccaacatcagagatgccatcaagctgtggaccaacagagtgtggagcatctacagctggtgccagaactgcatcacccagagcctggaggtgctgaaggacaccatcttccccagccgcatctgccaccgggagctgtacagcgtgaagcagcagttctgcatcctggagagcaagctgtgcaagctgcaggaggccctgaagaccatcagcgagagcagcagctgccccagctgtggccagacctgccacatgtctgggaagctgaccaacgtgcctgcctgtgtgctgatcacccctggggacagcaaggctgtgctgccccccaccctgccccagcctgccagccacttccccccacctcctcctcctccacccctgcccccacctcctccacccctggcccctgtgctgctgaggaagcccagcctggccaaggccctgcaggccggccccctgaagaaggatggccccatgcagatcaccgtgaaggacctgctgactgtgaagctgaagaagacccagagcctggatgagaagaggaagctgatccccagccccaaggccaggaaccccctggtgacagtgtctgacctgcagcacgtgaccctgaagcccaacagcaaggtgctgagcaccagggtgaccaacgtgctgatcacccctgggaagagccagatggacctgaggaagctgctgaggaaggtggatgtggagaggagccctgggggcacccccctgaccaacaaggagaacatggagactggaacaggcctgacccctgtgatgacccaggccctgcggaggaagttccagctggcccaccccaggagccccacccccaccctgcccctgagcaccagcagctttgatgagcagaactag

SEQ ID NO: 197723 - DNA, 1083 bp, Artificial Sequence
  derived and/or modified sequence
atgcccaagttcaagcagcggcggcggaagctgaaggccaaggccgagcgcttatttaaaaaaaaggaggcgagtcactttcaatctaagttaattacacctcctccccctccaccctcccctgagcgtgtgggcatctcctctatcgatatatcccaatctcggtcttggctgacctcctcatggaacttcaatttccctaatattcgagacgccattaagctgtggacaaaccgggtttggtccatctatagttggtgtcagaactgtattacccagagcttggaagtgttaaaggacacaatctttccttcccggatttgtcatcgagagctctatagtgtgaaacagcagttttgtatactggagtccaagttgtgtaagctccaggaagctcttaaaactatatctgagagctcatcctgtccctcctgcggacagacctgccacatgagcggcaaactaacaaatgttccagcttgtgtactaatcacccccggcgacagtaaagcggtgcttccacctaccctgccacagcctgcttctcatttcccaccaccaccccccccacccccattacccccacccccacctcccttggctcccgttcttctgcgtaagccatctctggccaaagccttgcaagcgggaccgttaaaaaaggatggtcccatgcagattactgtcaaagacctgctcactgtgaagttaaaaaagactcaaagccttgacgagaaacggaagctgattcctagccccaaagctcggaacccactcgttaccgtcagtgacctccaacacgtgacactgaaacccaattccaaggtgttgtcgaccagagttacaaatgttttgatcacccccggcaagtcacagatggacttaaggaagctgctgcgaaaggtagacgtggagcgatctcctggcgggaccccattaactaacaaagagaacatggagacagggaccggattgactccagtgatgacacaggctctgagacgtaagtttcaacttgcgcaccccaggagccccaccccaaccctccctctttctacaagttcatttgacgagcagaattag

SEQ ID NO: 197724 - DNA, 1083 bp, Artificial Sequence
  derived and/or modified sequence
atgcctaagtttaagcagaggagaagaaagctgaaggccaaagccgaaagactgtttaaaaagaaagaagcttcacattttcagagtaagctgatcacgccccctcctcctccccctagtccagagagggtagggatctctagcatagacattagtcagtccaggagctggctcacaagtagttggaacttcaattttcctaatattcgcgacgcaattaagctgtggacaaatcgcgtgtggtctatttacagttggtgccaaaattgcattactcagtccttagaagttctcaaagatactatcttcccctcacgcatttgccacagggagctctactccgtgaagcagcagttctgcatcctagaaagtaagctctgcaaattacaggaggcgctaaaaaccatcagcgagagcagctcctgcccatcctgcggccaaacctgccacatgtccgggaaattgacaaacgtgcccgcatgcgtgttgattacacctggcgactcaaaggccgttctgccccctactctaccacagcctgcgtcgcatttcccaccgcctccaccaccgccacccttgccacctccgcctcccccactggcgcctgtattgttacggaaaccatcactggcaaaggcgctgcaagcgggaccacttaaaaaggacggaccgatgcagattaccgtgaaagatctgctgacagtcaaactgaagaaaacccaatctctggatgagaaaaggaagctgatcccttcacctaaagccaggaacccccttgtgacagtaagtgacctccaacacgtgacccttaagcctaattctaaggtgctttccacccgggtgaccaatgtactcataacaccgggaaagtctcaaatggatctgcgaaagctactgaggaaggtggatgtggaacgttcgcccggagggacaccactgaccaacaaagagaacatggaaacggggactggattaaccccagtgatgacacaggcactgcgacgtaagttccaactcgcacacccacggtctcctaccccaacactccccctctctacctcctctttcgacgagcagaattag

SEQ ID NO: 197725 - DNA, 2086 bp, Artificial Sequence
  derived and/or modified sequence
atttttctttatggcgtgggagaggccacagcccggactccatcgactcccccggctcttagactaaaatcatgcccaagttcaaacaacgaagacgaaagctaaaagccaaagccgaaagattattcaaaaaaaaagaagcctctcactttcagtccaagctaattacacctcctcctccaccaccctcaccagaaagagtcggtatttcttcaatagatatatctcaaagcagaagctggctaacatcatcctggaacttcaattttcctaacatcagagatgcaataaaactttggacaaatagagtatggtctatatacagctggtgccagaactgcataacccagagtttagaagtattgaaagacaccatctttccatctcgtatctgccaccgagaactttacagtgtaaaacaacagttttgcattttggaaagtaaattatgcaagctccaggaagcactgaagaccatctcagaaagttcttcctgtccaagctgtggtcaaacatgtcacatgagtggtaaacttacaaatgtgcctgcctgcgttctgatcacccctggagactccaaagctgtgcttcctcccacactgccacagccagccagccattttcctcctcctcctccacctccacctctgccacctcctccaccaccactagcacctgtgttgctcagaaaacccagtctcgctaaagcacttcaggctggaccattaaaaaaagatggacccatgcagataacagttaaagatctgctgactgtaaaattaaagaagacacagagtttagatgaaaagaggaagcttataccatcgccgaaagcacggaatccactagttaccgtctctgacttgcagcatgttaccctgaaacctaactccaaagtgttatcgactcgagttacaaacgtcttaatcactcctggaaaaagtcagatggatctgcggaaactgcttagaaaagtcgatgtagagaggagcccaggtggaacccctcttaccaataaggaaaatatggaaacaggaacaggactgactccagtgatgacgcaggccttaaggagaaagtttcagctggctcaccctagaagcccaactccaactctgccactttctacaagcagctttgatgaacaaaactgatgccaactctgcctcactccatgagatgatccataacaaatacagataaaaacacccagctgggtgcagtggctcacacctgtaatcccagcactttgggaggctgaggcaggtggatcacctgaggtcaggagtttgagaccagcctggccaacatggtgaaactccttccccactaaaaatacagaaattagctgggcatagtggcgggtgcctgtaatcccagctatgcgggaggctaaggcaggagaattgcttgaacccaagaggcagaggttgcagtgagccaagatcgcgtcattgcactccagcctgagcaacaagagcaaaacaaaaacaaacaaacaaacaaaaaaaacccacccaaatccttttttttaatgtagtagggtttatatagatatactaatataattgcatttggagaattagagtatgtatggagcccacacatactgtgatataaagtgtatatacagatatttggatattttctagtttgcatgatgattaagagaaccagatgggaaaatacaatctccaaagtgatgtttatcctggaattacccaatttagattagagaggttgttcaaatttaactagataactctagtttgtactgtataggtgcagttatgacagtaaaaaaatagcctcttggctcatacctgtaatcccaccactttgggaggccaaggtgggaggattgcttgagcccaggaattcaagactagcctgggcaacataatacagggagaccccgtttctattaaaaatacaaaaatcagccagctgtggtgacacatgcctatagtcccagctacttaggaagctgagaagggaggatcacttgaggctgtagtgcactataattatgcctgtgaatagccactctactccagcctgggcaacatagcaagaccccatctct

SEQ ID NO: 197726 - DNA, 702 bp, Artificial Sequence
  derived and/or modified sequence
atggagaccagcgccagcagcagccagccccaggacaacagccaggtgcacagagagaccgaggacgtggactacggcgagaccgacttccacaagcaggacggcaaggccggcctgttcagccaggagcagtacgagagaaacaagagcagcagcagcagcagcagcagcagcagcagcagcagcagcagcagcagcagcagcagcagcgagagcaacgacgaggaccagcagcccagagccaccggcaagcacagaagaagcctgggcgccggctacccccacggcaacggcagccccggccccggccacggcgagcccgacgtgctgaaggacgagctgcagctgtacggcgacgcccccggcgaggtggtgcccagcggcgagagcggcctgagaagaagaggcagcgaccccgccagcggcgaggtggaggccagccagctgagaagactgaacatcaagaaggacgacgagttcttccacttcgtgctgctgtgcttcgccatcggcgccctgctggtgtgctaccactactacgccgactggttcatgagcctgggcgtgggcctgctgaccttcgccagcctggagaccgtgggcatctacttcggcctggtgtacagaatccacagcgtgctgcagggcttcatccccctgttccagaagttcagactgaccggcttcagaaagaccgactag

SEQ ID NO: 197727 - DNA, 702 bp, Artificial Sequence
  derived and/or modified sequence
atggagaccagcgcaagtagcagtcaaccacaggataatagccaggtgcatagagagactgaggatgtcgattacggcgaaacagacttccataaacaggacggaaaagccgggctcttttcccaagagcagtatgaacgcaataaaagctcatcttccagttcctctagcagctcaagtagcagttcaagttcatcatccagctcatccgagagcaatgacgaagatcagcagccccgcgccacgggaaagcacaggcgatcactgggggccgggtacccgcacggtaacggctctcctggtcccggacacggcgagccagacgttctcaaggacgagctccaattatatggagacgcaccgggcgaggttgtgccctcaggggaatctggcctcagacggcgtggcagcgacccagccagcggggaggtggaagcatcccagcttagacggctgaacattaagaaagacgacgagttctttcacttcgtcctgctgtgttttgctattggagccctgttggtgtgttatcattactatgctgattggtttatgagcttgggtgtgggactcctaacttttgcttctctcgagaccgtggggatctactttggcttggtataccgcatccattctgttctgcagggattcatccctctctttcagaagttccgcctgactgggttccgcaaaacagattag

SEQ ID NO: 197728 - DNA, 702 bp, Artificial Sequence
  derived and/or modified sequence
atggagacttccgctagttctagccagcctcaggacaacagtcaggtgcatcgcgagacggaggacgtggactatggcgagacagacttccacaaacaggacgggaaggcaggtctgttttcgcaggaacagtacgaacggaacaaatccagcagcagcagcagttcttctagttcctcttcatcctcatctagttcctcttcaagttctgagagtaacgatgaggaccagcagccgcgcgctactgggaaacatcgcaggagcttgggggccggttatccacatgggaatggttcaccggggcctggccatggcgagccggacgtgttgaaggacgagctccagctgtacggggacgcacccggcgaagttgtcccctccggagaaagtgggctcaggcgcagaggtagcgatcctgcctctggcgaagtagaagcatcgcagttgcgtagacttaacatcaaaaaagacgatgagtttttccacttcgtgttgctatgtttcgcaatcggggcactcctggtctgctatcattactacgccgactggttcatgtctttgggagtcgggctactgacattcgcctccttggagaccgtgggcatttacttcggactggtctaccggatccactcagtgctgcaggggttcattcctctgttccaaaagttccggctcacaggattccggaaaaccgattag

SEQ ID NO: 197729 - DNA, 702 bp, Artificial Sequence
  derived and/or modified sequence
atggagaccagcgccagcagcagccagccccaggacaacagccaggtgcaccgggagacagaagatgtggactatggagaaacagacttccacaagcaggacggcaaggccggcctcttcagccaggagcagtatgaaagaaacaagagcagcagcagcagcagcagcagcagcagcagcagcagcagcagcagcagcagcagcagcagcgagagcaatgatgaggaccagcagccccgggccaccgggaagcaccggcgcagcctgggcgccggctacccccatggaaatggcagccctggccctggccacggggagccagatgtgctgaaggatgagctgcagctgtatggagatgcccctggagaggtggtgcccagcggggagagcggcctgcggcggcggggcagtgaccctgccagcggggaggtggaggccagccagctgcggcggctgaacatcaagaaggatgatgagttcttccactttgtgctgctgtgctttgccatcggggccctgctggtgtgctaccactactatgctgactggttcatgagcctgggcgtgggcctgctgacctttgccagcctggagaccgtgggcatctacttcggcctggtgtaccgcatccacagcgtgctgcagggcttcatccccctcttccagaagttccggctgaccggcttcaggaagacagactag

SEQ ID NO: 197730 - DNA, 702 bp, Artificial Sequence
  derived and/or modified sequence
atggagaccagcgccagcagcagccagccccaggacaacagccaggtgcatcgagagacagaagacgtggactacggggagaccgacttccataagcaagacgggaaggctggacttttttctcaggaacaatacgagagaaacaagagcagtagttcttcatcgtcttcaagcagctcttcctcgagctcttccagctccagctcttccgaaagcaacgatgaggatcagcagccgagggcgaccgggaaacacaggaggtctcttggcgcggggtacccccatgggaatggatccccaggcccaggacacggggaaccagatgtcctcaaagatgagcttcaactgtacggtgacgctcctggcgaggttgtaccgagtggcgaatcagggctgcgccgtaggggctccgaccctgcctccggtgaagtcgaagcgtcacagctgagaagattgaatatcaaaaaagatgatgagttttttcattttgtgcttctatgctttgcaattggtgccctgctggtctgttatcactattatgcggattggttcatgtctctcggagtcggattgttaaccttcgcttctctggagactgtgggaatatatttcggcctggtttatagaatccactccgtgctgcagggattcatacccttgttccagaagttccgcttgaccggattcagaaaaaccgattag

SEQ ID NO: 197731 - DNA, 702 bp, Artificial Sequence
  derived and/or modified sequence
atggagaccagcgccagcagcagccagccccaggacaacagccaggtccaccgtgagaccgaggatgtcgactacggtgagacagacttccacaaacaagatggaaaggccggtctgttctcccaagagcagtatgagagaaataagagttccagctcctcctcctcgagcagctctagctcctcttcttcatccagctcaagctcttctgagagtaacgatgaagaccagcaaccacgggccaccgggaagcaccggaggtctcttggagcagggtaccctcatggaaacggctcgccaggccctggacatggggaacccgatgtcctgaaggatgagctccaactctatggagatgctcctggtgaggtggttccttccggagaaagcgggcttcgccgaagggggtcagatcctgcgagcggtgaagttgaggcatcacagctccgacgcctgaacatcaagaaggacgacgagttttttcactttgtcctgttgtgcttcgctatcggagcccttctggtttgctaccattattatgccgattggtttatgtcactcggtgtgggcctgctcactttcgcctcactggaaacagttgggatatacttcggattggtttaccggatccattccgttctgcagggatttattccactctttcagaagttccggctaacagggttcagaaaaacagactag

SEQ ID NO: 197732 - DNA, 702 bp, Artificial Sequence
  derived and/or modified sequence
atggagactagcgcgtcatcaagccaaccacaggacaattcacaagtccacagggagacagaagatgtggactacggggaaaccgactttcataagcaagatgggaaggccggactgtttagccaggagcagtatgagcgcaataaatcctctagcagttcgagtagctcttcttcaagttcctcctcttctagctcttccagtagttctgaatctaatgacgaagatcagcaaccaagagccaccggcaagcatagacgttcgctgggcgctgggtaccctcacgggaatggaagccccggacccggacatggcgaaccagatgttctgaaggacgagttgcaactctatggggatgcccctggtgaagtcgtgccctcaggcgagtctggactgcggaggcgaggaagcgatcctgcctcgggtgaagtcgaggcctcccagcttcggagactgaatataaaaaaagacgacgaatttttccatttcgtgctgctgtgcttcgccatcggcgctcttctggtatgttaccactattacgcggattggttcatgtctctcggcgtgggcttgctgacttttgcgtcgctcgagactgtggggatatactttgggctggtgtaccgcattcactccgtccttcagggcttcattcctttgttccagaaatttcgactcaccggatttcgtaagacagactag

SEQ ID NO: 197733 - DNA, 702 bp, Artificial Sequence
  derived and/or modified sequence
atggagacgagcgcctcctcaagccagccccaggataactcccaggtgcacagggaaacagaagatgtcgattatggggaaacagacttccacaagcaagatgggaaggctggtctcttttcacaagaacagtacgaaaggaataagtcaagttcctcctcaagctcttcaagcagctctagctccagcagcagcagcagtagtagtagcgaatccaatgatgaggaccagcagcccagggccaccggcaagcaccgacgctctttgggagccggttacccccatggaaacggtagtcctggtccaggacacggggaacccgacgttttgaaagacgagctccagctgtatggcgatgctcccggagaagtggtcccgtcaggggagtccggtctcaggcggagaggttcagaccctgcctccggcgaggtagaggccagtcagctgagacgactgaacatcaagaaggacgatgaattctttcattttgtcctgctttgcttcgcgatcggagccctcctggtgtgctaccactactatgccgattggtttatgagtctcggcgtcggactgctcactttcgcatcattggagactgtgggtatttatttcggcctcgtctataggatacattctgtgcttcagggtttcatcccccttttccagaaattcagattgaccgggttccgcaagacggattag

SEQ ID NO: 197734 - protein, 618 aa, Artificial Sequence
  derived and/or modified sequence
MKKDVRILLVGEPRVGKTSLIMSLVSEEFPEEVPPRAEEITIPADVTPERVPTHIVDYSEAEQSDEQLHQEISQANVICIVYAVNNKHSIDKVTSRWIPLINERTDKDSRLPLILVGNKSDLVEYSSMETILPIMNQYTEIETCVECSAKNLKNISELFYYAQKAVLHPTGPLYCPEEKEMKPACIKALTRIFKISDQDNDGTLNDAELNFFQRICFNTPLAPQALEDVKNVVRKHISDGVADSGLTLKGFLFLHTLFIQRGRHETTWTVLRRFGYDDDLDLTPEYLFPLLKIPPDCTTELNHHAYLFLQSTFDKHDLDRDCALSPDELKDLFKVFPYIPWGPDVNNTVCTNERGWITYQGFLSQWTLTTYLDVQRCLEYLGYLGYSILTEQESQASAVTVTRDKKIDLQKKQTQRNVFRCNVIGVKNCGKSGVLQALLGRNLMRQKKIREDHKSYYAINTVYVYGQEKYLLLHDISESEFLTEAEIICDVVCLVYDVSNPKSFEYCARIFKQHFMDSRIPCLIVAAKSDLHEVKQEYSISPTDFCRKHKMPPPQAFTCNTADAPSKDIFVKLTTMAMYPHVTQADLKSSTFWLRASFGATVFAVLGFAMYKALLKQR

SEQ ID NO: 197735 - DNA, 1857 bp, Artificial Sequence
  derived and/or modified sequence
atgaagaaagacgtcagaatactgctggtgggagagccccgagtgggaaaaactagccttataatgagcctagtgtccgaggagttcccagaagaggtgccccctcgcgccgaggaaattacaattcctgccgacgttaccccagaacgggtgcccacccacatcgtggactatagtgaggcagagcagagtgatgagcaattacaccaggaaatttcccaggccaacgtaatatgcattgtctatgctgtaaataataaacattctatagacaaggtgacttctagatggatacctcttattaatgaaaggacagacaaggacagcagacttccgctgatcctggtagggaataagagtgacttagtcgaatattcttcaatggaaaccatacttccaattatgaaccagtacactgagattgagacttgtgtggaatgttctgctaagaacttaaagaacatctcggaactgttttactacgctcaaaaggcagtgctccaccctacaggccctctttattgtcccgaggagaaggagatgaagcccgcatgtatcaaagccctaacacgaatcttcaaaatttccgaccaggacaatgacggcaccttgaacgacgcggaacttaactttttccagagaatctgttttaataccccgctggcccctcaagcattggaggacgttaagaacgtggtgaggaaacatatctctgacggtgtggctgacagcggtctaactctgaaggggttcctgttcctgcatacactgtttatccaacgaggacgacacgaaacaacatggacggtgttacgacggttcggatacgatgatgatttggatctgacccccgagtatttattcccccttttgaaaatcccgcccgactgtacgactgaacttaaccaccacgcttatctgttcctacagagtacatttgacaaacatgacctcgatagagattgcgccttatcccccgacgaattgaaagatctctttaaggtctttccgtatattccttggggaccggacgtgaacaacacagtgtgcacaaacgagagggggtggattacctatcaagggtttctctcacagtggacacttaccacctatctggatgtgcagcgttgtctggagtaccttggctacctaggctactctatccttacagaacaggagagccaagccagtgctgtgactgtgacccgcgacaaaaaaattgacctccagaagaagcaaacccaaaggaatgttttccgatgtaatgtgattggtgtgaagaactgtggtaagagtggcgtgctgcaggctctccttggccgcaacctgatgcggcaaaagaagattagggaggatcacaagtcttattacgccatcaacaccgtgtacgtttacgggcaggaaaaatacttattattgcatgatatttctgagagcgaatttcttacagaagccgagatcatttgtgatgtagtgtgtctggtctatgacgtttccaacccaaaaagctttgaatactgtgctagaatcttcaaacagcattttatggactcgaggattccgtgtttaatcgtagctgcaaaatccgatttgcatgaagtgaaacaggagtacagcatatcccccaccgacttctgcagaaagcataagatgccacccccccaggccttcacctgtaacaccgcggacgccccctccaaggacatcttcgtaaagctcacgacaatggcaatgtatccacatgttacccaggccgatctgaagtcttccacattctggttaagagcctctttcggtgctactgtatttgctgtactaggctttgccatgtacaaagcgcttctcaagcagagatag

SEQ ID NO: 197736 - DNA, 744 bp, Artificial Sequence
  derived and/or modified sequence
atgaaaaaggacgtgaggatcctgctggttggagaaccgagagtgggcaagacctccctcataatgtctctggtgtcagaggaattccccgaggaggtgcctccaagggccgaagaaattaccatccctgctgacgtaacgcccgagagggtgccaacacatatcgtcgactattctgaggctgaacagtccgacgaacagctgcatcaggaaattagtcaagccaatgtgatttgcatcgtgtacgcggtgaacaataaacattctatcgataaggtcacatcgcgatggatacctctaattaacgagcggacagataaggactcacggctgcccctcatactagtgggtaataagtccgacctcgtagagtattctagcatggagacgattctgcccatcatgaatcagtacacggagatcgaaacatgtgtggaatgtagcgcaaagaacctaaagaatatctcagagcttttctattatgcccagaaggctgtcctgcacccaacaggtccgctgtactgccccgaggagaaagaaatgaagccggcctgcattaaggctcttacccgcattttcaaaatttcagaccaagataatgacggtaccctcaatgatgcagagctcaacttcttccaacggatttgtttcaacacgcctttggccccacgcttcggttttgagcaggttctggtgctgctgttcctccagttctgggcccttttatgcacgaaacattactag

SEQ ID NO: 197737 - DNA, 1857 bp, Artificial Sequence
  derived and/or modified sequence
atgaagaaggatgtgcgcatcctgctggtgggggagccccgggtgggcaagaccagcctcatcatgagcctggtgtctgaggagttccctgaggaggtgccccccagggctgaggagatcaccatcccagcagatgtgaccccagagcgggtgcccacccacatcgtggactacagcgaggccgagcagagtgatgagcagctgcaccaggagatcagccaggccaacgtcatctgcatcgtgtatgctgtgaacaacaagcacagcattgacaaggtgaccagccgctggatccccctcatcaatgaaagaacagacaaggacagccggctgcccctcatcctggtgggcaacaagagtgacctggtggagtacagctccatggagaccatcctgcccatcatgaaccagtacacagaaattgagacctgtgtggagtgcagcgccaagaacctgaagaacatcagcgagctgttctactatgcccagaaggctgtgctgcaccccaccggccccctgtactgcccagaggagaaggagatgaagccagcctgcatcaaggccctgacccgcatcttcaagatcagtgaccaggacaatgatggcaccctgaatgatgctgagctgaacttcttccagaggatctgcttcaacacccccctggccccccaggccctggaggatgtgaagaatgtggtgaggaagcacatcagtgatggagtggccgacagcggcctgaccctgaagggcttcctgttcctgcacaccctcttcatccagagaggaagacatgagaccacctggacagtgctgcggcgcttcggctatgatgatgacctggacctgaccccagagtacctgttccccctgctgaagatccccccagactgcaccacagagctgaaccaccacgcctacctgttcctgcagagcacctttgacaagcatgacctggaccgggactgtgccctgagcccagatgagctgaaggacctcttcaaggtgttcccctacatcccctggggcccagatgtgaacaacacagtgtgcaccaatgaaagaggctggatcacctaccagggcttcctgagccagtggaccctgaccacctacctggatgtgcagcgctgcctggagtacctgggctacctgggctacagcatcctgacagagcaggagagccaggccagcgctgtgacagtgacccgggacaagaagattgacctgcagaagaagcagacccagagaaatgtgttccgctgcaacgtcatcggcgtgaagaactgtgggaagagcggcgtgctgcaggccctgctgggcaggaacctgatgaggcagaagaagatccgggaggaccacaagagctactatgccatcaacacagtgtatgtgtatggccaggagaagtacctgctgctgcatgacatcagcgagagcgagttcctgacagaagctgagatcatctgtgatgtggtgtgcctggtgtatgatgtgagcaaccccaagagctttgagtactgtgcccgcatcttcaagcagcacttcatggacagccgcatcccctgcctgattgtggccgccaagagtgacctgcacgaggtgaagcaggagtacagcatcagccccacagacttctgcaggaagcacaagatgcccccaccccaggccttcacctgcaacacagcagatgcccccagcaaggacatctttgtgaagctgaccaccatggccatgtacccccacgtgacccaggccgacctgaagagcagcaccttctggctgcgggccagctttggagccaccgtgtttgctgtgctgggctttgccatgtacaaggccctgctgaagcagaggtag

SEQ ID NO: 197738 - DNA, 744 bp, Artificial Sequence
  derived and/or modified sequence
atgaagaaggatgtgcgcatcctgctggtgggggagccccgggtgggcaagaccagcctcatcatgagcctggtgtctgaggagttccctgaggaggtgccccccagggctgaggagatcaccatcccagcagatgtgaccccagagcgggtgcccacccacatcgtggactacagcgaggccgagcagagtgatgagcagctgcaccaggagatcagccaggccaacgtcatctgcatcgtgtatgctgtgaacaacaagcacagcattgacaaggtgaccagccgctggatccccctcatcaatgaaagaacagacaaggacagccggctgcccctcatcctggtgggcaacaagagtgacctggtggagtacagctccatggagaccatcctgcccatcatgaaccagtacacagaaattgagacctgtgtggagtgcagcgccaagaacctgaagaacatcagcgagctgttctactatgcccagaaggctgtgctgcaccccaccggccccctgtactgcccagaggagaaggagatgaagccagcctgcatcaaggccctgacccgcatcttcaagatcagtgaccaggacaatgatggcaccctgaatgatgctgagctgaacttcttccagaggatctgcttcaacacccccctggcccccaggtttggatttgagcaggtgctggtgctgctcttcctgcagttctgggccctgctgtgcaccaagcactactag

SEQ ID NO: 197739 - DNA, 1857 bp, Artificial Sequence
  derived and/or modified sequence
atgaagaaggacgtgcggatcctgctggtgggcgagccccgggtgggaaagacctccctgattatgtcgctggtctctgaggagtttcctgaggaggttcctcccagggccgaagagattacaatccctgccgacgtgacccctgagcgtgttcccacccacatcgtggactactccgaggccgagcagtcagatgaacaactgcatcaggagatctcccaagcaaatgttatctgtatcgtgtacgccgtgaacaataagcattcgatcgataaagtgaccagccggtggatccccttaatcaacgagagaaccgataaggactcccgcctccccctcattcttgtggggaacaaatctgatctggtggagtactcctcaatggagacgatcctgcccattatgaatcagtatactgaaatagagacctgtgtggagtgcagcgccaaaaacttgaagaatatcagcgagctgttctattatgcacagaaagccgtgctccatcctaccggccctctgtactgtcctgaggagaaagaaatgaaacccgcgtgcattaaagcgctcacccggatattcaagattagcgatcaggataatgacggaacgctgaacgacgcagagttgaactttttccagcggatttgtttcaataccccactggcacctcaggccttggaagacgtcaagaacgtggtgcgcaagcatatttccgacggggtcgcagatagtggactcaccctgaaggggtttctgtttcttcacaccctgttcattcaaagaggtcgacacgaaacaacgtggaccgtcctgagacggttcgggtacgacgacgacctagatctcactcccgaatatctctttccactgctcaagatccccccagattgtacaacagagctgaaccatcacgcctacctgtttcttcaatctactttcgataagcatgatctggaccgggactgcgccctgtctcccgacgaactgaaggacctctttaaagtgtttccatacattccctggggaccagatgtgaacaacaccgtgtgcacaaacgaacggggttggattacctatcagggattcctgtcacagtggaccctgaccacttatctagatgtacagagatgcctcgagtatttgggctatctgggctacagcattctgaccgaacaggaaagccaggcgtcggccgtgactgtgacgcgagacaaaaagattgatctccagaagaagcaaacacagaggaacgtctttcgatgcaacgtgattggggtgaaaaactgtggaaaaagcggcgtactgcaggctcttctgggtcgaaatcttatgaggcagaaaaagatccgggaagatcacaagagctactatgccataaatacagtatatgtttatgggcaggaaaaatatctgctgctccacgacattagtgaatcagagtttttgaccgaggccgaaataatttgtgatgtcgtatgcctggtgtacgatgtaagtaatcccaaatcatttgagtattgcgcacgaatcttcaaacagcacttcatggattcaaggatcccttgcctgattgttgcagctaaaagcgatttgcacgaggtgaaacaggaatactccatctctcccaccgacttctgtcgcaagcataagatgcctcccccccaggcttttacatgtaacaccgccgatgcaccctctaaggacatatttgtaaaactcacaacaatggccatgtacccccacgtgacacaagcggatttaaagtccagtaccttctggctgcgggcctcctttggggctacggtcttcgccgtgctgggcttcgcaatgtacaaagccctcctgaagcagcgctag

SEQ ID NO: 197740 - DNA, 744 bp, Artificial Sequence
  derived and/or modified sequence
atgaagaaggacgtgcggatcctgctggtgggcgagccccgggtgggaaaaacatctctgattatgtcgttagttagcgaagagttccctgaagaggtgcccccccgagccgaagagatcaccatccctgctgacgtaacacccgagcgcgtccccacgcacatcgtagactacagcgaggcggagcaaagtgacgaacagctgcaccaggaaattagtcaggcaaatgtcatttgcatcgtatatgccgtgaataacaagcattccatagacaaagtgacgtcccggtggatccctctgatcaacgagcggacggacaaggactctaggttacctttgatcctcgtcggcaataagtctgacctagtggagtactcctctatggagaccattctgcctatcatgaaccagtacacagaaattgaaacctgtgtggaatgctcagctaagaacctgaagaacatctctgagctcttttactatgcccagaaggcagtgcttcatcccactggtcctctctactgcccagaggagaaggaaatgaagcccgcttgcattaaggccttgaccaggatttttaaaatctcggatcaagacaacgatgggactctgaatgacgcagagcttaattttttccagcgaatctgttttaacacaccattggcaccaagatttgggttcgagcaggtgctagtgctgctgtttctgcagttttgggccctcctctgtactaaacactactag

SEQ ID NO: 197741 - DNA, 1857 bp, Artificial Sequence
  derived and/or modified sequence
atgaagaaggacgttcgtattctgcttgtcggcgagccccgtgttgggaagaccagcctcatcatgagcttagtgtccgaggagttccccgaagaggtgccacccagagcagaggaaatcacgatcccagccgatgtgacacccgaacgggtccctacccacatagttgactattccgaagcagagcagagtgacgagcagctgcaccaagaaatctctcaggcaaatgttatctgtattgtctacgctgtgaataataaacacagcattgataaggtcactagcagatggattccgctgatcaatgaacgtaccgataaggacagtagactccccctgattctcgtcgggaataagagcgatctcgtggagtatagctctatggagacaatcctaccaataatgaaccagtacacagagatcgaaacatgcgtggagtgcagcgccaaaaatcttaagaatatttctgagcttttctactacgctcagaaagccgtgctgcatccaacgggacccctatactgccccgaagagaaggagatgaagcctgcttgtatcaaagcacttacgagaatctttaagatcagcgatcaggacaacgatgggaccctgaatgatgccgaactcaacttttttcagcgcatctgctttaacacacctcttgctcctcaggctttagaagatgtgaagaatgtcgtcaggaagcatatctctgacggggtggctgattctgggctgacgctgaagggctttctgtttttgcatacattattcatccagcgaggcagacacgagacgacctggacagtacttcggaggttcggttacgatgatgaccttgatctcacacccgaatacctttttccgctgcttaaaatcccacccgattgcactacagagctcaatcatcacgcttatctatttctccaatcaacctttgataagcacgacttagatagagattgtgcactgtccccggacgaactgaaagacttgttcaaggtgtttccttatataccatggggcccagatgttaataacactgtgtgtacaaacgaacgtggttggattacctaccaggggttccttagccagtggacattaactacctacctggacgttcaacgctgcctggagtatctcgggtatttgggctactctatcctgaccgagcaggagtcccaggcctctgccgtgacggtaacccgggacaaaaaaatagatttgcaaaagaagcagacacagaggaatgtgttcaggtgtaacgtcattggagtgaagaactgcgggaagtcaggcgtgctgcaggcgctgctcggcagaaatctgatgcgccagaagaaaattcgagaagatcataagtcatattatgccattaacaccgtgtacgtctacggacaggagaagtacctccttcttcacgacatctccgaatccgaattcctgacagaagccgaaattatatgtgacgtagtatgtttggtgtacgacgttagtaaccctaaaagcttcgaatattgcgccagaatctttaagcaacacttcatggattcacggattccttgcctgattgtggcagcaaaaagcgatctgcacgaggtgaagcaggagtatagtatttcacccactgacttttgcaggaagcataagatgccaccaccacaggcctttacctgtaacacagccgacgcgccaagtaaagatatctttgtgaagcttaccacaatggcaatgtatcctcacgtcacgcaggccgaccttaaaagcagtaccttctggctccgggcttcttttggtgccactgtttttgctgtactgggcttcgctatgtataaggccctgctgaaacagcgatag

SEQ ID NO: 197742 - DNA, 744 bp, Artificial Sequence
  derived and/or modified sequence
atgaaaaaggacgtcaggatcctattagtgggtgagccgagagtgggaaagacaagtctgataatgtcacttgtctctgaggaatttccagaggaggtgccaccccgagccgaggaaataaccattcccgcagacgtgaccccagaacgggtgcccacacatatcgttgactatagcgaggccgagcagagcgatgagcagctgcaccaagaaattagccaggccaatgttatatgcattgtgtacgcagtgaacaataaacactccatcgataaggtgacatcgcggtggatacccctgataaacgaaaggacggataaggactcacgcctccctctcatcttagtggggaacaagagcgatctcgtcgagtactctagcatggaaaccatcttaccgattatgaaccaatacaccgagatcgagacctgcgtcgagtgttccgccaagaatctgaagaacatttcagagcttttttattatgcccagaaagccgttcttcaccccacaggacccttgtactgccctgaggaaaaagagatgaaacccgcatgcatcaaagcccttaccagaatctttaagatctcagatcaagacaatgacggtacgctgaacgacgcagagctgaactttttccaaaggatctgttttaacacaccactggcccctcgtttcggctttgaacaggtgttagtgctgctctttttgcagttctgggctctgctgtgcaccaagcattattag

SEQ ID NO: 197743 - DNA, 3090 bp, Artificial Sequence
  derived and/or modified sequence
gccgccgccgccgccgccgccgccgccgccgccgccgccgccgccgccacagcccgctgggccggaggaggcggagctggcgctgtcccggctctcttgcggggaagcaactgagggggcggcgcggcgggccccggcggccgaagaggctggcaggtggcgccgtggggtgggtgctcctggtgagaggagtccactccgtgcgtgcgggcggaggccggcccccgagagccgccgacatgaagaaagacgtgcggatcctgctggtgggagaacctagagttgggaagacatcactgattatgtctctggtcagtgaagaatttccagaagaggttcctccccgggcagaagaaatcaccattccagctgatgtcaccccagagagagttccaacacacattgtagattactcagaagcagaacagagtgatgaacaacttcatcaagaaatatctcaggctaatgtcatctgtatagtgtatgccgttaacaacaagcattctattgataaggtaacaagtcgatggattcctctcataaatgaaagaacagacaaagacagcaggctgcctttaatattggttgggaacaaatctgatctggtggaatatagtagtatggagaccatccttcctattatgaaccagtatacagaaatagaaacctgtgtggagtgttcagcgaaaaacctgaagaacatatcagagctcttttattacgcacagaaagctgttcttcatcctacagggcccctgtactgcccagaggagaaggagatgaaaccagcttgtataaaagcccttactcgtatatttaaaatatctgatcaagataatgatggtactctcaatgatgctgaactcaacttctttcagaggatttgtttcaacactccattagctcctcaagctctggaggatgtcaagaatgtagtcagaaaacatataagtgatggtgtggctgacagtgggttgaccctgaaaggttttctctttttacacacactttttatccagagagggagacacgaaactacttggactgtgcttcgacgatttggttatgatgatgacctggatttgacacctgaatatttgttccccctgctgaaaatacctcctgattgcactactgaattaaatcatcatgcatatttatttctccaaagcacctttgacaagcatgatttggatagagactgtgctttgtcacctgatgagcttaaagatttatttaaagttttcccttacataccttgggggccagatgtgaataacacagtttgtaccaatgaaagaggctggataacctaccagggattcctttcccagtggacgctcacgacttatttagatgtacagcggtgcctggaatatttgggctatctaggctattcaatattgactgagcaagagtctcaagcttcagctgttacagtgacaagagataaaaagatagacctgcagaaaaaacaaactcaaagaaatgtgttcagatgtaatgtaattggagtgaaaaactgtgggaaaagtggagttcttcaggctcttcttggaagaaacttaatgaggcagaagaaaattcgtgaagatcataaatcctactatgcgattaacactgtttatgtatatggacaagagaaatacttgttgttgcatgatatctcagaatcggaatttctaactgaagctgaaatcatttgtgatgttgtatgcctggtatatgatgtcagcaatcccaaatcctttgaatactgtgccaggatttttaagcaacactttatggacagcagaataccttgcttaatcgtagctgcaaagtcagacctgcatgaagttaaacaagaatacagtatttcacctactgatttctgcaggaaacacaaaatgcctccaccacaagccttcacttgcaatactgctgatgcccccagtaaggatatctttgttaaattgacaacaatggccatgtatccgcacgtgacacaagctgacctcaagagctccacgttttggcttcgagcaagttttggtgctactgtttttgcagttttgggctttgctatgtacaaagcattattgaaacagcgatgatataaaaagaaatactgtccctaccaaaaacaaatacttttatgtacattctgaatgctttaagttctgctagaattattgagatatttatacatgcagagttactttattaatatttgtaattcatgcataagagtattttaatgatagttataactgcagtattggctagcatatggaaagaaaacagctaacagccaaactaaaatggctaaattccagaggccaaaagggaatattttgtaaatatatgtacatattcaggcaagatatggtctcccaagctgagttctagaaatgatgtttctagacatttctaagtggtattgttagtgctcacttggctcactcttctaggtttaagttagcccagagattgtatttactcatggatcactttatttatttcacatttactcagaatgatcctttgggttctataaggacataaggtacaatttgccattgtctctccatttttaaaaacatacaagtcagtgtcagcttaccaacatgacattttttcagtcagttgtggtaggccagccttgaagccatcgcacagtctagaaacttgtgtagctgagtgtgcagctcacctttaagggtgaagttaggtaaaagcaattagcagaggcgttatctatgtgattatgttgcttccttgtcagtatgttgaattttatagccctttcaatgaaataaaaaaaaaatttgtatattaccaatgtttttagtttaaataaagagtcacccttactactgttgaatttcatcccaagtgtaaatcattctataatggctgtgtctgttatagtatattacagtaactgcatgtgtcaccaagtgttctatatcaggctaggataacctagaggcagtaattttttaaatgataaaataaatctaatgaatataaactctcatgataaacctattttttccatcatcagccttttcaagtatttaaataaataactgctgtgtactgtga

SEQ ID NO: 197744 - DNA, 983 bp, Artificial Sequence
  derived and/or modified sequence
gccgccgccgccgccgccgccgccgccgccgccgccgccgccgccgccacagcccgctgggccggaggaggcggagctggcgctgtcccggctctcttgcggggaagcaactgagggggcggcgcggcgggccccggcggccgaagaggctggcaggtggcgccgtggggtgggtgctcctggtgagaggagtccactccgtgcgtgcgggcggaggccggcccccgagagccgccgacatgaagaaagacgtgcggatcctgctggtgggagaacctagagttgggaagacatcactgattatgtctctggtcagtgaagaatttccagaagaggttcctccccgggcagaagaaatcaccattccagctgatgtcaccccagagagagttccaacacacattgtagattactcagaagcagaacagagtgatgaacaacttcatcaagaaatatctcaggctaatgtcatctgtatagtgtatgccgttaacaacaagcattctattgataaggtaacaagtcgatggattcctctcataaatgaaagaacagacaaagacagcaggctgcctttaatattggttgggaacaaatctgatctggtggaatatagtagtatggagaccatccttcctattatgaaccagtatacagaaatagaaacctgtgtggagtgttcagcgaaaaacctgaagaacatatcagagctcttttattacgcacagaaagctgttcttcatcctacagggcccctgtactgcccagaggagaaggagatgaaaccagcttgtataaaagcccttactcgtatatttaaaatatctgatcaagataatgatggtactctcaatgatgctgaactcaacttctttcagaggatttgtttcaacactccattagctccacgttttggcttcgagcaagttttggtgctactgtttttgcagttttgggctttgctatgtacaaagcattattga

SEQ ID NO: 197745 - DNA, 1857 bp, Artificial Sequence
  derived and/or modified sequence
atgaagaaggacgtgagaatcctgctggtgggcgagcccagagtgggcaagaccagcctgatcatgagcctggtgagcgaggagttccccgaggaggtgccccccagagccgaggagatcaccatccccgccgacgtgacccccgagagagtgcccacccacatcgtggactacagcgaggccgagcagagcgacgagcagctgcaccaggagatcagccaggccaacgtgatctgcatcgtgtacgccgtgaacaacaagcacagcatcgacaaggtgaccagcagatggatccccctgatcaacgagagaaccgacaaggacagcagactgcccctgatcctggtgggcaacaagagcgacctggtggagtacagcagcatggagaccatcctgcccatcatgaaccagtacaccgagatcgagacctgcgtggagtgcagcgccaagaacctgaagaacatcagcgagctgttctactacgcccagaaggccgtgctgcaccccaccggccccctgtactgccccgaggagaaggagatgaagcccgcctgcatcaaggccctgaccagaatcttcaagatcagcgaccaggacaacgacggcaccctgaacgacgccgagctgaacttcttccagagaatctgcttcaacacccccctggccccccaggccctggaggacgtgaagaacgtggtgagaaagcacatcagcgacggcgtggccgacagcggcctgaccctgaagggcttcctgttcctgcacaccctgttcatccagagaggcagacacgagaccacctggaccgtgctgagaagattcggctacgacgacgacctggacctgacccccgagtacctgttccccctgctgaagatcccccccgactgcaccaccgagctgaaccaccacgcctacctgttcctgcagagcaccttcgacaagcacgacctggacagagactgcgccctgagccccgacgagctgaaggacctgttcaaggtgttcccctacatcccctggggccccgacgtgaacaacaccgtgtgcaccaacgagagaggctggatcacctaccagggcttcctgagccagtggaccctgaccacctacctggacgtgcagagatgcctggagtacctgggctacctgggctacagcatcctgaccgagcaggagagccaggccagcgccgtgaccgtgaccagagacaagaagatcgacctgcagaagaagcagacccagagaaacgtgttcagatgcaacgtgatcggcgtgaagaactgcggcaagagcggcgtgctgcaggccctgctgggcagaaacctgatgagacagaagaagatcagagaggaccacaagagctactacgccatcaacaccgtgtacgtgtacggccaggagaagtacctgctgctgcacgacatcagcgagagcgagttcctgaccgaggccgagatcatctgcgacgtggtgtgcctggtgtacgacgtgagcaaccccaagagcttcgagtactgcgccagaatcttcaagcagcacttcatggacagcagaatcccctgcctgatcgtggccgccaagagcgacctgcacgaggtgaagcaggagtacagcatcagccccaccgacttctgcagaaagcacaagatgccccccccccaggccttcacctgcaacaccgccgacgcccccagcaaggacatcttcgtgaagctgaccaccatggccatgtacccccacgtgacccaggccgacctgaagagcagcaccttctggctgagagccagcttcggcgccaccgtgttcgccgtgctgggcttcgccatgtacaaggccctgctgaagcagagatag

SEQ ID NO: 197746 - DNA, 744 bp, Artificial Sequence
  derived and/or modified sequence
atgaagaaggacgtgagaatcctgctggtgggcgagcccagagtgggcaagaccagcctgatcatgagcctggtgagcgaggagttccccgaggaggtgccccccagagccgaggagatcaccatccccgccgacgtgacccccgagagagtgcccacccacatcgtggactacagcgaggccgagcagagcgacgagcagctgcaccaggagatcagccaggccaacgtgatctgcatcgtgtacgccgtgaacaacaagcacagcatcgacaaggtgaccagcagatggatccccctgatcaacgagagaaccgacaaggacagcagactgcccctgatcctggtgggcaacaagagcgacctggtggagtacagcagcatggagaccatcctgcccatcatgaaccagtacaccgagatcgagacctgcgtggagtgcagcgccaagaacctgaagaacatcagcgagctgttctactacgcccagaaggccgtgctgcaccccaccggccccctgtactgccccgaggagaaggagatgaagcccgcctgcatcaaggccctgaccagaatcttcaagatcagcgaccaggacaacgacggcaccctgaacgacgccgagctgaacttcttccagagaatctgcttcaacacccccctggcccccagattcggcttcgagcaggtgctggtgctgctgttcctgcagttctgggccctgctgtgcaccaagcactactag

SEQ ID NO: 197747 - protein, 419 aa, Artificial Sequence
  derived and/or modified sequence
MPGRGRCPDCGSTELVEDSHYSQSQLVCSDCGCVVTEGVLTTTFSDEGNLREVTYSRSTGENEQVSRSQQRGLRRVRDLCRVLQLPPTFEDTAVAYYQQAYRHSGIRAARLQKKEVLVGCCVLITCRQHNWPLTMGAICTLLYADLDVFSSTYMQIVKLLGLDVPSLCLAELVKTYCSSFKLFQASPSVPAKYVEDKEKMLSRTMQLVELANETWLVTGRHPLPVITAATFLAWQSLQPADRLSCSLARFCKLANVDLPYPASSRLQELLAVLLRMAEQLAWLRVLRLDKRSVVKHIGDLLQHRQSLVRSAFRDGTAEVETREKEPPGWGQGQGEGEVGNNSLGLPQGKRPASPALLLPPCMLKSPKRICPVPPVSTVTGDENISDSEIEQYLRTPQEVRDFQRAQAARQAATSVPNPP

SEQ ID NO: 197748 - protein, 396 aa, Artificial Sequence
  derived and/or modified sequence
MPGRGRCPDCVVTEGVLTTTFSDEGNLREVTYSRSTGENEQVSRSQQRGLRRVRDLCRVLQLPPTFEDTAVAYYQQAYRHSGIRAARLQKKEVLVGCCVLITCRQHNWPLTMGAICTLLYADLDVFSSTYMQIVKLLGLDVPSLCLAELVKTYCSSFKLFQASPSVPAKYVEDKEKMLSRTMQLVELANETWLVTGRHPLPVITAATFLAWQSLQPADRLSCSLARFCKLANVDLPYPASSRLQELLAVLLRMAEQLAWLRVLRLDKRSVVKHIGDLLQHRQSLVRSAFRDGTAEVETREKEPPGWGQGQGEGEVGNNSLGLPQGKRPASPALLLPPCMLKSPKRICPVPPVSTVTGDENISDSEIEQYLRTPQEVRDFQRAQAARQAATSVPNPP

SEQ ID NO: 197749 - DNA, 1260 bp, Artificial Sequence
  derived and/or modified sequence
atgcccggcagaggcagatgccccgactgcggcagcaccgagctggtggaggacagccactacagccagagccagctggtgtgcagcgactgcggctgcgtggtgaccgagggcgtgctgaccaccaccttcagcgacgagggcaacctgagagaggtgacctacagcagaagcaccggcgagaacgagcaggtgagcagaagccagcagagaggcctgagaagagtgagagacctgtgcagagtgctgcagctgccccccaccttcgaggacaccgccgtggcctactaccagcaggcctacagacacagcggcatcagagccgccagactgcagaagaaggaggtgctggtgggctgctgcgtgctgatcacctgcagacagcacaactggcccctgaccatgggcgccatctgcaccctgctgtacgccgacctggacgtgttcagcagcacctacatgcagatcgtgaagctgctgggcctggacgtgcccagcctgtgcctggccgagctggtgaagacctactgcagcagcttcaagctgttccaggccagccccagcgtgcccgccaagtacgtggaggacaaggagaagatgctgagcagaaccatgcagctggtggagctggccaacgagacctggctggtgaccggcagacaccccctgcccgtgatcaccgccgccaccttcctggcctggcagagcctgcagcccgccgacagactgagctgcagcctggccagattctgcaagctggccaacgtggacctgccctaccccgccagcagcagactgcaggagctgctggccgtgctgctgagaatggccgagcagctggcctggctgagagtgctgagactggacaagagaagcgtggtgaagcacatcggcgacctgctgcagcacagacagagcctggtgagaagcgccttcagagacggcaccgccgaggtggagaccagagagaaggagccccccggctggggccagggccagggcgagggcgaggtgggcaacaacagcctgggcctgccccagggcaagagacccgccagccccgccctgctgctgcccccctgcatgctgaagagccccaagagaatctgccccgtgccccccgtgagcaccgtgaccggcgacgagaacatcagcgacagcgagatcgagcagtacctgagaaccccccaggaggtgagagacttccagagagcccaggccgccagacaggccgccaccagcgtgcccaaccccccctag

SEQ ID NO: 197750 - DNA, 1260 bp, Artificial Sequence
  derived and/or modified sequence
atgcctgggcgaggccggtgtcccgactgcggatccacagagctggtggaagattctcactactcacagagccagctggtgtgcagtgattgtggttgtgttgtgacagaaggggtcctgacaactacctttagcgatgaggggaatttacgggaggtcacttactccagatccaccggcgaaaatgagcaggtcagccgtagtcagcagaggggactgagacgggtcagggacctgtgtcgggtgctgcagctgcctccgacgtttgaagacacagctgttgcatactaccagcaagcgtatcggcattctggcattagagctgcccgccttcagaaaaaagaagtgctggtgggttgctgtgtgctaatcacctgtagacagcacaattggcctctgacaatgggtgccatctgtacgctgttatatgcagacttagacgtctttagttctacctacatgcagatcgttaagcttctaggtctcgatgtaccctctctgtgtctggctgagcttgttaagacatattgtagcagtttcaagctgttccaggcttcaccgtccgtgccagctaaatatgtggaggacaaagagaagatgcttagcagaactatgcagcttgtcgagctcgccaatgagacctggctggtgacaggccggcacccacttccagtgatcaccgcggcgaccttcctcgcctggcagtccttgcagcccgccgatagactgtcttgtagtctggctagattctgcaaactagctaacgtagacctgccgtaccccgccagtagtcgtttgcaggagcttctggccgttctgctgagaatggccgagcaattggcctggcttagagtactgagactggataaaaggtccgtggtcaagcacataggcgacctactgcagcataggcagagcttggtccggtctgcattccgggatggcaccgcagaggtagagacccgtgagaaggagccacctgggtgggggcaggggcaaggagagggggaagtggggaataatagcttaggcctaccccaggggaagagacccgcctcacctgcactgcttctccctccctgtatgctgaagtctcccaagaggatctgccctgtgccccccgtgtctaccgtgactggcgacgagaacatttccgacagcgaaattgaacaatatctgagaactccacaagaagttagagacttccaacgtgctcaggccgcaagacaagctgctacttccgtcccaaatcctccgtag

SEQ ID NO: 197751 - DNA, 1260 bp, Artificial Sequence
  derived and/or modified sequence
atgcctggccggggccgctgcccagactgtggcagcacagagctggtggaggacagccactacagccagagccagctggtgtgcagcgactgtggctgtgtggtgacagagggcgtgctgaccaccaccttcagtgatgagggcaacctgcgggaggtgacctacagccgcagcactggagaaaatgagcaggtgagccgcagccagcagaggggcctgcggcgggtgcgggacctgtgccgggtgctgcagctgccccccacctttgaggacacagctgtggcctactaccagcaggcctaccgccacagcggcatccgggccgcccggctgcagaagaaggaggtgctggtgggctgctgcgtgctgatcacctgccggcagcacaactggcccctgaccatgggcgccatctgcaccctgctgtatgctgacctggatgtgttcagcagcacctacatgcagatcgtgaagctgctgggcctggatgtgcccagcctgtgcctggccgagctggtgaagacctactgcagcagcttcaagctgttccaggccagccccagcgtgcctgccaagtatgtggaggacaaggagaagatgctgagcaggaccatgcagctggtggagctggccaatgagacctggctggtgacaggccgccaccccctgcccgtcatcacagctgccaccttcctggcctggcagagcctgcagcctgctgaccggctgagctgcagcctggcccgcttctgcaagctggccaacgtggacctgccctacccagccagcagccggctgcaggagctgctggccgtgctgctgaggatggccgagcagctggcctggctgcgggtgctgcggctggacaagaggtctgtggtgaagcacatcggggacctgctgcagcaccggcagagcctggtgcgcagcgccttcagagatggaacagctgaggtggagacccgggagaaggagcccccaggctggggccagggccagggcgagggggaggtgggcaacaacagcctgggcctgccccagggcaagaggcctgccagccctgccctgctgctgcccccctgcatgctgaagagccccaagaggatctgccctgtgccccctgtgtccacagtgactggagatgagaacatcagtgacagcgagattgagcagtacctgcggaccccccaggaggtgcgggacttccagagggcccaggccgcccggcaggccgccacctctgtgcccaaccccccatag

SEQ ID NO: 197752 - DNA, 1260 bp, Artificial Sequence
  derived and/or modified sequence
atgcccggccggggccggtgccccgactgcggcagcaccgagctggtcgaggatagccactactcccagtcacaattagtgtgcagtgactgcggctgtgtcgtgacagagggcgtgctcaccaccactttcagcgacgaaggtaaccttagagaagtgacctactccagatctacgggcgagaacgagcaagtgtcccggtcacaacagaggggattacgccgggtgagggatctgtgtcgggtgctgcagcttcccccaaccttcgaggataccgcagtcgcttactaccagcaggcctaccgccattcaggtataagagccgcaaggttgcagaaaaaagaggtgctcgtgggctgttgtgtcctgatcacatgtcggcagcacaattggcccctcacaatgggtgccatttgcacactgctctatgcggatttggacgtattcagcagtacctacatgcaaattgtcaagcttttgggccttgacgtgcccagtctctgtttagccgagctggtcaagacatattgtagttccttcaagctctttcaggctagcccctcggtgcccgctaaatatgtggaggataaggagaagatgctctctaggaccatgcaactggtggagttggcaaatgagacctggctggtgacgggaaggcatcccttaccagtaatcacggctgcgacctttctggcctggcagagtttgcagcctgctgacaggctgtcatgcagtctggcaagattttgtaagctggctaatgttgacttgccctatcccgcttcttcacggttacaggaactgttggcggtactactgcgcatggccgagcagcttgcatggctgagggtgctccgcttggataagaggagcgtagttaagcacatcggtgatttacttcagcatagacagtcacttgtccgctcggcgttccgcgatggcaccgccgaagttgaaactcgtgaaaaagaaccgcccgggtgggggcagggccagggggagggagaagtcgggaataattccttgggattgccccaggggaaacggcccgcgtcaccagctctgttacttccgccatgtatgcttaagtcacctaaaagaatttgccccgtgccgcctgtgtcaaccgtgaccggagacgaaaatatctcggatagcgagatcgagcagtatctgagaacaccgcaggaagtgagagatttccagagagcacaggccgcccgacaagctgctactagcgtgccaaatccaccatag

SEQ ID NO: 197753 - DNA, 1260 bp, Artificial Sequence
  derived and/or modified sequence
atgcccggtcgaggcaggtgccctgattgtggttccaccgagcttgttgaagatagtcattattcacagtctcaactggtctgttctgactgtggatgcgtggtcacagaaggggtccttactacgactttctcagacgaggggaatctgcgggaagtgacctatagccgtagtacgggcgagaacgagcaagtgagcagatctcagcagagaggcctccggcgagtgcgcgatctctgccgagtgttacagcttccacctaccttcgaggacacagccgtggcctactatcaacaggcgtaccgtcactcggggatccgggctgctagacttcaaaagaaggaggtccttgtgggctgttgcgtactgatcacctgtcgccaacacaactggcctctgaccatgggagcaatttgtaccctgctatacgctgatctggatgttttctcctcaacctatatgcagatcgtgaagctcctagggcttgatgtgccaagcctgtgcctggcggaactggtcaaaacctattgttcttcgttcaagctgttccaggcttccccttctgtgccggcaaagtatgtggaagacaaagagaagatgctgtcccgaacaatgcaactcgtcgagcttgctaacgagacctggctcgtcactggacgacaccctctgcctgtgattaccgccgcaacattcttggcctggcagagcctacagccagccgaccggctaagctgttcattagcacgtttttgcaagttagccaacgtcgacttgccataccctgcctcatctcggcttcaggaactgttggccgtcctgcttcggatggcagaacaactggcctggttaagggtgctcaggctggacaagagaagcgtggtcaagcatatcggtgatttactgcagcataggcagagcctcgttcgttctgccttcagggatgggactgcagaggtcgagacaagggagaaagagccgcctggatggggccaggggcagggcgaaggggaggtcggcaataattctctggggctgccccaaggaaagaggccagcctcccccgctctgctcctgcctccctgtatgctcaagagcccgaagcggatttgccctgtgccacccgtgagcacagttacgggcgacgaaaatatctcagactccgagatcgagcagtacttaaggaccccccaagaggttagagatttccaacgtgcgcaggccgctagacaggcggctacctctgtccccaatcctccctag

SEQ ID NO: 197754 - DNA, 1191 bp, Artificial Sequence
  derived and/or modified sequence
atgccgggtcggggacgctgtcccgactgcgtcgtgacagagggtgtcttaacaacaacctttagtgatgagggaaatctgagagaagtcacctactcgaggagcaccggcgagaatgagcaggtgtctcgatcccagcagcgaggcctgcgcagggtgagagatctgtgccgcgtgctgcagctgcctcctaccttcgaggacaccgccgtggcgtattatcagcaagcctatagacactctggaatccgggcagcgagactccagaagaaggaggtgttagtgggatgttgtgtcttgattacctgtagacaacacaattggcccctgacaatgggagccatctgcacattgttgtatgccgacctggatgtgttcagcagcacatacatgcagatcgtaaaactgctggggctggacgtaccgtccctttgcttggccgagctggtcaaaacatattgcagtagtttcaagctgttccaggccagcccaagtgttcctgcaaaatatgtggaggacaaggagaagatgctatcgcgcaccatgcagctggtggagctcgccaacgagacctggctcgtcacaggacgccatccactgcccgtgatcaccgctgccacgtttcttgcttggcagtcgctgcagcctgcggatcggctgtcctgtagtctcgctaggttttgtaaattggcaaatgttgatctcccctaccccgctagcagcagactgcaggagctcctcgccgtgctcctccgaatggcggagcaattagcttggctccgggtgctgaggctggacaaacgctctgtggtgaagcatataggagatttgcttcagcatcgtcagtctctcgtcaggtccgcctttcgggatgggaccgcagaagtggagacgagggagaaggaaccccccggctggggacagggccagggcgaaggggaggtggggaataactcccttggactgcctcaaggtaaacgccccgctagtcctgccttgcttcttccaccctgcatgctgaaatcacccaaaaggatctgtccagtgccacccgtctccactgtgacaggcgacgaaaacatctcagattccgagattgagcagtacctgcgcacgcctcaggaggtgagagatttccagcgcgcacaagccgcaaggcaggcagcgacgagcgtgcctaaccccccttag

SEQ ID NO: 197755 - DNA, 1191 bp, Artificial Sequence
  derived and/or modified sequence
atgcctggccggggccgctgcccagactgtgtggtgacagaaggagtgctgaccaccaccttcagtgatgagggcaacctgcgggaggtgacctacagccgcagcactggagaaaatgagcaggtgagccgcagccagcagaggggcctgcggcgggtgcgggacctgtgccgggtgctgcagctgccccccacctttgaggacacagctgtggcctactaccagcaggcctaccgccacagcggcatccgggccgcccggctgcagaagaaggaggtgctggtgggctgctgcgtgctgatcacctgccggcagcacaactggcccctgaccatgggcgccatctgcaccctgctgtatgctgacctggatgtgttcagcagcacctacatgcagatcgtgaagctgctgggcctggatgtgcccagcctgtgcctggccgagctggtgaagacctactgcagcagcttcaagctgttccaggccagccccagcgtgcctgccaagtatgtggaggacaaggagaagatgctgagcaggaccatgcagctggtggagctggccaatgagacctggctggtgacaggccgccaccccctgcctgtgatcacagctgccaccttcctggcctggcagagcctgcagcctgctgaccggctgagctgcagcctggcccgcttctgcaagctggccaacgtggacctgccctacccagccagcagccggctgcaggagctgctggccgtgctgctgaggatggccgagcagctggcctggctgcgggtgctgcggctggacaagaggtctgtggtgaagcacatcggggacctgctgcagcaccggcagagcctggtgcgcagcgccttcagagatggaacagctgaggtggagacccgggagaaggagcccccaggctggggccagggccagggcgagggggaggtgggcaacaacagcctgggcctgccccagggcaagaggcctgccagccctgccctgctgctgcccccctgcatgctgaagagccccaagaggatctgccctgtgccccctgtgtccacagtgactggagatgagaacatcagtgacagcgagattgagcagtacctgcggaccccccaggaggtgcgggacttccagagggcccaggccgcccggcaggccgccacctctgtgcccaaccccccatag

SEQ ID NO: 197756 - DNA, 1191 bp, Artificial Sequence
  derived and/or modified sequence
atgcccggccggggccggtgccccgactgcgtggtgaccgagggcgttctcacaacgacattcagtgatgaaggcaacctgcgcgaggttacttactcccgctcaacaggcgagaatgagcaggtttcacgaagtcagcagagaggtttgcgccgcgtgagggatctgtgtagagtgctgcagctgcctcccactttcgaggataccgccgtagcctactatcagcaggcctaccgacattccgggatccgtgccgcgaggttacaaaaaaaggaggtgctagtggggtgttgtgtgcttattacttgcagacagcacaattggcccctaaccatgggcgcaatttgcacacttttgtatgccgatctggatgtattctcctccacatatatgcaaatcgtgaaattgttgggtctggatgtgccctccctgtgcctggctgaattggtgaagacatactgctcatccttcaagctttttcaggcaagcccctccgtccccgcgaagtacgtggaggacaaggaaaagatgctctcacgcacgatgcagcttgtcgaactagcaaacgagacttggctggtcacaggccgtcaccccctgccagttatcactgccgcaaccttccttgcttggcaatccctgcaacccgcagataggctgagctgctcactggcacggttttgcaaactggcaaatgtggatcttccctatcccgcatcatccaggttgcaggagctgctcgctgttttactgaggatggccgaacaactggcatggctcagggtcctacgcctggataaaaggagcgttgtgaaacacattggcgatctgctccaacacaggcagtctctcgtgcgctccgctttccgggacggtacagccgaggtggagacgcgggagaaagaacccccgggctgggggcagggtcagggcgagggcgaagtcgggaataattccctgggactcccacagggtaaaagacctgccagccccgcgctcctcttaccaccatgcatgctcaagtccccaaagcggatttgtcccgtgcccccagtctcgaccgtgacaggagacgagaacatctctgattcagagatcgagcagtacctgaggacacctcaagaggtgcgggattttcagagggcccaagccgctcggcaggcggccacatccgtgcctaacccaccctag

SEQ ID NO: 197757 - DNA, 1191 bp, Artificial Sequence
  derived and/or modified sequence
atgccaggtcgaggaaggtgcccagactgtgtggtgacagagggtgtcttgacaacaaccttcagcgacgagggcaacctgcgcgaggtaacgtactcgagaagcacaggagagaacgaacaggtgtcacgtagccagcagaggggcctgagaagggtcagagacctatgcagagttctgcagctgccacctaccttcgaggacaccgcagtggcctattaccaacaggcctataggcattcgggtatcagggctgctaggctccagaagaaagaggtgctagtggggtgctgcgtgttgattacctgccgacagcacaactggcctttaacgatgggcgctatttgcacactgctctacgccgacctggatgtgttctcttccacatatatgcagatcgtcaaactcctgggtcttgacgtcccctctctctgtctcgcggagttggtgaaaacttactgcagtagctttaagttgtttcaggcctccccaagtgttcctgctaaatacgtggaagacaaagagaagatgctgtctcgaacgatgcaactggtggagttagctaacgagacctggctcgttactggaagacaccccctacccgtcatcacagctgccacgttcttagcctggcagagcctacagccagctgatcgattgtcctgttctctggctaggttctgtaagctagccaatgtggacctgccttacccggctagcagtagacttcaggaacttctggccgtgctgttgcggatggccgaacagctggcatggcttagagtcctccgtctcgacaagcggtccgtggtcaaacacatcggcgatctgctgcaacacaggcagtccctggtccgctccgcatttcgggacgggacagccgaggtggaaacccgggaaaaggaaccacctggctggggtcagggtcagggcgagggtgaggtgggcaacaatagcctgggcctgccgcagggcaagcgcccagcctctccggctctgctcttgcctccctgcatgctgaaatcccccaaaaggatttgcccggtaccccctgtcagtaccgtgacaggggacgagaatatatcagattctgaaatcgaacagtacttgagaactccccaggaggtgagggattttcagagagctcaagccgcacgccaagcggcaacaagcgttcctaatccaccttag

SEQ ID NO: 197758 - DNA, 2603 bp, Artificial Sequence
  derived and/or modified sequence
tggccggaagacgggggtgcaaccctttgaagtgtcccctcctacttcttgctgcctcacggttgctgttgcagacccaggagtctctgaaggcttccgcggctttggggccggttgtgagatgccaggcagaggccgctgcccggactgcggctccacggagctggtggaagactcgcactattcgcagagccagctggtgtgctccgactgcggctgcgtggtcaccgagggggtccttaccactaccttcagcgacgagggcaatctccgagaggtaacatattcccgaagcacaggggaaaacgaacaagttagtcgcagccagcaacgaggtctccggcgagtgagagacctttgtcgagttctgcagttgccaccaacatttgaggataccgcggttgcctactaccaacaggcatatcggcactctggcatccgagcggccaggctgcaaaagaaggaggtgttggttgggtgctgcgtcttaatcacctgccgacagcataactggcccctaacaatgggggccatctgcacgctgttgtatgcagatttggatgtgttttctagcacttacatgcagatagtgaagctcctgggactggatgtgccatctctgtgcttggcagaactggtgaagacctattgcagcagcttcaaactgttccaagcttcaccttctgtgccagccaaatacgtggaagacaaagagaagatgctgtctcgaacaatgcagttggtggagctggcaaatgagacgtggctggtgaccgggaggcatcccttgcccgtcatcactgctgcgactttcctggcttggcagtcgctgcagcctgcagatcggctttcatgttcccttgcccgattttgtaaattggcaaatgtggacctgccctacccggcgtcctcccgcctgcaggagctgctggctgtgctgctgcggatggctgagcagctggcctggttacgagttctgagacttgacaaacggtctgtggtgaagcacatcggtgaccttctccagcaccgccagtcactggtccgctctgcctttcgggatgggacagcagaagtggagacccgagagaaggagccaccggggtggggacaggggcaaggagaaggggaggtgggaaataattccttaggtttaccccaggggaagcggccggccagtcctgcccttctcttgccaccctgcatgttgaagtccccgaagcggatctgccctgtaccccctgtctccactgtcactggagatgagaacatttctgatagtgaaatagaacagtatttgcgtacccctcaggaagttagggactttcagagagcccaggctgctagacaggctgccacgagtgtccctaaccctccctgatggatatccactgggagcacttcatcctgttctgacagcttgataacattcctgttataaccaaggatggaagtgtacaccagtccgtaggtattgcttttcttgtttgaaggaaccaagaggggctctgccattagttggaccctgggtcctggagtaaagtcaggagtgcagggatgactataggtaggagagattcccatcccttggtgtgggagagcaagttgcctatgtccatgttctgtgagatggctttcctcatagatggatgggaaaatgtcaggctctttgctgctggtttgaattggacacactgctgcggctcctcctgcaggcctgagggggcttccctctgcttgtggagtggttggcattcccagcagtatcaaccctcagaggagcgggaactggggaattctggccctacgtgcattcacaggcaatgatgggtttgtgtgtatggtgtcatgagatcctctacctcataacaaaaggacagtgggtagactaaggcagtagctcaaagggctttgcaaaattttaatatattaaaacaagaggcatctgctagaaaacattctattgtataaaacccgagttcttaaaaacatgttttctttggcactttcattccctccctcccctttccccagcatattgcaaaaagctctccagtgctaaggcattggcagggtgtgtaaacagcagccagcatatgtggaagaataatacaaagcttttttttttcttctaatatgtctgtgcagcaagcataaataacaggacccattccaaggagtgtgtgtgggttttccccctcccctgtgtcctctgtcaccttggtgatgaggccagagtgatgtgaagactgggagggaaccctaggtcagaccttggtttcctgttgttcttcccaagacccagggttccctcggtttccatttggtcctgtagtgaaatgctggtggttggttttaggttggggaaaagacgggtgctggtgtttaaaaggagtaaaggcataggcccctcatgacctgcagggaccccagccactgcctctgggcttggcttgagctcctgggagtcgggaagctggtttgacattttgtaggtttctctctactgtggagctggagatcaaatgattgggatggttcttcctctggccttacggaggcaaggaagtgctcttccttagtcccgtggtgttgtaaggctg

SEQ ID NO: 197759 - DNA, 1410 bp, Artificial Sequence
  derived and/or modified sequence
ctcccagcggagggaaccgcctatgcctccgtcgcgctggccggaagacgggggtgcaaccctttgaagtgtcccctcctacttcttgctgcctcacggttgctgttgcagacccaggagtctctgaaggcttccgcggctttggggccggttgtgagatgccaggcagaggccgctgcccggactgcgtggtcaccgagggggtccttaccactaccttcagcgacgagggcaatctccgagaggtaacatattcccgaagcacaggggaaaacgaacaagttagtcgcagccagcaacgaggtctccggcgagtgagagacctttgtcgagttctgcagttgccaccaacatttgaggataccgcggttgcctactaccaacaggcatatcggcactctggcatccgagcggccaggctgcaaaagaaggaggtgttggttgggtgctgcgtcttaatcacctgccgacagcataactggcccctaacaatgggggccatctgcacgctgttgtatgcagatttggatgtgttttctagcacttacatgcagatagtgaagctcctgggactggatgtgccatctctgtgcttggcagaactggtgaagacctattgcagcagcttcaaactgttccaagcttcaccttctgtgccagccaaatacgtggaagacaaagagaagatgctgtctcgaacaatgcagttggtggagctggcaaatgagacgtggctggtgaccgggaggcatcccttgcccgtcatcactgctgcgactttcctggcttggcagtcgctgcagcctgcagatcggctttcatgttcccttgcccgattttgtaaattggcaaatgtggacctgccctacccggcgtcctcccgcctgcaggagctgctggctgtgctgctgcggatggctgagcagctggcctggttacgagttctgagacttgacaaacggtctgtggtgaagcacatcggtgaccttctccagcaccgccagtcactggtccgctctgcctttcgggatgggacagcagaagtggagacccgagagaaggagccaccggggtggggacaggggcaaggagaaggggaggtgggaaataattccttaggtttaccccaggggaagcggccggccagtcctgcccttctcttgccaccctgcatgttgaagtccccgaagcggatctgccctgtaccccctgtctccactgtcactggagatgagaacatttctgatagtgaaatagaacagtatttgcgtacccctcaggaagttagggactttcagagagcccaggctgctagacaggctgccacgagtgtccctaaccctccctgatggatatccactgggagcacttcatcctgttctgacagcttgataacattcctgttataac

SEQ ID NO: 197760 - DNA, 1191 bp, Artificial Sequence
  derived and/or modified sequence
atgcccggcagaggcagatgccccgactgcgtggtgaccgagggcgtgctgaccaccaccttcagcgacgagggcaacctgagagaggtgacctacagcagaagcaccggcgagaacgagcaggtgagcagaagccagcagagaggcctgagaagagtgagagacctgtgcagagtgctgcagctgccccccaccttcgaggacaccgccgtggcctactaccagcaggcctacagacacagcggcatcagagccgccagactgcagaagaaggaggtgctggtgggctgctgcgtgctgatcacctgcagacagcacaactggcccctgaccatgggcgccatctgcaccctgctgtacgccgacctggacgtgttcagcagcacctacatgcagatcgtgaagctgctgggcctggacgtgcccagcctgtgcctggccgagctggtgaagacctactgcagcagcttcaagctgttccaggccagccccagcgtgcccgccaagtacgtggaggacaaggagaagatgctgagcagaaccatgcagctggtggagctggccaacgagacctggctggtgaccggcagacaccccctgcccgtgatcaccgccgccaccttcctggcctggcagagcctgcagcccgccgacagactgagctgcagcctggccagattctgcaagctggccaacgtggacctgccctaccccgccagcagcagactgcaggagctgctggccgtgctgctgagaatggccgagcagctggcctggctgagagtgctgagactggacaagagaagcgtggtgaagcacatcggcgacctgctgcagcacagacagagcctggtgagaagcgccttcagagacggcaccgccgaggtggagaccagagagaaggagccccccggctggggccagggccagggcgagggcgaggtgggcaacaacagcctgggcctgccccagggcaagagacccgccagccccgccctgctgctgcccccctgcatgctgaagagccccaagagaatctgccccgtgccccccgtgagcaccgtgaccggcgacgagaacatcagcgacagcgagatcgagcagtacctgagaaccccccaggaggtgagagacttccagagagcccaggccgccagacaggccgccaccagcgtgcccaaccccccctag

SEQ ID NO: 197761 - protein, 793 aa, Artificial Sequence
  derived and/or modified sequence
MFWKFDLHSSSHIDTLLEREDVTLKELMDEEDVLQECKAQNRKLIEFLLKAECLEDLVSFIIEEPPQDMDEKIRYKYPNISCELLTSDVSQMNDRLGEDESLLMKLYSFLLNDSPLNPLLASFFSKVLSILISRKPEQIVDFLKKKHDFVDLIIKHIGTSAIMDLLLRLLTCIEPPQPRQDVLNWLNEEKIIQRLVEIVHPSQEEDRHSNASQSLCEIVRLSRDQMLQIQNSTEPDPLLATLEKQEIIEQLLSNIFHKEKNESAIVSAIQILLTLLETRRPTFEGHIEICPPGMSHSACSVNKSVLEAIRGRLGSFHELLLEPPKNMFFKYTWNNFLHTQVEICIALILASPFENTENATITDQDSTGDNLLLKHLFQKCQLIERILEAWEMNEKKQAEGGRRHGYMGHLTRIANCIVHSTDKGPNSALVQQLIKDLPDEVRERWETFCTSSLGETNKRNTVDLAFSDYQMQQMTSNFIDQFGFNDEKFADQDDIGNVSFDRVSDINFTLNTNESGNIALFEACCKERIQQFDDGGSDEEDIWEEKHIAFTPESQRRSSSGSTDSEESTDSEEEDGAKQDLFEPSSANTEDKMEVDLSEPPNWSANFDVPMETTHGAPLDSVGSDVWSTEEPMPTKETGWASFSEFTSSLSTKDSLRSNSPVEMETSTEPMDPLTPSAAALAVQPEAAGSVAMEASSDGEEDAESTDKVTETVMNGGMKETLSLTVDAKTETAVFKSEEGKLSTSQDAACKDAEECPETAEAKCAAPRPPSSSPEQRTGQPSAPGDTSVNGPV

SEQ ID NO: 197762 - DNA, 2382 bp, Artificial Sequence
  derived and/or modified sequence
atgttttggaaattcgatctgcattccagttctcatattgacacactgttggaacgggaagacgtgaccctgaaggagttaatggacgaagaagatgttcttcaggagtgtaaagcccaaaaccgtaagttaattgaattccttctcaaagccgaatgtctcgaggatctcgtgtcctttatcattgaagagcctcctcaggacatggatgagaaaattcgctacaagtaccctaacatcagctgcgaactgcttacctcagatgtctcgcaaatgaatgatcgcctcggcgaggacgagtccctcctgatgaagctctactcatttctgttgaatgacagtcccctgaaccctttgctggcaagtttcttttctaaagtcttgagcattttaatctcaagaaagccagaacagatcgttgacttcttaaagaagaaacatgacttcgtggacttgattattaaacatattggcacaagcgccatcatggacttgttgctccgactgctgacgtgtatcgagcctccacagccgaggcaagacgtgctgaattggctcaacgaagagaaaattattcagcggcttgtggaaatcgttcacccaagccaagaggaggatcgacactccaatgcctcccagtccctttgtgagatagttcggttatctagggaccagatgctgcagatacagaactcaactgaacctgatcctctgctggctactttggagaagcaggagatcatcgagcaactgctgtcaaatatttttcataaggaaaagaatgaatcggccatcgtgtcagctattcagatccttctgacacttcttgagacacggcgccccactttcgaggggcatatcgagatctgccctcctggaatgtcccactctgcttgttcagtcaacaagagtgtattagaggccatcaggggccgcctcggttcttttcacgaacttttgctggagcccccaaagaatatgtttttcaaatacacttggaacaactttctgcacacccaggttgaaatttgtatcgctctcatcctggcctcccctttcgagaataccgagaatgcgacgatcactgatcaggattcaaccggagacaatcttcttctgaaacacctgttccagaaatgtcaactgatcgaaagaatcctcgaagcctgggaaatgaacgaaaagaaacaggccgagggaggccgtaggcacggctacatgggacacctcacccggatagccaactgtattgtccactctaccgataagggcccaaatagcgctttggtgcagcagctgatcaaggacctgcccgacgaggtgagggaaagatgggaaactttctgtacctcatcactgggcgaaacgaacaaacggaacaccgtggacctggctttcagcgactatcagatgcaacagatgacttccaacttcattgatcagtttgggtttaatgacgagaagttcgcagaccaggatgacattgggaacgtcagttttgaccgtgtgagcgatatcaatttcactctgaacacaaatgaatccggcaatattgctttgttcgaggcgtgttgcaaggaacgcatccaacaattcgatgacgggggctcagatgaagaggatatctgggaggaaaagcatatcgcttttacgcccgaatctcagcgccgctctagttccgggagcactgatagcgaagagtccaccgacagcgaggaagaagacggggcaaagcaagacctgttcgagccctcctctgctaacactgaagataagatggaagttgacctgagcgagcctccgaattggtccgccaacttcgacgttccgatggaaacgacacacggggcccccttagattctgtagggtcagacgtgtggtcgacagaagagcctatgcccactaaggagacaggatgggcctcctttagcgaatttacaagtagtctgagcaccaaagactctctgaggtctaatagccccgttgagatggaaacctctaccgagccaatggacccacttacaccctctgctgccgctctcgctgtgcaacctgaggccgccgggtctgtagccatggaagccagcagtgacggtgaagaggatgccgagtccactgacaaggtcacagaaacggtgatgaatggtggtatgaaagaaactctgagtctcactgtcgacgcaaaaactgaaactgccgtttttaaatcagaggaaggaaagctttcaacaagccaggacgcagcgtgtaaggatgccgaagagtgccccgaaactgctgaggccaaatgtgctgctcctaggccccctagctcctccccagagcagcgaacggggcaaccatcagctcctggcgatacctctgtgaatggccccgtttag

SEQ ID NO: 197763 - DNA, 2382 bp, Artificial Sequence
  derived and/or modified sequence
atgttctggaagtttgacctgcacagcagcagccacatcgacaccctgctggagcgggaggatgtgaccctgaaggagctgatggatgaagaagatgtgctgcaggagtgcaaggcccagaacaggaagctgattgagttcctgctgaaggccgagtgcctggaggacctggtgtccttcatcatcgaggagcccccccaggacatggatgagaagatccgctacaagtaccccaacatcagctgtgagctgctgaccagtgatgtgtcccagatgaatgaccggctgggggaggatgagagcctgctgatgaagctgtacagcttcctgctgaatgacagccccctgaaccccctgctggccagcttcttcagcaaggtgctgagcatcctgatcagcaggaagccagagcagatcgtggacttcctgaagaagaagcatgactttgtggacctgatcatcaagcacatcggcaccagcgccatcatggacctgctgctgcggctgctgacctgcatcgagcccccccagccccggcaggatgtgctgaactggctgaatgaggagaagatcatccagaggctggtggagatcgtgcaccccagccaggaggaggacagacacagcaatgccagccagagcctgtgtgagatcgtgcggctgagccgggaccagatgctgcagatccagaacagcacagagccagaccccctgctggccaccctggagaagcaggagatcatcgagcagctgctgagcaacatcttccacaaggagaagaatgaaagtgccatcgtgtctgccatccagatcctgctgaccctgctggagacccggcggcccacctttgagggccacatcgagatctgccccccaggcatgagccacagcgcctgcagcgtgaacaagtctgtgctggaggccatccggggccgcctgggcagcttccacgagctgctgctggagccccccaagaacatgttcttcaagtacacctggaacaacttcctgcacacccaggtggagatctgcatcgccctgatcctggccagcccctttgagaacacagaaaatgccaccatcacagaccaggacagcactggagacaacctgctgctgaagcacctgttccagaagtgccagctgattgagcgcatcctggaggcctgggagatgaatgagaagaagcaggccgagggcggccgccgccacggctacatgggccacctgaccagaattgccaactgcatcgtgcacagcacagacaagggccccaacagcgccctggtgcagcagctgatcaaggacctgcctgatgaggtgcgggagcgctgggagaccttctgcaccagcagcctgggggagaccaacaagaggaacacagtggacctggccttcagtgactaccagatgcagcagatgaccagcaacttcatcgaccagtttggcttcaatgatgagaagtttgctgaccaggatgacattggaaatgtgtcctttgacagagtgtctgacatcaacttcaccctgaacaccaatgaaagtggcaacatcgccctgtttgaggcctgctgcaaggagcgcatccagcagtttgatgatggcggcagtgatgaggaggacatctgggaggagaagcacatcgccttcaccccagagagccagaggaggagcagcagcggcagcacagattctgaggagagcacagattctgaggaggaggatggagccaagcaggacctgtttgagcccagcagcgccaacacagaggacaagatggaggtggacctgtctgagccccccaactggagcgccaactttgatgtgcccatggagaccacccatggagcccccctggacagcgtgggcagtgatgtgtggagcacagaggagcccatgcccaccaaggagaccggctgggccagcttcagcgagttcaccagcagcctgagcaccaaggacagcctgcggagcaacagccctgtggagatggagaccagcacagagcccatggaccccctgaccccatctgctgctgccctggccgtgcagcctgaggccgccggctctgtggccatggaggccagcagtgatggagaagaagatgctgagagcacagacaaggtgacagagaccgtgatgaatggaggcatgaaggagaccctgagcctgactgtggatgccaagacagaaacagctgtgttcaagtctgaggagggcaagctgagcaccagccaggatgctgcctgcaaggatgctgaagaatgtcctgagacagctgaggccaagtgtgccgcccccaggcctcccagcagcagccctgagcagaggacaggccagcccagcgcccctggggacacctctgtgaatggacctgtgtag

SEQ ID NO: 197764 - DNA, 2382 bp, Artificial Sequence
  derived and/or modified sequence
atgttctggaagttcgacctgcacagcagcagccacatcgacaccctgctcgagcgggaggacgtcaccctcaaagagctgatggacgaggaggatgtgctgcaagagtgcaaggcacagaacaggaagctgatcgaatttctgctgaaggctgagtgtcttgaggatttggttagcttcataatcgaagagcctccccaagatatggatgaaaaaataaggtacaagtacccaaatattagctgtgaactgttgacatctgatgtgagccagatgaatgaccgactcggcgaggacgagagcctgctcatgaaattatacagctttcttctgaatgattctcccctcaaccctctgcttgcatccttcttttcaaaggtgctgtctattctcatcagcagaaaacctgagcagatagtggatttcctcaaaaaaaaacatgacttcgttgacctaattattaaacatattggcacctctgcgataatggacctgctgctgagactcttgacctgtattgagccaccccaaccccgacaggacgttcttaactggctgaacgaagaaaaaatcatccagcgactggtcgaaatcgtgcatcccagccaggaagaggatcggcacagcaacgccagccaatctttatgcgagatcgtcagactctctcgggatcagatgttgcaaatccagaatagtactgagccagaccctctactagccactctggagaaacaggagatcatagaacagctactctcgaacatttttcacaaggaaaagaatgaaagtgccatcgtctccgctattcagatcctgcttaccctgctcgagacacgcaggcccacgtttgaggggcacattgagatttgccctcccgggatgtcacattccgcctgtagcgtaaataagagtgtgctggaagcgataagagggaggttagggtctttccatgagctactcctggaaccacccaagaacatgttctttaagtacacgtggaataattttctgcatacacaggtagagatttgtatcgcactaatattggcaagtccattcgagaataccgagaatgctactatcacggatcaagattctaccggagataacctgctgttgaaacacctgtttcagaaatgtcagttaattgaacgaatacttgaagcctgggagatgaacgagaagaagcaggcggagggaggcaggcggcacggttacatgggacacttaactcggattgccaattgtatagtccattctacggacaagggcccgaactccgcccttgtgcagcagctgataaaggatctccccgatgaggtgcgagaacgttgggagaccttctgcacatccagcctgggggagactaacaagaggaacaccgtggacttagccttcagcgattaccagatgcagcaaatgactagcaatttcatcgaccagtttggctttaacgatgagaaattcgcggatcaggacgacataggcaacgttagtttcgatcgagtgagcgacataaactttaccctcaatacaaatgagtccggaaatattgccctttttgaggcttgttgtaaagaaagaattcaacagttcgatgacggcggtagtgacgaggaggatatatgggaggagaaacatattgcctttaccccggagtcccagcggcgaagttcttctgggtctacagactctgaggagtccacagacagtgaagaggaagatggagcaaaacaagacctgttcgagccgtctagtgccaataccgaggacaaaatggaggtcgatctctcagagcctccgaattggtctgcgaacttcgacgtccctatggaaactactcacggagcccccttggacagcgttgggtctgacgtctggtcaactgaggaaccgatgccaactaaggagaccggctgggcctctttctccgagtttacatcttctctgtcgacaaaggatagtctgcggtcaaatagccctgtagagatggagacgagcactgaacctatggacccgctgactccctcagccgcagctctggctgtgcagccggaggctgctggttcagtcgcaatggaggcatcatcggatggcgaagaagatgctgagagcacggataaagtcacagagactgtcatgaacggcggcatgaaggaaaccctctccctgactgtggacgctaagactgagaccgcagtctttaagtcagaagagggaaagctctccacaagccaggatgcggcctgcaaggacgccgaagagtgtccagagacagctgaggcaaagtgtgcggcccctcgaccccccagttcatctccagagcaacgaaccggccagccgagtgcaccgggtgacacctcggttaacgggcccgtgtag

SEQ ID NO: 197765 - DNA, 2382 bp, Artificial Sequence
  derived and/or modified sequence
atgttctggaagtttgacctgcactctagctcgcatatcgacactctcctcgaacgcgaggatgttacccttaaggaactcatggatgaggaggacgtactgcaggaatgtaaagcacaaaatcgcaagctcattgagtttctgttgaaggctgaatgcctagaggatttagtcagctttattatcgaggaacccccacaagatatggatgagaagatcaggtacaagtatcctaatattagctgtgagttgctgacgtcagacgtcagccaaatgaacgaccgcctgggggaggatgagtctctcctgatgaagctctatagcttcctgctgaacgattcacccttgaatccgcttctggccagttttttttccaaggttctctcgatcctaatctccaggaagcccgagcagattgtcgatttcctgaagaagaaacacgactttgtcgatctcataataaaacatattggcacgtccgcaattatggaccttttactgcgattgcttacatgtatcgagccaccacagccccgacaggacgtgctgaactggctcaatgaggagaaaatcatccagcgtctggtggagattgtccatccgtctcaggaggaagaccgccattcaaatgcttcgcagagtctttgtgagatcgttcgactcagtagagatcagatgttacagattcaaaactctactgagcccgatcccctgctcgcaaccctggagaagcaggaaatcattgagcaactactttcaaacatctttcacaaggagaagaatgaaagcgccatcgtgtctgctatccagattcttttgacgctcctggagactaggcgaccaacatttgaaggtcacattgaaatatgcccgccaggcatgagccactccgcctgctctgtgaacaagtcagtgcttgaagccatccgagggaggctgggcagtttccatgaactccttctggaacccccaaagaatatgttctttaaatacacatggaataatttcctccacacccaggtcgagatttgcattgcattgatactggcgagcccattcgagaacactgagaatgccacaatcactgaccaggattctacaggcgacaatttactgttaaagcatctgtttcagaaatgccagctgatcgagcggatactagaagcgtgggagatgaatgaaaagaaacaagccgaaggaggcaggagacatggctacatgggccacctcacacgaattgcaaactgcattgtccactcaacggacaagggcccaaattccgctctcgtacagcagttgattaaggacctgcctgacgaggttcgtgagaggtgggagacattctgcaccagcagtctgggggagaccaataagaggaatacagtcgatctggccttttccgattaccagatgcagcagatgacctcaaactttatcgatcaatttggatttaatgacgagaaatttgctgatcaggatgacatcggtaatgtctcattcgacagagtgtccgatatcaatttcacactcaataccaacgaatcggggaacatagctctgttcgaagcctgttgcaaagaacgaatacagcagttcgatgatggtggcagcgatgaggaggatatctgggaggaaaagcacatagcttttacacctgagagtcaaaggagatctagcagcggatctacagacagtgaggaatcgaccgattcggaggaagaagacggcgcaaagcaggacctctttgagccctccagcgctaataccgaagacaaaatggaggtggacctcagcgagccaccgaactggagtgctaactttgatgtgcccatggaaaccacgcacggagcaccactagactctgttggaagcgatgtgtggtccacagaggaacccatgcccactaaagaaactgggtgggcatcattttctgagtttaccagctctctgtcaaccaaagactccctgcgttctaatagcccagtcgaaatggagacttccactgagcctatggacccactgactccgtcagctgctgccctggccgttcagccagaggccgcaggcagcgtcgctatggaggcctcctccgacggcgaagaggatgccgaaagtactgacaaggtcaccgaaaccgtgatgaacggaggtatgaaggagacacttagtctgacggtcgatgctaaaacagaaactgctgtctttaaatcagaggagggcaaactcagcacttcgcaggatgctgcttgcaaggatgcagaggaatgcccggaaacggccgaggccaaatgtgccgctccacgcccaccctctagcagccccgaacagagaacagggcagcctagcgctccgggtgacacttctgtcaatggacccgtgtag

SEQ ID NO: 197766 - DNA, 4794 bp, Artificial Sequence
  derived and/or modified sequence
cgtgggcacctccagataagaaaacaagctcagagagatgtggtgacttgctcaaatagtgacagaacttcctcggccatatggaggggtcatataatacccttgtgtcttcagtttgaggagagcttgtttcatatccatatcccactgtattcctgctaatctgctaatgcagtaaattggaggaaaactgttaccaggataacctgtaatgggcaaggagccacaaagaagaaaacatttcttttaatttttaaacttggtttgaaagaccagcatgttttggaaatttgatcttcactcatcatcccacatagacacacttctagaaagagaagatgtaacactgaaggagttaatggatgaggaagatgttttacaggaatgtaaagctcagaaccgcaaacttatagagtttctgttaaaagcagaatgtctcgaagatttagtctcattcattatagaagaaccacctcaagacatggatgaaaagatcagatacaagtatccaaatatatcttgtgagttgctcacttctgatgtctcccagatgaatgatagactgggagaagatgaatccttgctaatgaaattatatagcttcctcctaaacgattcccctttgaatccactacttgccagtttcttcagcaaggtgctaagtattcttatcagcagaaaaccagaacagattgtggatttcttaaagaagaagcatgattttgtagaccttattataaagcacataggaacttctgctatcatggatttgttgctcaggctcctgacgtgtatcgaacctccacagcccaggcaagatgtgctgaattggttaaatgaggagaaaattatccagaggcttgtggaaatagttcatccatcgcaagaagaagatcgacattcaaatgcatcacaatcactttgtgaaattgttcgcctgagcagagaccagatgttacaaattcagaacagtacagagcccgaccccctgcttgccactctagaaaagcaagaaattatagagcagcttctatcaaatattttccacaaggagaaaaatgagtcagccatagtcagtgcaatccagatattgctgactttacttgagacacgacgaccaacatttgaaggccatatagagatctgcccaccaggcatgagccattcagcttgttcagtaaacaagagtgttctagaagccatcagaggaagacttggatcttttcatgaactcctgctggagccacccaagaacatgttcttcaagtatacatggaataactttttgcatacacaagtggaaatttgtattgcactgattcttgcaagtccttttgaaaacacagaaaatgccacaattaccgatcaagactccactggtgataatttgttattaaaacatcttttccaaaaatgtcaattaatagaacgaatacttgaagcctgggaaatgaatgagaagaaacaggctgagggaggaagacggcatggttacatgggacacctaacgaggatagctaactgtatcgtgcacagcactgacaagggccccaacagtgcattagtgcagcagcttatcaaagatcttcccgacgaagtcagggaacgatgggagacgttctgcacaagctccttaggagaaactaacaagaggaacacggtagatctagccttttctgattatcagatgcaacaaatgacgtccaattttattgaccagtttggcttcaacgatgagaagtttgcagatcaagatgacattggcaatgtttcttttgatcgagtatcagacatcaactttactctcaatacaaatgaaagtggaaatattgccttgtttgaagcatgttgtaaggaaagaatacaacagtttgatgatggtggctctgatgaggaagatatatgggaggaaaagcacatcgcattcacaccagaatcccaaagacgatccagctcggggagtacagacagtgaggaaagtacagactctgaagaagaagatggagcaaagcaagacttgtttgaacccagcagtgccaacacggaggataaaatggaggtggacctgagtgaaccacccaactggtcagctaactttgatgtcccaatggaaacaacccacggtgctccattggattctgtgggatctgatgtctggagcacagaggagccgatgccaactaaagagacgggctgggcttctttttcagagttcacgtcttccctgagcacaaaagattctttaaggagtaattctccagtggaaatggaaaccagcactgaacccatggaccctctgactcccagtgcggctgccctggcagtgcagccagaagcggcaggcagtgtggccatggaagccagctctgacggagaggaggatgcagaaagtacagacaaggtaactgagacagtgatgaatggcggcatgaaggaaacgctcagcctcactgtagatgccaagacagagactgcggtcttcaaaagtgaggaagggaaactgtctacctctcaagatgctgcttgtaaagacgcagaggagtgtcccgagactgcagaggcgaagtgcgcggcgcccaggcctcccagcagcagtcccgagcagaggactggccaaccaagcgcaccaggtgacacttcagtgaatggccctgtatgacgggtgacgtctgctgctgctgactgaggactgcagaccgccaccactcaggggctctggaggggtcagctggagcccaccaagctgtcactgctgcactcactctgcaagggatcaggaccagcaacctttatattctagattctaagacattgtacagagaaattcagaagtgtaaaaatattgcacattgacaaataccaagaatttttgcgtatgtttatattgtattgttctaaataatgggtagcctgtgaaataagatcttgccacccatgtaataatagtagtaatactatagttaaaatggctgtaagaatagttttataaaagtgaatacacagatctattgtatttgaaacataactttgacaattattagtgtgaccaaagtattaggcggttttcatacatttttcaccttgtacaaaattatgaattcatttttcctccaggccgacaaggagttgtagaatgaaaatgccctctaagtgttattttggttgttctaacttacaaaagtgattttgaataagaaatatttggtgttctttttataaccagtttttgattggtaattgttttctgtattgtttaaaacggatcaaaaatgtaagtctattggtagagattaagtaaagtatttattgctacatcatagttgataaattgatgttatcgtaaagccatatgttctgttcaagtcttgtttgcttgaaatgattattcctacaagtgaaacactagactatttggagtgtatatggcttgtgttttgggattttttttttttttttttggcttttgtttttgtttgtttttttgtttcatttggtagttcatctgccttttaacccattcaccaaaatttaccttgttaacaagcatcaccaatgaacatttcagagcaatctgcatatttaacagacctaaaataaatcctattaggcaagtcagttgaaaatgctcgtgctgctaatggaattagagtgcgttcattttacaggctagtattttaaaagtagaaatcaaaatctggcaccgaagcatgctaattgtttactgtaccttgtgaggttttcactcataaatttaaaccagtgtatttttttagaactggtttgtgtatatatatagtgattatggatactaattcaatgtaatttataattttctatgtcaatacaaaaatacatcacagccttctcaaacagctcaagcaatatattgtatattgccatatcgtctggtgaaagggttaaattacttcacctcttgcacttttagatgcaaatcagtttttcatttctgtaatagaaaattattcacgtatttttacatcatttgtttttcctgaccagtatttaaaaccaaaaggatattctgaaaaatggccaacaatttttttagaagtagcatcccaagcagcgtgcctaaacattacattgcatatggaaataaaagaatcaaacgtctaatgccttattatttctgatttcctttttcattttaagtggtgtggagattccagcactcccaggacagtggagtcagcagtaagccctgggacaggtggcaagggtgggtcccttgacctttgcacgcctcctcaggaaccccctttcccgggtgagcccctctctgaagagactgtccttgggcctcctctggaagcagcacccccagaggacagggctcctcctgcttgcctcagggctgcctgacttgaatggcgttggacctcggggattactggtagataatatgctctggtctcgcctggtggtgagttttgccagccatggccagggtttggctccactggtggcacacgtggcctccgtggtatggacctggtggcttctccatcccactgtggcctctgtggtatggacctggtggcttctccatcctacccaaggtaacagtgtcttgcttcatcccactgactgctgggagagagcctctgggacttttctttggggcatcattttgttttgtctttcgtagcagggaaaggatatgacaatggggaggacagttcttttggaggttggaggggccaagccaaggacaggagcaagtgtgccctcattttgtttctacttttaatttctgtgtgttggccatactga

SEQ ID NO: 197767 - DNA, 2382 bp, Artificial Sequence
  derived and/or modified sequence
atgttctggaagttcgacctgcacagcagcagccacatcgacaccctgctggagagagaggacgtgaccctgaaggagctgatggacgaggaggacgtgctgcaggagtgcaaggcccagaacagaaagctgatcgagttcctgctgaaggccgagtgcctggaggacctggtgagcttcatcatcgaggagcccccccaggacatggacgagaagatcagatacaagtaccccaacatcagctgcgagctgctgaccagcgacgtgagccagatgaacgacagactgggcgaggacgagagcctgctgatgaagctgtacagcttcctgctgaacgacagccccctgaaccccctgctggccagcttcttcagcaaggtgctgagcatcctgatcagcagaaagcccgagcagatcgtggacttcctgaagaagaagcacgacttcgtggacctgatcatcaagcacatcggcaccagcgccatcatggacctgctgctgagactgctgacctgcatcgagcccccccagcccagacaggacgtgctgaactggctgaacgaggagaagatcatccagagactggtggagatcgtgcaccccagccaggaggaggacagacacagcaacgccagccagagcctgtgcgagatcgtgagactgagcagagaccagatgctgcagatccagaacagcaccgagcccgaccccctgctggccaccctggagaagcaggagatcatcgagcagctgctgagcaacatcttccacaaggagaagaacgagagcgccatcgtgagcgccatccagatcctgctgaccctgctggagaccagaagacccaccttcgagggccacatcgagatctgcccccccggcatgagccacagcgcctgcagcgtgaacaagagcgtgctggaggccatcagaggcagactgggcagcttccacgagctgctgctggagccccccaagaacatgttcttcaagtacacctggaacaacttcctgcacacccaggtggagatctgcatcgccctgatcctggccagccccttcgagaacaccgagaacgccaccatcaccgaccaggacagcaccggcgacaacctgctgctgaagcacctgttccagaagtgccagctgatcgagagaatcctggaggcctgggagatgaacgagaagaagcaggccgagggcggcagaagacacggctacatgggccacctgaccagaatcgccaactgcatcgtgcacagcaccgacaagggccccaacagcgccctggtgcagcagctgatcaaggacctgcccgacgaggtgagagagagatgggagaccttctgcaccagcagcctgggcgagaccaacaagagaaacaccgtggacctggccttcagcgactaccagatgcagcagatgaccagcaacttcatcgaccagttcggcttcaacgacgagaagttcgccgaccaggacgacatcggcaacgtgagcttcgacagagtgagcgacatcaacttcaccctgaacaccaacgagagcggcaacatcgccctgttcgaggcctgctgcaaggagagaatccagcagttcgacgacggcggcagcgacgaggaggacatctgggaggagaagcacatcgccttcacccccgagagccagagaagaagcagcagcggcagcaccgacagcgaggagagcaccgacagcgaggaggaggacggcgccaagcaggacctgttcgagcccagcagcgccaacaccgaggacaagatggaggtggacctgagcgagccccccaactggagcgccaacttcgacgtgcccatggagaccacccacggcgcccccctggacagcgtgggcagcgacgtgtggagcaccgaggagcccatgcccaccaaggagaccggctgggccagcttcagcgagttcaccagcagcctgagcaccaaggacagcctgagaagcaacagccccgtggagatggagaccagcaccgagcccatggaccccctgacccccagcgccgccgccctggccgtgcagcccgaggccgccggcagcgtggccatggaggccagcagcgacggcgaggaggacgccgagagcaccgacaaggtgaccgagaccgtgatgaacggcggcatgaaggagaccctgagcctgaccgtggacgccaagaccgagaccgccgtgttcaagagcgaggagggcaagctgagcaccagccaggacgccgcctgcaaggacgccgaggagtgccccgagaccgccgaggccaagtgcgccgcccccagaccccccagcagcagccccgagcagagaaccggccagcccagcgcccccggcgacaccagcgtgaacggccccgtgtag

SEQ ID NO: 197768 - protein, 1582 aa, Artificial Sequence
  derived and/or modified sequence
MGSKRRRATSPSSSVSGDFDDGHHSVSTPGPSRKRRRLSNLPTVDPIAVCHELYNTIRDYKDEQGRLLCELFIRAPKRRNQPDYYEVVSQPIDLMKIQQKLKMEEYDDVNLLTADFQLLFNNAKSYYKPDSPEYKAACKLWDLYLRTRNEFVQKGEADDEDDDEDGQDNQGTVTEGSSPAYLKEILEQLLEAIVVATNPSGRLISELFQKLPSKVQYPDYYAIIKEPIDLKTIAQRIQNGSYKSIHAMAKDIDLLAKNAKTYNEPGSQVFKDANSIKKIFYMKKAEIEHHEMAKSSLRMRTPSNLAAARLTGPSHSKGSLGEERNPTSKYYRNKRAVQGGRLSAITMALQYGSESEEDAALAAARYEEGESEAESITSFMDVSNPFYQLYDTVRSCRNNQGQLIAEPFYHLPSKKKYPDYYQQIKMPISLQQIRTKLKNQEYETLDHLECDLNLMFENAKRYNVPNSAIYKRVLKLQQVMQAKKKELARRDDIEDGDSMISSATSDTGSAKRKSKKNIRKQRMKILFNVVLEAREPGSGRRLCDLFMVKPSKKDYPDYYKIILEPMDLKIIEHNIRNDKYAGEEGMIEDMKLMFRNARHYNEEGSQVYNDAHILEKLLKEKRKELGPLPDDDDMASPKLKLSRKSGISPKKSKYMTPMQQKLNEVYEAVKNYTDKRGRRLSAIFLRLPSRSELPDYYLTIKKPMDMEKIRSHMMANKYQDIDSMVEDFVMMFNNACTYNEPESLIYKDALVLHKVLLETRRDLEGDEDSHVPNVTLLIQELIHNLFVSVMSHQDDEGRCYSDSLAEIPAVDPNFPNKPPLTFDIIRKNVENNRYRRLDLFQEHMFEVLERARRMNRTDSEIYEDAVELQQFFIKIRDELCKNGEILLSPALSYTTKHLHNDVEKERKEKLPKEIEEDKLKREEEKREAEKSEDSSGAAGLSGLHRTYSQDCSFKNSMYHVGDYVYVEPAEANLQPHIVCIERLWEDSAEKEVFKSDYYNKVPVSKILGKCVVMFVKEYFKLCPENFRDEDVFVCESRYSAKTKSFKKIKLWTMPISSVRFVPRDVPLPVVRVASVFANADKGDDEKNTDNSEDSRAEDNFNLEKEKEDVPVEMSNGEPGCHYFEQLHYNDMWLKVGDCVFIKSHGLVRPRVGRIEKVWVRDGAAYFYGPIFIHPEETEHEPTKMFYKKEVFLSNLEETCPMTCILGKCAVLSFKDFLSCRPTEIPENDILLCESRYNESDKQMKKFKGLKRFSLSAKVVDDEIYYFRKPIVPQKEPSPLLEKKIQLLEAKFAELEGGDDDIEEMGEEDSESTPKSAKGSAKKEGSKRKINMSGYILFSSEMRAVIKAQHPDYSFGELSRLVGTEWRNLETAKKAEYEGMMGGYPPGLPPLQGPVDGLVSMGSMQPLHPGGPPPHHLPPGVPGLPGIPPPGVMNQGVAPMVGTPAPGGSPYGQQVGVLGPPGQQAPPPYPGPHPAGPPVIQQPTTPMFVAPPPKTQRLLHSEAYLKYIEGLSAESNSISKWDQTLAARRRDVHLSKEQESRLPSHWLKSKGAHTTMADALWRLRDLMLRDTLNIRQAYNLENV

SEQ ID NO: 197769 - protein, 152 aa, Artificial Sequence
  derived and/or modified sequence
MGSKRRRATSPSSSVSGDFDDGHHSVSTPGPSRKRRRLSNLPTVDPIAVCHELYNTIRDYKDEQGRLLCELFIRAPKRRNQPDYYEVVSQPIDLMKIQQKLKMEEYDDVNLLTADFQLLFNNAKSYYKPDSPEYKAACKLWDLYLRTRNEFV

SEQ ID NO: 197770 - protein, 230 aa, Artificial Sequence
  derived and/or modified sequence
MGSKRRRATSPSSSVSGDFDDGHHSVSTPGPSRKRRRLSNLPTVDPIAVCHELYNTIRDYKDEQGRLLCELFIRAPKRRNQPDYYEVVSQPIDLMKIQQKLKMEEYDDVNLLTADFQLLFNNAKSYYKPDSPEYKAACKLWDLYLRTRNEFVQKGEADDEDDDEDGQDNQGTVTEGSSPAYLKEILEQLLEAIVVATNPSGRLISELFQKLPSKVQYPDYYAIIKEPIDL

SEQ ID NO: 197771 - protein, 87 aa, Artificial Sequence
  derived and/or modified sequence
MGSKRRRATSPSSSVSGDFDDGHHSVSTPGPSRKRRRLSNLPTVDPIAVCHELYNTIRDYKDEQGRLLCELFIRAPKRRNQPDYYEV

SEQ ID NO: 197772 - DNA, 4749 bp, Artificial Sequence
  derived and/or modified sequence
atgggaagcaaaagacggagagccacatcccccagtagttctgttagcggggatttcgatgacgggcaccacagcgtgagtacaccaggaccttcgcgaaaacggagacgcctgtccaacctcccgactgtggaccccatcgccgtgtgccacgaactatataatactattcgtgattacaaagacgaacagggaagactgctgtgcgaattgttcatccgtgcaccaaaaagaagaaatcagccggattattacgaagtggtctctcaaccaatcgaccttatgaagatacagcagaagctcaaaatggaagagtacgatgacgttaacctgctcacagccgactttcagcttttgtttaacaatgccaagtcctattacaaaccggactcgcctgagtacaaggcagcatgcaagttatgggatctgtacctccggacccggaatgagtttgtgcagaaaggcgaagcggatgacgaagacgacgacgaggatggccaagacaatcaagggaccgtcaccgagggctcttcccccgcttatttgaaggagatcctggagcagttgttggaggcaattgtggtggccaccaacccgtctggtaggctgattagtgaacttttccagaagctgccatctaaggtgcagtatcccgactactacgccattataaaagagccaatcgaccttaagactattgcccagcgcatccaaaacggctcatacaagagtattcacgcgatggctaaggacatcgatctcctagctaaaaatgccaaaacatataatgaacccggaagccaggtgttcaaagatgcaaactccatcaagaagatcttctacatgaagaaggcagaaatagagcaccacgagatggctaagagtagccttcgaatgaggaccccctcgaacctggctgcggccagacttacagggccatctcactctaagggctctttaggagaggaaagaaaccctaccagcaaatattaccggaataagagagccgttcaaggtggacggctttcagccatcaccatggccctgcaatacgggtctgagtccgaggaagacgccgctctcgccgccgcccggtatgaagaaggagaatctgaagcggagtcaattacaagcttcatggacgtctctaatcctttttaccagctgtacgacaccgttagaagctgtcggaataatcaaggacaactcatagctgagcccttctatcacctgcctagcaaaaaaaaatacccagactactaccagcagatcaagatgcccataagtctgcagcagattcgcaccaaactaaagaatcaggagtacgagactctggatcatctcgaatgtgatctgaacttgatgttcgaaaatgcgaaaaggtacaatgtgcctaatagcgccatttacaagcgtgtgctcaaactacagcaggtgatgcaggctaagaagaaggagttagcccgacgcgatgatattgaagacggtgattctatgatctcaagtgccacgagtgacaccgggagcgctaagagaaaaagtaaaaagaatattcgaaaacagcgcatgaagatcctgtttaatgtggtacttgaagccagagaacctgggagtggccgacgactctgcgacctcttcatggttaaaccttcgaaaaaggattatccagattactataaaataattctggaaccaatggatctgaagattatcgagcacaatattaggaacgacaaatatgccggtgaagagggaatgatagaagatatgaagttaatgttcaggaacgctaggcactacaacgaagagggctcacaggtatacaatgatgcgcacatactggagaagctgctgaaagagaagagaaaagaactgggaccactgccagatgatgatgatatggccagtccaaaattaaaactgtcgcggaagagtggaataagccctaaaaaaagcaagtatatgacgccaatgcagcagaaactgaacgaggtctacgaagccgtcaaaaactacacagataaaagaggccgccgtttatccgctattttcttgcggttgccctcaagaagcgagttgcctgattattatctgaccattaaaaaacccatggatatggaaaagattcgaagtcatatgatggctaacaagtatcaggacatcgattcaatggtggaggattttgtgatgatgtttaacaacgcatgcacctataacgagcctgagtccttaatttacaaggacgcccttgtcctacataaagtcctactggaaacaaggagggatttggagggcgacgaggacagccacgtgccaaacgtgacactgttaattcaagagcttattcacaatctgttcgtgagcgtgatgagtcatcaggatgacgaaggcagatgttacagtgattctctggccgaaatccccgctgttgacccgaatttcccgaacaaacccccactcactttcgatataattcgaaagaatgtcgagaataataggtatcggcgcctagacctattccaagagcacatgttcgaggtcctagaacgggctaggcggatgaaccggacggattcggaaatctacgaagatgccgtagagctgcaacagtttttcattaaaatccgcgacgaattgtgtaagaacggggagattctgctatcaccagccctttcgtacactaccaagcacttgcacaacgatgtcgaaaaggagagaaaagagaagctgccgaaggagatcgaggaggacaagctgaagcgggaggaggaaaagagagaggctgagaagagcgaagacagcagcggtgcagcagggctgagtggcctccatcggacttactcacaggactgtagctttaagaactcgatgtaccatgtaggcgattacgtctacgtagaaccggcagaggcaaacctccagccccacatcgtttgtattgaaaggctctgggaggattccgctgaaaaagaggtttttaaatctgactattataacaaagtgcccgtatcaaagatcctggggaagtgtgttgtgatgtttgttaaagagtatttcaagctatgtccagagaactttcgtgatgaagacgtgtttgtgtgtgagagtagatactcagccaaaaccaagtcttttaagaaaattaaactgtggaccatgccaatctctagcgttcgctttgtgccaagggacgtacctttacccgtggtgcgtgtcgctagcgtgttcgccaacgctgataaaggggatgatgagaaaaataccgacaacagcgaggacagtcgggccgaggataattttaacctagaaaaggaaaaagaggatgtgccggtcgaaatgtcaaacggggagccagggtgccactactttgagcagctgcactacaatgacatgtggctgaaagttggggattgtgtgtttatcaaaagccacggattagtaaggccacgggtgggccggatcgaaaaagtatgggtcagagatggtgcggcttacttctatgggccaatatttatccacccagaggaaactgagcatgagcctaccaaaatgttttacaagaaagaggtcttcctaagcaatctggaagagacttgtccaatgacctgcatactaggcaaatgtgcggtactgtctttcaaagatttcttgagttgtagaccgactgagattcccgagaatgacatcctgttgtgtgagagtagatataacgagtcggataagcaaatgaagaaatttaaagggcttaaaaggtttagtttgtctgccaaagtggtggacgatgagatttattattttcgcaagccgattgtgccacagaaggagccctcgccccttctggagaagaagattcagctgcttgaagcaaagttcgccgagttagagggcggtgacgatgatattgaggagatgggtgaggaagactcggaatcaacaccgaagagtgcaaaaggtagcgcaaaaaaggaaggttccaagcgaaagatcaacatgtctgggtacatcctgttttcttctgagatgagggcagtgattaaagcgcagcacccggattacagctttggagaacttagccgattggtcggaacagaatggcgtaatctggagactgcaaaaaaagccgagtacgagggaatgatgggcggataccccccaggactaccccctctccaaggcccggtggacggccttgtgagcatgggtagtatgcagccactacacccaggggggcccccgccccaccacctgccgcccggcgtgcccggactgccgggcattcctccgcctggggtcatgaatcagggtgtcgcccccatggtcggtaccccagcccccggagggtctccatatggccaacaagtgggcgtgttgggccccccaggacagcaggcacccccgccctacccgggcccacacccagccgggcctcctgtaatccagcagcccacaacaccaatgtttgtagctccaccacctaaaacacagaggctgttgcatagcgaagcttatcttaagtacatagagggcttatctgccgagtccaacagtatttccaaatgggatcagactcttgctgccaggaggcgcgacgttcacctttcgaaagaacaggagtcccgtttaccatcccactggctgaagagtaaaggtgcacatacaactatggccgatgctctgtggaggctgcgggacctcatgcttcgggacaccctgaatatcaggcaagcgtacaacctggagaacgtatag

SEQ ID NO: 197773 - DNA, 459 bp, Artificial Sequence
  derived and/or modified sequence
atgggtagtaagcgacggagggctacttccccctctagttcagtgtccggcgacttcgatgacggacatcactctgtgagtacccccggcccttcccggaaaaggcggaggctgtcaaatctccccaccgttgatccaatcgctgtgtgccatgagctctacaacactatcagggattataaggatgagcaggggagactcctgtgcgaactgtttattcgagcccctaaacggagaaaccagccagactactatgaggtggttagtcagcccattgatctgatgaagatccagcagaagttgaagatggaggagtacgatgatgtgaacctgctgacagctgacttccagttgctctttaacaatgctaagtcctactataaacctgactcccctgagtacaaagcagcttgcaaactgtgggacttgtatctcaggacacggaatgaatttgtgtag

SEQ ID NO: 197774 - DNA, 693 bp, Artificial Sequence
  derived and/or modified sequence
atgggaagcaagcgacgccgagccaccagtccatcctcctcagtgagtggcgactttgacgatgggcaccacagcgtgtccaccccgggcccttctagaaaaaggagaaggctctcaaacttgccaacagttgacccaatagccgtgtgtcacgaactctataacactatccgggattataaagatgagcagggtaggctgctttgtgaactttttattagagcccccaagagacgtaatcagcctgactactatgaagtggtgtctcaaccgattgacctaatgaagatccaacagaagctaaagatggaggaatacgacgatgtgaacctccttactgcggactttcagttgctgttcaacaacgcaaagtcatattacaaaccggattcccctgagtacaaggccgcgtgcaaattgtgggacctctacttgaggacccgtaacgagttcgtccagaaaggagaggcagacgacgaagatgacgacgaggatggacaggataatcagggaaccgtaaccgaaggtagctctccggcgtatctcaaagagatactggagcagctgttagaagctattgttgtggccactaaccctagcggacgcctaattagcgaactgtttcagaaactgcccagcaaagtgcagtacccagattattatgcgatcattaaggaaccaatcgatctctag

SEQ ID NO: 197775 - DNA, 4749 bp, Artificial Sequence
  derived and/or modified sequence
atgggcagcaagagaagaagagccaccagccccagcagctctgtgtctggggactttgatgatggccaccacagcgtgtccaccccaggccccagcaggaagagaagaaggctgagcaacctgcccaccgtggaccccatcgctgtgtgccacgagctgtacaacaccatccgggactacaaggatgagcagggccgcctgctgtgtgagctgttcatccgggcccccaagagaagaaaccagcctgactactatgaggtggtgtcccagcccatcgacctgatgaagatccagcagaagctgaagatggaggagtatgatgatgtgaacctgctgacagctgacttccagctgctcttcaacaatgccaagagctactacaagccagacagccctgagtacaaggccgcctgcaagctgtgggacctgtacctgcggaccagaaatgaatttgtgcagaagggggaggctgatgatgaagatgatgatgaagatggccaggacaaccagggcaccgtgacagagggcagcagccctgcctacctgaaggagatcctggagcagctgctggaggccatcgtggtggccaccaaccccagcggccgcctcatcagcgagctgttccagaagctgcccagcaaggtgcagtacccagactactatgccatcatcaaggagcccatcgacctgaagaccatcgcccagaggatccagaatggcagctacaagagcatccacgccatggccaaggacatcgacctgctggccaagaatgccaagacctacaatgaacctggcagccaggtgttcaaggatgccaacagcatcaagaagatcttctacatgaagaaggccgagattgagcaccacgagatggccaagagcagcctgaggatgaggacccccagcaacctggccgccgcccggctgaccggccccagccacagcaagggcagcctgggggaggagaggaaccccaccagcaagtactacagaaacaagagagctgtgcagggcggccgcctgagcgccatcaccatggccctgcagtatggcagcgagagtgaagaagatgctgccctggccgccgcccgctatgaggagggggagagcgaggccgagagcatcaccagcttcatggatgtgagcaaccccttctaccagctgtatgacacagtgcgcagctgcaggaacaaccagggccagctgattgctgagcccttctaccacctgcccagcaagaagaagtacccagactactaccagcagatcaagatgcccatcagcctgcagcagatccgcaccaagctgaagaaccaggagtatgagaccctggaccacctggagtgtgacctgaacctgatgtttgaaaatgccaagcgctacaacgtgcccaacagcgccatctacaagagggtgctgaagctgcagcaggtgatgcaggccaagaagaaggagctggccaggagagatgacattgaagatggagacagcatgatcagcagcgccaccagtgacaccggcagcgccaagaggaagagcaagaagaacatcaggaagcagaggatgaagatcctcttcaacgtggtgctggaggcccgggagcccggcagcggccggcggctgtgtgacctcttcatggtgaagcccagcaagaaggactacccagactactacaagatcatcctggagcccatggacctgaagatcatcgagcacaacatcagaaatgacaagtatgctggggaggagggcatgattgaggacatgaagctgatgttcagaaatgcccggcactacaatgaggagggcagccaggtgtacaatgatgcccacatcctggagaagctgctgaaggagaagaggaaggagctgggccccctgcctgatgatgatgacatggccagccccaagctgaagctgagcaggaagagcggcatcagccccaagaagagcaagtacatgacccccatgcagcagaagctgaatgaggtgtatgaggccgtgaagaactacacagacaagaggggccggcggctgagcgccatcttcctgcggctgcccagccgctctgagctgcctgactactacctgaccatcaagaagcccatggacatggagaagatccgcagccacatgatggccaacaagtaccaggacatcgacagcatggtggaggactttgtgatgatgttcaacaatgcctgcacctacaatgaacctgagagcctcatctacaaggatgccctggtgctgcacaaggtgctgctggagacccggcgggacctggagggagatgaggacagccacgtgcccaacgtgaccctgctgatccaggagctgatccacaacctgtttgtgtctgtgatgagccaccaggatgatgagggccgctgctacagcgacagcctggccgagatcccagctgtggaccccaacttccccaacaagccacccctgacctttgacatcatcaggaagaatgtggagaacaaccgctacagaaggctggacctcttccaggagcacatgtttgaggtgctggagcgggcccggaggatgaacagaacagattctgagatctatgaagatgctgtggagctgcagcagttcttcatcaagatcagagatgagctgtgcaagaatggagagatcctgctgagccctgccctgagctacaccaccaagcacctgcacaatgatgtggagaaggagaggaaggagaagctgcccaaggagattgaggaggacaagctgaagcgggaggaggagaagcgggaggccgagaagtctgaggacagcagtggagctgctggcctgagcggcctgcacaggacctacagccaggactgcagcttcaagaacagcatgtaccacgtgggggactatgtgtatgtggagcctgctgaggccaacctgcagccccacatcgtgtgcatcgagcggctgtgggaggacagcgctgagaaggaggtgttcaagagtgactactacaacaaggtgcctgtgtccaagatcctgggcaaatgtgtggtgatgtttgtgaaggagtacttcaagctgtgcccagagaacttcagagatgaagatgtgtttgtgtgtgagagccgctacagcgccaagaccaagagcttcaagaagatcaagctgtggaccatgcccatcagctctgtgcgctttgtgcccagagatgtgcccctgcctgtggtgcgggtggcctctgtgtttgccaatgctgacaagggagatgatgagaagaacacagacaacagcgaggacagcagagctgaggacaacttcaacctggagaaggagaaggaggatgtgcctgtggagatgagcaatggagagcccggctgccactactttgagcagctgcactacaatgacatgtggctgaaggtgggggactgtgtgttcatcaagagccacggcctggtgcggccccgggtgggccgcatcgagaaggtgtgggtgagagatggagctgcctacttctacggccccatcttcatccaccctgaggagacagaacatgagcccaccaagatgttctacaagaaggaggtgttcctgagcaacctggaggagacctgccccatgacctgcatcctgggcaaatgtgctgtgctgtccttcaaggacttcctgagctgccggcccacagagatcccagaaaatgacatcctgctgtgtgagagccgctacaatgaaagtgacaagcagatgaagaagttcaagggcctgaagcgcttcagcctgagcgccaaggtggtggatgatgagatctactacttcaggaagcccatcgtgccccagaaggagcccagccccctgctggagaagaagatccagctgctggaggccaagtttgctgagctggagggcggagatgatgacatcgaggagatgggagaagaagattctgagagcacccccaagagcgccaagggcagcgccaagaaggagggcagcaagaggaagatcaacatgagcggctacatcctcttcagcagcgagatgagagctgtgatcaaggcccagcacccagactacagctttggagagctgagccggctggtgggcacagagtggaggaacctggagacagccaagaaggccgagtatgagggcatgatgggcggctacccacctggcctgccccccctgcagggccctgtggatggcctggtgtccatgggctccatgcagcccctgcaccctgggggccccccaccccaccacctgcccccaggagtgcccggcctgcccggcatccccccacctggggtgatgaaccagggcgtggcccccatggtgggcaccccagcccctgggggcagcccctacggccagcaggtgggcgtgctgggccccccaggccagcaggcccccccaccctacccaggcccccaccctgctggcccccctgtgatccagcagcccaccacccccatgtttgtggcccccccacccaagacccagaggctgctgcacagcgaggcctacctgaagtacatcgagggcctgtctgctgagagcaacagcatcagcaagtgggaccagaccctggccgcccggaggagagatgtgcacctgagcaaggagcaggagagccggctgcccagccactggctgaagagcaaaggagcccacaccaccatggctgatgccctgtggaggctgcgggacctgatgctgcgggacaccctgaacatccggcaggcctacaacctggagaatgtgtag

SEQ ID NO: 197776 - DNA, 459 bp, Artificial Sequence
  derived and/or modified sequence
atgggcagcaagagaagaagagccaccagccccagcagctctgtgtctggggactttgatgatggccaccacagcgtgtccaccccaggccccagcaggaagagaagaaggctgagcaacctgcccaccgtggaccccatcgctgtgtgccacgagctgtacaacaccatccgggactacaaggatgagcagggccgcctgctgtgtgagctgttcatccgggcccccaagagaagaaaccagcctgactactatgaggtggtgtcccagcccatcgacctgatgaagatccagcagaagctgaagatggaggagtatgatgatgtgaacctgctgacagctgacttccagctgctcttcaacaatgccaagagctactacaagccagacagccctgagtacaaggccgcctgcaagctgtgggacctgtacctgcggaccagaaatgaatttgtgtag

SEQ ID NO: 197777 - DNA, 693 bp, Artificial Sequence
  derived and/or modified sequence
atgggcagcaagagaagaagagccaccagccccagcagctctgtgtctggggactttgatgatggccaccacagcgtgtccaccccaggccccagcaggaagagaagaaggctgagcaacctgcccaccgtggaccccatcgctgtgtgccacgagctgtacaacaccatccgggactacaaggatgagcagggccgcctgctgtgtgagctgttcatccgggcccccaagagaagaaaccagcctgactactatgaggtggtgtcccagcccatcgacctgatgaagatccagcagaagctgaagatggaggagtatgatgatgtgaacctgctgacagctgacttccagctgctcttcaacaatgccaagagctactacaagccagacagccctgagtacaaggccgcctgcaagctgtgggacctgtacctgcggaccagaaatgaatttgtgcagaagggggaggctgatgatgaagatgatgatgaagatggccaggacaaccagggcaccgtgacagagggcagcagccctgcctacctgaaggagatcctggagcagctgctggaggccatcgtggtggccaccaaccccagcggccgcctcatcagcgagctgttccagaagctgcccagcaaggtgcagtacccagactactatgccatcatcaaggagcccatcgacctgtag

SEQ ID NO: 197778 - DNA, 4749 bp, Artificial Sequence
  derived and/or modified sequence
atgggcagcaagcggcggcgggccaccagccccagcagcagcgtgagtggagattttgatgacggccatcacagcgttagcaccccggggccatccagaaagcgaaggcgtttaagcaatctgccaactgtggaccccatagccgtgtgtcacgaactgtacaataccatccgggactataaggatgagcagggcaggttactgtgtgaactgtttatccgtgcccctaagaggagaaatcagcctgactactatgaggtggtgagtcaacccatcgacctgatgaaaatccagcagaaactcaaaatggaagagtatgatgatgtaaacttgttgacagctgattttcagcttctgtttaacaatgccaagagctactacaaacccgacagtccagaatataaggcagcctgcaagttgtgggatctttacctccggactagaaatgagtttgtccagaaaggcgaagcagatgatgaggacgacgacgaggacggacaggacaatcagggaacggtgactgagggtagcagccctgcatatctcaaggagatcctagagcagctactggaagcgatcgtcgtagccacaaatccttcaggccggctgatctccgaattgtttcagaaactcccctccaaggttcagtatcccgattattacgccatcatcaaagagccaattgatctgaagacaatcgctcagcgaatccaaaatgggtcttacaaatcaattcatgccatggccaaagacatagacctattagcaaagaacgctaaaacttataatgaacccggttctcaggtctttaaggacgccaattccatcaagaagatcttttacatgaagaaagcagagatcgaacaccacgagatggccaagtcatccctgcgtatgagaaccccttccaatctagcggcagctagacttacaggaccctcccattcaaaaggaagtctcggcgaggagcggaatcctacaagcaagtactacagaaataagagagccgtgcagggggggcggctgtcggcaataacaatggccctacagtatggcagcgagtccgaagaggatgctgccctggcagccgcacgatatgaagaaggagaatcggaggccgaatctattactagctttatggatgtgagtaaccccttctaccagctctacgacactgtgcgtagctgtagaaataatcaggggcagctgattgcggagcccttctaccacctacctagtaagaaaaagtatccagactattaccagcagattaagatgccaatcagtctacaacagatcagaactaaactcaagaaccaggaatacgagacacttgatcatctcgagtgcgatctcaacttaatgttcgaaaacgccaagaggtacaatgtccctaattcagctatctacaaacgggttttaaagctacagcaggttatgcaggctaagaagaaggagctggctagaagggatgatattgaggacggggatagtatgatctcctccgccacttcggataccgggagtgcgaaacgcaagtcaaaaaagaatattagaaagcagcgaatgaaaattctatttaacgtggttctagaggcacgggaacctggaagtggccgacgtctttgtgacctgttcatggtaaagccctccaaaaaggactatcctgattattataaaatcatcctggaacccatggacttgaaaattattgaacataacatacgcaacgacaaatatgccggagaggaggggatgattgaagatatgaaactgatgttcagaaatgctagacactataacgaagaaggatcccaagtgtacaacgacgcccatatcctggagaagctcctgaaggaaaagcgcaaagagcttggccccctacccgatgacgacgacatggcctctcctaagctgaagctgagtaggaagtcggggatttccccaaaaaagagtaaatatatgactcccatgcagcagaaactcaatgaggtatacgaggctgttaagaattacaccgacaagcggggacggcgactgtctgctatatttctgcgacttccatctagatctgaactgcccgattactacttgacaatcaaaaagccaatggatatggaaaagattcgatcccacatgatggctaacaaatatcaggacatcgatagtatggtggaggatttcgtaatgatgtttaacaatgcctgtacatataatgaacctgagagccttatttacaaggacgccttagtcctgcacaaggtgctgcttgaaaccagacgagacctggaaggcgacgaggactctcacgtgcccaacgtaactctgctcatacaggagctcatccataatctgttcgtgtccgtcatgagtcaccaagacgatgaggggcggtgctatagcgactccttggctgagatccctgccgtggatcctaactttccaaacaagccaccactcacattcgacattattagaaagaatgtggagaataataggtacagaaggctggacttgttccaggagcacatgttcgaggtgctcgagcgagcccgccggatgaatagaactgatagtgaaatctatgaggatgccgtggagctgcagcagtttttcatcaaaatccgagacgagctctgtaagaacggggagatcctgttgagccctgccctctcctacactacaaagcacctgcataatgatgtggagaaagagcgaaaagaaaaattgccaaaagagattgaagaggacaaactcaaaagagaagaagaaaaaagagaagctgaaaaatcagaagattcatccggagcggcagggctgagcggcttacatcgcacgtactctcaggactgctcattcaagaacagcatgtaccacgtgggggactatgtctatgtcgaacccgcagaggctaatctacagccccatatcgtgtgcattgaaagactctgggaggactcggccgagaaggaagtgttcaagtctgattactataacaaagttccggtgtcaaagatcctggggaagtgcgttgtgatgtttgtgaaggagtacttcaagctgtgtcccgagaacttccgggatgaagacgtgtttgtgtgcgaatctaggtactccgccaaaaccaagagctttaagaaaataaaattatggacaatgcccatcagctccgtacgattcgtaccccgagatgtaccgcttcccgttgttagagtggctagcgtcttcgcaaacgccgacaagggtgacgatgagaaaaataccgataactccgaagactctagagcggaggacaatttcaacctggagaaagaaaaggaggacgtcccagtggagatgtccaatggagagcccggctgccattatttcgaacagctccattataatgacatgtggttgaaagtgggggattgtgtctttattaaatcgcacgggctggttagacctagggtggggcggatagagaaagtttgggtgcgcgatggagcagcctacttttatggccctatttttattcatccagaggaaactgaacatgagcctactaagatgttctacaaaaaagaggtctttctcagcaacctggaagagacctgcccgatgacttgtattcttggtaaatgcgccgtcttatcgttcaaggacttcctgtcttgccgccccaccgagataccagaaaacgacattcttctgtgcgaaagtaggtataacgagtccgacaagcagatgaagaaattcaaaggtctgaagcggtttagtctgtccgctaaagtggtggacgatgaaatttattattttcggaagcctattgtgccacagaaggagccctctcctttattggagaagaagatccagttacttgaggccaagtttgccgagttggagggaggagatgacgacattgaggaaatgggggaagaggattcagaaagtaccccaaaaagcgctaagggaagtgctaaaaaggaggggtcaaaaaggaagatcaatatgtcaggctatattctgttcagctctgaaatgagggcagtgatcaaggctcagcaccctgattactcgttcggggaattgtcacgactcgtcggaactgaatggcgcaacctggagactgccaagaaagctgaatatgagggaatgatgggcggctacccccctggtttaccacctcttcagggacctgtcgacggactagtttccatgggatcaatgcagccccttcatcccggaggccctccaccccaccatctgccacccggtgtgccaggactacccggaatccctccccccggagtcatgaaccagggtgtcgcaccaatggtcggtaccccggcccctggcggtagcccatacggtcagcaagtgggcgtgcttggcccccctggccagcaggcaccccctccttatccgggaccgcatccggcaggaccaccggtcattcagcagcctacaacacctatgttcgtagctcctcctccaaaaacccaaagactgctccatagcgaggcctaccttaagtacatagagggactctctgcagagtctaattctatctcaaaatgggatcagactctagccgcccggcgaagggatgtgcacctatccaaagaacaggaaagcagactgcctagccactggctcaagtccaagggcgcccatactacgatggctgatgccttatggcgacttagggatctaatgctccgcgatacactgaatatcagacaggcgtacaatctcgagaatgtgtag

SEQ ID NO: 197779 - DNA, 459 bp, Artificial Sequence
  derived and/or modified sequence
atgggcagcaagcggcggcgggccaccagccccagcagcagcgtgagcggtgatttcgacgacgggcatcactcagtctccacacccggtccttctaggaagaggaggcgcttgtcaaatctgccaacagtcgaccccattgccgtgtgccatgagttgtacaatactattcgcgattacaaggacgaacaggggcggctgttgtgtgagctgttcattagggcaccgaaaaggcgtaaccagccagactattatgaggttgtgagtcaacctatcgacctgatgaaaatccagcagaaattgaaaatggaagaatacgatgatgtgaacctgctcacagccgattttcaactcctatttaataatgccaaatcctactataagcccgacagcccggagtacaaggccgcatgcaaattgtgggatttgtaccttcggacaagaaatgaattcgtatag

SEQ ID NO: 197780 - DNA, 693 bp, Artificial Sequence
  derived and/or modified sequence
atgggcagcaagcggcggcgggccaccagccccagcagcagcgtgagcggagactttgacgatggccatcacagcgtatctacacctgggccatcaagaaagcggaggagacttagcaatcttcccactgtcgatcctatcgccgtatgtcacgagctctacaacactatacgagactataaagatgaacaaggtcgcctcctctgcgagctgttcatccgtgcccccaagaggaggaatcaaccagactattatgaggtcgtgagtcagcccattgatcttatgaaaattcagcagaagctaaaaatggaagagtacgacgatgtgaatctgctgaccgcagacttccagttgttatttaataatgcaaaatcatactataaaccagactctcctgagtataaagcagcttgcaagctctgggatctctatctgcgaactcggaacgaattcgtacagaagggagaagctgacgacgaagacgatgatgaggacggtcaggacaaccaggggaccgtgaccgaggggagttccccagcatatctcaaagaaatcctggagcagttactagaggctatcgttgtggccaccaaccccagcgggcggctgatctctgaactgtttcagaaactccctagcaaggttcagtatcctgattactatgcaattattaaggaacccattgatctgtag

SEQ ID NO: 197781 - DNA, 5071 bp, Artificial Sequence
  derived and/or modified sequence
aggagcaatagcagcagccgtggcggccacggggcggggcgcggcggtcggtgaccgcggccggggctgcaggcggcggagcggctggaagttggattccatgggttccaagagaagaagagctacctccccttccagcagtgtcagcggggactttgatgatgggcaccattctgtgtcaacaccaggcccaagcaggaaaaggaggagactttccaatcttccaactgtagatcctattgccgtgtgccatgaactctataataccatccgagactataaggatgaacagggcagacttctctgtgagctcttcattagggcaccaaagcgaagaaatcaaccagactattatgaagtggtttctcagcccattgacttgatgaaaatccaacagaaactaaaaatggaagagtatgatgatgttaatttgctgactgctgacttccagcttctttttaacaatgcaaagtcctattataagccagattctcctgaatataaagccgcttgcaaactctgggatttgtaccttcgaacaagaaatgagtttgttcagaaaggagaagcagatgacgaagatgatgatgaagatgggcaagacaatcagggcacagtgactgaaggatcttctccagcttacttgaaggagatcctggagcagcttcttgaagccatagttgtagctacaaatccatcaggacgtctcattagcgaactttttcagaaactgccttctaaagtgcaatatccagattattatgcaataattaaggagcctatagatctcaagaccattgcccagaggatacagaatggaagctacaaaagtattcatgcaatggccaaagatatagatctcctcgcaaaaaatgccaaaacttataatgagcctggctctcaagtattcaaggatgcaaattcaattaaaaaaatattttatatgaaaaaggctgaaattgaacatcatgaaatggctaagtcaagtcttcgaatgaggactccatccaacttggctgcagccagactgacaggtccttcacacagtaaaggcagccttggtgaagagagaaatcccactagcaagtattaccgtaataaaagagcagtacaaggaggtcgtttatcagcaattacaatggcacttcaatatggctcagaaagtgaagaagatgctgctttagctgctgcacgctatgaagagggagagtcagaagcagaaagcatcacttcctttatggatgtttcaaatcctttttatcagctttatgacacagttaggagttgtcggaataaccaagggcagctaatagctgaacctttttaccatttgccttcaaagaaaaaataccctgattattaccagcaaattaaaatgcccatatcactacaacagatccgaacaaaactgaagaatcaagaatatgaaactttagatcatttggagtgtgatctgaatttaatgtttgaaaatgccaaacgctataatgtgcccaattcagccatctacaagcgagttctaaaattgcagcaagttatgcaggcaaagaagaaagagcttgccaggagagacgatatcgaggacggagacagcatgatctcttcagccacctctgatactggtagtgccaaaagaaaaagtaaaaagaacataagaaagcagcgaatgaaaatcttattcaatgttgttcttgaagctcgagagccaggttcaggcagaagactttgtgacctatttatggttaaaccatccaaaaaggactatcctgattattataaaatcatcttggagccaatggacttgaaaataattgagcataacatccgcaatgacaaatatgctggtgaagagggaatgatagaagacatgaagctgatgttccggaatgccaggcactataatgaggagggctcccaggtttataatgatgcacatatcctggagaagttactcaaggagaaaaggaaagagctgggcccactgcctgatgatgatgacatggcttctcccaaactcaagctgagtaggaagagtggcatttctcctaaaaaatcaaaatacatgactccaatgcagcagaaactaaatgaggtctatgaagctgtaaagaactatactgataagaggggtcgccgcctcagtgccatatttctgaggcttccctctagatctgagttgcctgactactatctgactattaaaaagcccatggacatggaaaaaattcgaagtcacatgatggccaacaagtaccaagatattgactctatggttgaggactttgtcatgatgtttaataatgcctgtacatacaatgagccggagtctttgatctacaaagatgctcttgttctacacaaagtcctgcttgaaacacgcagagacctggagggagatgaggactctcatgtcccaaatgtgactttgctgattcaagagcttatccacaatctttttgtgtcagtcatgagtcatcaggatgatgagggaagatgctacagcgattctttagcagaaattcctgctgtggatcccaactttcctaacaaaccaccccttacatttgacataattaggaagaatgttgaaaataatcgctaccgtcggcttgatttatttcaagagcatatgtttgaagtattggaacgagcaagaaggatgaatcggacagattcagaaatatatgaagatgcagtagaacttcagcagttttttattaaaattcgtgatgaactctgcaaaaatggagagattcttctttcaccggcactcagctataccacaaaacatttgcataatgatgtggagaaagagagaaaggaaaaattgccaaaagaaatagaggaagataaactaaaacgagaagaagaaaaaagagaagctgaaaagagtgaagattcctctggtgctgcaggcctctcaggcttacatcgcacatacagccaggactgtagctttaaaaacagcatgtaccatgttggagattacgtctatgtggaacctgcagaggccaacctacaaccacatatcgtctgtattgaaagactgtgggaggattcagctgaaaaagaagtttttaagagtgactattacaacaaagttccagttagtaaaattctaggcaagtgtgtggtcatgtttgtcaaggaatactttaagttatgcccagaaaacttccgagatgaggatgtttttgtctgtgaatcacggtattctgccaaaaccaaatcttttaagaaaattaaactgtggaccatgcccatcagctcagtcaggtttgtccctcgggatgtgcctctgcctgtggttcgcgtggcctctgtatttgcaaatgcagataaaggtgatgatgagaagaatacagacaactcagaggacagtcgagctgaagacaattttaacttggaaaaggaaaaagaagatgtccctgtggaaatgtccaatggtgaaccaggttgccactactttgagcagctccattacaatgacatgtggctgaaggttggcgactgtgtcttcatcaagtcccatggcctggtgcgtcctcgtgtgggcagaattgaaaaagtatgggttcgagatggagctgcatatttttatggccccatcttcattcacccagaagaaacagagcatgagcccacaaaaatgttctacaaaaaagaagtatttctgagtaatctggaagaaacctgccccatgacatgtattctcggaaagtgtgctgtgttgtcattcaaggacttcctctcctgcaggccaactgaaataccagaaaatgacattctgctttgtgagagccgctacaatgagagcgacaagcagatgaagaaattcaaaggattgaagaggttttcactctctgctaaagtggtagatgatgaaatttactacttcagaaaaccaattgttcctcagaaggagccatcacctttgctggaaaagaagatccagttgctagaagctaaatttgccgagttagaaggtggagatgatgatattgaagagatgggagaagaagatagtgagtctaccccaaagtctgccaaaggcagtgcaaagaaggaaggctccaaacggaaaatcaacatgagtggctacatcctgttcagcagtgagatgagggctgtgattaaggcccaacacccagactactctttcggggagctcagccgcctggtggggacagaatggagaaatcttgagacagccaagaaagcagaatatgaaggcatgatgggtggctatccgccaggccttccacctttgcagggcccagttgatggccttgttagcatgggcagcatgcagccacttcaccctggggggcctccaccccaccatcttccgccaggtgtgcctggcctcccgggcatcccaccaccgggtgtgatgaaccaaggagtggcccctatggtagggactccagcaccaggtggaagtccatatggacaacaggtgggagttttggggcctccagggcagcaggcaccacctccatatcccggcccacatccagctggaccccctgtcatacagcagccaacaacacccatgtttgtagctcccccaccaaagacccagcggcttcttcactcagaggcctacctgaaatacattgaaggactcagtgcggagtccaacagcattagcaagtgggatcagacactggcagctcgaagacgcgacgtccatttgtcgaaagaacaggagagccgcctaccctctcactggctgaaaagcaaaggggcccacaccaccatggcagatgccctctggcgccttcgagatttgatgctccgggacaccctcaacattcgccaagcatacaacctagaaaatgtttaatcacatcattacgtttcttttatatagaagcataaagagttgtggatcagtagccattttagttactgggggtggggggaaggaacaaaggaggataatttttattgcattttactgtacatcacaaggccatttttatatacggacacttttaataagctatttcaatttgtttgttatattaagttgactttatcaaatacacaaagatttttttgcata

SEQ ID NO: 197782 - DNA, 4749 bp, Artificial Sequence
  derived and/or modified sequence
atgggatccaaacggagacgagctacgtccccttcatccagcgtgagtggagatttcgatgacggccaccattcagtatccacacccggacccagccgcaaacggaggagactgagcaatctccccacagtggacccaatcgctgtgtgtcatgagctatataataccatcagggattataaggatgagcagggtagactgctgtgcgagttgttcatccgggcaccaaagaggagaaatcagcccgactactatgaagtggtgagtcaacctattgatctcatgaagattcagcagaaactaaagatggaggagtatgatgatgtgaatctgctcacagcagatttccaacttttattcaacaatgctaaatcttattataaaccagacagccccgaatacaaagctgcctgcaaactgtgggacctttacttacgcacccgtaatgaatttgtacagaagggggaggcagacgacgaagacgatgatgaagacggacaagacaaccaaggcaccgtaactgaaggctcgagtccagcctatttgaaggaaatacttgagcagctccttgaggccatcgttgtcgccaccaatcctagtggacgtttaatttctgagctattccagaaactcccatccaaggtccagtatccagattactacgcaattatcaaggaacctattgaccttaaaacaattgcacagagaattcagaacggttcctataaatccatccacgccatggcaaaagacatcgacctgctggcaaagaacgccaaaacatacaacgagcccggaagtcaggtgttcaaagacgcaaattctatcaaaaagatcttttacatgaagaaagcagaaatagagcatcacgaaatggcgaagagtagccttcgcatgcgcaccccaagcaaccttgccgcagcgagactaacgggcccatcccattcaaaaggatccctgggagaggaaagaaaccctaccagtaaatattaccgaaataagcgagccgttcaaggaggcaggctctctgccataaccatggcgctgcagtatgggtctgaaagtgaagaggatgcagccctggctgccgcacggtatgaggagggcgagagtgaggccgaaagcattacttccttcatggatgtctctaaccctttctatcagctctacgatacagtgcgatcatgccggaataaccaggggcagctgattgccgagccattctatcacctgcccagcaagaaaaaataccctgactattatcaacaaattaagatgccaatatctctgcaacagattcggactaagctgaaaaatcaggaatacgagaccctggaccatttggagtgcgatttaaacctcatgtttgagaatgctaaaaggtataacgtcccaaatagcgcgatttataagagagtccttaagctccagcaggtgatgcaggctaagaagaaggagctggcccgacgtgacgacatcgaggacggagactctatgatatcaagtgccacctcagacaccggcagcgccaagcgcaagagcaaaaagaacattcgtaaacaaaggatgaaaatcttgtttaacgtggttctggaagcgcgtgagcctggatcagggaggcggttgtgtgatctgttcatggttaaacctagcaaaaaggactacccagactattacaagataattctggaacccatggacctcaagattatagaacacaacatcagaaacgacaagtacgcaggcgaagaaggcatgattgaagatatgaaattgatgtttcgcaacgccagacactataatgaagaaggatcacaggtgtataatgacgcgcacatactcgagaaactgctgaaagagaaacgcaaagagttagggccattgccagatgatgacgacatggctagcccaaagctgaaactcagcagaaaaagtggcatatctccgaagaaatctaaatacatgacccctatgcaacagaagctgaatgaggtgtacgaggccgtcaagaactataccgataagcgcggacgtcgattgtccgcgatctttctccggcttcccagcaggagtgaactgcccgactactacctcacaataaagaagccgatggacatggagaaaatccgttctcacatgatggctaacaagtaccaggacatcgacagcatggtcgaagatttcgtgatgatgttcaacaatgcgtgcacctataacgaaccggagagcctgatatacaaagacgctctggtgctgcataaagtgcttctggaaacccgacgcgatttggaaggcgatgaggattctcatgtgccaaacgtgaccctgctgatacaggaactcattcataatctctttgtttctgtgatgtcccaccaggatgacgaagggaggtgttattccgactcccttgccgagattcctgctgtcgaccccaacttcccaaataagccacccctgaccttcgatattatcaggaaaaatgtggaaaacaacaggtatcgacgcctggacctgttccaggagcacatgtttgaggtactggaacgggcacgacggatgaaccgaacagacagcgagatctacgaggacgcggtggagctgcaacaattttttatcaagattcgagatgagctctgcaagaacggggagatactgctgtccccagcactgagttatacaaccaaacacctccataacgacgtggaaaaggagaggaaggagaagttgcccaaggaaattgaggaggacaagcttaaacgcgaagaggaaaaaagagaagccgagaagtcggaggatagttcaggcgcagcaggcctgtctgggcttcacaggacatattcccaggattgtagttttaagaattcaatgtaccatgttggcgactacgtttacgtagagcccgcagaagccaatctgcagcctcacattgtgtgtatcgagcggctgtgggaagacagtgcggaaaaggaagttttcaagagcgattactacaacaaggtccctgtatcaaaaattctgggcaagtgcgtggttatgttcgtgaaggagtactttaaactgtgtccagagaactttagagatgaagacgtctttgtctgtgaatcccggtactcagcaaagactaaaagttttaaaaagatcaaactttggactatgcccattagcagtgttaggtttgtgcctcgcgacgtgcccctgcccgtcgtgcgtgtggctagcgtctttgcaaatgccgataagggggacgacgaaaagaacaccgacaacagcgaggactctcgcgcagaagacaactttaacctggagaaggagaaagaggatgtccctgtagaaatgagcaatggagagcctggatgtcattattttgagcagttgcactataacgatatgtggttaaaggttggggactgcgtgtttattaaatcacacggcctggtgaggccacgggtgggacgaatcgagaaggtgtgggtccgtgacggagctgcatatttttacggcccaatatttatccacccggaggagaccgagcatgagccaaccaaaatgttttacaagaaagaggtcttcttaagtaacttagaggaaacgtgccctatgacctgcatcctgggcaagtgcgccgtgctctccttcaaggactttttgagttgtcgcccaacagaaatccctgaaaacgacatcctgttgtgcgaatcaagatacaatgagtcagacaagcaaatgaaaaaatttaaggggctgaaaagatttagtctttcggcaaaagttgtggacgacgagatctactattttcgaaagccaattgtgccccagaaggaaccctccccacttttggagaagaagattcagctgcttgaggctaagttcgctgagttggaggggggagatgatgacatcgaagaaatgggtgaggaggacagcgaatctacccctaaaagtgccaagggtagcgctaaaaaggaaggatccaagaggaagatcaacatgtccggctacattctcttcagttccgaaatgcgggcagtcataaaagcacagcatcctgattactcttttggagagctgagccggctagtcgggacagaatggcgaaatcttgagacagccaaaaaagctgaatacgaaggcatgatgggcggttatccccctggtctgcccccactgcagggacctgttgatggccttgtgagcatggggagcatgcaaccacttcaccccggaggtccaccccctcaccatctacctcccggagtgccaggtctgcctggtatccctccgccaggagtaatgaaccagggcgtggccccaatggttggcaccccggctccgggtggttcaccctatggacagcaagttggcgtgttgggccctcccggtcagcaggcccctcctccttatcctggaccccatccggctggacccccagtgatccagcagccgacaacccccatgttcgtcgcccctcccccaaaaacgcaacggctgctccactctgaggcatacctgaagtacattgagggtttgagcgcggaatccaattcaatcagtaaatgggatcaaaccctagccgctagacggagagacgtgcacctatcgaaggagcaagagtctcggctcccttcccactggctgaagagcaagggcgcacacacaactatggccgacgcactgtggagactgagggatctcatgttgcgcgacacattaaatatcagacaggcgtacaacctcgagaacgtgtag

SEQ ID NO: 197783 - DNA, 459 bp, Artificial Sequence
  derived and/or modified sequence
atgggatccaaacggcgaagggcaacctcgccatctagcagcgtgtccggcgactttgacgatggccatcacagcgtgtctacccctggaccttctcggaaacgtcgcaggctgagcaacttacccactgtggaccctatcgccgtgtgccacgaactatataatacaattcgcgactacaaggatgagcaaggacgtctcctatgcgagctttttattcgagctcctaaaaggcgcaaccaacctgattactatgaggtggtctcacaacccattgatctcatgaagatccaacagaaattgaagatggaggaatacgacgatgtcaacctgttaaccgctgatttccagctgctgtttaacaacgcaaagtcatactataagccagacagtcccgaatacaaggctgcctgcaagctatgggacctatatctcagaactcgcaatgagtttgtctag

SEQ ID NO: 197784 - DNA, 693 bp, Artificial Sequence
  derived and/or modified sequence
atgggctccaaaagacgaagggctacaagcccgtcttcaagcgtctccggcgacttcgacgatgggcaccatagcgtgagcacacccggtcctagccgcaagcgcagacgcttatcaaacctgcctaccgtggacccgattgctgtgtgccatgagctatacaacaccattcgggactacaaagacgagcagggcaggttactatgcgagctgtttattcgcgctcccaagcggaggaaccagcctgattattacgaggtagtctcccagccaattgatctcatgaagatccaacagaagctgaaaatggaggagtacgacgacgttaatctgcttaccgctgattttcagctgttattcaacaatgcaaagtcttactataagcccgactcaccggaatataaggctgcctgtaagctgtgggatctttaccttcggacaagaaatgaattcgtgcagaagggggaggcggacgacgaggatgatgatgaggatggacaggacaatcagggtactgtcaccgagggctccagccctgcttaccttaaggagattctggaacagctgctcgaggctatcgtggttgccaccaacccatcaggacgactcatatcagaacttttccagaaactcccgtcaaaggtccagtatccagactattacgccattattaaggagcccatcgacctgtag

SEQ ID NO: 197785 - DNA, 4749 bp, Artificial Sequence
  derived and/or modified sequence
atgggcagcaagagaagaagagccaccagccccagcagcagcgtgagcggcgacttcgacgacggccaccacagcgtgagcacccccggccccagcagaaagagaagaagactgagcaacctgcccaccgtggaccccatcgccgtgtgccacgagctgtacaacaccatcagagactacaaggacgagcagggcagactgctgtgcgagctgttcatcagagcccccaagagaagaaaccagcccgactactacgaggtggtgagccagcccatcgacctgatgaagatccagcagaagctgaagatggaggagtacgacgacgtgaacctgctgaccgccgacttccagctgctgttcaacaacgccaagagctactacaagcccgacagccccgagtacaaggccgcctgcaagctgtgggacctgtacctgagaaccagaaacgagttcgtgcagaagggcgaggccgacgacgaggacgacgacgaggacggccaggacaaccagggcaccgtgaccgagggcagcagccccgcctacctgaaggagatcctggagcagctgctggaggccatcgtggtggccaccaaccccagcggcagactgatcagcgagctgttccagaagctgcccagcaaggtgcagtaccccgactactacgccatcatcaaggagcccatcgacctgaagaccatcgcccagagaatccagaacggcagctacaagagcatccacgccatggccaaggacatcgacctgctggccaagaacgccaagacctacaacgagcccggcagccaggtgttcaaggacgccaacagcatcaagaagatcttctacatgaagaaggccgagatcgagcaccacgagatggccaagagcagcctgagaatgagaacccccagcaacctggccgccgccagactgaccggccccagccacagcaagggcagcctgggcgaggagagaaaccccaccagcaagtactacagaaacaagagagccgtgcagggcggcagactgagcgccatcaccatggccctgcagtacggcagcgagagcgaggaggacgccgccctggccgccgccagatacgaggagggcgagagcgaggccgagagcatcaccagcttcatggacgtgagcaaccccttctaccagctgtacgacaccgtgagaagctgcagaaacaaccagggccagctgatcgccgagcccttctaccacctgcccagcaagaagaagtaccccgactactaccagcagatcaagatgcccatcagcctgcagcagatcagaaccaagctgaagaaccaggagtacgagaccctggaccacctggagtgcgacctgaacctgatgttcgagaacgccaagagatacaacgtgcccaacagcgccatctacaagagagtgctgaagctgcagcaggtgatgcaggccaagaagaaggagctggccagaagagacgacatcgaggacggcgacagcatgatcagcagcgccaccagcgacaccggcagcgccaagagaaagagcaagaagaacatcagaaagcagagaatgaagatcctgttcaacgtggtgctggaggccagagagcccggcagcggcagaagactgtgcgacctgttcatggtgaagcccagcaagaaggactaccccgactactacaagatcatcctggagcccatggacctgaagatcatcgagcacaacatcagaaacgacaagtacgccggcgaggagggcatgatcgaggacatgaagctgatgttcagaaacgccagacactacaacgaggagggcagccaggtgtacaacgacgcccacatcctggagaagctgctgaaggagaagagaaaggagctgggccccctgcccgacgacgacgacatggccagccccaagctgaagctgagcagaaagagcggcatcagccccaagaagagcaagtacatgacccccatgcagcagaagctgaacgaggtgtacgaggccgtgaagaactacaccgacaagagaggcagaagactgagcgccatcttcctgagactgcccagcagaagcgagctgcccgactactacctgaccatcaagaagcccatggacatggagaagatcagaagccacatgatggccaacaagtaccaggacatcgacagcatggtggaggacttcgtgatgatgttcaacaacgcctgcacctacaacgagcccgagagcctgatctacaaggacgccctggtgctgcacaaggtgctgctggagaccagaagagacctggagggcgacgaggacagccacgtgcccaacgtgaccctgctgatccaggagctgatccacaacctgttcgtgagcgtgatgagccaccaggacgacgagggcagatgctacagcgacagcctggccgagatccccgccgtggaccccaacttccccaacaagccccccctgaccttcgacatcatcagaaagaacgtggagaacaacagatacagaagactggacctgttccaggagcacatgttcgaggtgctggagagagccagaagaatgaacagaaccgacagcgagatctacgaggacgccgtggagctgcagcagttcttcatcaagatcagagacgagctgtgcaagaacggcgagatcctgctgagccccgccctgagctacaccaccaagcacctgcacaacgacgtggagaaggagagaaaggagaagctgcccaaggagatcgaggaggacaagctgaagagagaggaggagaagagagaggccgagaagagcgaggacagcagcggcgccgccggcctgagcggcctgcacagaacctacagccaggactgcagcttcaagaacagcatgtaccacgtgggcgactacgtgtacgtggagcccgccgaggccaacctgcagccccacatcgtgtgcatcgagagactgtgggaggacagcgccgagaaggaggtgttcaagagcgactactacaacaaggtgcccgtgagcaagatcctgggcaagtgcgtggtgatgttcgtgaaggagtacttcaagctgtgccccgagaacttcagagacgaggacgtgttcgtgtgcgagagcagatacagcgccaagaccaagagcttcaagaagatcaagctgtggaccatgcccatcagcagcgtgagattcgtgcccagagacgtgcccctgcccgtggtgagagtggccagcgtgttcgccaacgccgacaagggcgacgacgagaagaacaccgacaacagcgaggacagcagagccgaggacaacttcaacctggagaaggagaaggaggacgtgcccgtggagatgagcaacggcgagcccggctgccactacttcgagcagctgcactacaacgacatgtggctgaaggtgggcgactgcgtgttcatcaagagccacggcctggtgagacccagagtgggcagaatcgagaaggtgtgggtgagagacggcgccgcctacttctacggccccatcttcatccaccccgaggagaccgagcacgagcccaccaagatgttctacaagaaggaggtgttcctgagcaacctggaggagacctgccccatgacctgcatcctgggcaagtgcgccgtgctgagcttcaaggacttcctgagctgcagacccaccgagatccccgagaacgacatcctgctgtgcgagagcagatacaacgagagcgacaagcagatgaagaagttcaagggcctgaagagattcagcctgagcgccaaggtggtggacgacgagatctactacttcagaaagcccatcgtgccccagaaggagcccagccccctgctggagaagaagatccagctgctggaggccaagttcgccgagctggagggcggcgacgacgacatcgaggagatgggcgaggaggacagcgagagcacccccaagagcgccaagggcagcgccaagaaggagggcagcaagagaaagatcaacatgagcggctacatcctgttcagcagcgagatgagagccgtgatcaaggcccagcaccccgactacagcttcggcgagctgagcagactggtgggcaccgagtggagaaacctggagaccgccaagaaggccgagtacgagggcatgatgggcggctacccccccggcctgccccccctgcagggccccgtggacggcctggtgagcatgggcagcatgcagcccctgcaccccggcggcccccccccccaccacctgccccccggcgtgcccggcctgcccggcatccccccccccggcgtgatgaaccagggcgtggcccccatggtgggcacccccgcccccggcggcagcccctacggccagcaggtgggcgtgctgggcccccccggccagcaggccccccccccctaccccggcccccaccccgccggcccccccgtgatccagcagcccaccacccccatgttcgtggcccccccccccaagacccagagactgctgcacagcgaggcctacctgaagtacatcgagggcctgagcgccgagagcaacagcatcagcaagtgggaccagaccctggccgccagaagaagagacgtgcacctgagcaaggagcaggagagcagactgcccagccactggctgaagagcaagggcgcccacaccaccatggccgacgccctgtggagactgagagacctgatgctgagagacaccctgaacatcagacaggcctacaacctggagaacgtgtag

SEQ ID NO: 197786 - DNA, 459 bp, Artificial Sequence
  derived and/or modified sequence
atgggcagcaagagaagaagagccaccagccccagcagcagcgtgagcggcgacttcgacgacggccaccacagcgtgagcacccccggccccagcagaaagagaagaagactgagcaacctgcccaccgtggaccccatcgccgtgtgccacgagctgtacaacaccatcagagactacaaggacgagcagggcagactgctgtgcgagctgttcatcagagcccccaagagaagaaaccagcccgactactacgaggtggtgagccagcccatcgacctgatgaagatccagcagaagctgaagatggaggagtacgacgacgtgaacctgctgaccgccgacttccagctgctgttcaacaacgccaagagctactacaagcccgacagccccgagtacaaggccgcctgcaagctgtgggacctgtacctgagaaccagaaacgagttcgtgtag

SEQ ID NO: 197787 - DNA, 693 bp, Artificial Sequence
  derived and/or modified sequence
atgggcagcaagagaagaagagccaccagccccagcagcagcgtgagcggcgacttcgacgacggccaccacagcgtgagcacccccggccccagcagaaagagaagaagactgagcaacctgcccaccgtggaccccatcgccgtgtgccacgagctgtacaacaccatcagagactacaaggacgagcagggcagactgctgtgcgagctgttcatcagagcccccaagagaagaaaccagcccgactactacgaggtggtgagccagcccatcgacctgatgaagatccagcagaagctgaagatggaggagtacgacgacgtgaacctgctgaccgccgacttccagctgctgttcaacaacgccaagagctactacaagcccgacagccccgagtacaaggccgcctgcaagctgtgggacctgtacctgagaaccagaaacgagttcgtgcagaagggcgaggccgacgacgaggacgacgacgaggacggccaggacaaccagggcaccgtgaccgagggcagcagccccgcctacctgaaggagatcctggagcagctgctggaggccatcgtggtggccaccaaccccagcggcagactgatcagcgagctgttccagaagctgcccagcaaggtgcagtaccccgactactacgccatcatcaaggagcccatcgacctgtag

SEQ ID NO: 197788 - protein, 379 aa, Artificial Sequence
  derived and/or modified sequence
MEFDCEGLRRLLGKYKFRDLTVEELRNVNVFFPHFKYSMDTYVFKDSSQKDLLNFTGTIPVMYQGNTYNIPIRFWILDSHPFAPPICFLKPTANMGILVGKHVDAQGRIYLPYLQNWSHPKSVIVGLIKEMIAKFQEELPMYSLSSSDEARQVDLLAYIAKITEGVSDTNSKSWANHENKTVNKITVVGGGELGIACTLAISAKGIADRLVLLDLSEGTKGATMDLEIFNLPNVEISKDLSASAHSKVVIFTVNSLGSSQSYLDVVQSNVDMFRALVPALGHYSQHSVLLVASQPVEIMTYVTWKLSTFPANRVIGIGCNLDSQRLQYIITNVLKAQTSGKEVWVIGEQGEDKVLTWSGQEEVVSHTSQVQLSNRDIMI

SEQ ID NO: 197789 - DNA, 1140 bp, Artificial Sequence
  derived and/or modified sequence
atggagttcgactgcgagggcctgagaagactgctgggcaagtacaagttcagagacctgaccgtggaggagctgagaaacgtgaacgtgttcttcccccacttcaagtacagcatggacacctacgtgttcaaggacagcagccagaaggacctgctgaacttcaccggcaccatccccgtgatgtaccagggcaacacctacaacatccccatcagattctggatcctggacagccaccccttcgccccccccatctgcttcctgaagcccaccgccaacatgggcatcctggtgggcaagcacgtggacgcccagggcagaatctacctgccctacctgcagaactggagccaccccaagagcgtgatcgtgggcctgatcaaggagatgatcgccaagttccaggaggagctgcccatgtacagcctgagcagcagcgacgaggccagacaggtggacctgctggcctacatcgccaagatcaccgagggcgtgagcgacaccaacagcaagagctgggccaaccacgagaacaagaccgtgaacaagatcaccgtggtgggcggcggcgagctgggcatcgcctgcaccctggccatcagcgccaagggcatcgccgacagactggtgctgctggacctgagcgagggcaccaagggcgccaccatggacctggagatcttcaacctgcccaacgtggagatcagcaaggacctgagcgccagcgcccacagcaaggtggtgatcttcaccgtgaacagcctgggcagcagccagagctacctggacgtggtgcagagcaacgtggacatgttcagagccctggtgcccgccctgggccactacagccagcacagcgtgctgctggtggccagccagcccgtggagatcatgacctacgtgacctggaagctgagcaccttccccgccaacagagtgatcggcatcggctgcaacctggacagccagagactgcagtacatcatcaccaacgtgctgaaggcccagaccagcggcaaggaggtgtgggtgatcggcgagcagggcgaggacaaggtgctgacctggagcggccaggaggaggtggtgagccacaccagccaggtgcagctgagcaacagagacatcatgatctag

SEQ ID NO: 197790 - DNA, 1140 bp, Artificial Sequence
  derived and/or modified sequence
atggagtttgactgcgagggtctgaggcggctgcttggcaagtacaagttccgtgatctgaccgtggaggagttgcgcaatgtgaacgtcttttttccacactttaaatattccatggacacatatgtatttaaagattctagccaaaaagacttgctgaatttcacagggaccatccccgtgatgtaccaaggcaatacttacaatatcccaattaggttttggattctggactcacatccctttgcaccccccatctgtttcctgaagccaaccgctaatatgggcattttggtgggtaaacacgtggatgcccagggaagaatctaccttccctaccttcagaactggtctcaccccaagtctgtgattgtgggcttaattaaagagatgatcgccaagtttcaagaagagttgccaatgtacagcctgtcctcttcagatgaagcaaggcaggtggatttacttgcctacatcgcaaaaataaccgagggtgtgagcgacaccaatagcaaatcttgggcaaaccacgagaataagacggtgaataaaatcaccgtcgtcggcggcggtgaactcggtatagcatgtacccttgctatcagtgccaaagggattgctgatcggcttgtactcctggatctctctgagggtaccaaaggcgcaactatggatttggagatctttaacctcccaaacgtcgagatatcgaaagatctgtcagcatctgcccattcaaaggtggttatcttcactgtcaacagcctaggctcttcccaatcttacctcgatgtggtccagtcgaatgtggatatgtttagagccttggttcccgctttaggacactattcccaacacagtgtcctgcttgtcgcttcccagcccgttgaaatcatgacttacgtgacttggaaactgtctacctttcccgcgaatagggtcatcggaataggatgtaaccttgattcccaaaggttacaatacatcattaccaatgtcctgaaggcccagacctccggtaaagaggtgtgggtaatcggcgagcagggcgaggataaggtgttgacttggtccggtcaggaggaggtggtgtcacacacaagccaggtgcagctgtctaatcgcgatataatgatttag

SEQ ID NO: 197791 - DNA, 1140 bp, Artificial Sequence
  derived and/or modified sequence
atggagtttgactgtgagggcctgcggcggctgctgggcaagtacaagttccgggacctgactgtggaggagctgagaaatgtgaatgtgttcttcccccacttcaagtacagcatggacacctacgtgttcaaggacagcagccagaaggacctgctgaacttcaccggcaccatccctgtgatgtaccagggcaacacctacaacatccccatccgcttctggatcctggacagccacccctttgccccacccatctgcttcctgaagcccacagccaacatgggcatcctggtgggcaagcacgtggatgcccagggccgcatctacctgccctacctgcagaactggagccaccccaagagcgtcatcgtgggcctcatcaaggagatgattgccaagttccaggaggagctgcccatgtacagcctgagcagcagtgatgaggcccggcaggtggacctgctggcctacatcgccaagatcacagaaggagtgtctgacaccaacagcaagtcctgggccaaccacgagaacaagacagtgaacaagatcaccgtggtgggcggcggggagctgggcatcgcctgcaccctggccatcagcgccaagggcattgctgaccggctggtgctgctggacctgtctgagggcaccaagggggccaccatggacctggagatcttcaacctgcccaacgtggagatcagcaaggacctgagcgccagcgcccacagcaaggtggtgatcttcaccgtgaacagcctgggcagcagccagagctacctggatgtggtgcagagcaatgtggacatgttccgggccctggtgcctgccctgggccactacagccagcacagcgtgctgctggtggccagccagcctgtggagatcatgacctacgtgacctggaagctgagcaccttccctgccaacagagtgattggaattggctgcaacctggacagccagaggctgcagtacatcatcaccaacgtgctgaaggcccagaccagcggcaaggaggtgtgggtgattggagagcagggcgaggacaaggtgctgacctggagcggccaggaggaggtggtgagccacaccagccaggtgcagctgagcaacagagacatcatgatctag

SEQ ID NO: 197792 - DNA, 1140 bp, Artificial Sequence
  derived and/or modified sequence
atggagttcgactgcgagggcctgcggcggctgctgggcaagtacaaattcagggacctaaccgtagaagaactgcgaaatgtaaatgtgttcttcccgcattttaaatatagcatggatacatatgtgtttaaggactcaagccagaaggatctgcttaactttacgggaacgattccagtgatgtaccagggaaatacgtataacatacccatccggttttggatcctggacagccaccccttcgcccctcccatctgttttctgaagcccacggcaaacatgggcatcttggtgggcaagcacgtcgatgcacagggaagaatctacctgccatatctgcagaactggtcacaccccaaaagtgtgatcgtggggcttatcaaggagatgattgccaagttccaggaggaactacccatgtactccttgtcatccagcgacgaggcccgacaggtcgatctcctggcatacatcgctaagataacagaaggtgtatctgacacaaattctaagagttgggcaaaccacgagaacaagaccgttaataagattaccgtagtgggagggggcgagctagggatagcctgtaccctcgccatctccgctaagggaatcgctgatcgcctagttctcctagacttgagtgaagggactaagggagccactatggacctggaaatcttcaatctcccgaatgtggaaatctctaaagatctgagcgccagtgctcactcgaaagtcgtgatttttactgtgaatagtctgggctccagccagtcctacttggatgtcgtccaaagcaatgtggacatgtttcgcgccttggtcccagcactcggccactatagtcagcactctgtgttacttgtggcatcccagcccgtggagattatgacctacgttacatggaaactctccacttttccagctaacagggtcatcgggatcggctgcaatctcgactcacaaaggttacagtatattatcacgaacgtgctgaaagcccagacctcaggcaaagaggtttgggtgataggagaacagggtgaggacaaagtgctgacctggagtgggcaggaggaagtggtgtcacacactagccaagtgcagctgagcaatcgcgacataatgatctag

SEQ ID NO: 197793 - DNA, 1140 bp, Artificial Sequence
  derived and/or modified sequence
atggagtttgattgtgaaggcctgcggagactcctaggcaaatacaaattccgagacctgactgtggaggagctccgcaatgtcaacgttttctttccccacttcaagtactctatggatacctatgttttcaaagacagttcccagaaggacctgttaaattttacaggtactatacctgtcatgtatcaggggaatacatacaacatccctattagattttggatcctggacagccacccctttgcaccacctatttgtttcctgaaacctacagcaaatatgggcattttggtgggaaaacacgtggatgcccagggcaggatctatctcccctatctgcagaattggagccaccccaaatctgtaatcgtagggttaatcaaagaaatgatagccaaatttcaggaggagctgcccatgtactctttatcaagctcagacgaagctcgccaggttgaccttctcgcttacattgccaaaattacagagggtgtcagcgacacaaacagcaagtcatgggcaaatcatgaaaataagacagtcaacaagatcacggtcgtcgggggaggtgaactcggcattgcttgtacattagctatctccgcaaaagggattgctgataggctggtgctgctggacctgtccgaaggaaccaagggggcaacaatggaccttgaaatatttaacttgcccaacgtggaaatttccaaagacctcagcgctagcgcgcacagtaaggtggtgatatttactgtgaactctttgggctctagccaatcttaccttgatgtcgtccaatcgaacgtggatatgtttcgcgctcttgtccctgccttggggcattactcccaacattcagtcctgctagtggcatcacagccagtggagatcatgacatatgttacctggaaactatccacattccctgccaatcgggtgatcggcatcggttgtaatctggacagccagcggctgcagtacatcattaccaatgtgctgaaagcccaaacctctggaaaagaggtctgggttataggagagcagggcgaagataaggtactgacttggagcgggcaagaagaggtggtcagtcacaccagccaggtgcaactgtcaaacagggacattatgatctag

SEQ ID NO: 197794 - DNA, 2503 bp, Artificial Sequence
  derived and/or modified sequence
agtttggtcctcagcggcttccgtcctgcagcaagtccggaagaaggtccgggggctggagtcctgggacctagctcgggaccggcctggagatggagttcgactgcgagggcctgagacggctgcttggcaagtacaagttcagggacctaactgtggaagaactaaggaatgtaaatgtatttttcccacatttcaaatattccatggacacctatgtttttaaagatagttctcagaaagacctgctgaattttactggcacaattcctgtgatgtatcagggtaatacatataacataccaattcgtttctggattttggattctcaccctttcgctccccctatttgcttcttgaagccaactgcaaatatgggaatcttagtcggaaaacatgtggatgctcaaggcagaatatatttgccctatctccaaaactggagccatcctaaatctgtcattgttggattaattaaagaaatgattgccaagtttcaagaggaacttcccatgtattctctatcatcatctgatgaggcacggcaggtagacttgctagcctatattgcaaaaatcactgaaggtgtttcagatacaaattcaaagagctgggcaaatcatgagaataaaacagtcaataaaattactgtggttggaggtggagaactcggtattgcctgcacattagcaatttcagcaaagggtattgcagacaggcttgtcctcttagacctctcagaagggactaaaggagccacgatggaccttgaaatcttcaaccttcctaatgtggagatcagcaaagatttgtctgcctctgctcattccaaggtggtgatcttcacagtcaactctttgggtagttctcagtcgtaccttgatgtggtacagagcaatgtggatatgttcagagcccttgtcccagctctgggacattatagtcaacacagtgtcctgctcgttgcatctcaaccagtggaaatcatgacctatgtaacatggaaactgagtacatttcctgcaaatcgagtgatcggaattggatgtaatctggattcacagagattacagtatattattacaaatgttttgaaggcacagacttcaggcaaagaagtatgggttattggcgagcaaggagaagacaaagtgctcacatggagtggccaagaagaagtagtgagtcatacctctcaagtgcagctgtccaacagggatattatgatataaatagtgaagtgtttttaagtttgccttgcatccttggaaccaatggagtatctgaagttatcaaaaccacactgaaagaagatacagttactgagaaactccaaagcagtgcatcctcaatccacagtctccaacaacagttaaaactttgattctcaaatgcaatttgagaggctggacttctacctaaagggaaaagtcatttaattttacctatatataggtttgaggatttctgtatcctgctacttacttttacaaactgcttggttaaagtagagggtttcttgattagctttgtgatgtaaatccttaaggagttatacaaggaggggaaaaattaattttatttggggttcttgagatatctatgctgttctttaaatctacagcaggggtaaacattcatctgcagtgtgcatcaatttaaatcatatatcctaaactaaaagcacaattcatacttcgggaatattttataagtaatatatctttaaaagaaaattaccctttgacttttataatcaacataagttccaggcccagtatggatttacaaaatctgtgtcagttgtacattcacaggatccacagcttaagttactaatgtttcttgtgtaaaatcctgttggtagtaatagtaaagcattgtatttcccttcttcaaattaattacctaccaaaaaatggaaaagaattttacatgcactttaaaatagtaaaatggaaagtgaatttttaaaatatatgcattaaaagtttactttaatttccagtgggacttcctttatgaaattttccataacctcttcctggagtattacaagatctccaacatctcataaactaattgtgatattagtggaaccataagcaaatatatatttttagtggaaatagattatgaatgaaagccaagcaccttactttaaagccaaaatatgagattttcattaaaaacattggtcataatagggagaggttttttatttgttctgagcaaatcctttaacctctcctgatgatacagttcagagtacacacactttggtgatggatcaagagcaatattttcttatgtgaaagatagcttattattactattgtgacatacaactaatagtaacagttaacatcaacacttcatatataccaggcagcatgataagcactttattattttactgaatcctcacaacagaccactgaggtagggactattgccatcatcattttataaaaggaaattgaggtttagtcctcaagaagtc

SEQ ID NO: 197795 - protein, 627 aa, Artificial Sequence
  derived and/or modified sequence
MCVPRSGLILSCICLYCGVLLPVLLPNLPFLTCLSMSTLESVTYLPEKGLYCQRLPSSRTHGGTESLKGKNTENMGFYGTLKMIFYKMKRKLDHGSEVRSFSLGKKPCKVSEYTSTTGLVPCSATPTTFGDLRAANGQGQQRRRITSVQPPTGLQEWLKMFQSWSGPEKLLALDELIDSCEPTQVKHMMQVIEPQFQRDFISLLPKELALYVLSFLEPKDLLQAAQTCRYWRILAEDNLLWREKCKEEGIDEPLHIKRRKVIKPGFIHSPWKSAYIRQHRIDTNWRRGELKSPKVLKGHDDHVITCLQFCGNRIVSGSDDNTLKVWSAVTGKCLRTLVGHTGGVWSSQMRDNIIISGSTDRTLKVWNAETGECIHTLYGHTSTVRCMHLHEKRVVSGSRDATLRVWDIETGQCLHVLMGHVAAVRCVQYDGRRVVSGAYDFMVKVWDPETETCLHTLQGHTNRVYSLQFDGIHVVSGSLDTSIRVWDVETGNCIHTLTGHQSLTSGMELKDNILVSGNADSTVKIWDIKTGQCLQTLQGPNKHQSAVTCLQFNKNFVITSSDDGTVKLWDLKTGEFIRNLVTLESGGSGGVVWRIRASNTKLVCAVGSRNGTEETKLLVLDFDVDMK

SEQ ID NO: 197796 - DNA, 3734 bp, Artificial Sequence
  derived and/or modified sequence
cttacgggttccctggagcggatcaccatataattgatgtgcagtctgcattgctgaatcctggactgcaccattctgtgttcaagggaagatgtaatctgatccctctgctgctgagggaggaatctgttcagtcaaggctttgacagggcatagtctcctccaataatcttctccgttctctctcattattccctcgagttcttctcagtcaagctgcatgtatgtatgtgtgtcccgagaagcggtttgatactgagctgcatttgcctttactgtggagttttgttgccggttctgctccctaatcttccttttctgacgtgcctgagcatgtccacattagaatctgtgacatacctacctgaaaaaggtttatattgtcagagactgccaagcagccggacacacgggggcacagaatcactgaaggggaaaaatacagaaaatatgggtttctacggcacattaaaaatgattttttacaaaatgaaaagaaagttggaccatggttctgaggtccgctctttttctttgggaaagaaaccatgcaaagtctcagaatatacaagtaccactgggcttgtaccatgttcagcaacaccaacaacttttggggacctcagagcagccaatggccaagggcaacaacgacgccgaattacatctgtccagccacctacaggcctccaggaatggctaaaaatgtttcagagctggagtggaccagagaaattgcttgctttagatgaactcattgatagttgtgaaccaacacaagtaaaacatatgatgcaagtgatagaaccccagtttcaacgagacttcatttcattgctccctaaagagttggcactctatgtgctttcattcctggaacccaaagacctgctacaagcagctcagacatgtcgctactggagaattttggctgaagacaaccttctctggagagagaaatgcaaagaagaggggattgatgaaccattgcacatcaagagaagaaaagtaataaaaccaggtttcatacacagtccatggaaaagtgcatacatcagacagcacagaattgatactaactggaggcgaggagaactcaaatctcctaaggtgctgaaaggacatgatgatcatgtgatcacatgcttacagttttgtggtaaccgaatagttagtggttctgatgacaacactttaaaagtttggtcagcagtcacaggcaaatgtctgagaacattagtgggacatacaggtggagtatggtcatcacaaatgagagacaacatcatcattagtggatctacagatcggacactcaaagtgtggaatgcagagactggagaatgtatacacaccttatatgggcatacttccactgtgcgttgtatgcatcttcatgaaaaaagagttgttagcggttctcgagatgccactcttagggtttgggatattgagacaggccagtgtttacatgttttgatgggtcatgttgcagcagtccgctgtgttcaatatgatggcaggagggttgttagtggagcatatgattttatggtaaaggtgtgggatccagagactgaaacctgtctacacacgttgcaggggcatactaatagagtctattcattacagtttgatggtatccatgtggtgagtggatctcttgatacatcaatccgtgtttgggatgtggagacagggaattgcattcacacgttaacagggcaccagtcgttaacaagtggaatggaactcaaagacaatattcttgtctctgggaatgcagattctacagttaaaatctgggatatcaaaacaggacagtgtttacaaacattgcaaggtcccaacaagcatcagagtgctgtgacctgtttacagttcaacaagaactttgtaattaccagctcagatgatggaactgtaaaactatgggacttgaaaacgggtgaatttattcgaaacctagtcacattggagagtggggggagtgggggagttgtgtggcggatcagagcctcaaacacaaagctggtgtgtgcagttgggagtcggaatgggactgaagaaaccaagctgctggtgctggactttgatgtggacatgaagtgaagagcagaaaagatgaatttgtccaattgtgtagacgatatactccctgcccttccccctgcaaaaagaaaaaaagaaaagaaaaagaaaaaaatcccttgttctcagtggtgcaggatgttggcttggggcaacagattgaaaagacctacagactaagaaggaaaagaagaagagatgacaaaccataactgacaagagaggcgtctgctgtctcatcacataaaaggcttcacttttgactgagggcagctttgcaaaatgagactttctaaatcaaaccaggtgcaattatttctttattttcttctccagtggtcattgggcagtgttaatgctgaaacatcattacagattctgctagcctgttcttttaccactgacagctagacacctagaaaggaactgcaataatatcaaaacaagtactggttgactttctaattagagagcatctgcaacaaaaagtcatttttctggagtggaaaagcttaaaaaaattactgtgaattgtttttgtacagttatcatgaaaagcttttttttttttttttttgccaaccattgccaatgtcaatcaatcacagtattagcctctgttaatctatttactgttgcttccatatacattcttcaatgcatatgttgctcaaaggtggcaagttgtcctgggttctgtgagtcctgagatggatttaattcttgatgctggtgctagaagtaggtcttcaaatatgggattgttgtcccaaccctgtactgtactcccagtggccaaacttatttatgctgctaaatgaaagaaagaaaaaagcaaattatttttttttattttttttctgctgtgacgttttagtcccagactgaattccaaatttgctctagtttggttatggaaaaaagactttttgccactgaaacttgagccatctgtgcctctaagaggctgagaatggaagagtttcagataataaagagtgaagtttgcctgcaagtaaagaattgagagtgtgtgcaaagcttattttcttttatctgggcaaaaattaaaacacattccttggaacagagctattacttgcctgttctgtggagaaacttttctttttgagggctgtggtgaatggatgaacgtacatcgtaaaactgacaaaatattttaaaaatatataaaacacaaaattaaaataaagttgctggtcagtcttagtgttttacagtatttgggaaaacaactgttacagttttattgctctgagtaactgacaaagcagaaactattcagtttttgtagtaaaggcgtcacatgcaaacaaacaaaatgaatgaaacagtcaaatggtttgcctcattctccaagagccacaactcaagctgaactgtgaaagtggtttaacactgtatcctaggcgatcttttttcctccttctgtttatttttttgtttgttttatttatagtctgatttaaaacaatcagattcaagttggttaattttagttatgtaacaacctgacatgatggaggaaaacaacctttaaagggattgtgtctatggtttgattcacttagaaattttattttcttataacttaagtgcaataaaatgtgttttttcatgtt

SEQ ID NO: 197797 - DNA, 1884 bp, Artificial Sequence
  derived and/or modified sequence
atgtgcgtgccccggagcggcttgattctgtcttgcatttgcctgtattgcggggtgcttcttcctgtactactgcctaatctgcccttcctgacgtgcctttctatgtctacactcgagtccgtaacctatctgccagaaaaaggactgtattgccaacggctaccctcttcccggacccacggcggaactgagagtctcaaagggaaaaacactgagaatatgggcttctatgggacactgaagatgatattctataagatgaaaaggaaactggaccacggatccgaagtgaggtcttttagtctgggaaagaaaccatgcaaagtgtctgagtacacaagtactaccgggctcgtaccttgttctgccactcccaccacatttggcgacctgcgagctgcgaatggccaaggccagcagcggcgccggataacaagtgttcagccgcccactgggctacaggagtggctcaaaatgttccaatcttggagcggacctgagaagctgctggccctcgacgagctcatcgatagttgtgaacccacacaggtcaagcacatgatgcaagtgatcgagccacagtttcagcgggacttcataagcctgttacccaaggaactagccctatatgtgttgtcgtttctagaacctaaagatttgctacaggccgcacagacttgcaggtattggaggattctggctgaagacaatctgctgtggcgcgagaaatgcaaggaggaaggaattgacgaacctctccacatcaagcggagaaaggtaataaagccagggtttattcatagtccctggaagagcgcctacatccgtcagcaccgcatagataccaactggcggaggggtgaactgaagagccctaaagtgttgaaaggacatgatgatcacgtgattacttgtctgcagttctgcggaaaccggatcgtttcggggagcgacgataacacccttaaggtctggtctgccgtcacagggaagtgtctgagaactctggtcggccacacaggtggggtctggtccagccagatgagggataatattattatcagtgggtcaaccgatcggacactgaaagtctggaatgcggaaaccggcgagtgcatccatacactgtacggccatacgtctaccgtacgatgtatgcacctgcacgagaagcgggttgtctccggatctcgcgacgctacactgcgggtttgggatattgagactgggcaatgcctacacgtgctgatgggccatgtcgctgccgtcaggtgcgttcaatatgatggacgaagggttgtcagcggcgcttacgactttatggtgaaggtgtgggaccctgagacagaaacctgtttacacactctccagggacacaccaacagagtttacagcttgcagttcgacggtatacacgtcgtgtcaggcagtctggatacatccattcgagtgtgggatgtagagactgggaattgcatacacacactgactgggcaccagagcctgacctccggcatggaacttaaagacaatattctggtgagtgggaatgccgacagtacggtgaagatttgggatattaagacaggccaatgcctgcagaccctgcagggacctaataagcaccagagcgctgtaacatgtctccagttcaataaaaatttcgtgatcaccagttcagacgacggaacagtgaaattgtgggatttgaaaaccggtgagttcatcagaaatctggtgacgttagagtcgggcgggagtggtggggtcgtatggaggataagggcttctaacactaaactggtgtgtgctgtaggctctcgcaatggcaccgaagagactaaactgctggtgcttgatttcgacgtggacatgaaatag

SEQ ID NO: 197798 - DNA, 1884 bp, Artificial Sequence
  derived and/or modified sequence
atgtgtgtgcccaggagcggcctcatcctgagctgcatctgcctgtactgcggcgtgctgctgcctgtgctgctgcccaacctgcccttcctgacctgcctgtccatgagcaccctggagagcgtgacctacctgcctgagaagggcctgtactgccagaggctgcccagcagcaggacccatggaggaacagagagcctgaagggcaagaacacagagaacatgggcttctacggcaccctgaagatgatcttctacaagatgaagaggaagctggaccacggcagcgaggtgcgctccttcagcctgggcaagaagccctgcaaggtgtctgagtacaccagcaccaccggcctggtgccctgcagcgccacccccaccacctttggagacctgcgggccgccaacggccagggccagcagaggcggcgcatcacctctgtgcagccccccaccggcctgcaggagtggctgaagatgttccagagctggagcggccctgagaagctgctggccctggatgagctgattgacagctgtgagcccacccaggtgaagcacatgatgcaggtgattgagccccagttccagagggacttcatcagcctgctgcccaaggagctggccctgtatgtgctgtccttcctggagcccaaggacctgctgcaggccgcccagacctgccgctactggaggatcctggccgaggacaacctgctgtggagggagaagtgcaaggaggagggcattgatgagcccctgcacatcaagaggaggaaggtgatcaagccaggcttcatccacagcccctggaagagcgcctacatccggcagcacagaattgacaccaactggaggagaggagagctgaagagccccaaggtgctgaagggccatgatgaccacgtgatcacctgcctgcagttctgtggcaaccgcatcgtgtctggcagtgatgacaacaccctgaaggtgtggagcgctgtgacaggcaagtgcctgcggaccctggtgggccacactggaggagtgtggagcagccagatgagggacaacatcatcatcagcggcagcacagacaggaccctgaaggtgtggaatgctgagaccggggagtgcatccacaccctgtatggccacaccagcacagtgcgctgcatgcacctgcacgagaagagggtggtgtctggcagcagagatgccaccctgcgggtgtgggacatcgagaccggccagtgcctgcacgtgctgatgggccacgtggccgctgtgcgctgtgtgcagtatgatggccggcgggtggtgtctggggcctatgacttcatggtgaaggtgtgggaccctgagacagagacctgcctgcacaccctgcagggccacaccaacagagtgtacagcctgcagtttgatggcatccacgtggtgtctggcagcctggacaccagcatccgggtgtgggatgtggagaccggcaactgcatccacaccctgaccggccaccagagcctgaccagcggcatggagctgaaggacaacatcctggtgtctggaaatgctgacagcacagtgaagatctgggacatcaagacaggccagtgcctgcagaccctgcagggccccaacaagcaccagagcgctgtgacctgcctgcagttcaacaagaacttcgtcatcaccagcagtgatgatggcaccgtgaagctgtgggacctgaagacaggagagttcatccggaacctggtgaccctggagagcggcggcagcggcggcgtggtgtggaggatccgggccagcaacaccaagctggtgtgtgctgtgggcagcagaaatggaacagaggagaccaagctgctggtgctggactttgatgtggacatgaagtag

SEQ ID NO: 197799 - DNA, 1884 bp, Artificial Sequence
  derived and/or modified sequence
atgtgcgtgccccggagcggcctgatcctgagctgcatctgcctgtactgcggcgtgctcctacctgttttgttgccaaatctcccttttctgacatgcttgtctatgtccacgcttgaaagcgtaacatacctgccagagaagggtctgtactgtcagagactccccagctcacggacgcacggtggaactgagtccctgaagggaaaaaacacggaaaacatggggttctacggaactctcaagatgatcttctacaagatgaagcgtaagctggatcatggcagcgaggttcggagctttagcctagggaagaagccatgtaaagtctccgaatacacttcaaccactggcctggttccatgctcggcaacacctactacttttggggacctccgagcagcaaacggccaaggtcaacagaggcgaagaataacctctgtgcagccaccgactggcctgcaggagtggctgaagatgttccagagttggagtggcccagaaaagcttttggccctagacgaattaattgatagctgtgagcctacgcaggtgaagcacatgatgcaggtcatcgaaccacagttccaacgcgactttattagccttttacctaaagagttggcattgtacgtgttatcttttctagaaccaaaggacttgttgcaagctgcccagacctgcaggtattggaggatcttagccgaggataacttgctgtggcgcgagaagtgcaaggaggagggcattgacgaacctcttcacattaaaagaaggaaagttatcaaaccgggcttcatccattcgccctggaagtctgcatatattcggcaacaccggatcgacacaaattggaggcgaggcgagctgaagagccctaaggtcctgaagggccatgacgaccatgtgatcacttgcctacaattttgcgggaatagaatcgtttctggtagtgacgataacaccctgaaggtgtggtccgccgttacagggaagtgtttacgaaccttggtgggccacaccggaggtgtgtggagctcacagatgcgggataatatcattatatcgggctccaccgatcgaacgctgaaagtctggaatgccgagactggcgagtgcattcatacattgtatggccatactagcaccgtgcggtgtatgcatctacacgagaagagggtggtcagcggcagtcgtgacgccaccttgcgcgtgtgggacatcgaaaccgggcagtgcctgcacgtcctcatgggccacgtcgccgccgtgcgatgcgtgcagtacgacgggcgtcgtgtggtgtccggagcatatgactttatggtgaaagtttgggacccggaaacagaaacatgcttgcatacccttcagggacatactaatagagtgtattcattacagttcgatgggattcatgtcgtgtcgggctccctggatacttccatcagagtgtgggacgtagagacgggaaactgtattcacacacttaccggacatcagagcctgacatccggcatggaactcaaggataatatcctagtgtctggcaacgccgatagcaccgtaaagatctgggatatcaaaacagggcagtgcttgcaaactctgcaggggccaaacaagcaccaatcagcagtcacatgcctgcagttcaacaagaatttcgttatcacctcgtcagatgacgggactgtgaaactatgggatttgaagacgggcgagtttattagaaacttagtgactttggaaagtggcggcagtgggggagtcgtctggcgcatcagggcaagtaatacaaagctggtctgcgccgtcggttcaagaaacggtacagaagagacaaagctcctcgttctagacttcgacgtggacatgaaatag

SEQ ID NO: 197800 - DNA, 1884 bp, Artificial Sequence
  derived and/or modified sequence
atgtgcgtgccaagatccgggctgatactatcctgcatttgtctctactgcggtgtgttgctccctgttttattacccaatcttcctttcctaacctgcctcagtatgtccacactggagtccgtgacctatttaccagagaaaggcttgtattgccaaagactgccttcttccaggacgcacggcggaactgagtccctgaaaggcaagaatactgaaaatatgggattctatggtacgctgaagatgatcttctacaaaatgaagagaaagttggaccacggatccgaagttcgaagcttctccctgggaaaaaaaccttgtaaagtaagcgaatatacatctacaacgggactagtgccgtgtagcgctacgccaaccacattcggtgatctgagagccgcaaatggccagggtcagcagagaagaagaatcacctctgtgcagcccccaacagggctccaggaatggctcaagatgtttcagtcctggagcggtcctgagaagctgctggctctggacgaactaatcgactcttgcgaaccgacacaggttaagcatatgatgcaggtgatcgagccacagttccagagagacttcatctccttgctgccaaaggagctggcgctgtatgttcttagctttcttgaacctaaggatctgctccaggccgctcaaacgtgtaggtactggcgcattctggctgaagataacctgctgtggcgcgagaagtgtaaggaagaaggtattgacgagcccctccatatcaaaagacgcaaagtaatcaaacctggctttatccactcaccatggaagtcagcctacatccgccagcaccgcatagatacaaactggaggcggggtgaactgaaaagccccaaggtactgaaggggcatgacgatcatgtcatcacatgtctgcagttctgtggaaatcgcatcgtatctggatcggacgataacactctgaaagtttggtccgctgtcactgggaaatgcttacggaccttggtggggcataccggtggcgtgtggtcctcacagatgcgggataacattattatctcaggcagtaccgatcggaccctgaaggtctggaacgccgagaccggggaatgcatacataccttgtatggccatacttctaccgtccggtgcatgcatctgcacgaaaagcgcgtggtgtcaggaagcagagatgccaccctcagagtgtgggacatagagaccggccagtgtttgcatgtgctgatgggccatgttgctgccgtgaggtgcgtacagtacgacggtcgtcgcgttgtgagcggggcttatgacttcatggtgaaggtgtgggaccctgaaactgagacgtgcctgcacactcttcagggccacacaaacagagtgtactctttacagttcgatgggatccacgtggttagcgggtcgctggatacatccatccgcgtctgggacgtagaaactggcaactgtattcatacccttactggccaccaatcactcaccagcggcatggaactgaaggataacatactcgtgtctggcaatgccgactcgacggtgaagatttgggatattaagacaggtcaatgcctgcaaaccctgcaggggcctaataagcaccagtccgcagttacgtgtctgcagttcaataaaaactttgtgataacaagttccgatgacggtaccgttaagctgtgggacctcaaaacgggcgagttcatccggaacctggtgacacttgagagcggtggaagtggtggagtagtgtggcgcatcagagcctccaacactaagctggtctgtgccgtgggttctaggaatggaaccgaagagacaaaactcctcgtactggattttgatgtggatatgaaatag

SEQ ID NO: 197801 - DNA, 1884 bp, Artificial Sequence
  derived and/or modified sequence
atgtgcgtgcccagaagcggcctgatcctgagctgcatctgcctgtactgcggcgtgctgctgcccgtgctgctgcccaacctgcccttcctgacctgcctgagcatgagcaccctggagagcgtgacctacctgcccgagaagggcctgtactgccagagactgcccagcagcagaacccacggcggcaccgagagcctgaagggcaagaacaccgagaacatgggcttctacggcaccctgaagatgatcttctacaagatgaagagaaagctggaccacggcagcgaggtgagaagcttcagcctgggcaagaagccctgcaaggtgagcgagtacaccagcaccaccggcctggtgccctgcagcgccacccccaccaccttcggcgacctgagagccgccaacggccagggccagcagagaagaagaatcaccagcgtgcagccccccaccggcctgcaggagtggctgaagatgttccagagctggagcggccccgagaagctgctggccctggacgagctgatcgacagctgcgagcccacccaggtgaagcacatgatgcaggtgatcgagccccagttccagagagacttcatcagcctgctgcccaaggagctggccctgtacgtgctgagcttcctggagcccaaggacctgctgcaggccgcccagacctgcagatactggagaatcctggccgaggacaacctgctgtggagagagaagtgcaaggaggagggcatcgacgagcccctgcacatcaagagaagaaaggtgatcaagcccggcttcatccacagcccctggaagagcgcctacatcagacagcacagaatcgacaccaactggagaagaggcgagctgaagagccccaaggtgctgaagggccacgacgaccacgtgatcacctgcctgcagttctgcggcaacagaatcgtgagcggcagcgacgacaacaccctgaaggtgtggagcgccgtgaccggcaagtgcctgagaaccctggtgggccacaccggcggcgtgtggagcagccagatgagagacaacatcatcatcagcggcagcaccgacagaaccctgaaggtgtggaacgccgagaccggcgagtgcatccacaccctgtacggccacaccagcaccgtgagatgcatgcacctgcacgagaagagagtggtgagcggcagcagagacgccaccctgagagtgtgggacatcgagaccggccagtgcctgcacgtgctgatgggccacgtggccgccgtgagatgcgtgcagtacgacggcagaagagtggtgagcggcgcctacgacttcatggtgaaggtgtgggaccccgagaccgagacctgcctgcacaccctgcagggccacaccaacagagtgtacagcctgcagttcgacggcatccacgtggtgagcggcagcctggacaccagcatcagagtgtgggacgtggagaccggcaactgcatccacaccctgaccggccaccagagcctgaccagcggcatggagctgaaggacaacatcctggtgagcggcaacgccgacagcaccgtgaagatctgggacatcaagaccggccagtgcctgcagaccctgcagggccccaacaagcaccagagcgccgtgacctgcctgcagttcaacaagaacttcgtgatcaccagcagcgacgacggcaccgtgaagctgtgggacctgaagaccggcgagttcatcagaaacctggtgaccctggagagcggcggcagcggcggcgtggtgtggagaatcagagccagcaacaccaagctggtgtgcgccgtgggcagcagaaacggcaccgaggagaccaagctgctggtgctggacttcgacgtggacatgaagtag

SEQ ID NO: 197802 - protein, 615 aa, Artificial Sequence
  derived and/or modified sequence
MAESGGSSGGAGGGGAFGAGPGPERPNSTADKNGALKCTFSAPSHSTSLLQGLATLRAQGQLLDVVLTINREAFPAHKVVLAACSDYFRAMFTGGMREASQDVIELKGVSARGLRHIIDFAYSAEVTLDLDCVQDVLGAAVFLQMLPVVELCEEFLKAAMSVETCLNIGQMATTFSLASLRESVDAFTFRHFLQIAEEEDFLRLPLERLVFFLQSNRLQSCAEIDLFRAAVRWLQHDPARRPRASHVLCHIRFPLMQSSELVDSVQTLDIMVEDVLCRQYLLEAFNYQVLPFRQHEMQSPRTAVRSDVPSLVTFGGTPYTDSDRSVSSKVYQLPEPGARHFRELTEMEVGCSHTCVAVLDNFVYVAGGQHLQYRSGEGAVDACYRYDPHLNRWLRLQAMQESRIQFQLNVLCGMVYATGGRNRAGSLASVERYCPRRNEWGYACSLKRRTWGHAGAASGGRLYISGGYGISVEDKKALHCYDPVADQWEFKAPMSEPRVLHAMVGAGGRIYALGGRMDHVDRCFDVLAVEYYVPETDQWTSVSPMRAGQSEAGCCLLERKIYIVGGYNWRLNNVTGIVQVYNTDTDEWERDLHFPESFAGIACAPVLLPRAGTRR

SEQ ID NO: 197803 - protein, 145 aa, Artificial Sequence [sequence omitted]

SEQ ID NO: 197804 - DNA, 1848 bp, Artificial Sequence
  derived and/or modified sequence
atggccgagagcggcggcagcagcggcggcgccggcggcggcggcgccttcggcgccggccccggccccgagagacccaacagcaccgccgacaagaacggcgccctgaagtgcaccttcagcgcccccagccacagcaccagcctgctgcagggcctggccaccctgagagcccagggccagctgctggacgtggtgctgaccatcaacagagaggccttccccgcccacaaggtggtgctggccgcctgcagcgactacttcagagccatgttcaccggcggcatgagagaggccagccaggacgtgatcgagctgaagggcgtgagcgccagaggcctgagacacatcatcgacttcgcctacagcgccgaggtgaccctggacctggactgcgtgcaggacgtgctgggcgccgccgtgttcctgcagatgctgcccgtggtggagctgtgcgaggagttcctgaaggccgccatgagcgtggagacctgcctgaacatcggccagatggccaccaccttcagcctggccagcctgagagagagcgtggacgccttcaccttcagacacttcctgcagatcgccgaggaggaggacttcctgagactgcccctggagagactggtgttcttcctgcagagcaacagactgcagagctgcgccgagatcgacctgttcagagccgccgtgagatggctgcagcacgaccccgccagaagacccagagccagccacgtgctgtgccacatcagattccccctgatgcagagcagcgagctggtggacagcgtgcagaccctggacatcatggtggaggacgtgctgtgcagacagtacctgctggaggccttcaactaccaggtgctgcccttcagacagcacgagatgcagagccccagaaccgccgtgagaagcgacgtgcccagcctggtgaccttcggcggcaccccctacaccgacagcgacagaagcgtgagcagcaaggtgtaccagctgcccgagcccggcgccagacacttcagagagctgaccgagatggaggtgggctgcagccacacctgcgtggccgtgctggacaacttcgtgtacgtggccggcggccagcacctgcagtacagaagcggcgagggcgccgtggacgcctgctacagatacgacccccacctgaacagatggctgagactgcaggccatgcaggagagcagaatccagttccagctgaacgtgctgtgcggcatggtgtacgccaccggcggcagaaacagagccggcagcctggccagcgtggagagatactgccccagaagaaacgagtggggctacgcctgcagcctgaagagaagaacctggggccacgccggcgccgccagcggcggcagactgtacatcagcggcggctacggcatcagcgtggaggacaagaaggccctgcactgctacgaccccgtggccgaccagtgggagttcaaggcccccatgagcgagcccagagtgctgcacgccatggtgggcgccggcggcagaatctacgccctgggcggcagaatggaccacgtggacagatgcttcgacgtgctggccgtggagtactacgtgcccgagaccgaccagtggaccagcgtgagccccatgagagccggccagagcgaggccggctgctgcctgctggagagaaagatctacatcgtgggcggctacaactggagactgaacaacgtgaccggcatcgtgcaggtgtacaacaccgacaccgacgagtgggagagagacctgcacttccccgagagcttcgccggcatcgcctgcgcccccgtgctgctgcccagagccggcaccagaagatag

SEQ ID NO: 197805 - DNA, 438 bp, Artificial Sequence
  derived and/or modified sequence
atggccgagagcggcggcagcagcggcggcgccggcggcggcggcgccttcggcgccggccccggccccgagagacccaacagcaccgccgacaagaacggcgccctgaagtgcaccttcagcgcccccagccacagcaccagcctgctgcagggcctggccaccctgagagcccagggccagctgctggacgtggtgctgaccatcaacagagaggccttccccgcccacaaggtggtgctggccgcctgcagcgactacttcagagccatgttcaccggcggcatgagagaggccagccaggacgtgatcgagctgaagggcgtgagcgccagaggcctgagacacatcatcgacttcgcctacagcgccgaggtgaccctggacctggactgcgtgcaggaggtggcccccaagacccccggcaccctggcctag

SEQ ID NO: 197806 - DNA, 1848 bp, Artificial Sequence
  derived and/or modified sequence
atggcagaaagcgggggcagtagcggcggagccggtggcggaggcgcatttggagccggacctggccccgagagaccaaattcaacggcagacaaaaacggcgccctgaagtgtacattcagcgccccttctcactcaacttccctgctccagggtcttgctacactgagggcccaaggccagttattggatgtggtgctgacaataaacagggaagcctttcctgcacacaaggtggtgctagccgcttgctctgactacttccgcgccatgttcacaggcggcatgagagaggccagccaggacgtgatcgaattaaaaggcgtgtctgcaaggggtctgcggcacattattgattttgcatatagcgcggaggttaccctggacctggattgcgtgcaagacgttcttggcgcagccgtgttccttcagatgctgcctgtggtggagctatgtgaggagtttctgaaggccgccatgagcgtggaaacttgtcttaacatagggcagatggccaccacctttagtcttgctagtctcagggaatctgtcgacgcctttactttcagacacttcctgcagattgcggaggaggaggatttcttgcgattgcccttggaacggcttgtgttcttcttgcagtctaataggctgcagtcttgcgcggaaatcgatctgttccgggctgcagtacggtggctccaacatgatccagctagaagacccagggcatcacacgtattatgccatattaggtttcccctgatgcagagcagcgaactggtagattcagtgcagacgttggacattatggtggaggacgtgctgtgccgtcagtacttactcgaagccttcaactatcaagtgcttccttttcgacagcatgaaatgcagtctccccggacggcagtacgctctgatgtgccctccttagtcactttcggcggcaccccatatacggatagcgatcgaagcgtgtcttcaaaagtctatcagctccccgaaccgggggcccgacacttccgggagttgactgaaatggaggtagggtgctctcacacttgtgtggccgtgttggataacttcgtgtatgtagcaggtggccaacatctacagtaccgtagcggcgagggcgctgtggacgcttgctacagatacgacccccatctcaaccgttggctcaggcttcaggcaatgcaagagtcgagaatccagtttcagttgaacgtgctgtgtggcatggtttacgccactggcggaaggaacagagcaggaagcctggcttctgtcgagaggtattgcccgcggcgcaatgaatggggttatgcttgctctctgaaaaggagaacctggggccacgcaggagctgccagcggcggaagactctacatctcaggaggttatggcatatcagtggaggataagaaagcactgcactgttacgatcccgttgcggaccagtgggaatttaaggcacccatgtctgaacctcgggtgttacacgccatggttggagccggcggacgcatctacgccctcggggggagaatggatcatgttgaccggtgttttgatgtgctcgccgttgaatattacgtaccagagaccgatcaatggacaagtgtctctcctatgcgtgcgggccagagcgaggctggctgctgccttctcgagagaaagatatacatcgtagggggttacaactggagattgaataacgtcactgggatagtccaggtatataacacagataccgatgagtgggagcgggatctccatttccctgaaagttttgctggcattgcatgtgctcctgtgctcttgccccgagccggaaccaggcgatag

SEQ ID NO: 197807 - DNA, 438 bp, Artificial Sequence
  derived and/or modified sequence
atggccgaatcaggagggtcttccggaggagcggggggagggggcgccttcggagcagggcctggacccgagagacccaactctacagcagataagaacggagccctgaagtgtaccttttccgctccttcacatagtacctcactgctccaggggttagccaccttacgcgcgcaaggccagcttctcgatgtggttctcactattaatagggaggcatttcccgcccacaaggtcgttttggcagcctgcagtgactattttagggccatgttcaccggcggaatgagagaggcttcacaggacgttattgagctgaaaggggttagcgcccgagggctgagacacatcattgattttgcatacagtgccgaggtgactcttgacctggattgcgtgcaggaggtggcccccaaaactcccgggacgttggcgtag

SEQ ID NO: 197808 - DNA, 1848 bp, Artificial Sequence
  derived and/or modified sequence
atggccgagagcggcggcagcagcggcggggccggcggcggcggggcctttggagctggccctggccctgagcggcccaacagcacagctgacaagaatggagccctgaagtgcaccttcagcgcccccagccacagcaccagcctgctgcagggcctggccaccctgcgggcccagggccagctgctggatgtggtgctgaccatcaaccgggaggccttccctgcccacaaggtggtgctggccgcctgcagcgactacttccgggccatgttcaccggcggcatgagggaggccagccaggacgtcatcgagctgaagggcgtgtctgcccggggcctgcggcacatcatcgactttgcctacagcgctgaggtgaccctggacctggactgtgtgcaggatgtgctgggcgctgctgtgttcctgcagatgctgcctgtggtggagctgtgtgaggagttcctgaaggccgccatgtctgtggagacctgcctgaacatcggccagatggccaccaccttcagcctggccagcctgcgggagagcgtggatgccttcaccttccgccacttcctgcagattgctgaggaggaggacttcctgcggctgcccctggagcggctggtgttcttcctgcagagcaaccggctgcagagctgtgccgagattgacctcttccgggctgctgtgcgctggctgcagcacgaccctgcccggcggccccgggccagccacgtgctgtgccacatccgcttccccctgatgcagagcagcgagctggtggacagcgtgcagaccctggacatcatggtggaggatgtgctgtgccggcagtacctgctggaggccttcaactaccaggtgctgcccttccggcagcacgagatgcagagccccaggacagctgtgcggagtgatgtgcccagcctggtgaccttcggcggcaccccctacacagacagcgacagatctgtgagcagcaaggtgtaccagctgcctgagcccggggcccggcacttccgggagctgacagagatggaggtgggctgcagccacacctgtgtggccgtgctggacaactttgtgtatgtggccggcggccagcacctgcagtacagaagtggagagggcgctgtggatgcctgctaccgctatgacccccacctgaaccgctggctgcggctgcaggccatgcaggagagccgcatccagttccagctgaatgtgctgtgtggcatggtgtatgccaccggcggcaggaacagagctggcagcctggcctctgtggagcgctactgccccaggagaaatgagtggggctacgcctgcagcctgaagaggaggacctggggccacgccggggccgccagcggcggccgcctgtacatcagcggcggctacggcatctctgtggaggacaagaaggccctgcactgctatgaccctgtggccgaccagtgggagttcaaggcccccatgtctgagccccgggtgctgcacgccatggtgggcgctgggggccgcatctatgccctgggcggccgcatggaccacgtggaccgctgctttgatgtgctggccgtggagtactacgtgcctgagacagaccagtggacctctgtgagccccatgagagctggccagagcgaggccggctgctgcctgctggagaggaagatctacatcgtgggcggctacaactggaggctgaacaacgtgactggaattgtgcaggtgtacaacacagacacagatgagtgggagcgggacctgcacttccctgagagctttgctggcatcgcctgtgcccctgtgctgctgcccagggctggcaccaggaggtag

SEQ ID NO: 197809 - DNA, 438 bp, Artificial Sequence
  derived and/or modified sequence
atggccgagagcggcggcagcagcggcggggccggcggcggcggggcctttggagctggccctggccctgagcggcccaacagcacagctgacaagaatggagccctgaagtgcaccttcagcgcccccagccacagcaccagcctgctgcagggcctggccaccctgcgggcccagggccagctgctggatgtggtgctgaccatcaaccgggaggccttccctgcccacaaggtggtgctggccgcctgcagcgactacttccgggccatgttcaccggcggcatgagggaggccagccaggacgtcatcgagctgaagggcgtgtctgcccggggcctgcggcacatcatcgactttgcctacagcgctgaggtgaccctggacctggactgtgtgcaggaggtggcccccaagaccccaggcaccctggcctag

SEQ ID NO: 197810 - DNA, 3122 bp, Artificial Sequence
  derived and/or modified sequence
actcgaacgcgcgacggcggggggaagatggcggagtccggcggtagcagcggtggtgctggtggcggcggcgctttcggcgcgggcccgggccccgagcgcccgaacagcacggccgacaagaacggggccctcaagtgcaccttctcggcacccagccacagcaccagcctcctgcagggcctggccaccctccgcgctcagggccagctcctcgatgttgtgctgactattaacagagaggcctttcctgcacacaaggtcgtcctggctgcctgcagcgactacttcagggccatgttcaccggcggcatgcgggaggcaagccaggacgtcatcgagctgaagggcgtgtcggcccgtggcctgcggcacatcatcgacttcgcctacagcgccgaggtgacactggacctggactgcgtgcaggacgtgctgggcgcggccgtgttcttgcagatgctgcccgtggtggagctgtgcgaggagttcctgaaggcggccatgagcgtggagacctgcctcaacatcggccagatggccaccaccttcagcctggcctcgctgcgagagtcggtggatgccttcaccttccggcacttcctgcagatcgccgaggaggaggatttcctgcgcctgccactggagcgcctggtcttcttcctgcagagcaaccggctgcagagctgtgccgagatcgacctgttccgcgcggccgtccgctggctgcagcatgacccggcccggcggccgcgcgccagccacgtgctctgccacattcgcttcccgctcatgcagtcgtccgagctggtggacagcgtgcagacgctggacatcatggtggaggacgtgctgtgccgccagtatctgctggaggccttcaactaccaggtgctgcccttccggcagcacgagatgcagtctccgcgcaccgccgtgcgctcggatgtgccctcgctcgtcaccttcggcggcacgccctacaccgacagcgaccgctcggtcagcagcaaggtctaccagctgcctgagccgggagcccgccacttccgcgagctcacggagatggaggtaggctgcagccacacgtgcgtggccgtgctggacaattttgtgtacgtggccggggggcagcacctgcagtaccgcagcggcgagggcgcagtggacgcctgctaccgctacgacccccacctgaatcgctggctgcgcctgcaggccatgcaggaaagccgcatccagttccagctgaacgtgctgtgcggcatggtgtacgccacgggcggccgcaaccgagccggcagcctggcctccgtggagcggtactgcccccggcgcaatgagtggggctacgcctgctcgctgaagcgccgtacctggggccatgctggggccgcctcagggggccgcctctacatctcgggtggctacgggatctcagtggaggacaagaaggccctgcactgctacgaccccgtggccgaccagtgggagttcaaggcgcccatgagcgaaccccgcgtgctacacgccatggtgggtgccggcggccgcatctatgccctcgggggccgcatggaccacgtggaccgctgcttcgacgtgctggctgtggagtactatgtgccggagacggaccagtggaccagcgtgagccccatgcgggccggccagtcagaggccggctgctgcctgctggagaggaagatctacatcgtcgggggctacaactggcgtctcaacaacgtcacgggcatcgtacaggtgtacaacacggacaccgacgagtgggagcgggacctgcacttcccggagtccttcgcaggcatagcctgcgcccccgtcctgctgccccgggccgggaccaggaggtagcccccaagacccccgggaccctggcctgaccgcatgttgtctccaagtggggcttggcgaatgcacgtctgcctgagaaccccagtgccccccttcgcccgggctgcccttgaggggcctgctgcgttgataagcccccctcccaggggtccctccctccctccttcccaaagcagatcctggctgcgagtccatccgagggagcctgccggcaaagcgtctgacatgtggtggcagcaaattcgtccccggggtggtttcctcgcctggcccccgagtccccacgggctggcgggtggaatcccaggtctccagggggtccctgtgcagctccatctcacttctctactgcctcccagccccacggtttcaggcattcagatgtgagctcatcaacattgaacccaaagtcggtggtatatgactcaccctccttccaagtctcctgcgcgcgtgtttttaaaataaactcacccgaaacgtccgtaacacacggacctccaggagcagtgagaggtggcttagaagcccctggtttggggtgggtggaggaggagggcacgtgtctgcctcccctggggtgccctccttcccccatcccaagctgctgaggggaggccctggtcatgcctcagttcctgccttcatctgctttccggaggaaaaaccatatcaactcctagaaacgctccttaggggcttgggaccttccatttggcactgagcatcttgtggggccttaactggctgagacatcccggccctctacatttgccctgttggccaggcagtccccttcccgcaattggagggcgacgctaacttcagaatcccatagtggcgcttgccgcaggtctggtggggtgtcttttttctcctccctcctttccacccctccgcgccctgccactccctggcctgccctgtttttgggtcaacattgctacggagccagcagtgaggcctttcccttcaagggctctgtggtatctctggccacatttgttctaatgtctgaacctctaaatcttttctttttgattggttttactgtttttaagaagccagcactgctgtctcatagatgggatttgtactcttggggcaacttaaagtgtctctctcgctgctaacagacgattgatgtcttgtctctgtgacccactcaccatgtaaagaattaacctcctatcttagcagacatcgtctcctaatatttccctttatttaataaaaatgttatggtg

SEQ ID NO: 197811 - DNA, 989 bp, Artificial Sequence
  derived and/or modified sequence
actcgaacgcgcgacggcggggggaagatggcggagtccggcggtagcagcggtggtgctggtggcggcggcgctttcggcgcgggcccgggccccgagcgcccgaacagcacggccgacaagaacggggccctcaagtgcaccttctcggcacccagccacagcaccagcctcctgcagggcctggccaccctccgcgctcagggccagctcctcgatgttgtgctgactattaacagagaggcctttcctgcacacaaggtcgtcctggctgcctgcagcgactacttcagggccatgttcaccggcggcatgcgggaggcaagccaggacgtcatcgagctgaagggcgtgtcggcccgtggcctgcggcacatcatcgacttcgcctacagcgccgaggtgacactggacctggactgcgtgcaggaggtagcccccaagacccccgggaccctggcctgaccgcatgttgtctccaagtggggcttggcgaatgcacgtctgcctgagaaccccagtgccccccttcgcccgggctgcccttgaggggcctgctgcgttgataagcccccctcccaggggtccctccctccctccttcccaaagcagatcctggctgcgagtccatccgagggagcctgccggcaaagcgtctgacatgtggtggcagcaaattcgtccccggggtggtttcctcgcctggcccccgagtccccacgggctggcgggtggaatcccaggtctccagggggtccctgtgcagctccatctcacttctctactgcctcccagccccacggtttcaggcattcagatgtgagctcatcaacattgaacccaaagtcggtggtatatgactcaccctccttccaagtctcctgcgcgcgtgtttttaaaataaactcacccgaaacgtccgtaacacacggacctccaggagcagtgagaggtggcttagaagcccctggtttggggtgggtggagga

SEQ ID NO: 197812 - DNA, 1848 bp, Artificial Sequence
  derived and/or modified sequence
atggccgagagcggcggcagcagcggcggcgccggcggcggcggcgctttcggggccggccctgggcctgagcgccccaactctactgcagataaaaatggagccctgaagtgcaccttctccgctccgtcacattccactagcctcctgcagggattagcaacactgcgcgcacagggacagcttctagacgtcgtgttaactatcaatcgcgaagcatttcccgcccacaaggtcgtactggccgcctgttcagattatttcagggccatgttcactggggggatgcgcgaagcctcccaagacgtgatagagctgaagggggtgagtgcccgtggattacggcacattatcgacttcgcctactctgcagaagtgaccttggacctcgactgtgtccaggacgtgctcggggcagctgtgttcctccagatgctacccgtggtcgaactgtgtgaagaattcctaaaggccgccatgtctgttgagacttgtctgaatattggtcaaatggcaacgacctttagtctggctagcctccgtgaatcagtggacgccttcacgttcagacattttctacagatcgctgaggaagaagacttcttgcggttgcccttggaaagattggtgttttttctccagtccaaccgactgcaatcgtgcgccgaaatcgatctctttagagctgcagtccggtggcttcagcatgatccagctcggcgtcccagggcctctcacgtgctttgccacatccgctttccgctcatgcagtcatcggagctggtagatagtgtccagactcttgatatcatggtggaagacgtgctgtgcagacagtatctcctggaggccttcaactaccaagtgctcccatttagacagcatgaaatgcaatctccacgcacagctgttaggagcgacgttccatccttagtgaccttcggagggaccccttataccgatagcgatcggagcgtctcatcaaaggtgtatcagctgcccgagccaggagctcgacactttagggagcttaccgagatggaagtggggtgctcccatacgtgtgtcgcggtgctggacaacttcgtgtacgtcgcaggcggccagcacctccagtataggtcaggcgaaggcgccgtggatgcctgctaccgctatgacccacacctgaatcgttggttgcgactgcaggccatgcaggaatccaggattcagttccagttgaacgttctatgcggaatggtctatgcaaccggaggaaggaaccgagctggcagcttagcttccgtcgaacggtattgtccacgacggaatgaatgggggtacgcttgtagcctgaagcgtcggacgtgggggcatgcaggcgcagcctctggaggacgactctacatttctggaggctatgggatatcggtggaggacaaaaaggcactgcactgctacgaccctgtggcagatcagtgggagttcaaggcgcccatgagcgagccacgtgtgctgcatgccatggtcggcgcaggagggcgcatttatgccctgggtggacgtatggaccatgtcgatcgctgttttgatgtgctggccgttgagtactacgtaccagaaacagaccagtggacaagcgtgtctccaatgagggccgggcagtccgaggctgggtgttgtcttcttgagaggaagatttacattgtcggtggatacaactggagactgaacaatgtgaccggcatcgttcaggtctataatacggatacagatgagtgggagcgagatttgcacttcccggaatcatttgctgggattgcctgcgcacccgttcttctgccccgcgccggaacccggaggtag

SEQ ID NO: 197813 - DNA, 438 bp, Artificial Sequence
  derived and/or modified sequence
atggccgagagcggcggcagcagcggcggcgccggcggcggcggcgcattcggtgcaggtcctgggcccgagcgccccaacagcaccgccgataagaatggcgctttgaagtgtactttctctgcgccatcccactccacgagcctcctccaaggactggccacgctacgagcacaaggtcagctgttagatgttgttctcaccatcaaccgggaagccttccccgcacataaggtggttttggcggcgtgtagcgattacttccgagctatgttcaccggaggcatgcgggaggcgagccaggatgtgatagagctaaaaggcgtttccgccagagggctcaggcatataatcgatttcgcgtatagcgccgaggttacactggacctggattgcgttcaggaagttgccccgaagactcccggcactctggcatag

SEQ ID NO: 197814 - DNA, 1848 bp, Artificial Sequence
  derived and/or modified sequence
atggcagagagcggaggatcttccggaggtgctggcggaggcggagccttcggagccggtcctggccctgaaaggccaaatagcacggctgacaaaaacggggctctgaaatgtaccttttccgcaccctcccattcaacgtccctgctgcagggtctggccacactccgcgcacaaggccagctcctggatgtggtactcacgatcaatcgcgaagcctttcctgcgcataaggttgtgctcgccgcttgttccgattatttccgtgcgatgtttaccggaggtatgcgtgaagcatcacaggatgtgattgagcttaagggcgtgagtgctcgcggtttgcgccatatcatagatttcgcatactccgccgaagtaacactggatttagattgcgtgcaagacgtgctgggagccgctgtcttcctgcagatgcttcctgtggtggaactctgcgaagagtttctgaaggcagcaatgagcgtggagacgtgcctcaatataggtcagatggccacaactttctcgcttgctagcttgagggagtctgtggacgcgttcacattcagacacttcctccagatcgcagaagaggaagacttccttagattaccactggaaaggctggtgttttttctccagtcaaatagattgcagagttgcgcagaaatagatctattcagagctgccgtgcgatggttgcagcacgaccccgctcgtcggcctcgggctagccacgtcctctgccatattagattcccactgatgcaatcctccgagctggtagattcagtacagactctggatatcatggtggaagatgttctgtgtagacagtacctcctagaggcctttaactaccaggtcttaccttttagacaacacgagatgcagagcccccgaaccgccgtgcgcagtgacgtaccgtccctggtgacgttcggcggaacaccctacaccgatagtgaccgcagtgtgagtagcaaggtataccaactgccagaacccggagccagacacttccgagagcttaccgaaatggaggtgggctgcagtcatacgtgcgtggcagtgttggacaacttcgtgtatgtggcaggcggacagcacctgcagtataggagcggagagggcgctgtcgacgcttgttacagatacgaccctcacctgaatcggtggcttaggctgcaagctatgcaagagtcacgtatacaatttcaactgaatgtgctatgcgggatggtgtacgcaaccggcggaagaaatagagccggtagccttgccagtgttgagagatactgtcctcggaggaatgaatggggctatgcgtgctctctgaagagaagaacctggggtcatgccggagccgcaagcgggggaagactgtatatcagtggcggatatggcatttcagtcgaggataaaaaggccctgcattgttacgaccccgtagccgaccaatgggagtttaaagccccaatgagtgagccgagagttctccatgctatggtgggcgcaggtggcagaatctacgctctcgggggtcgaatggaccatgtcgataggtgctttgacgtgctcgctgttgaatactatgtgcccgaaaccgaccagtggacctcggtttcccctatgcgcgcagggcagagcgaagctggatgttgtctgcttgagaggaaaatctatatagtcgggggatacaactggagactaaacaatgtaacaggcattgtgcaggtctacaacacagacactgatgagtgggagcgcgatctgcatttccccgagtcttttgcagggatcgcctgtgctcccgtgctcctgcccagagccggtactcgccgttag

SEQ ID NO: 197815 - DNA, 438 bp, Artificial Sequence
  derived and/or modified sequence
atggccgagtccgggggatcttctggcggagcaggcggtggtggggcttttggagcaggcccaggtcctgaacgaccgaactccacagctgacaaaaatggtgcgctcaaatgcactttttctgccccttctcactctacctcacttctccagggtcttgcaactctaagagcacagggtcaactgttggacgtcgtgttgaccatcaaccgcgaggccttccctgctcacaaggtcgtcctggccgcatgttccgactactttagggctatgtttactggcggaatgcgcgaggccagtcaagatgtgatcgaacttaagggggtcagcgcccgtgggctgcggcatattattgacttcgcgtattcggccgaggtgaccctggacttggactgcgtgcaggaggtggctcccaagacacctgggaccctcgcatag

SEQ ID NO: 197816 - protein, 405 aa, Artificial Sequence
  derived and/or modified sequence
MDDDDFGGFEAAETFDGGSGETQTTSPAIPWAAFPAVSGVHLSPSSPEIVLDRDHSSSIGCLSSDAIISSPENTHAANSIVSQTIPKAQIQQSTHTHLDISLFPLGLTDEKSNGTIALVDDSEDPGANVSNIQLQQKISSLEIKLKVSEEEKQRIKQDVESLMEKHNVLEKGFLKEKEQEAISFQDRYKELQEKHKQELEDMRKAGHEALSIIVDEYKHQRLLEMLDTEKELLKEKIKEALIQQSQEQKEILEKCLEEERQRNKEALVSAAKLEKEAVKDAVLKVVEEERKNLEKAHAEERELWKTEHAKDQEKVSQEIQKAIQEQRKISQETVKAAIIEEQKRSEKAVEEAVKRTRDELIEYIKEQKRLDQVIRQRSLSSLELFLSCAQKQLSALIATEPVDIE

SEQ ID NO: 197817 - protein, 441 aa, Artificial Sequence
  derived and/or modified sequence
MDDDDFGGFEAAETFDGGSGETQTTSPAIPWAAFPAVSGVHLSPSSPEIVLDRDHSSSIGCLSSDAIISSPENTHAANSIVSQTIPKAQIQQSTHTHLDISLFPLGLTDEKSNGTIALVDDSEDPGANVSNIQLQQKISSLEIKLKVSEEEKQRIKQDVESLMEKHNVLEKGFLKEKEQEAISFQDRYKELQEKHKQELEDMRKAGHEALSIIVDEYKALLQSSVKQQVEAIEKQYISAIEKQAHKCEELLNAQHQRLLEMLDTEKELLKEKIKEALIQQSQEQKEILEKCLEEERQRNKEALVSAAKLEKEAVKDAVLKVVEEERKNLEKAHAEERELWKTEHAKDQEKVSQEIQKAIQEQRKISQETVKAAIIEEQKRSEKAVEEAVKRTRDELIEYIKEQKRLDQVIRQRSLSSLELFLSCAQKQLSALIATEPVDIE

SEQ ID NO: 197818 - protein, 361 aa, Artificial Sequence
  derived and/or modified sequence
MDDDDFGGFEAAETFDGGSGETQTTSPAIPWAAFPAVSGVHLSPSSPEIVLDRDHSSSIGCLSSDAIISSPENTHAANSIVSQTIPKAQIQQSTHTHLDISLFPLGLTDEKSNGTIALVDDSEDPGANVSNIQLQQKISSLEIKLKVSEEEKQRIKQDVESLMEKHNVLEKGFLKEKEQEAISFQDRYKELQEKHKQELEDMRKAGHEALSIIVDEYKALLQSSVKQQVEAIEKQYISAIEKQAHKCEELLNAQHQRLLEMLDTEKELLKEKIKEALIQQSQEQKEILEKCLEEERQRNKEALVSAAKLEKEAVKDAVLKVVEEERKNLEKAHAEERELWKTEHAKDQEKVSQEIQKAIQE

SEQ ID NO: 197819 - protein, 85 aa, Artificial Sequence
  derived and/or modified sequence
MDDDDFGGFEAAETFDGGSGETQTTSPAIPWAAFPAVSGVHLSPSSPEIVLDRDHSSSIGCLSSDAIISSPENTHAANSIVSQTI

SEQ ID NO: 197820 - protein, 91 aa, Artificial Sequence
  derived and/or modified sequence
MDDDDFGGFEAAETFDGGSGETQTTSPAIPWAAFPAVSGVHLSPSSPEIVLDRDHSSSIGCLSSDAIISSPENTHAANSIVSQTIPKAQIQ

SEQ ID NO: 197821 - DNA, 2226 bp, Artificial Sequence
  derived and/or modified sequence
aggtgccacttgaagaatggatgatgatgattttggtggttttgaggctgcggagacttttgatggtggaagtggtgaaacccaaacaacatctcctgctattccttgggctgcctttcctgcagtatctggagtccatctttcaccatcttctcctgagattgtactggaccgtgaccactcttcttccattggctgcctctcttctgatgccattatttcatcaccagagaatacacatgcagcaaatagcattgtgagtcaaactattccaaaagcacagattcagcaatcaacacacactcatctggatatctcactttttccattgggtttaactgatgaaaaaagtaatggaacaattgcccttgtggatgattctgaggatcctggagccaatgtatctaacatacagcttcagcaaaaaatttcaagtctggagattaaactcaaagtatctgaagaagaaaaacagagaattaaacaggatgtggaatcattgatggaaaagcataatgtcttagaaaaaggctttctaaaagaaaaagagcaagaggccatttcttttcaagatagatacaaagaacttcaggaaaaacataaacaagaattggaagacatgaggaaagctggtcacgaagccctcagcattattgtggatgaatataagcatcagaggctccttgaaatgctagatacagagaaggaactgttaaaagaaaaaataaaggaagctttgattcagcaatctcaagaacagaaggaaatattggaaaagtgtttggaggaagaaaggcaaagaaataaagaggcattagtatccgctgcaaagcttgaaaaagaagcagtgaaggatgcagttttaaaagtcgtagaagaagaaagaaaaaatttagaaaaagcgcatgctgaagaaagggaattatggaagacagaacatgcaaaagatcaagaaaaagtatctcaggaaattcaaaaagctatacaagaacaaagaaaaataagtcaggaaactgttaaggcagcaataatagaagagcagaaacgaagtgaaaaggctgtggaagaggcagtgaaaagaacaagagatgaattgatagagtatataaaagaacagaaaaggctcgatcaagtcatccgccaaagaagcctgtccagtttggaactgttcctctcctgtgcacagaaacagttaagtgctttaatagctacggaaccagttgacattgaataaaaagaacatgacaaacccacactggcattggataaatcatattacaccttcaaaatacacactctgaattataaagatgtgtttgttttctttccaaatcatgtagaattgatttccagttcaaggataaaccaaaacaatatttagaactatcaagtgatctaatttattttcttttggtttcttctttacatttactgttattttattattattagtagtagcagcaacagagtatgatatgacccaaaagccattgtaaagtgccacattaccaaaattaattaagtaaactttatagcctgtgggagtctattatatattattttgcaaaagtagtaaatatattattgtttcatgatgactcttgatgagatgctagaatgtaaccatacatttatcttattttgaggatagaaatagcatggatttcaacatcacttatttatctgtataattggaaataaaacaccgatatgatagagaatcattccggcattacctaacctcttctgcagttggatctatgtattttcattggtctactgaaaacaaacaatacaattaaaagcactaaagattattatattaattcaactttgatctgatatatcacttaaactaaaggggtgtgtgtggtgtatgcttgtttcctatttctgctctttaaagatactttgaatcaataaaaccattagtctacaaatcaaattgtgaacttaatctctagaaagagaatataactcagccatttataggaatttaggttcaagtacaggatatatgaaatcttttcccagtatttcagaatgtacttaattcacaggcaggatgcttcaatgcaaaatcatgaatatttttaattcaaaactaaaatgtcattaatatgtatgtatgcaaatgttttatcttattttctgaaatgcatctactttcatgggctttgtacgtttctgagatttctcagtgtaataaaaagagctcccaaactt

SEQ ID NO: 197822 - DNA, 2334 bp, Artificial Sequence
  derived and/or modified sequence
aggtgccacttgaagaatggatgatgatgattttggtggttttgaggctgcggagacttttgatggtggaagtggtgaaacccaaacaacatctcctgctattccttgggctgcctttcctgcagtatctggagtccatctttcaccatcttctcctgagattgtactggaccgtgaccactcttcttccattggctgcctctcttctgatgccattatttcatcaccagagaatacacatgcagcaaatagcattgtgagtcaaactattccaaaagcacagattcagcaatcaacacacactcatctggatatctcactttttccattgggtttaactgatgaaaaaagtaatggaacaattgcccttgtggatgattctgaggatcctggagccaatgtatctaacatacagcttcagcaaaaaatttcaagtctggagattaaactcaaagtatctgaagaagaaaaacagagaattaaacaggatgtggaatcattgatggaaaagcataatgtcttagaaaaaggctttctaaaagaaaaagagcaagaggccatttcttttcaagatagatacaaagaacttcaggaaaaacataaacaagaattggaagacatgaggaaagctggtcacgaagccctcagcattattgtggatgaatataaggcactactgcagtcttcagttaagcaacaagtagaagctattgaaaaacagtacatttctgcaattgagaaacaggcacacaagtgtgaggagttgctaaatgctcagcatcagaggctccttgaaatgctagatacagagaaggaactgttaaaagaaaaaataaaggaagctttgattcagcaatctcaagaacagaaggaaatattggaaaagtgtttggaggaagaaaggcaaagaaataaagaggcattagtatccgctgcaaagcttgaaaaagaagcagtgaaggatgcagttttaaaagtcgtagaagaagaaagaaaaaatttagaaaaagcgcatgctgaagaaagggaattatggaagacagaacatgcaaaagatcaagaaaaagtatctcaggaaattcaaaaagctatacaagaacaaagaaaaataagtcaggaaactgttaaggcagcaataatagaagagcagaaacgaagtgaaaaggctgtggaagaggcagtgaaaagaacaagagatgaattgatagagtatataaaagaacagaaaaggctcgatcaagtcatccgccaaagaagcctgtccagtttggaactgttcctctcctgtgcacagaaacagttaagtgctttaatagctacggaaccagttgacattgaataaaaagaacatgacaaacccacactggcattggataaatcatattacaccttcaaaatacacactctgaattataaagatgtgtttgttttctttccaaatcatgtagaattgatttccagttcaaggataaaccaaaacaatatttagaactatcaagtgatctaatttattttcttttggtttcttctttacatttactgttattttattattattagtagtagcagcaacagagtatgatatgacccaaaagccattgtaaagtgccacattaccaaaattaattaagtaaactttatagcctgtgggagtctattatatattattttgcaaaagtagtaaatatattattgtttcatgatgactcttgatgagatgctagaatgtaaccatacatttatcttattttgaggatagaaatagcatggatttcaacatcacttatttatctgtataattggaaataaaacaccgatatgatagagaatcattccggcattacctaacctcttctgcagttggatctatgtattttcattggtctactgaaaacaaacaatacaattaaaagcactaaagattattatattaattcaactttgatctgatatatcacttaaactaaaggggtgtgtgtggtgtatgcttgtttcctatttctgctctttaaagatactttgaatcaataaaaccattagtctacaaatcaaattgtgaacttaatctctagaaagagaatataactcagccatttataggaatttaggttcaagtacaggatatatgaaatcttttcccagtatttcagaatgtacttaattcacaggcaggatgcttcaatgcaaaatcatgaatatttttaattcaaaactaaaatgtcattaatatgtatgtatgcaaatgttttatcttattttctgaaatgcatctactttcatgggctttgtacgtttctgagatttctcagtgtaataaaaagagctcccaaactt

SEQ ID NO: 197823 - DNA, 1301 bp, Artificial Sequence
  derived and/or modified sequence
aaatcaacttccgggggcagaggtgttcgaagccgggtggtgcgtgggctaccccaacctgtgtggctgggccgcggtctcccctcaagggcctggggccgtgcctcgggtgtacgcgtaggggtctgtgtgctgggggtggctcaccgggcagcgtgggtgagcggcgcagcggcggcagcggagagcgagagaggggagcaggtgccacttgaagaatggatgatgatgattttggtggttttgaggctgcggagacttttgatggtggaagtggtgaaacccaaacaacatctcctgctattccttgggctgcctttcctgcagtatctggagtccatctttcaccatcttctcctgagattgtactggaccgtgaccactcttcttccattggctgcctctcttctgatgccattatttcatcaccagagaatacacatgcagcaaatagcattgtgagtcaaactattccaaaagcacagattcagcaatcaacacacactcatctggatatctcactttttccattgggtttaactgatgaaaaaagtaatggaacaattgcccttgtggatgattctgaggatcctggagccaatgtatctaacatacagcttcagcaaaaaatttcaagtctggagattaaactcaaagtatctgaagaagaaaaacagagaattaaacaggatgtggaatcattgatggaaaagcataatgtcttagaaaaaggctttctaaaagaaaaagagcaagaggccatttcttttcaagatagatacaaagaacttcaggaaaaacataaacaagaattggaagacatgaggaaagctggtcacgaagccctcagcattattgtggatgaatataaggcactactgcagtcttcagttaagcaacaagtagaagctattgaaaaacagtacatttctgcaattgagaaacaggcacacaagtgtgaggagttgctaaatgctcagcatcagaggctccttgaaatgctagatacagagaaggaactgttaaaagaaaaaataaaggaagctttgattcagcaatctcaagaacagaaggaaatattggaaaagtgtttggaggaagaaaggcaaagaaataaagaggcattagtatccgctgcaaagcttgaaaaagaagcagtgaaggatgcagttttaaaagtcgtagaagaagaaagaaaaaatttagaaaaagcgcatgctgaagaaagggaattatggaagacagaacatgcaaaagatcaagaaaaagtatctcaggaaattcaaaaagctatacaagaa

SEQ ID NO: 197824 - DNA, 471 bp, Artificial Sequence
  derived and/or modified sequence
ctctcttgcctgcagccatgtaagttgtgcctttgcttctccttcaccttccaccatgattgtgaggcctccccagccatgtggaattttcctccttcacaggctcatgctctctctctcacctgccgccatgtaagatgtgcctgcttctccttctgccatgattgtaagtttcctgaggcctccccagccgtgcaaacctgtgccacttgaagaatggatgatgatgattttggtggttttgaggctgcggagacttttgatggtggaagtggtgaaacccaaacaacatctcctgctattccttgggctgcctttcctgcagtatctggagtccatctttcaccatcttctcctgagattgtactggaccgtgaccactcttcttccattggctgcctctcttctgatgccattatttcatcaccagagaatacacatgcagcaaatagcattgtgagtcaaactatt

SEQ ID NO: 197825 - DNA, 2440 bp, Artificial Sequence
  derived and/or modified sequence
ggccttggcggaaatcaacttccgggggcagaggtgttcgaagccgggtggtgcgtgggctaccccaacctgtgtggctgggccgcggtctcccctcaagggcctggggccgtgcctcgggtgtacgcgtaggggtctgtgtgctgggggtggctcaccgggcagcgtgggtgagcggcgcagcggcggcagcggagagcgagagaggggagcaggtgccacttgaagaatggatgatgatgattttggtggttttgaggctgcggagacttttgatggtggaagtggtgaaacccaaacaacatctcctgctattccttgggctgcctttcctgcagtatctggagtccatctttcaccatcttctcctgagattgtactggaccgtgaccactcttcttccattggctgcctctcttctgatgccattatttcatcaccagagaatacacatgcagcaaatagcattgtgagtcaaactattccaaaagcacagattcagcaatcaacacacactcatctggatatctcactttttccattgggtttaactgatgaaaaaagtaatggaacaattgcccttgtggatgattctgaggatcctggagccaatgtatctaacatacagcttcagcaaaaaatttcaagtctggagattaaactcaaagtatctgaagaagaaaaacagagaattaaacaggatgtggaatcattgatggaaaagcataatgtcttagaaaaaggctttctaaaagaaaaagagcaagaggccatttcttttcaagatagatacaaagaacttcaggaaaaacataaacaagaattggaagacatgaggaaagctggtcacgaagccctcagcattattgtggatgaatataagcatcagaggctccttgaaatgctagatacagagaaggaactgttaaaagaaaaaataaaggaagctttgattcagcaatctcaagaacagaaggaaatattggaaaagtgtttggaggaagaaaggcaaagaaataaagaggcattagtatccgctgcaaagcttgaaaaagaagcagtgaaggatgcagttttaaaagtcgtagaagaagaaagaaaaaatttagaaaaagcgcatgctgaagaaagggaattatggaagacagaacatgcaaaagatcaagaaaaagtatctcaggaaattcaaaaagctatacaagaacaaagaaaaataagtcaggaaactgttaaggcagcaataatagaagagcagaaacgaagtgaaaaggctgtggaagaggcagtgaaaagaacaagagatgaattgatagagtatataaaagaacagaaaaggctcgatcaagtcatccgccaaagaagcctgtccagtttggaactgttcctctcctgtgcacagaaacagttaagtgctttaatagctacggaaccagttgacattgaataaaaagaacatgacaaacccacactggcattggataaatcatattacaccttcaaaatacacactctgaattataaagatgtgtttgttttctttccaaatcatgtagaattgatttccagttcaaggataaaccaaaacaatatttagaactatcaagtgatctaatttattttcttttggtttcttctttacatttactgttattttattattattagtagtagcagcaacagagtatgatatgacccaaaagccattgtaaagtgccacattaccaaaattaattaagtaaactttatagcctgtgggagtctattatatattattttgcaaaagtagtaaatatattattgtttcatgatgactcttgatgagatgctagaatgtaaccatacatttatcttattttgaggatagaaatagcatggatttcaacatcacttatttatctgtataattggaaataaaacaccgatatgatagagaatcattccggcattacctaacctcttctgcagttggatctatgtattttcattggtctactgaaaacaaacaatacaattaaaagcactaaagattattatattaattcaactttgatctgatatatcacttaaactaaaggggtgtgtgtggtgtatgcttgtttcctatttctgctctttaaagatactttgaatcaataaaaccattagtctacaaatcaaattgtgaacttaatctctagaaagagaatataactcagccatttataggaatttaggttcaagtacaggatatatgaaatcttttcccagtatttcagaatgtacttaattcacaggcaggatgcttcaatgcaaaatcatgaatatttttaattcaaaactaaaatgtcattaatatgtatgtatgcaaatgttttatcttattttctgaaatgcatctactttcatgggctttgtacgtttctgagatttctcagtgtaataaaaagagctcccaaactta

SEQ ID NO: 197826 - DNA, 575 bp, Artificial Sequence
  derived and/or modified sequence
actgcggaggaaagctttggacatgaaacctatttttggcttcactttaaggagtggaactctattaaaagctgcgctggtgtttttttgagacagaatcgcctaagctgaagtgtagtggcgccatcatagctcactgcagcctccagctccttggctcaagtgattctcctgcctgagcctccctagtagctaggactacaggtgctatacgtggatgacctgcttagttttaatttttggagaaatacattttataaaacattttcatcagattgctaaaattgtgccacttgaagaatggatgatgatgattttggtggttttgaggctgcggagacttttgatggtggaagtggtgaaacccaaacaacatctcctgctattccttgggctgcctttcctgcagtatctggagtccatctttcaccatcttctcctgagattgtactggaccgtgaccactcttcttccattggctgcctctcttctgatgccattatttcatcaccagagaatacacatgcagcaaatagcattgtgagtcaaactattccaaaagcacagattcagca

SEQ ID NO: 197827 - DNA, 2738 bp, Artificial Sequence
  derived and/or modified sequence
ttccgggggcagaggtgttcgaagccgggtggtgcgtgggctaccccaacctgtgtggctgggccgcggtctcccctcaagggcctggggccgtgcctcgggtgtacgcgtaggggtctgtgtgctgggggtggctcaccgggcagcgtgggtgagcggcgcagcggcggcagcggagagcgagagaggggagcaggcttctaaccctcctttatgtgactcagagaaaggagacctcattccaagttccaggattaattctgatgaaagtattctgtctcatgcatctaatactttacttgtgaatgaagattcattatgaggtgctatacgtggatgacctgcttagttttaatttttggagaaatacattttataaaacattttcatcagattgctaaaattgtgccacttgaagaatggatgatgatgattttggtggttttgaggctgcggagacttttgatggtggaagtggtgaaacccaaacaacatctcctgctattccttgggctgcctttcctgcagtatctggagtccatctttcaccatcttctcctgagattgtactggaccgtgaccactcttcttccattggctgcctctcttctgatgccattatttcatcaccagagaatacacatgcagcaaatagcattgtgagtcaaactattccaaaagcacagattcagcaatcaacacacactcatctggatatctcactttttccattgggtttaactgatgaaaaaagtaatggaacaattgcccttgtggatgattctgaggatcctggagccaatgtatctaacatacagcttcagcaaaaaatttcaagtctggagattaaactcaaagtatctgaagaagaaaaacagagaattaaacaggatgtggaatcattgatggaaaagcataatgtcttagaaaaaggctttctaaaagaaaaagagcaagaggccatttcttttcaagatagatacaaagaacttcaggaaaaacataaacaagaattggaagacatgaggaaagctggtcacgaagccctcagcattattgtggatgaatataaggcactactgcagtcttcagttaagcaacaagtagaagctattgaaaaacagtacatttctgcaattgagaaacaggcacacaagtgtgaggagttgctaaatgctcagcatcagaggctccttgaaatgctagatacagagaaggaactgttaaaagaaaaaataaaggaagctttgattcagcaatctcaagaacagaaggaaatattggaaaagtgtttggaggaagaaaggcaaagaaataaagaggcattagtatccgctgcaaagcttgaaaaagaagcagtgaaggatgcagttttaaaagtcgtagaagaagaaagaaaaaatttagaaaaagcgcatgctgaagaaagggaattatggaagacagaacatgcaaaagatcaagaaaaagtatctcaggaaattcaaaaagctatacaagaacaaagaaaaataagtcaggaaactgttaaggcagcaataatagaagagcagaaacgaagtgaaaaggctgtggaagaggcagtgaaaagaacaagagatgaattgatagagtatataaaagaacagaaaaggctcgatcaagtcatccgccaaagaagcctgtccagtttggaactgttcctctcctgtgcacagaaacagttaagtgctttaatagctacggaaccagttgacattgaataaaaagaacatgacaaacccacactggcattggataaatcatattacaccttcaaaatacacactctgaattataaagatgtgtttgttttctttccaaatcatgtagaattgatttccagttcaaggataaaccaaaacaatatttagaactatcaagtgatctaatttattttcttttggtttcttctttacatttactgttattttattattattagtagtagcagcaacagagtatgatatgacccaaaagccattgtaaagtgccacattaccaaaattaattaagtaaactttatagcctgtgggagtctattatatattattttgcaaaagtagtaaatatattattgtttcatgatgactcttgatgagatgctagaatgtaaccatacatttatcttattttgaggatagaaatagcatggatttcaacatcacttatttatctgtataattggaaataaaacaccgatatgatagagaatcattccggcattacctaacctcttctgcagttggatctatgtattttcattggtctactgaaaacaaacaatacaattaaaagcactaaagattattatattaattcaactttgatctgatatatcacttaaactaaaggggtgtgtgtggtgtatgcttgtttcctatttctgctctttaaagatactttgaatcaataaaaccattagtctacaaatcaaattgtgaacttaatctctagaaagagaatataactcagccatttataggaatttaggttcaagtacaggatatatgaaatcttttcccagtatttcagaatgtacttaattcacaggcaggatgcttcaatgcaaaatcatgaatatttttaattcaaaactaaaatgtcattaatatgtatgtatgcaaatgttttatcttattttctgaaatgcatctactttcatgggctttgtacgtttctgagatttctcagtgtaataaaaagagctcccaaactta

SEQ ID NO: 197828 - DNA, 1218 bp, Artificial Sequence
  derived and/or modified sequence
atggacgacgacgacttcggcggcttcgaggccgccgagaccttcgacggcggcagcggcgagacccagaccaccagccccgccatcccctgggccgccttccccgccgtgagcggcgtgcacctgagccccagcagccccgagatcgtgctggacagagaccacagcagcagcatcggctgcctgagcagcgacgccatcatcagcagccccgagaacacccacgccgccaacagcatcgtgagccagaccatccccaaggcccagatccagcagagcacccacacccacctggacatcagcctgttccccctgggcctgaccgacgagaagagcaacggcaccatcgccctggtggacgacagcgaggaccccggcgccaacgtgagcaacatccagctgcagcagaagatcagcagcctggagatcaagctgaaggtgagcgaggaggagaagcagagaatcaagcaggacgtggagagcctgatggagaagcacaacgtgctggagaagggcttcctgaaggagaaggagcaggaggccatcagcttccaggacagatacaaggagctgcaggagaagcacaagcaggagctggaggacatgagaaaggccggccacgaggccctgagcatcatcgtggacgagtacaagcaccagagactgctggagatgctggacaccgagaaggagctgctgaaggagaagatcaaggaggccctgatccagcagagccaggagcagaaggagatcctggagaagtgcctggaggaggagagacagagaaacaaggaggccctggtgagcgccgccaagctggagaaggaggccgtgaaggacgccgtgctgaaggtggtggaggaggagagaaagaacctggagaaggcccacgccgaggagagagagctgtggaagaccgagcacgccaaggaccaggagaaggtgagccaggagatccagaaggccatccaggagcagagaaagatcagccaggagaccgtgaaggccgccatcatcgaggagcagaagagaagcgagaaggccgtggaggaggccgtgaagagaaccagagacgagctgatcgagtacatcaaggagcagaagagactggaccaggtgatcagacagagaagcctgagcagcctggagctgttcctgagctgcgcccagaagcagctgagcgccctgatcgccaccgagcccgtggacatcgagtag

SEQ ID NO: 197829 - DNA, 1326 bp, Artificial Sequence
  derived and/or modified sequence
atggacgacgacgacttcggcggcttcgaggccgccgagaccttcgacggcggcagcggcgagacccagaccaccagccccgccatcccctgggccgccttccccgccgtgagcggcgtgcacctgagccccagcagccccgagatcgtgctggacagagaccacagcagcagcatcggctgcctgagcagcgacgccatcatcagcagccccgagaacacccacgccgccaacagcatcgtgagccagaccatccccaaggcccagatccagcagagcacccacacccacctggacatcagcctgttccccctgggcctgaccgacgagaagagcaacggcaccatcgccctggtggacgacagcgaggaccccggcgccaacgtgagcaacatccagctgcagcagaagatcagcagcctggagatcaagctgaaggtgagcgaggaggagaagcagagaatcaagcaggacgtggagagcctgatggagaagcacaacgtgctggagaagggcttcctgaaggagaaggagcaggaggccatcagcttccaggacagatacaaggagctgcaggagaagcacaagcaggagctggaggacatgagaaaggccggccacgaggccctgagcatcatcgtggacgagtacaaggccctgctgcagagcagcgtgaagcagcaggtggaggccatcgagaagcagtacatcagcgccatcgagaagcaggcccacaagtgcgaggagctgctgaacgcccagcaccagagactgctggagatgctggacaccgagaaggagctgctgaaggagaagatcaaggaggccctgatccagcagagccaggagcagaaggagatcctggagaagtgcctggaggaggagagacagagaaacaaggaggccctggtgagcgccgccaagctggagaaggaggccgtgaaggacgccgtgctgaaggtggtggaggaggagagaaagaacctggagaaggcccacgccgaggagagagagctgtggaagaccgagcacgccaaggaccaggagaaggtgagccaggagatccagaaggccatccaggagcagagaaagatcagccaggagaccgtgaaggccgccatcatcgaggagcagaagagaagcgagaaggccgtggaggaggccgtgaagagaaccagagacgagctgatcgagtacatcaaggagcagaagagactggaccaggtgatcagacagagaagcctgagcagcctggagctgttcctgagctgcgcccagaagcagctgagcgccctgatcgccaccgagcccgtggacatcgagtag

SEQ ID NO: 197830 - DNA, 1086 bp, Artificial Sequence
  derived and/or modified sequence
atggacgacgacgacttcggcggcttcgaggccgccgagaccttcgacggcggcagcggcgagacccagaccaccagccccgccatcccctgggccgccttccccgccgtgagcggcgtgcacctgagccccagcagccccgagatcgtgctggacagagaccacagcagcagcatcggctgcctgagcagcgacgccatcatcagcagccccgagaacacccacgccgccaacagcatcgtgagccagaccatccccaaggcccagatccagcagagcacccacacccacctggacatcagcctgttccccctgggcctgaccgacgagaagagcaacggcaccatcgccctggtggacgacagcgaggaccccggcgccaacgtgagcaacatccagctgcagcagaagatcagcagcctggagatcaagctgaaggtgagcgaggaggagaagcagagaatcaagcaggacgtggagagcctgatggagaagcacaacgtgctggagaagggcttcctgaaggagaaggagcaggaggccatcagcttccaggacagatacaaggagctgcaggagaagcacaagcaggagctggaggacatgagaaaggccggccacgaggccctgagcatcatcgtggacgagtacaaggccctgctgcagagcagcgtgaagcagcaggtggaggccatcgagaagcagtacatcagcgccatcgagaagcaggcccacaagtgcgaggagctgctgaacgcccagcaccagagactgctggagatgctggacaccgagaaggagctgctgaaggagaagatcaaggaggccctgatccagcagagccaggagcagaaggagatcctggagaagtgcctggaggaggagagacagagaaacaaggaggccctggtgagcgccgccaagctggagaaggaggccgtgaaggacgccgtgctgaaggtggtggaggaggagagaaagaacctggagaaggcccacgccgaggagagagagctgtggaagaccgagcacgccaaggaccaggagaaggtgagccaggagatccagaaggccatccaggagtag

SEQ ID NO: 197831 - DNA, 258 bp, Artificial Sequence
  derived and/or modified sequence
atggacgacgacgacttcggcggcttcgaggccgccgagaccttcgacggcggcagcggcgagacccagaccaccagccccgccatcccctgggccgccttccccgccgtgagcggcgtgcacctgagccccagcagccccgagatcgtgctggacagagaccacagcagcagcatcggctgcctgagcagcgacgccatcatcagcagccccgagaacacccacgccgccaacagcatcgtgagccagaccatctag

SEQ ID NO: 197832 - DNA, 276 bp, Artificial Sequence
  derived and/or modified sequence
atggacgacgacgacttcggcggcttcgaggccgccgagaccttcgacggcggcagcggcgagacccagaccaccagccccgccatcccctgggccgccttccccgccgtgagcggcgtgcacctgagccccagcagccccgagatcgtgctggacagagaccacagcagcagcatcggctgcctgagcagcgacgccatcatcagcagccccgagaacacccacgccgccaacagcatcgtgagccagaccatccccaaggcccagatccagtag

SEQ ID NO: 197833 - DNA, 1218 bp, Artificial Sequence
  derived and/or modified sequence
atggacgacgatgatttcggtggcttcgaagctgcagagacgttcgacggtggcagcggcgagactcagacgacaagccccgccattccttgggcagcctttcccgctgtgtctggtgtccatctgagccctagtagccccgaaatagtgctcgatagagatcactcctccagtataggttgtttgtctagtgacgccattatctcttctcccgaaaacacccatgcagccaatagcattgtctcacagacaattccgaaggcccaaatccagcagtctacacatacccatcttgacatcagcctctttccgcttggactgaccgacgaaaagtccaatgggaccatcgcactggtggacgatagcgaagaccccggagcaaacgtgagtaatatacagctgcagcaaaagatttcttccctggagataaaactcaaagtgtccgaggaagagaaacaacgcatcaagcaggacgtcgaaagtctgatggagaaacacaatgtgctggaaaaaggattcctgaaagagaaagaacaggaggccatctcctttcaggacagatacaaagagttgcaggagaaacacaaacaggagctcgaagatatgcgcaaggccgggcacgaggcgctgagtataatcgtcgacgaatacaaacatcaaagactgttggaaatgcttgataccgaaaaagagctactgaaggagaagatcaaagaagctcttattcagcagtcccaggagcagaaagagatcttggaaaagtgtctggaagaagagaggcagcgtaacaaggaagccctggtctccgcagcaaaacttgagaaggaagcggttaaagacgctgtcctgaaggtggtggaagaggagcgtaagaatttggagaaggctcatgcggaagaacgcgaactctggaaaacggagcacgcaaaagaccaggagaaagtcagtcaggagatccagaaagctattcaggaacaaaggaaaatttcacaggagactgttaaggccgctatcatcgaggagcaaaagcgctcagagaaggccgtggaagaggccgtgaagcgaactagggacgaactaatcgaatacatcaaggagcaaaaaagattggaccaggtaattcggcagcgctccctgagcagccttgaactgttcctgtcgtgtgcacagaaacaattgtctgctttaattgcaacggagccagtcgacatagaatag

SEQ ID NO: 197834 - DNA, 1326 bp, Artificial Sequence
  derived and/or modified sequence
atggacgatgatgactttgggggattcgaggcagcggagactttcgatggcggatcgggggagacccagactacgtcccccgctattccctgggctgcctttccggctgtctctggtgtgcacttgtcaccctcctcaccggagattgttcttgatcgcgaccacagttcctctattggatgcctaagcagcgatgccattatctccagtccagaaaatacgcacgccgcaaactcgatcgtgagtcagactatcccaaaggcacagatccagcagtccacgcatacacacctcgatatcagcctgttcccactcggcctcacagacgagaagtccaatgggacgatcgctcttgttgacgattctgaagatcctggggccaacgtttctaatatccaactccaacaaaagatctcgtctctggagatcaaattgaaagtctccgaggaagagaagcagcggatcaaacaagatgttgaatccttaatggaaaaacacaacgtgctggagaagggcttcctgaaggagaaagagcaggaggcaatttcttttcaggaccggtacaaagagctacaggagaaacacaaacaggaattggaggatatgcgcaaagccggtcatgaggcactatccatcattgtcgacgaatataaagccctgctgcaaagctccgtaaagcagcaggtggaggcaatcgaaaagcaatatatttccgctattgagaaacaggcccacaagtgcgaggaactgctcaacgcacagcatcagagacttctagaaatgcttgataccgagaaagaactgctcaaagaaaagataaaagaggctctgatccagcagtctcaggagcagaaggagatccttgaaaaatgccttgaggaggagaggcaaagaaacaaggaagcccttgtgtccgctgccaaattagaaaaagaggccgtgaaagatgccgtgttgaaagtcgttgaggaggagcgcaagaaccttgaaaaagctcacgcggaagaaagagaactctggaagactgaacacgccaaagaccaagagaaagtgtcccaagagatccaaaaggcgattcaagaacagcgcaaaatcagccaggagactgtgaaggcagccatcatagaggaacaaaaaagatctgagaaagctgtggaagaggcggtcaagcgcacccgggatgagcttatcgaatacatcaaagaacagaagcggctggaccaggtgattaggcagaggtctttgtctagtctggagctctttctgtcttgcgcacaaaaacagttgtcagcacttatcgctaccgagccagttgacatagagtag

SEQ ID NO: 197835 - DNA, 1086 bp, Artificial Sequence
  derived and/or modified sequence
atggacgacgacgacttcgggggctttgaagcagcggaaacatttgatggcggctcgggtgagactcaaacaacatcacctgccataccgtgggcggcttttcccgcagtcagtggtgtgcatctctcaccctcctctcccgaaatcgtgttggatagagaccactccagttcaattggctgcctatctagtgatgccattatcagctcaccagagaatacccacgctgccaactctattgtctcacagaccatccctaaggctcaaattcaacagtcgacacacactcacctggatatttcactgttcccactaggactgacagacgaaaaaagtaacgggaccatagcactggtggacgatagcgaggatcccggggcaaatgtctctaacattcagctccagcaaaagatcagctcactagaaatcaagttgaaagttagcgaggaggaaaagcaaagaatcaagcaggacgtcgaatccctgatggaaaaacacaacgttctggagaaaggcttcttgaaggagaaagaacaggaggctatctccttccaggataggtacaaagagttacaggaaaagcataagcaggagctcgaggatatgcgaaaggctgggcacgaagcgttgagcatcattgttgacgagtacaaagcgctgttgcagtcctcagtgaagcagcaggtcgaagccattgagaaacagtatatctcagcaatagaaaagcaggctcataaatgcgaagagctcctgaatgcacagcaccagagactgttggagatgttggataccgagaaagagctgttaaaagaaaagatcaaagaagctttaatacaacagtctcaggaacagaaagaaattctggagaagtgcctggaagaagaaagacagcggaacaaggaggctctggtttccgccgctaagcttgagaaggaggcagtaaaagacgcagtattaaaggtggtcgaggaggagcggaaaaatctggaaaaggcacatgcagaagagagagaactgtggaagactgaacacgcaaaggatcaggagaaagtctcacaggagatccagaaggcgattcaggaatag

SEQ ID NO: 197836 - DNA, 258 bp, Artificial Sequence
  derived and/or modified sequence
atggacgatgacgattttggcgggtttgaagcagctgaaacctttgacgggggaagcggggaaacacagacaacttctcctgccattccgtgggccgcctttcccgccgtcagcggggtacacctgtctccaagttcccccgagatcgttttagatcgcgaccatagcagttcaattggttgtctgagttcggatgccattatttcttcccccgagaacacccatgccgcgaactccatcgtcagtcagaccatctag

SEQ ID NO: 197837 - DNA, 1218 bp, Artificial Sequence
  derived and/or modified sequence
atggacgacgatgacttcggcggtttcgaagctgcggagactttcgatggaggatccggggagactcaaacaacgtcaccggctattccatgggcggcatttcctgccgtctcaggcgtgcacctgagcccctcaagcccagaaatcgtgttggaccgggatcactctagtagtatagggtgtctcagctcggacgccataataagctctccagagaatacccacgccgccaactccatcgtctcacagacgatccccaaggctcagatccagcagtccactcacacacatctcgacattagtctcttccctctcggactgaccgacgaaaagtccaacggcacaattgcactcgtagacgattccgaggacccgggggcgaatgtctctaatattcagctgcagcaaaagatttcaagcctcgaaataaaattgaaggtcagcgaggaagagaagcaaaggattaagcaggacgtggaaagccttatggagaagcacaatgtgctggaaaaagggttcttgaaagagaaagagcaagaggccatcagcttccaggatagatacaaggagctgcaggagaagcacaaacaagaactggaagatatgcgaaaggccggtcacgaagccttgagcatcatcgtcgacgaatataagcaccaacgcttgctggagatgctcgacacagagaaagagctgctgaaggaaaagattaaagaggccctgatccagcagagccaggaacagaaagagatcttggaaaagtgtctggaagaggagcgacagcgcaacaaggaggcactggtaagtgctgccaagctggaaaaggaggcagtaaaggacgccgttttgaaggtggtcgaggaggaaaggaaaaacctggagaaagcacatgcagaggagagagagctttggaagactgaacacgctaaagatcaagagaaggtgagccaggagatccagaaagccatacaggaacagcgaaaaatatcacaagagactgtgaaagctgcaattatcgaggagcagaaaaggagtgaaaaggcagtggaggaagccgtgaagcggacgcgagatgaattgattgaatacataaaagaacagaagagactagaccaggtaattcgacagagaagtctgtcctccctggagctttttctgtcatgcgcacagaagcaactttctgcgctgatcgccacagagcctgttgatatcgagtag

SEQ ID NO: 197838 - DNA, 276 bp, Artificial Sequence
  derived and/or modified sequence
atggacgacgatgactttggggggtttgaggcggcagagactttcgacgggggatctggggagacgcagaccacgagcccagcaataccgtgggccgcatttcctgccgtatctggggtacacctgtcgcccagcagccccgagatcgtgttggatcgtgatcactcatcgtctattggatgcctcagttcagacgcgattatcagcagccccgagaatacccacgcagccaacagcatcgtaagccagacgatccccaaggcccaaattcagtag

SEQ ID NO: 197839 - DNA, 1326 bp, Artificial Sequence
  derived and/or modified sequence
atggacgacgacgactttggcggcttcgaggccgccgagacctttgacggaggcagtggagaaacccagactaccagtcctgcgattccctgggccgcttttcctgcagtcagtggcgtgcacctatcccccagttctccggagatagtccttgatcgcgaccatagcagctctattggatgtttatcttccgacgccatcatttcatcccctgagaatacccatgctgcaaatagtattgtgagccaaacaatccccaaggctcagatccagcagtcaacccatacgcatcttgacatctccctctttccacttggactgacagatgagaagagtaatggtacaatcgccctggtggatgactcggaggatcccggagcaaatgtgagcaacatccagctccaacagaagatctcttccctggagatcaaactaaaggtgtccgaggaggaaaaacagcggataaagcaggatgtggagtctctgatggagaagcataacgttctggagaaaggctttctgaaggaaaaagagcaagaggcaatttctttccaggaccgttataaagaactacaggagaaacacaagcaagaacttgaagacatgcggaaagccgggcacgaggccctcagcatcattgttgacgaatacaaggcactgttgcagtcttctgtcaagcaacaggtcgaggcaattgagaagcaatatatttcagccattgaaaaacaggcccacaagtgcgaagaattgctaaacgcgcaacaccagagactcctagagatgcttgacacagaaaaggagctcttaaaggagaagattaaagaggcactcattcagcagtcccaggagcagaaagagattctggaaaaatgtctggaagaggagcgtcagaggaacaaggaagccttggtgtcagctgctaagctcgagaaagaagccgtgaaggacgccgtgctgaaagtggtagaggaagagcgtaaaaacctggagaaggcacatgcggaggagcgagagctctggaagactgaacacgcaaaggaccaggaaaaagtttcccaggaaatacagaaagccatccaagagcagaggaagatttcacaggagacagtgaaggccgctatcatcgaggagcagaaacgctcagaaaaggctgtcgaggaggcggtgaaacgcacacgggacgagttaattgaatatatcaaggaacagaaaaggctcgaccaggtgatccgccagcgctctctgagcagcttagagctgttcctgtcttgcgcgcaaaaacagctgagtgctttgatagctactgaaccagtggacatcgagtag

SEQ ID NO: 197840 - DNA, 1218 bp, Artificial Sequence
  derived and/or modified sequence
atggatgatgatgactttggaggctttgaagctgctgagacctttgatggcggcagcggggagacccagaccaccagccctgccatcccctgggccgccttccctgctgtgtctggagtgcacctgagccccagcagccctgagatcgtgctggaccgggaccacagcagcagcatcggctgcctgagcagtgatgccatcatcagcagccctgagaacacccacgccgccaacagcatcgtgtcccagaccatccccaaggcccagatccagcagagcacccacacccacctggacatcagcctcttccccctgggcctgacagatgagaagagcaatggcaccatcgccctggtggatgacagtgaagatcctggggccaacgtgagcaacatccagctgcagcagaagatcagcagcctggagatcaagctgaaggtgtctgaggaggagaagcagaggatcaagcaggatgtggagagcctgatggagaagcacaacgtgctggagaagggcttcctgaaggagaaggagcaggaggccatctccttccaggaccgctacaaggagctgcaggagaagcacaagcaggagctggaggacatgaggaaggccggccacgaggccctgagcatcatcgtggatgagtacaagcaccagaggctgctggagatgctggacacagagaaggagctgctgaaggagaagatcaaggaggccctgatccagcagagccaggagcagaaggagatcctggagaagtgcctggaggaggagcggcagaggaacaaggaggccctggtgtctgctgccaagctggagaaggaggccgtgaaggatgctgtgctgaaggtggtggaggaggagaggaagaacctggagaaggcccacgccgaggagcgggagctgtggaagacagagcacgccaaggaccaggagaaggtgtcccaggagatccagaaggccatccaggagcagaggaagatcagccaggagaccgtgaaggccgccatcatcgaggagcagaagaggtctgagaaggctgtggaggaggccgtgaagaggaccagagatgagctgattgagtacatcaaggagcagaagaggctggaccaggtgatccggcagaggagcctgagcagcctggagctgttcctgagctgtgcccagaagcagctgagcgccctgattgccacagagcctgtggacatcgagtag

SEQ ID NO: 197841 - DNA, 1326 bp, Artificial Sequence
  derived and/or modified sequence
atggatgatgatgactttggaggctttgaagctgctgagacctttgatggcggcagcggggagacccagaccaccagccctgccatcccctgggccgccttccctgctgtgtctggagtgcacctgagccccagcagccctgagatcgtgctggaccgggaccacagcagcagcatcggctgcctgagcagtgatgccatcatcagcagccctgagaacacccacgccgccaacagcatcgtgtcccagaccatccccaaggcccagatccagcagagcacccacacccacctggacatcagcctcttccccctgggcctgacagatgagaagagcaatggcaccatcgccctggtggatgacagtgaagatcctggggccaacgtgagcaacatccagctgcagcagaagatcagcagcctggagatcaagctgaaggtgtctgaggaggagaagcagaggatcaagcaggatgtggagagcctgatggagaagcacaacgtgctggagaagggcttcctgaaggagaaggagcaggaggccatctccttccaggaccgctacaaggagctgcaggagaagcacaagcaggagctggaggacatgaggaaggccggccacgaggccctgagcatcatcgtggatgagtacaaggccctgctgcagagctctgtgaagcagcaggtggaggccatcgagaagcagtacatcagcgccatcgagaagcaggcccacaagtgtgaggagctgctgaatgcccagcaccagaggctgctggagatgctggacacagagaaggagctgctgaaggagaagatcaaggaggccctgatccagcagagccaggagcagaaggagatcctggagaagtgcctggaggaggagcggcagaggaacaaggaggccctggtgtctgctgccaagctggagaaggaggccgtgaaggatgctgtgctgaaggtggtggaggaggagaggaagaacctggagaaggcccacgccgaggagcgggagctgtggaagacagagcacgccaaggaccaggagaaggtgtcccaggagatccagaaggccatccaggagcagaggaagatcagccaggagaccgtgaaggccgccatcatcgaggagcagaagaggtctgagaaggctgtggaggaggccgtgaagaggaccagagatgagctgattgagtacatcaaggagcagaagaggctggaccaggtgatccggcagaggagcctgagcagcctggagctgttcctgagctgtgcccagaagcagctgagcgccctgattgccacagagcctgtggacatcgagtag

SEQ ID NO: 197842 - DNA, 1086 bp, Artificial Sequence
  derived and/or modified sequence
atggatgatgatgactttggaggctttgaagctgctgagacctttgatggcggcagcggggagacccagaccaccagccctgccatcccctgggccgccttccctgctgtgtctggagtgcacctgagccccagcagccctgagatcgtgctggaccgggaccacagcagcagcatcggctgcctgagcagtgatgccatcatcagcagccctgagaacacccacgccgccaacagcatcgtgtcccagaccatccccaaggcccagatccagcagagcacccacacccacctggacatcagcctcttccccctgggcctgacagatgagaagagcaatggcaccatcgccctggtggatgacagtgaagatcctggggccaacgtgagcaacatccagctgcagcagaagatcagcagcctggagatcaagctgaaggtgtctgaggaggagaagcagaggatcaagcaggatgtggagagcctgatggagaagcacaacgtgctggagaagggcttcctgaaggagaaggagcaggaggccatctccttccaggaccgctacaaggagctgcaggagaagcacaagcaggagctggaggacatgaggaaggccggccacgaggccctgagcatcatcgtggatgagtacaaggccctgctgcagagctctgtgaagcagcaggtggaggccatcgagaagcagtacatcagcgccatcgagaagcaggcccacaagtgtgaggagctgctgaatgcccagcaccagaggctgctggagatgctggacacagagaaggagctgctgaaggagaagatcaaggaggccctgatccagcagagccaggagcagaaggagatcctggagaagtgcctggaggaggagcggcagaggaacaaggaggccctggtgtctgctgccaagctggagaaggaggccgtgaaggatgctgtgctgaaggtggtggaggaggagaggaagaacctggagaaggcccacgccgaggagcgggagctgtggaagacagagcacgccaaggaccaggagaaggtgtcccaggagatccagaaggccatccaggagtag

SEQ ID NO: 197843 - DNA, 258 bp, Artificial Sequence
  derived and/or modified sequence
atggatgatgatgactttggaggctttgaagctgctgagacctttgatggcggcagcggggagacccagaccaccagccctgccatcccctgggccgccttccctgctgtgtctggagtgcacctgagccccagcagccctgagatcgtgctggaccgggaccacagcagcagcatcggctgcctgagcagtgatgccatcatcagcagccctgagaacacccacgccgccaacagcatcgtgtcccagaccatctag

SEQ ID NO: 197844 - DNA, 276 bp, Artificial Sequence
  derived and/or modified sequence
atggatgatgatgactttggaggctttgaagctgctgagacctttgatggcggcagcggggagacccagaccaccagccctgccatcccctgggccgccttccctgctgtgtctggagtgcacctgagccccagcagccctgagatcgtgctggaccgggaccacagcagcagcatcggctgcctgagcagtgatgccatcatcagcagccctgagaacacccacgccgccaacagcatcgtgtcccagaccatccccaaggcccagatccagtag

SEQ ID NO: 197845 - DNA, 1218 bp, Artificial Sequence
  derived and/or modified sequence
atggacgacgacgacttcggcggcttcgaggccgccgagaccttcgatggcggctcaggcgaaacccagacaacctctccggctatcccatgggccgcctttcctgccgtcagcggggtccatctcagtccatcatcacccgagatcgtgctcgatcgagaccactcctcatcaattggttgcttaagtagcgacgcgattatctcctcgcccgagaatactcacgcggccaattcaatcgtgtcccaaacgatacccaaagcacagattcaacagagcacccatactcacttagacatttcactctttccacttgggctcaccgacgaaaagagtaatggcaccatcgccctggtcgatgactcagaggaccctggggctaacgtcagcaacatacagctgcagcaaaagatttcttctctcgagattaagctgaaggttagcgaggaggaaaagcagcgaatcaagcaggacgtggagagtctcatggagaaacataatgttctcgaaaagggattcttgaaggaaaaggaacaggaagccatctcttttcaagatcgctataaagagctgcaggagaaacataagcaggaattggaggacatgcgaaaggcaggccatgaggcactttccatcatcgtcgatgaatataaacaccagcgtctcctcgagatgctcgatacagagaaagagcttctcaaggaaaagatcaaggaggctctgatccagcaaagtcaggagcagaaagagattctcgagaaatgccttgaagaggagaggcagagaaataaggaggccttagtgagtgccgccaaattagaaaaggaggccgtaaaggatgccgtgctcaaagtggtggaggaggaacggaagaacttagaaaaagcccatgctgaggaacgagaattatggaagactgagcacgccaaggatcaggagaaagtgagccaagagatccagaaagcaatccaggagcaaagaaaaatctcccaggaaactgtgaaggccgccatcatcgaggagcagaaacgctctgaaaaagcggtagaagaagccgtgaagcgaacccgcgatgagttgatcgaatatatcaaagagcagaaacgccttgatcaggttatccggcagagaagtctgagcagtctggaactcttcctgagctgcgcccagaaacaactttcagccttaatcgccaccgaacctgtggatatcgagtag

SEQ ID NO: 197846 - DNA, 1326 bp, Artificial Sequence
  derived and/or modified sequence
atggacgacgacgacttcggcggcttcgaggccgccgagaccttcgacggcggaagcggtgagactcagacgaccagtccagcgataccctgggccgcattccctgcagtgtccggcgttcacctcagcccaagtagccctgaaatcgtgcttgatcgggaccattcttcctccattgggtgccttagcagtgacgctattatatcttctcccgaaaacactcatgccgcaaacagcatcgtgagtcagaccatcccgaaggcccaaatccagcaatcgactcacactcacttggatattagtttatttcccctggggttgactgatgagaagagcaacgggaccattgctttggttgacgattccgaggatccaggcgccaatgtgagtaacatacagttgcagcagaagatctccagcctggagataaaattgaaagtgtctgaagaggagaagcagagaatcaagcaggacgttgaatctctaatggagaagcataacgtcctggagaaggggtttctcaaggaaaaggaacaggaggcaataagttttcaggatcgatacaaggaactccaggaaaaacacaaacaggagttagaggacatgcggaaagccgggcacgaagccctgtccattatagtcgacgaatataaggccttacttcagtccagcgttaagcagcaagtcgaggccatcgaaaaacagtatatctcagccatcgagaagcaggcacataaatgcgaggagctcttgaacgcccagcaccaaagattgctcgaaatgctggatactgaaaaggagctactaaaagagaagatcaaggaggcgctgatccaacagagccaagagcaaaaagagatactcgaaaagtgcctggaagaggaacgccagaggaataaagaagccttggtgtccgcggccaagcttgagaaagaagccgtgaaggatgctgtcctgaaagtggtggaggaggaacggaagaatctggaaaaagcccatgctgaagagcgggagctttggaagactgaacacgccaaggatcaggagaaagtgtcccaggagatccagaaagccatccaggagcaaagaaaaatttctcaggaaacagtcaaagctgccatcatcgaagagcagaagcgatcggaaaaagcggtagaagaagcagttaagaggactagggatgagctgattgaatacattaaagagcaaaagaggctagatcaggtcattaggcagaggtctctctcatccctggaactgttcttgtcgtgcgcacagaagcaactgagtgcacttatcgccaccgaaccagtagatattgagtag

SEQ ID NO: 197847 - DNA, 1086 bp, Artificial Sequence
  derived and/or modified sequence
atggacgacgacgacttcggcggcttcgaggccgccgagaccttcgacgggggctctggtgaaacccagacaaccagtcccgccatcccttgggccgcctttccagccgttagcggggtgcacctatccccttcctccccagaaattgtgctggacagagaccacagctctagtataggatgcctgtcctcagatgccattatatctagcccagagaatacccatgccgccaactccatcgtttctcagacaatccctaaagcccagatccagcagagcacccacacgcatcttgatatcagtttattccctctgggcctgacagacgaaaaatcgaacggtaccatcgcgctggtggatgattccgaggacccaggggccaacgtgagtaacatacagctgcagcagaaaatttctagtctggaaattaagctcaaagtctctgaagaggaaaagcagaggattaagcaggacgtggaatccctgatggagaagcataacgtcctcgagaagggtttcctaaaggaaaaagaacaggaagctatttcctttcaggacaggtataaagagctccaggagaagcataagcaggagctggaggacatgcgaaaggccgggcacgaggccttatcaattatcgtggatgaatacaaggcgctgctccagtcatcagttaaacaacaggtcgaggccatcgagaagcaatacattagcgcaatcgaaaagcaagcccataaatgcgaggaactgctgaatgcccaacaccagcgcctccttgagatgctcgacacagaaaaggagctgctcaaggaaaaaataaaggaggccctcattcagcaaagtcaggagcagaaagagatcctcgaaaaatgtctggaagaagagagacagagaaacaaggaagctcttgtgtccgcagccaaattagagaaggaggccgtcaaagatgctgtgctgaaggtcgtggaagaggagagaaaaaatcttgagaaggcccatgctgaagaacgcgagctgtggaaaaccgaacacgccaaggaccaggagaaagtatcccaggaaatccagaaggctatccaggagtag

SEQ ID NO: 197848 - DNA, 258 bp, Artificial Sequence
  derived and/or modified sequence
atggacgacgacgacttcggcggcttcgaggccgccgagaccttcgatggggggagcggagaaacccagaccacaagcccggctattccttgggccgcatttcctgcagtctccggcgtgcacctgtcaccctcgagtccagaaatcgtgttagaccgggaccactcttcatccattggatgcctatcaagcgatgccattatttccagtcctgaaaacacccatgccgccaactccatcgtgtcccagacaatttag

SEQ ID NO: 197849 - DNA, 1218 bp, Artificial Sequence
  derived and/or modified sequence
atggacgacgacgacttcggcggcttcgaggccgccgagaccttcgatggtggtagcggagaaacacagactacttccccggccattccttgggccgctttcccagccgtgtctggggtgcacctgagcccatcgagccctgaaattgtcttggaccgcgaccactcttcatccataggctgtctcagttccgatgccatcatttcctcaccggagaatacccacgctgcgaattccattgtctcccagaccatccccaaggctcagatccaacaaagcacacacactcacctggatatctctctttttcccctgggacttacagacgaaaaaagtaatggcacgattgcgttagtggacgactccgaggatcccggtgcaaacgtgtcgaatattcagcttcaacagaaaatctccagcctggaaatcaagctgaaagtttcggaggaagagaagcaacgcatcaaacaagacgtggagtccctgatggaaaaacacaacgtgctcgaaaagggctttctcaaggaaaaagaacaggaggctatatctttccaagacaggtacaaggagctccaggagaaacacaagcaagaactggaggacatgcgaaaggcagggcacgaagccttatcaataatcgtggacgagtacaagcaccagcggctgctggagatgctcgacacagagaaggaactgctcaaggagaaaataaaagaggctctgatccaacagagccaggaacagaaggaaattctggagaagtgtctggaagaggagagacaacgcaataaggaggccttggtcagtgccgccaagttggagaaggaagccgtcaaggacgccgtgctgaaagtggtggaggaagagagaaagaacctggaaaaggcccatgccgaagagcgggagttgtggaagaccgagcacgccaaggatcaggaaaaagtctcccaggagattcaaaaagcgattcaggagcagcgcaagatcagccaggagactgtaaaggctgccatcatcgaagagcagaagaggtctgaaaaggctgtggaggaagccgtcaaaagaacaagagatgagctcattgaatatattaaggaacagaagcggctagaccaagtgatacgtcaaaggtcgctgagctcgttggagctcttcctgtcgtgcgcccagaagcagctatctgcactgatcgcaaccgagcccgtggacatcgaatag

SEQ ID NO: 197850 - DNA, 276 bp, Artificial Sequence
  derived and/or modified sequence
atggacgacgacgacttcggcggcttcgaggccgccgagaccttcgatggaggatctggagagacacagacgaccagccctgccatcccctgggccgccttcccagccgtcagtggcgtccatctctccccgagctctccagagattgtactggacagggaccactcatcctccatcggatgtctttcttctgatgccatcatttcttcgcctgagaatacgcatgctgccaactctatcgtgtcgcaaactatccctaaggcgcagatccagtag

SEQ ID NO: 197851 - DNA, 1326 bp, Artificial Sequence
  derived and/or modified sequence
atggacgacgacgacttcggcggcttcgaggccgccgagaccttcgacggaggctcaggcgagacccaaactacatcacctgccataccttgggctgctttcccagcggtgtctggagtacatctgtcacctagttcccctgaaatagtgctggacagggatcatagctcttccattggatgcctctccagcgacgctatcatctcttcccctgagaacacgcacgccgccaattccatcgtctcccaaaccatccccaaggcccagattcaacagtccacccatacccatcttgatatctctctgttcccactgggcctgactgacgaaaaatctaacggcactattgctctggtggatgactcagaagatcccggagcgaatgtgtcgaacattcagttacagcagaaaatatcaagcctcgaaatcaagctgaaagttagcgaagaggagaaacaaagaattaaacaggatgtggagtctttaatggagaaacacaacgtgctggagaaagggtttttgaaagaaaaagagcaggaggccatatcatttcaggaccgttacaaagagctccaggagaaacacaaacaggagcttgaagacatgaggaaggctggccatgaagcattgtcaatcattgtggatgaatacaaagcgctgcttcagtccagcgtcaaacagcaggtggaggctatagagaaacagtacataagcgcgatagaaaagcaggctcacaagtgtgaagaactgctgaacgcgcagcaccagagactgcttgaaatgctggacaccgaaaaagagcttcttaaagagaaaatcaaggaagctttgatacagcagtctcaggagcagaaagagatcctggagaagtgtctggaagaggaaaggcagcgcaacaaggaggcactggtgtctgcagccaaattggaaaaggaagccgtgaaagacgcagtgcttaaggtggtggaagaagaaagaaaaaatctggagaaggcccacgccgaagagcgcgagctgtggaaaactgagcatgcaaaggaccaggagaaagtctctcaggagatacagaaggccattcaggagcagcgcaagatcagccaagaaaccgtaaaggctgctatcatcgaggagcagaagagatccgaaaaggccgttgaggaggccgtgaagagaactagagacgaactgatcgagtacataaaggagcagaaacggctggaccaggttatacggcaacgctccttaagtagcttagagttgtttctttcctgtgctcaaaagcagctctctgctctgatcgctacggaacccgtggacatagaatag

SEQ ID NO: 197852 - DNA, 1218 bp, Artificial Sequence
  derived and/or modified sequence
atggacgatgacgacttcggtgggttcgaagccgcagagaccttcgatggcggtagtggcgagacccaaactacctctcccgcaatcccttgggctgccttcccagccgtctccggagtccacctgtccccctcaagtccggagatcgtgttggacagagatcactcatcctccatcggttgcctgtcctctgacgcaattatatcttcacccgaaaatacacatgccgcaaactcaatcgtctcccaaactattccaaaagcccagattcagcagtctacacatacccatttagacatttctcttttccccctgggactgacagatgagaagagtaatggtaccattgctttagtggatgatagcgaagatccaggagcaaatgtctcgaacatccagctgcaacaaaagatcagctccctggagatcaaacttaaggtgtctgaggaagagaagcaaaggattaagcaggatgtagagtccctgatggagaaacacaacgtgctggaaaaaggctttctcaaagagaaagaacaggaggccatctcctttcaggaccgctacaaggaattgcaggagaagcacaaacaggaactcgaagacatgcgcaaagccggacatgaggctctgtcgatcatagttgatgagtacaaacatcagaggttattagaaatgctcgataccgagaaagagttattaaaggagaagattaaggaggctctcatccagcagagccaggaacagaaagagatcctagagaagtgtttagaggaggagaggcagcggaacaaagaagctctggtgtcagcggctaaactggagaaggaagctgtaaaagatgctgtgcttaaagtcgtggaggaagaacgtaagaacctcgaaaaggcccacgctgaagaacgagagctgtggaagactgagcacgccaaagatcaggaaaaagtgtcccaggaaattcagaaggcgatacaagaacaaagaaagattagtcaggagacagtaaaggcagcaatcatcgaagagcaaaaaaggagcgaaaaggcagttgaagaagcagtgaaaaggacccgcgacgagctgatcgaatacatcaaggaacagaagcgactcgaccaggtgatcagacagagaagcctctcttcactggagctatttctcagctgcgcccaaaaacagcttagtgcgcttattgccaccgagccagtggacatcgaatag

SEQ ID NO: 197853 - DNA, 1326 bp, Artificial Sequence
  derived and/or modified sequence
atggatgatgacgatttcggaggattcgaggccgctgaaacatttgacggaggatcaggcgagacacaaactacttcccctgccatcccttgggccgctttccccgcagtttcaggagttcatctctccccctcctccccagaaattgttctggaccgcgaccactcgagctccattggatgtctgtcttctgacgctatcatttctagccctgagaacactcatgcagcaaacagcatcgtgagccaaacaatcccgaaagcacaaatccaacaatctacacacacccatctggatatttcactcttccccctgggcttaactgatgagaaatccaacgggacaatcgcactggtcgacgatagtgaagaccccggagctaacgtcagcaacattcaacttcaacagaagataagtagtctggagattaagctaaaagtgtccgaggaggagaagcagcgcattaaacaggatgtggaatcgctcatggagaaacataacgtcttggagaaaggctttctgaaggagaaagaacaggaggcaatcagcttccaggatcggtataaggagctgcaagaaaaacacaaacaggaacttgaggacatgagaaaggctggtcacgaagctctcagcatcattgttgacgaatacaaagctctattacaaagttcagtgaaacagcaggtggaggcaatcgaaaagcagtatatctccgccattgaaaaacaagcacacaaatgtgaggaattactcaatgctcagcatcagagattgctggaaatgttagatacggaaaaggagctgctgaaagagaaaattaaagaggctctgattcagcaatctcaggagcagaaagaaattctggaaaaatgtctagaagaggaaaggcagagaaacaaggaagccctcgttagcgccgcaaagctagaaaaggaggcagtaaaggatgcggtgctcaaagtggtcgaggaggagcggaagaacctggaaaaggctcacgctgaagagagggagctctggaagactgaacatgctaaagatcaggaaaaagtctcccaggagatccagaaggccatacaggaacagagaaagatttcccaggagaccgtaaaggccgcaattatagaggaacagaaacggagcgaaaaggccgtcgaggaggctgtcaaacggacccgcgacgagctaatcgaatatatcaaagagcagaaacgattggaccaggttatccgccagcgatccctttcaagtttggagctcttcctgtcatgcgcccaaaaacagcttagcgctcttatcgccactgaaccagtcgacatagagtag

SEQ ID NO: 197854 - DNA, 1086 bp, Artificial Sequence
  derived and/or modified sequence
atggacgatgacgactttggagggtttgaggcagccgagacgttcgacggtggatctggagagacacagacaactagtcccgcaattccttgggccgcattcccagcagtgtccggagtgcatctctccccctcatcccctgagattgtgctcgaccgcgatcacagcagctcgatcggttgtctgtcttccgatgctatcatctcttcccctgaaaacacccacgcagccaatagtattgtatcccaaacgattcccaaggcccaaatccagcaaagtacacacacccatttggacatttctctgttccccttgggcttaacagatgaaaagtctaatggaaccattgcactggtggatgactctgaagatccaggagcgaacgtttcaaatatccagctgcaacagaagatctctagcctagagattaaactgaaagtgtcagaagaggagaagcagagaatcaaacaggacgtggaatcccttatggagaagcacaacgtgttggaaaaaggatttctgaaagaaaaggagcaggaagcaatttcgtttcaggaccgttacaaagagctgcaggaaaaacacaaacaggaattagaggatatgaggaaggccggtcacgaggccctctcaatcatagtggacgagtataaggcactcctgcagtccagtgttaaacagcaggtggaagcaatagaaaaacaatacattagtgctatcgagaaacaggcccacaagtgtgaggagttgctgaatgcgcagcaccagcgccttctggaaatgctggacactgaaaaggagctcctaaaagaaaagattaaggaagcgttaatccagcagtcacaggagcagaaggagatcctggagaagtgcctggaggaggaacggcaacgtaacaaggaggctctggtgtccgcagctaaactcgagaaagaagctgtcaaagacgcagtgttgaaagtcgtggaagaggaaaggaaaaacctggagaaggcccatgcggaagagcgagagctttggaagacagagcacgctaaagatcaggagaaggtgtctcaggaaatccagaaggctatccaggagtag

SEQ ID NO: 197855 - DNA, 258 bp, Artificial Sequence
  derived and/or modified sequence
atggacgatgacgattttggcggattcgaagctgcagagacttttgacggcggaagcggagaaacacagaccaccagccctgctatcccatgggccgcttttcctgctgtatccggcgtgcacctctctccatccagccccgagatcgtcttagatcgcgaccattcttccagcatcggctgtctgtcaagcgacgcaattatatcgtccccagagaatacgcatgctgccaactccattgtctcccaaaccatctag

SEQ ID NO: 197856 - DNA, 1218 bp, Artificial Sequence
  derived and/or modified sequence
atggacgacgatgattttggcggttttgaagccgctgagactttcgacggtgggtcaggggagactcaaacgactagcccagcaattccgtgggcggcatttcctgccgtatctggggtacacctctcgccatcatctcctgagatcgttctggatcgggatcacagtagttccattggctgtctatcgagtgatgcaatcataagtagtccagaaaacacccacgcagcaaatagcattgtcagtcagacaatcccaaaggcccagatccaacagtcgacccacactcacctggatatttccctgtttccactcgggctcacagacgaaaagagtaatggcaccattgccctggtcgatgatagcgaagatccaggggctaacgtgtcaaacattcagctgcagcaaaagatttcatctctagagataaaactcaaagtctcggaggaggaaaaacagcgcataaagcaggacgtggaaagccttatggagaaacacaacgttttagagaagggttttctgaaggaaaaggaacaggaggcaatctccttccaggataggtacaaagagttgcaagagaagcataagcaggaactggaggacatgaggaaggccggacacgaagctctaagcatcatcgtggatgagtataagcatcagaggctcctggaaatgctggacacagaaaaggagttattgaaggagaagataaaggaggcgctgattcagcaaagtcaggaacagaaggaaatactggagaaatgtctggaagaggagcggcaacgcaataaagaggcgctcgtgtcagccgcaaaacttgaaaaagaggccgtgaaagacgctgtgctgaaggtggtggaggaggagagaaaaaatttagagaaggcccatgcagaagagcgcgagttatggaaaacagaacatgcaaaagatcaggagaaggtctcacaggagattcagaaggcaatccaagaacagcggaagattagccaggaaactgttaaggctgccattatcgaagagcaaaagaggtccgagaaggccgtggaagaggctgtcaagcggacgcgagacgaacttatagaatatattaaggagcagaaacggttggatcaggtgatcaggcaaagatctttatctagtttagaactgtttctcagttgcgcccagaagcagttgtctgctctgattgccacagagcccgtggacattgagtag

SEQ ID NO: 197857 - DNA, 276 bp, Artificial Sequence
  derived and/or modified sequence
atggatgacgatgacttcggtggatttgaggctgctgaaacgttcgacgggggttctggggaaacgcagacaacctctcccgcaatcccgtgggcagccttccccgcagtttctggggtgcacctttcaccatcctcccctgaaattgtcctggaccgtgatcactcttcttccataggctgcctcagctcagatgcaataatctcaagccccgagaatacacacgccgcaaattcaatcgtgagccagactataccaaaagcccagattcagtag

SEQ ID NO: 197858 - DNA, 1326 bp, Artificial Sequence
  derived and/or modified sequence
atggacgacgacgatttcggaggcttcgaggcggctgagacttttgatggaggatctggggaaacccagaccacgtctcccgctatcccctgggccgctttcccagcagtcagtggagtgcatctgtctccctcttcacccgaaatcgtactggacagagatcactcaagcagtatcggctgtcttagttcagacgcaattatctcaagtcctgagaacacacatgctgctaactctattgtttcccagactatcccaaaggcacagatccagcagtctacacacactcacttggacatatccttatttcctctcggtctcactgacgaaaaatcaaatgggacgatagccctcgtggatgactctgaagaccccggagcaaatgtgagcaacatccagctgcagcaaaaaattagttccttggaaattaaattaaaagtgtcagaagaagagaaacagcgcattaagcaagacgtagagtcactcatggaaaagcacaacgtactggagaaagggtttttgaaagaaaaggagcaggaggctatttcctttcaggatcgctacaaggagcttcaggagaagcataaacaggagctggaagacatgcggaaagccggacatgaggctctcagcataattgtggatgaatacaaggccctcctgcagagcagcgttaagcaacaggtggaggctattgagaagcagtacattagcgccattgagaagcaagcacacaaatgcgaggaactgctgaacgcccaacatcagagattactggaaatgctagatactgaaaaggaactcctaaaggaaaaaataaaagaggctcttattcagcagagtcaggagcagaaggagatcctggagaaatgccttgaggaggaaaggcaaagaaacaaagaggccttagtgagcgcagccaagctcgaaaaggaggcagtgaaggatgctgtgctcaaagttgtagaggaggaacgtaagaatttggagaaggcacacgctgaagaacgcgagctgtggaaaactgagcacgctaaggatcaggagaaggtctcacaagagatccaaaaagcgattcaagaacagcgcaaaatctcacaggagacagtaaaagccgctatcattgaggaacagaagcgaagcgaaaaggccgtcgaggaggccgtcaagagaacacgcgacgagctcattgagtatattaaggagcagaaaagactcgatcaggttatccggcagagatctctgtctagcctggagctcttccttagttgcgcgcagaaacagctctctgccctgatcgctaccgaacccgtcgacatcgagtag

SEQ ID NO: 197859 - protein, 481 aa, Artificial Sequence
  derived and/or modified sequence
MEDPSEPDRLASADGGSPEEEEDGEREPLLPRIAWAHPRRGAPGSAVRLLDAAGEEGEAGDEELPLPPGDVGVSRSSSAELDRSRPAVSVTIGTSEMNAFLDDPEFADIMLRAEQAIEVGIFPERISQGSSGSYFVKDPKRKIIGVFKPKSEEPYGQLNPKWTKYVHKVCCPCCFGRGCLIPNQGYLSEAGAYLVDNKLHLSIVPKTKVVWLVSETFNYNAIDRAKSRGKKYALEKVPKVGRKFHRIGLPPKIGSFQLFVEGYKEAEYWLRKFEADPLPENIRKQFQSQFERLVILDYIIRNTDRGNDNWLVRYEKQKCEKEIDHKESKWIDDEEFLIKIAAIDNGLAFPFKHPDEWRAYPFHWAWLPQAKVPFSEEIRNLILPYISDMNFVQDLCEDLYELFKTDKGFDKATFESQMSVMRGQILNLTQALRDGKSPFQLVQIPCVIVERSQGGSQGRIVHLSNSFTQTVNCRKPFFSSW

SEQ ID NO: 197860 - protein, 450 aa, Artificial Sequence
  derived and/or modified sequence
MEDPSEPDRLASADGGSPEEEEDGEREPLLPRIAWAHPRRGAPGSAVRLLDRSRPAVSVTIGTSEMNAFLDDPEFADIMLRAEQAIEVGIFPERISQGSSGSYFVKDPKRKIIGVFKPKSEEPYGQLNPKWTKYVHKVCCPCCFGRGCLIPNQGYLSEAGAYLVDNKLHLSIVPKTKVVWLVSETFNYNAIDRAKSRGKKYALEKVPKVGRKFHRIGLPPKIGSFQLFVEGYKEAEYWLRKFEADPLPENIRKQFQSQFERLVILDYIIRNTDRGNDNWLVRYEKQKCEKEIDHKESKWIDDEEFLIKIAAIDNGLAFPFKHPDEWRAYPFHWAWLPQAKVPFSEEIRNLILPYISDMNFVQDLCEDLYELFKTDKGFDKATFESQMSVMRGQILNLTQALRDGKSPFQLVQIPCVIVERSQGGSQGRIVHLSNSFTQTVNCRKPFFSSW

SEQ ID NO: 197861 - DNA, 1446 bp, Artificial Sequence
  derived and/or modified sequence
atggaggatccgtcagaacctgatagacttgcttccgccgacggtggaagtccagaggaggaggaagacggcgagcgcgagccgttgcttcccagaatcgcatgggcccacccacggcgcggcgcccccggcagcgcagttcggttgttggacgccgcaggggaggaaggcgaagccggagacgaggagctgccactcccgcccggcgacgtgggtgtttctaggtcctctagcgccgaactggaccgctcacgcccagctgtgtcagtgactatcggcaccagcgaaatgaatgcatttctggacgaccctgagttcgctgatatcatgctgagggccgagcaggccatcgaggtgggcattttcccagagcgtatcagccagggcagttccggatcctactttgtgaaagaccccaagcggaagattattggagtgttcaagcccaagtcggaggagccatacgggcagttgaacccaaagtggacaaaatacgtccataaggtttgctgcccatgctgctttggacgaggatgcctgatccccaaccaggggtatcttagcgaagcaggggcctatttagtcgacaacaagctgcatctgagcattgtgcccaagaccaaggtggtgtggctggtgtccgaaacttttaactataacgcaatcgacagagcgaaaagcagggggaaaaaatacgccctggaaaaggtcccaaaagtgggtcgcaaatttcaccggatcgggctcccacccaagattggcagctttcaactcttcgtagagggatacaaggaggctgaatactggctgagaaagtttgaggccgatccactgcctgaaaatatcaggaaacagttccagtctcaattcgagcggctcgtgattttggactacatcattagaaacactgataggggaaatgacaattggctcgtccggtacgagaaacagaagtgcgaaaaggagattgaccacaaggagtcaaaatggatcgatgatgaagagtttcttataaagatcgccgcaattgataatggactcgccttccccttcaaacaccccgacgaatggagagcttatccatttcattgggcatggcttccccaggccaaggtgcctttttctgaggaaatacgcaatctcatcttgccatacatttctgatatgaatttcgttcaggatttgtgcgaggacctgtatgagttgttcaagaccgacaagggctttgacaaggctactttcgaatcccaaatgtccgtcatgcgcggacagatcctgaacctgactcaggcacttcgggacggaaagagcccatttcagctcgttcagataccatgtgtcatcgtggaaagaagccagggcggttctcaggggagaattgtgcacctgagcaattctttcacgcagactgtaaattgcagaaaacctttcttctcaagctggtag

SEQ ID NO: 197862 - DNA, 1353 bp, Artificial Sequence
  derived and/or modified sequence
atggaggacccttccgagcctgaccggctggcttcagcggacggtggaagcccagaagaggaggaggatggcgagcgcgagcctctcctccccagaatagcctgggcccaccctcggcgaggcgccccgggttctgcagtgcgactcctggacagaagcagacccgccgtgtctgtgacaattggcacgtctgagatgaatgccttcctcgacgacccggaattcgctgatatcatgctgcgcgcggagcaagctatcgaggtggggatcttccctgagcgaattagtcaggggtctagcggctcatatttcgttaaagatcctaagcgcaaaattatcggggtgttcaagcctaaatcggaagaaccctatggccaactgaatcctaaatggacgaagtacgtgcacaaagtgtgttgtccctgctgctttggacggggttgcctcattccaaatcagggctatctttcagaagctggggcgtacctggtcgacaacaaactgcatttgtcaattgtgccaaaaaccaaggtcgtctggctcgtgagtgagacatttaattacaacgcaatcgatcgcgctaaatcccgcggaaagaagtacgcgcttgagaaggtccctaaagtggggaggaaatttcaccgtattggactgccacccaaaataggctcattccagctgtttgttgagggctacaaggaggccgaatactggctccggaaatttgaggccgatccacttcctgagaatataagaaaacaattccaatcacagtttgagcgcctcgtcattcttgactatatcatcaggaataccgacaggggtaacgataactggctggtaagatatgaaaagcagaagtgcgagaaagagattgaccataaggagagtaaatggatcgacgacgaggaattcctaattaaaatcgctgctatcgataacgggttggccttcccttttaaacatccagacgaatggcgcgcatacccattccactgggcctggctccctcaggccaaggtaccattctcggaagaaatacggaatctaatactgccctacatctccgatatgaacttcgtgcaagatctgtgtgaggatttgtatgagctctttaagaccgataagggatttgacaaggccacatttgagagccaaatgtccgtgatgcggggtcagattttgaatctaacacaggcgctgagagacggaaagtccccgtttcagctcgtgcagatcccgtgcgttatcgtggaaagaagtcagggtggcagccaggggaggattgtgcatctttcaaactcatttacacagacagtgaactgtcggaaaccatttttttcttcgtggtag

SEQ ID NO: 197863 - DNA, 1446 bp, Artificial Sequence
  derived and/or modified sequence
atggaggaccccagcgagccagaccggctggccagcgcagatggcggcagccctgaggaggaggaggatggagagcgggagcccctgctgcccagaattgcctgggcccaccccaggagaggagcccctggcagcgctgtgcggctgctggatgctgctggggaggagggggaggccggagatgaggagctgcccctgcccccaggagatgtgggcgtgagccgcagcagcagcgctgagctggacaggagcaggcctgctgtgtctgtgaccatcggcaccagcgagatgaatgccttcctggatgatcctgagtttgctgacatcatgctgcgggcagagcaggccatcgaggtgggcatcttccctgagcgcatcagccagggcagcagcggcagctactttgtgaaggaccccaagaggaagatcatcggggtcttcaagcccaagtctgaggagccctacggccagctgaaccccaagtggaccaagtatgtgcacaaggtgtgctgcccctgctgcttcggccggggctgcctgatccccaaccagggctacctgtctgaggccggggcctacctggtggacaacaagctgcacctgagcatcgtgcccaagaccaaggtggtgtggctggtgtctgagaccttcaactacaatgccatcgaccgggccaagagccggggcaagaagtatgccctggagaaggtgcccaaggtgggcaggaagttccacagaattggcctgccccccaagattggcagcttccagctgtttgtggagggctacaaggaggccgagtactggctgaggaagtttgaagctgaccccctgcctgagaacatcaggaagcagttccagagccagtttgagcggctggtgatcctggactacatcatccggaacacagacagaggaaatgacaactggctggtgcgctatgagaagcagaagtgtgagaaggagattgaccacaaggagagcaagtggattgatgatgaggagttcctgatcaagattgctgccatcgacaatggcctggccttccccttcaagcacccagatgagtggagggcctaccccttccactgggcctggctgccccaggccaaggtgcccttcagcgaggagatccggaacctgatcctgccctacatcagtgacatgaactttgtgcaggacctgtgtgaggacctgtatgagctgttcaagacagacaagggctttgacaaggccacctttgagagccagatgtctgtgatgaggggccagatcctgaacctgacccaggccctgagagatggcaagagccccttccagctggtgcagatcccctgcgtcatcgtggagaggagccagggcggcagccagggccgcatcgtgcacctgagcaacagcttcacccagacagtgaactgcaggaagcccttcttcagctcctggtag

SEQ ID NO: 197864 - DNA, 1353 bp, Artificial Sequence
  derived and/or modified sequence
atggaggaccccagcgagccagaccggctggccagcgcagatggcggcagccctgaggaggaggaggatggagagcgggagcccctgctgcccagaattgcctgggcccaccccaggagaggagcccctggcagcgctgtgcggctgctggacaggagcaggcctgctgtgtctgtgaccatcggcaccagcgagatgaatgccttcctggatgatcctgagtttgctgacatcatgctgcgggcagagcaggccatcgaggtgggcatcttccctgagcgcatcagccagggcagcagcggcagctactttgtgaaggaccccaagaggaagatcattggagtcttcaagcccaagtctgaggagccctacggccagctgaaccccaagtggaccaagtatgtgcacaaggtgtgctgcccctgctgcttcggccggggctgcctgatccccaaccagggctacctgtctgaggccggggcctacctggtggacaacaagctgcacctgagcatcgtgcccaagaccaaggtggtgtggctggtgtctgagaccttcaactacaatgccatcgaccgggccaagagccggggcaagaagtatgccctggagaaggtgcccaaggtgggcaggaagttccaccgcatcggcctgccccccaagattggcagcttccagctgtttgtggagggctacaaggaggccgagtactggctgaggaagtttgaggccgaccccctgcctgagaacatcaggaagcagttccagagccagtttgagcggctggtgatcctggactacatcatccggaacacagacagaggaaatgacaactggctggtgcgctatgagaagcagaagtgtgagaaggagattgaccacaaggagagcaagtggattgatgatgaggagttcctgatcaagattgctgccatcgacaatggcctggccttccccttcaagcacccagatgagtggagggcctaccccttccactgggcctggctgccccaggccaaggtgcccttcagcgaggagatccggaacctgatcctgccctacatcagtgacatgaactttgtgcaggacctgtgtgaggacctgtatgagctgttcaagacagacaagggctttgacaaggccacctttgagagccagatgtctgtgatgaggggccagatcctgaacctgacccaggccctgagagatggcaagagccccttccagctggtgcagatcccctgtgtgattgtggagaggagccagggcggcagccagggcagaattgtgcacctgagcaacagcttcacccagacagtgaactgcaggaagcccttcttcagctcctggtag

SEQ ID NO: 197865 - DNA, 1446 bp, Artificial Sequence
  derived and/or modified sequence
atggaggaccccagcgagcccgaccggctggccagcgccgacggcggaagccctgaagaggaggaagacggtgagcgagagccattgctgccccggatcgcttgggcacacccccgacggggcgctcccggaagcgcagtcaggctacttgatgccgcgggtgaggagggagaagctggggatgaggaattgcccctaccccccggggacgtaggggtgtctagaagcagctctgccgaactggacagatctcggcctgcggtgtcggtgacaattggtacctctgaaatgaatgcatttctggatgaccctgagtttgctgatattatgctcagagcggaacaggccatagaagttggaattttccctgaaagaatctctcaggggtcgagcggctcctactttgtcaaggaccctaaacggaagattatcggcgtcttcaagccaaagtctgaggaaccttatggtcagttgaatcccaaatggacaaaatatgtgcataaggtgtgctgtccatgttgctttgggcgaggatgtttgatccctaaccagggatatctgtccgaggccggggcctacctcgtggacaataagttacacttgagcatcgtacccaagacgaaagtggtgtggctggtgtcagagactttcaattataatgcaattgatagggccaagtcccgcggcaaaaaatacgctctagaaaaggttccaaaggtcggccgcaaatttcaccgtatcggactaccacccaagattggctctttccagctgttcgtagaagggtacaaagaagccgagtattggctccgtaagttcgaggcggaccctcttccagaaaatatccgtaagcagttccagtcacagtttgaaagattggtgattctcgactacataattagaaacaccgaccgaggaaatgacaactggctcgtacgttacgagaagcagaagtgtgagaaggaaatcgatcataaagagtccaagtggatcgatgatgaggaatttctgataaagatcgctgctatagataatggtctggcgttccctttcaaacatcctgatgaatggagagcctatcccttccattgggcttggctgccacaggcaaaggtccctttctcagaggaaattcgtaacctgattcttccatatatatcagacatgaattttgtgcaagatctgtgtgaagacctatacgagcttttcaaaacagacaaggggtttgacaaggcgacctttgaaagccagatgtccgtgatgaggggccagattcttaacttgacacaggccttgcgagatggtaagagcccatttcagctcgtccaaattccctgtgttattgtcgagaggtcgcagggagggtcccagggtcgtatcgtccatctcagtaatagtttcacccagacagttaactgtaggaaaccttttttctcctcatggtag

SEQ ID NO: 197866 - DNA, 1353 bp, Artificial Sequence
  derived and/or modified sequence
atggaggaccccagcgagcccgaccggctggccagcgccgacggcggctccccagaggaggaagaagacggggagcgcgaaccactgttgccaagaatagcatgggcgcatccccggcggggggcccccgggtccgccgttaggctgctggatagatcccggccagccgtctctgttaccattggaaccagcgagatgaacgcctttctggatgacccggagtttgcagatatcatgctccgtgcagagcaggccattgaggtgggcatattccctgagcgtatctcacagggctcttccggaagctattttgtcaaggaccccaagagaaaaattatcggcgtgtttaaacccaagtcagaagaaccctacgggcagctgaacccaaaatggacaaaatacgttcacaaagtttgctgtccatgctgcttcggaagaggatgcttaattccaaatcaaggatatctgtctgaggctggtgcatatctggtagacaataagcttcacttatctatcgtgccgaagactaaggttgtttggctggtaagcgagacatttaactataatgccatcgatcgcgccaaaagccgcggaaagaaatacgctctcgaaaaggtgcccaaggtggggcgaaaattccaccggatcggtctcccaccaaagatcgggagcttccagctctttgtggaagggtacaaagaagctgaatattggcttcgcaaattcgaggctgaccctctcccagagaacattcggaagcagttccagtcccagttcgagagactcgttattctggattatataattagaaatactgatagaggaaacgacaattggctggtgaggtatgaaaagcagaagtgtgagaaggaaatcgatcataaagaaagtaaatggattgatgatgaagagttcctgattaagattgcagccattgataacggcctcgcctttcctttcaaacatccagatgaatggagagcgtatccattccactgggcctggctgcctcaggctaaggtacccttcagcgaggagattagaaacctcatccttccttacatttccgacatgaacttcgtgcaggacctttgcgaggatctttacgaactgttcaagacagataaaggcttcgacaaggccacattcgagtctcagatgagcgtgatgcgcgggcaaatactgaatctaacacaggcattaagagacggaaagtctcctttccagttggtgcagataccatgcgttatcgtggagaggagtcaggggggcagtcagggccgaattgtccatctgtccaattccttcactcaaaccgtgaactgcagaaagcccttcttctcaagctggtag

SEQ ID NO: 197867 - DNA, 3540 bp, Artificial Sequence
  derived and/or modified sequence
ggaggcgcgaggtggggcgcggccggcggcgaggcgggacaaccgctgggcgggcgccaagcgtgcccgtgcgctggtgaggtggcgtccgttctacccggtcgctcccgttccgcgccatgcagagcccagtctctggcacctggctgctctgatctggtctcagcgcggagggagcagagggagtccatggaggatccctccgagcccgaccggttggcgtccgcggacggcgggagcccggaggaggaggaggatggggagcgggagccgctgctaccgcggatcgcctgggcccacccgcggagaggcgccccaggcagcgccgtgaggctgctggacgctgccggggaggagggcgaggccggcgacgaggagctgcccctcccgcccggggacgtgggggtctcccggagttcgtccgccgagctggaccggagccgccccgcggtttcagtaactattggtacttcagagatgaatgcattcttggatgacccagaatttgccgatattatgctgagagcagagcaagcaatagaagttggaatttttccagaaagaatctctcaaggttcaagtggaagttactttgtgaaggatcctaagaggaaaattattggtgtgtttaaacccaaatcagaagagccttatggtcaactcaatccaaaatggaccaaatatgtccataaggtctgctgcccttgctgctttggccgaggctgcctgattcctaatcaggggtacctttccgaagcgggtgcctatcttgtggacaacaagcttcatctgagcattgtacctaaaacaaaggtggtttggcttgtcagtgagacatttaactataatgcgattgaccgtgcaaaatcaagaggcaaaaagtatgctttagaaaaagtgccaaaagtgggtagaaagtttcataggataggactccctcctaagattggttcctttcagttatttgttgaaggttacaaggaggctgaatattggcttaggaaatttgaagctgaccctttgcctgagaatattagaaaacaatttcagtcacaatttgaaagattagttattttggattacatcatcagaaatacagacaggggcaatgataattggttagtcagatacgaaaagcagaaatgtgaaaaggaaattgaccataaggaatcaaaatggattgatgatgaagaattccttattaaaatagctgcaattgataatggtctagcatttccttttaaacatcctgatgaatggagagcatatccatttcactgggcttggcttcctcaagcaaaagttcccttttctgaagaaataagaaatttgattctaccatatatttctgacatgaactttgtgcaagatttatgtgaagatctctatgaactttttaagactgacaaaggatttgacaaagccacttttgaaagtcagatgtctgtgatgaggggtcagatcttaaaccttactcaggcattgagagacgggaagagtcctttccagctagtacagataccttgtgtgattgtggaacgcagtcaaggtggaagtcagggtcggattgtccacctgagcaattcctttacccagactgtcaattgcaggaagccatttttttcctcctggtagtaaatgtcagagtaagagaaacaaactgtttagaattatcatgtttttaaaacatcatagtaatataaatctgctgttaggagctccagttgctaaaacctcaatttaagtctttaaaaggttgtattttgaatgtaaccaaaagtttacagttttttgtccaaatattaaatttctatttcagggaagaagtgctatatctcctatattgtatttttgtagaaaatttgtattttatgttgttgttagtttaaaaggtaattttacacatgctggaatgactgtaattactctagaattccaagtagaatacaataacttttaatattgagaagaatgttcatgctaattcttcttacattacaaaaggcctttgaggatgcctacgtctgaaattgctcttacgaactttaataaaatagttagctaatagaaaaacaggtaagaataaagcaatgttgccttaatttcaaaagctgctattttagaatttgaataagtactcctaaagtgaccattattagggaccagaaaattatatcttggctaagtaatagaggaccattttggtttttgtacttgagaatatttttggtgaattactttgttgtagtgaggaaaaaacctaagaaatttcccctttttttaaaaaatggaaatattcaattgagacttgaggggaataatagaaaattaaggtagatccccaatattttggaataccaaaattgccttaaaaattcccttctgtttcttacatgggatcaaatacttgagattagtacttcagagtactggccttgttcaatttagtacttcaattagtattaaacttcactaaaaagtaaaccatactccaaattgtatattggattgcattttggggtcctaggtcatacgttcttcaaaattattatgattgtactattgtacttgaaattacagatgttattataattacagtcaaatgtagactatcaggccaaattaaaggggagcatggcagataaccataaagtcatttatatttgattttgaaatgtatttttgtactttattttgaatatcatccatatgtctgacattattggaatttgtaacattgttaatgcactaagtgatttaaattcaattgatgaagatgtgattttacagaagcagaagtttcattttcttgaggcttaaaaccaatgtcaccacttgggcttaactgggtaatttgtggtctaggccttttgttttctaagcttactatcttgtgtttgtttatttgcttttaatgaagtattttgtgtagaaggttaaattaggatgcaaaacagatctgccattcctttttcccttatatcttccttttggtcttcatggacgagatgaatgaggattctgctgccctgagggagttcattggaaacctgcgttctcctacctcttccaaccctccattagctcaattttgagataatggaaaattgactggaaattcaaaactcaaactactatctttagatataaacactagtaattaaaatgtgccttttgaagatgttttctaagagaaaggaaatacgttgcagtgatgtgggtactgctttcataaaacagttttttcagtattttgagaattgccatattaatttttataatggaaaacttaataaattgctactgttttatatcataaaattaaaataccatggtaatatttgcaaaaggtctggccataccagaaaagtacagttgagatagttaagatataaccacaagtcagagtacattggttgtattttgtaaactttcatgaactgaattcttatttaaatagtatggttttttttcaataagtatatttatagtgacaaatgtggtagactaaaggtaataaaaatcattgtcttaagatta

SEQ ID NO: 197868 - DNA, 3388 bp, Artificial Sequence
  derived and/or modified sequence
aagcgtgcccgtgcgctggtgaggtggcgtccgttctacccggtcgctcccgttccgcgccatgcagagcccagtctctggcacctggctgctctgatctggtctcagcgcggagggagcagagggagtccatggaggatccctccgagcccgaccggttggcgtccgcggacggcgggagcccggaggaggaggaggatggggagcgggagccgctgctaccgcggatcgcctgggcccacccgcggagaggcgccccaggcagcgccgtgaggctgctggaccggagccgccccgcggtttcagtaactattggtacttcagagatgaatgcattcttggatgacccagaatttgccgatattatgctgagagcagagcaagcaatagaagttggaatttttccagaaagaatctctcaaggttcaagtggaagttactttgtgaaggatcctaagaggaaaattattggtgtgtttaaacccaaatcagaagagccttatggtcaactcaatccaaaatggaccaaatatgtccataaggtctgctgcccttgctgctttggccgaggctgcctgattcctaatcaggggtacctttccgaagcgggtgcctatcttgtggacaacaagcttcatctgagcattgtacctaaaacaaaggtggtttggcttgtcagtgagacatttaactataatgcgattgaccgtgcaaaatcaagaggcaaaaagtatgctttagaaaaagtgccaaaagtgggtagaaagtttcataggataggactccctcctaagattggttcctttcagttatttgttgaaggttacaaggaggctgaatattggcttaggaaatttgaagctgaccctttgcctgagaatattagaaaacaatttcagtcacaatttgaaagattagttattttggattacatcatcagaaatacagacaggggcaatgataattggttagtcagatacgaaaagcagaaatgtgaaaaggaaattgaccataaggaatcaaaatggattgatgatgaagaattccttattaaaatagctgcaattgataatggtctagcatttccttttaaacatcctgatgaatggagagcatatccatttcactgggcttggcttcctcaagcaaaagttcccttttctgaagaaataagaaatttgattctaccatatatttctgacatgaactttgtgcaagatttatgtgaagatctctatgaactttttaagactgacaaaggatttgacaaagccacttttgaaagtcagatgtctgtgatgaggggtcagatcttaaaccttactcaggcattgagagacgggaagagtcctttccagctagtacagataccttgtgtgattgtggaacgcagtcaaggtggaagtcagggtcggattgtccacctgagcaattcctttacccagactgtcaattgcaggaagccatttttttcctcctggtagtaaatgtcagagtaagagaaacaaactgtttagaattatcatgtttttaaaacatcatagtaatataaatctgctgttaggagctccagttgctaaaacctcaatttaagtctttaaaaggttgtattttgaatgtaaccaaaagtttacagttttttgtccaaatattaaatttctatttcagggaagaagtgctatatctcctatattgtatttttgtagaaaatttgtattttatgttgttgttagtttaaaaggtaattttacacatgctggaatgactgtaattactctagaattccaagtagaatacaataacttttaatattgagaagaatgttcatgctaattcttcttacattacaaaaggcctttgaggatgcctacgtctgaaattgctcttacgaactttaataaaatagttagctaatagaaaaacaggtaagaataaagcaatgttgccttaatttcaaaagctgctattttagaatttgaataagtactcctaaagtgaccattattagggaccagaaaattatatcttggctaagtaatagaggaccattttggtttttgtacttgagaatatttttggtgaattactttgttgtagtgaggaaaaaacctaagaaatttcccctttttttaaaaaatggaaatattcaattgagacttgaggggaataatagaaaattaaggtagatccccaatattttggaataccaaaattgccttaaaaattcccttctgtttcttacatgggatcaaatacttgagattagtacttcagagtactggccttgttcaatttagtacttcaattagtattaaacttcactaaaaagtaaaccatactccaaattgtatattggattgcattttggggtcctaggtcatacgttcttcaaaattattatgattgtactattgtacttgaaattacagatgttattataattacagtcaaatgtagactatcaggccaaattaaaggggagcatggcagataaccataaagtcatttatatttgattttgaaatgtatttttgtactttattttgaatatcatccatatgtctgacattattggaatttgtaacattgttaatgcactaagtgatttaaattcaattgatgaagatgtgattttacagaagcagaagtttcattttcttgaggcttaaaaccaatgtcaccacttgggcttaactgggtaatttgtggtctaggccttttgttttctaagcttactatcttgtgtttgtttatttgcttttaatgaagtattttgtgtagaaggttaaattaggatgcaaaacagatctgccattcctttttcccttatatcttccttttggtcttcatggacgagatgaatgaggattctgctgccctgagggagttcattggaaacctgcgttctcctacctcttccaaccctccattagctcaattttgagataatggaaaattgactggaaattcaaaactcaaactactatctttagatataaacactagtaattaaaatgtgccttttgaagatgttttctaagagaaaggaaatacgttgcagtgatgtgggtactgctttcataaaacagttttttcagtattttgagaattgccatattaatttttataatggaaaacttaataaattgctactgttttatatcataaaattaaaataccatggtaatatttgcaaaaggtctggccataccagaaaagtacagttgagatagttaagatataaccacaagtcagagtacattggttgtattttgtaaactttcatgaactgaattcttatttaaatagtatggttttttttcaataagtatatttatagtgacaaatgtggtagactaaaggtaataaaaatcattgtcttaagatt

SEQ ID NO: 197869 - DNA, 1446 bp, Artificial Sequence
  derived and/or modified sequence
atggaagacccttctgagcccgatagactggcctccgctgatggcggtagcccggaagaagaggaggatggtgagcgtgagcctctgttacctcgtattgcctgggcccacccacggaggggagccccagggtccgccgtgcgactcctcgatgccgctggagaggagggggaggcaggggacgaagagttaccactgcctcccggagatgtgggcgtgtccagatcttcctccgcagaactggaccgatccagaccagccgtctccgtaaccattggtacctccgaaatgaatgcgttcctcgacgatccagagtttgccgatattatgctcagagctgagcaggcaatcgaagtaggaatatttcccgagcgcatatctcagggttcaagcggcagttacttcgtcaaggacccaaagcgtaagatcatcggcgtcttcaagccaaaaagcgaagaaccttacgggcagcttaaccctaaatggacgaagtacgtccacaaagtatgttgcccctgctgctttggacggggttgtttgattcccaatcaaggctacttatctgaggctggagcctacctggttgataataaactgcacctgagcatcgttcctaagaccaaggtggtgtggctggtgagtgagaccttcaattacaacgctatcgatagagcaaaaagccgtggcaaaaagtacgccctcgagaaggtgccaaaggtgggacggaaatttcaccgaattggcctcccccctaagatcggctcttttcaactcttcgtggagggttataaggaggccgaatactggctgcggaaatttgaagccgaccctctgcccgagaacattagaaaacagtttcagagtcagtttgaaaggttagttatcctggactacatcatcagaaacacagatagaggcaacgacaactggctagtacggtacgaaaaacagaaatgcgaaaaggagattgatcataaggaatccaaatggattgatgacgaggagtttctcattaagatcgccgcaatcgacaacggactggcattcccattcaaacaccctgacgaatggcgggcatacccctttcactgggcatggctgccccaggctaaagtaccattttctgaagagattcggaacctgatactcccctacatctccgatatgaatttcgtgcaggatctgtgcgaggacctgtacgagctgtttaaaactgataaaggatttgacaaggccacctttgaatctcaaatgtctgttatgcgcggacagatactgaacctaactcaagccttgcgggatggcaagtccccgttccaattggtgcagatcccttgtgtgatcgtggagagatcacaggggggttctcagggacgcattgttcacttatctaatagcttcactcaaaccgtaaattgcaggaaacccttcttctcctcttggtag

SEQ ID NO: 197870 - DNA, 1353 bp, Artificial Sequence
  derived and/or modified sequence
atggaggatccaagcgaaccagatcgcctggctagcgctgatgggggaagccccgaagaagaagaagacggagagagagagccattgttaccgcgaatcgcttgggcacatcccagacgcggagcaccagggtctgccgtgagactcctcgaccgctcccggccagccgtgtccgttaccattgggaccagtgaaatgaatgcatttctagacgatcccgaatttgccgacataatgctgagagccgagcaagcaattgaggtcgggatctttcctgaacgcatctctcaggggagcagtggctcttatttcgtgaaggaccccaaaaggaagatcatcggagtgttcaagcccaagtccgaggagccctatggtcagctcaacccaaaatggacgaaatacgttcacaaggtgtgttgcccctgttgcttcggacgtgggtgtttgattccaaaccagggctatctgtcagaggctggggcttatctggtcgataacaagctacacctgagcattgtacctaaaaccaaggttgtgtggctagtctccgagacttttaattacaacgctatcgatcgcgcaaagtcacgagggaagaagtacgcattggagaaagtgccgaaagtagggaggaagttccacaggattggactgccccctaaaattggctcgtttcagcttttcgtcgaaggatacaaggaagccgagtactggctgcgtaaatttgaggccgacccactgcccgaaaatatccggaaacagtttcagagtcagttcgagcgtttagtgatccttgattatatcatccggaatactgaccgtggaaatgataactggctagtgcgctacgaaaagcagaagtgcgagaaggagattgaccacaaagaatccaagtggatcgacgatgaagagtttctaattaagatcgccgcaatcgacaatggtctggccttccccttcaaacacccagatgaatggagggcgtatccatttcactgggcttggctgccccaagccaaggtcccgtttagcgaggaaatccgcaacctcattctgccttacatttctgacatgaattttgtccaagacctgtgtgaggacctgtacgaactgttcaagacggacaaggggtttgataaagccaccttcgagtcccagatgagtgtcatgaggggacagattttgaatctcactcaggccctgcgggacggcaaaagtcctttccagctcgttcaaataccttgcgtcatcgtggagcggagccagggtggcagccagggacggatcgtacatctctctaacagcttcacgcagactgtgaattgccgtaaaccttttttttcatcatggtag

SEQ ID NO: 197871 - DNA, 1446 bp, Artificial Sequence
  derived and/or modified sequence
atggaggaccccagcgagcccgacagactggccagcgccgacggcggcagccccgaggaggaggaggacggcgagagagagcccctgctgcccagaatcgcctgggcccaccccagaagaggcgcccccggcagcgccgtgagactgctggacgccgccggcgaggagggcgaggccggcgacgaggagctgcccctgccccccggcgacgtgggcgtgagcagaagcagcagcgccgagctggacagaagcagacccgccgtgagcgtgaccatcggcaccagcgagatgaacgccttcctggacgaccccgagttcgccgacatcatgctgagagccgagcaggccatcgaggtgggcatcttccccgagagaatcagccagggcagcagcggcagctacttcgtgaaggaccccaagagaaagatcatcggcgtgttcaagcccaagagcgaggagccctacggccagctgaaccccaagtggaccaagtacgtgcacaaggtgtgctgcccctgctgcttcggcagaggctgcctgatccccaaccagggctacctgagcgaggccggcgcctacctggtggacaacaagctgcacctgagcatcgtgcccaagaccaaggtggtgtggctggtgagcgagaccttcaactacaacgccatcgacagagccaagagcagaggcaagaagtacgccctggagaaggtgcccaaggtgggcagaaagttccacagaatcggcctgccccccaagatcggcagcttccagctgttcgtggagggctacaaggaggccgagtactggctgagaaagttcgaggccgaccccctgcccgagaacatcagaaagcagttccagagccagttcgagagactggtgatcctggactacatcatcagaaacaccgacagaggcaacgacaactggctggtgagatacgagaagcagaagtgcgagaaggagatcgaccacaaggagagcaagtggatcgacgacgaggagttcctgatcaagatcgccgccatcgacaacggcctggccttccccttcaagcaccccgacgagtggagagcctaccccttccactgggcctggctgccccaggccaaggtgcccttcagcgaggagatcagaaacctgatcctgccctacatcagcgacatgaacttcgtgcaggacctgtgcgaggacctgtacgagctgttcaagaccgacaagggcttcgacaaggccaccttcgagagccagatgagcgtgatgagaggccagatcctgaacctgacccaggccctgagagacggcaagagccccttccagctggtgcagatcccctgcgtgatcgtggagagaagccagggcggcagccagggcagaatcgtgcacctgagcaacagcttcacccagaccgtgaactgcagaaagcccttcttcagcagctggtag

SEQ ID NO: 197872 - DNA, 1353 bp, Artificial Sequence
  derived and/or modified sequence
atggaggaccccagcgagcccgacagactggccagcgccgacggcggcagccccgaggaggaggaggacggcgagagagagcccctgctgcccagaatcgcctgggcccaccccagaagaggcgcccccggcagcgccgtgagactgctggacagaagcagacccgccgtgagcgtgaccatcggcaccagcgagatgaacgccttcctggacgaccccgagttcgccgacatcatgctgagagccgagcaggccatcgaggtgggcatcttccccgagagaatcagccagggcagcagcggcagctacttcgtgaaggaccccaagagaaagatcatcggcgtgttcaagcccaagagcgaggagccctacggccagctgaaccccaagtggaccaagtacgtgcacaaggtgtgctgcccctgctgcttcggcagaggctgcctgatccccaaccagggctacctgagcgaggccggcgcctacctggtggacaacaagctgcacctgagcatcgtgcccaagaccaaggtggtgtggctggtgagcgagaccttcaactacaacgccatcgacagagccaagagcagaggcaagaagtacgccctggagaaggtgcccaaggtgggcagaaagttccacagaatcggcctgccccccaagatcggcagcttccagctgttcgtggagggctacaaggaggccgagtactggctgagaaagttcgaggccgaccccctgcccgagaacatcagaaagcagttccagagccagttcgagagactggtgatcctggactacatcatcagaaacaccgacagaggcaacgacaactggctggtgagatacgagaagcagaagtgcgagaaggagatcgaccacaaggagagcaagtggatcgacgacgaggagttcctgatcaagatcgccgccatcgacaacggcctggccttccccttcaagcaccccgacgagtggagagcctaccccttccactgggcctggctgccccaggccaaggtgcccttcagcgaggagatcagaaacctgatcctgccctacatcagcgacatgaacttcgtgcaggacctgtgcgaggacctgtacgagctgttcaagaccgacaagggcttcgacaaggccaccttcgagagccagatgagcgtgatgagaggccagatcctgaacctgacccaggccctgagagacggcaagagccccttccagctggtgcagatcccctgcgtgatcgtggagagaagccagggcggcagccagggcagaatcgtgcacctgagcaacagcttcacccagaccgtgaactgcagaaagcccttcttcagcagctggtag

SEQ ID NO: 197873 - protein, 222 aa, Artificial Sequence
  derived and/or modified sequence
MSTLCPPPSPAVAKTEIALSGKSPLLAATFAYWDNILGPRVRHIWAPKTEQVLLSDGEITFLANHTLNGEILRNAESGAIDVKFFVLSEKGVIIVSLIFDGNWNGDRSTYGLSIILPQTELSFYLPLHRVCVDRLTHIIRKGRIWMHKERQENVQKIILEGTERMEDQGQSIIPMLTGEVIPVMELLSSMKSHSVPEEIDIADTVLNDDDIGDSCHEGFLLK

SEQ ID NO: 197874 - protein, 481 aa, Artificial Sequence
  derived and/or modified sequence
MSTLCPPPSPAVAKTEIALSGKSPLLAATFAYWDNILGPRVRHIWAPKTEQVLLSDGEITFLANHTLNGEILRNAESGAIDVKFFVLSEKGVIIVSLIFDGNWNGDRSTYGLSIILPQTELSFYLPLHRVCVDRLTHIIRKGRIWMHKERQENVQKIILEGTERMEDQGQSIIPMLTGEVIPVMELLSSMKSHSVPEEIDIADTVLNDDDIGDSCHEGFLLNAISSHLQTCGCSVVVGSSAEKVNKIVRTLCLFLTPAERKCSRLCEAESSFKYESGLFVQGLLKDSTGSFVLPFRQVMYAPYPTTHIDVDVNTVKQMPPCHEHIYNQRRYMRSELTAFWRATSEEDMAQDTIIYTDESFTPDLNIFQDVLHRDTLVKAFLDQVFQLKPGLSLRSTFLAQFLLVLHRKALTLIKYIEDDTQKGKKPFKSLRNLKIDLDLTAEGDLNIIMALAEKIKPGLHSFIFGRPFYTSVQERDVLMTF

SEQ ID NO: 197875 - DNA, 1446 bp, Artificial Sequence
  derived and/or modified sequence
atgtcgaccctctgccctccgccctcacctgctgtggctaagacggagatcgccttgtcaggaaagtcacccctcctcgcagccacctttgcttactgggataacattctggggccaagagtgaggcacatttgggctccaaaaactgaacaggttctcctgagtgacggggagatcacatttttagccaatcatacattaaatggagagatactaagaaacgcggaatctggcgccattgatgttaagttcttcgttttgtctgagaaaggagtgatcatagtgtccctgatcttcgacgggaattggaatggcgatcggagtacttacgggcttagcatcatcctgccacagaccgaactgtccttctacctcccactgcaccgggtgtgcgtcgaccggctgacacacattatcagaaaaggcagaatctggatgcacaaggagagacaggaaaatgtgcagaaaatcatcttagagggaaccgaaaggatggaagaccagggacaaagcattattcccatgctgaccggagaagttattcccgtgatggaactgttatcttctatgaagtcgcattctgtgcctgaggaaatcgacatagccgacacggttttaaatgacgacgatataggggactcttgccacgaaggctttctgttgaatgcgatcagttcccacttgcaaacatgcggttgttcggttgtggtcggttcttccgccgagaaagttaataagatcgttcggaccctctgtctgttccttactccagcagagcgtaagtgttccaggctttgcgaggccgaatctagctttaagtacgaaagcggcctttttgtgcagggtttattgaaagatagcacggggagcttcgttttgccatttagacaagtgatgtacgcgccatatcccacgacacatatcgacgttgacgtgaataccgtcaagcaaatgcccccctgccacgaacatatttacaatcagcgtcgttacatgcgttccgagctgactgccttttggagggccacttcggaggaggacatggcccaagacacaattatctacacagatgaatctttcacccccgatctgaatattttccaggacgttttacatagggacacccttgtgaaagccttcctggatcaggtgttccaactcaaacccgggctcagcctgcgcagcacttttctggctcagttcctgctggtcctgcacaggaaagccctgacacttattaaatatatcgaggatgacactcaaaagggcaaaaagcctttcaagtcactaaggaacctaaagatcgacctggaccttacagcggagggggacttgaatatcataatggcactggctgagaagatcaaacccggattgcactcattcatcttcggcagacccttttacacctccgtccaggagcgggatgtgctgatgaccttctag

SEQ ID NO: 197876 - DNA, 1446 bp, Artificial Sequence
  derived and/or modified sequence
atgagcaccctgtgccccccacccagccctgctgtggccaagacagaaattgccctgagcggcaagagccccctgctggccgccacctttgcctactgggacaacatcctgggcccccgggtgcgccacatctgggcccccaagacagagcaggtgctgctgagtgatggagagatcaccttcctggccaaccacaccctgaatggagagatcctgagaaatgctgagagcggggccattgatgtgaagttctttgtgctgtctgagaagggcgtcatcatcgtgtccctcatctttgatggcaactggaatggagacaggagcacctacggcctgagcatcatcctgccccagacagagctgtccttctacctgcccctgcaccgggtgtgtgtggaccggctgacccacatcatcaggaagggccgcatctggatgcacaaggagcggcaggagaatgtgcagaagatcatcctggagggcacagagaggatggaggaccagggccagagcatcatccccatgctgactggagaggtgattcctgtgatggagctgctgagctccatgaagagccacagcgtgcctgaggagattgatattgctgacacagtgctgaatgatgatgacattggagacagctgccacgagggcttcctgctgaatgccatcagcagccacctgcagacctgtggctgcagcgtggtggtgggcagcagcgctgagaaggtgaacaagatcgtgaggaccctgtgcctcttcctgaccccagctgagaggaagtgcagccggctgtgtgaggccgagagcagcttcaagtatgagagcggcctgtttgtgcagggcctgctgaaggacagcacaggcagctttgtgctgcccttccggcaggtgatgtatgccccctaccccaccacccacattgatgtggatgtgaacacagtgaagcagatgccaccctgccacgagcacatctacaaccagaggcgctacatgaggtctgagctgacagccttctggagggccaccagcgaggaggacatggcccaggacaccatcatctacacagatgagagcttcaccccagacctgaacatcttccaggatgtgctgcaccgggacaccctggtgaaggccttcctggaccaggtgttccagctgaagccaggcctgagcctgcggagcaccttcctggcccagttcctgctggtgctgcacaggaaggccctgaccctcatcaagtacattgaagatgacacccagaagggcaagaagcccttcaagagcctgaggaacctgaagattgacctggacctgacagctgagggggacctgaacatcatcatggccctggccgagaagatcaagccaggcctgcacagcttcatcttcggccggcccttctacacctctgtgcaggagagagatgtgctgatgaccttctag

SEQ ID NO: 197877 - DNA, 1446 bp, Artificial Sequence
  derived and/or modified sequence
atgagcaccctgtgccccccccccagccccgccgtggccaagaccgaaatcgccctgagtggcaagagcccactactagccgcgactttcgcttattgggacaacatactgggtcctcgggtgagacatatctgggcccctaaaactgaacaagtacttctgtcggacggcgagattacattccttgctaatcacacactgaacggtgaaatcttgcggaatgccgaatcgggtgccatcgatgttaagtttttcgtgctctctgaaaaaggggttattatagtttccctcatttttgacggaaactggaatggggaccgttcaacctatggccttagcatcatcctcccccagaccgagctgtcattctacctgccactccatagagtgtgtgtcgaccgcctcacccacatcattcgcaagggcagaatttggatgcataaagagcgtcaggagaatgtgcaaaagatcatccttgagggtaccgagagaatggaagatcagggacagtcaatcatccccatgctaacaggggaagtcatacctgtgatggagctactttcaagcatgaaaagtcactccgtccctgaggagatcgatatcgccgacacggtgttaaatgacgatgatattggtgactcctgccatgagggcttcctgttgaatgccatctccagccacctccaaacctgcggctgttccgttgtagtaggcagttcagccgagaaagtgaacaaaattgttaggactctttgtctgttcctgacccctgctgaacgaaagtgttcccggttgtgtgaggcagaaagtagtttcaagtatgaatccggtctcttcgttcagggtctcctgaaggacagcacagggagttttgtcctgccgttccggcaggttatgtatgccccgtaccccactacccatatagacgtggacgtgaacactgtgaaacagatgcctccatgccatgagcacatctacaatcaaagacggtacatgcggagcgaactcacagcgttctggcgcgccacctctgaggaggacatggcccaagatacaatcatctataccgatgagtctttcaccccagacctgaatatctttcaggacgtattgcacagagataccctggtgaaggcctttctcgatcaggtgtttcagctcaagccaggcctgtccttgcggtctacattccttgcacagttcctgctcgtgttgcatagaaaggcgcttactctgattaagtatatcgaagacgacacgcagaagggcaagaaaccctttaagtccctgcgtaacttaaagattgacctggacctcaccgccgagggggacctgaacattatcatggccctggctgagaaaattaagcccgggcttcattctttcatcttcggccggccattctatacaagtgtgcaagagagagatgtgcttatgactttctag

SEQ ID NO: 197878 - DNA, 1446 bp, Artificial Sequence
  derived and/or modified sequence
atgtccactctgtgtccacctccaagccccgctgttgccaaaaccgaaatcgcgttatccggcaagtcacctctattagccgcaacatttgcttactgggacaacattctgggtcccagagtcaggcatatctgggcccctaaaacagagcaggtgctgctctcagacggagagataaccttcctggccaatcacacattgaacggcgagatcttgcgcaatgccgagtcaggggctatcgatgtgaagttctttgtgctgtccgagaagggcgtcatcattgtgtctctcattttcgacggcaattggaatggagataggtctacttatgggctcagtattattctgcctcaaacggagctctccttttacctacctctgcatcgcgtctgtgtggataggcttacccacatcatcaggaagggacgcatttggatgcacaaggagcgacaggagaacgtgcagaaaataatccttgaaggaacagagcggatggaagatcagggtcagtcaatcattcctatgctgacgggtgaagtcatcccagtaatggagttgctctcatctatgaaatcccacagcgtccccgaagaaatcgacattgctgataccgtcctgaacgatgacgacataggcgatagctgtcacgagggattcttactcaatgctatttcatcgcatttgcagacttgcggatgtagcgttgttgtaggctcctctgccgagaaggtaaacaagatcgtgcgaaccctctgtttattcctcacaccagccgaaaggaagtgcagcagactctgcgaggcagaaagttcgttcaagtacgaaagcggtctgttcgtacaaggcctgctgaaggactctactggctccttcgtactgccctttcgccaggtaatgtacgcgccttaccccaccactcatattgatgtggacgtgaataccgtgaagcagatgcctccatgtcacgagcacatctacaatcagaggcgctatatgcggtccgagctgaccgctttctggagggcgactagtgaggaggacatggcccaagataccatcatttacaccgatgagtcctttaccccagacctgaatatattccaggacgtgctgcacagggatacgctcgtaaaggcttttctggaccaggtatttcagttaaaaccaggcctctccctccgttccaccttcttggcacagttcttactcgtactgcacaggaaggccttgaccctgattaagtacatagaggacgacacacaaaagggtaaaaaaccgtttaagtcccttcggaatctgaaaatcgacctggatctcaccgctgaaggtgatctgaacatcattatggccctggccgagaaaatcaaacccggactgcacagctttatttttggccgtccgttttatacttccgttcaggagcgtgatgtgctgatgactttttag

SEQ ID NO: 197879 - DNA, 3200 bp, Artificial Sequence
  derived and/or modified sequence
gcgcaggcggtggcgagtggatatctccggagcatttggataatgtgacagttggaatgcagtgatgtcgactctttgcccaccgccatctccagctgttgccaagacagagattgctttaagtggcaaatcacctttattagcagctacttttgcttactgggacaatattcttggtcctagagtaaggcacatttgggctccaaagacagaacaggtacttctcagtgatggagaaataacttttcttgccaaccacactctaaatggagaaatccttcgaaatgcagagagtggtgctatagatgtaaagttttttgtcttgtctgaaaagggagtgattattgtttcattaatctttgatggaaactggaatggggatcgcagcacatatggactatcaattatacttccacagacagaacttagtttctacctcccacttcatagagtgtgtgttgatagattaacacatataatccggaaaggaagaatatggatgcataaggaaagacaagaaaatgtccagaagattatcttagaaggcacagagagaatggaagatcagggtcagagtattattccaatgcttactggagaagtgattcctgtaatggaactgctttcatctatgaaatcacacagtgttcctgaagaaatagatatagctgatacagtactcaatgatgatgatattggtgacagctgtcatgaaggctttcttctcaatgccatcagctcacacttgcaaacctgtggctgttccgttgtagtaggtagcagtgcagagaaagtaaataagatagtcagaacattatgcctttttctgactccagcagagagaaaatgctccaggttatgtgaagcagaatcatcatttaaatatgagtcagggctctttgtacaaggcctgctaaaggattcaactggaagctttgtgctgcctttccggcaagtcatgtatgctccatatcccaccacacacatagatgtggatgtcaatactgtgaagcagatgccaccctgtcatgaacatatttataatcagcgtagatacatgagatccgagctgacagccttctggagagccacttcagaagaagacatggctcaggatacgatcatctacactgacgaaagctttactcctgatttgaatatttttcaagatgtcttacacagagacactctagtgaaagccttcctggatcaggtctttcagctgaaacctggcttatctctcagaagtactttccttgcacagtttctacttgtccttcacagaaaagccttgacactaataaaatatatagaagacgatacgcagaagggaaaaaagccctttaaatctcttcggaacctgaagatagaccttgatttaacagcagagggcgatcttaacataataatggctctggctgagaaaattaaaccaggcctacactcttttatctttggaagacctttctacactagtgtgcaagaacgagatgttctaatgactttttaaatgtgtaacttaataagcctattccatcacaatcatgatcgctggtaaagtagctcagtggtgtggggaaacgttcccctggatcatactccagaattctgctctcagcaattgcagttaagtaagttacactacagttctcacaagagcctgtgaggggatgtcaggtgcatcattacattgggtgtctcttttcctagatttatgcttttgggatacagacctatgtttacaatataataaatattattgctatcttttaaagatataataataggatgtaaacttgaccacaactactgtttttttgaaatacatgattcatggtttacatgtgtcaaggtgaaatctgagttggcttttacagatagttgactttctatcttttggcattctttggtgtgtagaattactgtaatacttctgcaatcaactgaaaactagagcctttaaatgatttcaattccacagaaagaaagtgagcttgaacataggatgagctttagaaagaaaattgatcaagcagatgtttaattggaattgattattagatcctactttgtggatttagtccctgggattcagtctgtagaaatgtctaatagttctctatagtccttgttcctggtgaaccacagttagggtgttttgtttattttattgttcttgctattgttgatattctatgtagttgagctctgtaaaaggaaattgtattttatgttttagtaattgttgccaactttttaaattaattttcattatttttgagccaaattgaaatgtgcacctcctgtgccttttttctccttagaaaatctaattacttggaacaagttcagatttcactggtcagtcattttcatcttgttttcttcttgctaagtcttaccatgtacctgctttggcaatcattgcaactctgagattataaaatgccttagagaatatactaactaataagatctttttttcagaaacagaaaatagttccttgagtacttccttcttgcatttctgcctatgtttttgaagttgttgctgtttgcctgcaataggctataaggaatagcaggagaaattttactgaagtgctgttttcctaggtgctactttggcagagctaagttatcttttgttttcttaatgcgtttggaccattttgctggctataaaataactgattaatataattctaacacaatgttgacattgtagttacacaaacacaaataaatattttatttaaaattctggaagtaatataaaagggaaaatatatttataagaaagggataaaggtaatagagcccttctgccccccacccaccaaatttacacaacaaaatgacatgttcgaatgtgaaaggtcataatagctttcccatcatgaatcagaaagatgtggacagcttgatgttttagacaaccactgaactagatgactgttgtactgtagctcagtcatttaaaaaatatataaatactaccttgtagtgtcccatactgtgttttttacatggtagattcttatttaagtgctaactggttattttctttggctggtttattgtactgttatacagaatgtaagttgtacagtgaaataagttattaaagcatgtgtaaacattgttatatatcttttctcctaaatggagaattttgaataaaatatatttgaaatttt

SEQ ID NO: 197880 - DNA, 1446 bp, Artificial Sequence
  derived and/or modified sequence
atgagcaccctgtgccccccccccagccccgccgtggccaagaccgagatcgccctgagcggcaagagccccctgctggccgccaccttcgcctactgggacaacatcctgggccccagagtgagacacatctgggcccccaagaccgagcaggtgctgctgagcgacggcgagatcaccttcctggccaaccacaccctgaacggcgagatcctgagaaacgccgagagcggcgccatcgacgtgaagttcttcgtgctgagcgagaagggcgtgatcatcgtgagcctgatcttcgacggcaactggaacggcgacagaagcacctacggcctgagcatcatcctgccccagaccgagctgagcttctacctgcccctgcacagagtgtgcgtggacagactgacccacatcatcagaaagggcagaatctggatgcacaaggagagacaggagaacgtgcagaagatcatcctggagggcaccgagagaatggaggaccagggccagagcatcatccccatgctgaccggcgaggtgatccccgtgatggagctgctgagcagcatgaagagccacagcgtgcccgaggagatcgacatcgccgacaccgtgctgaacgacgacgacatcggcgacagctgccacgagggcttcctgctgaacgccatcagcagccacctgcagacctgcggctgcagcgtggtggtgggcagcagcgccgagaaggtgaacaagatcgtgagaaccctgtgcctgttcctgacccccgccgagagaaagtgcagcagactgtgcgaggccgagagcagcttcaagtacgagagcggcctgttcgtgcagggcctgctgaaggacagcaccggcagcttcgtgctgcccttcagacaggtgatgtacgccccctaccccaccacccacatcgacgtggacgtgaacaccgtgaagcagatgcccccctgccacgagcacatctacaaccagagaagatacatgagaagcgagctgaccgccttctggagagccaccagcgaggaggacatggcccaggacaccatcatctacaccgacgagagcttcacccccgacctgaacatcttccaggacgtgctgcacagagacaccctggtgaaggccttcctggaccaggtgttccagctgaagcccggcctgagcctgagaagcaccttcctggcccagttcctgctggtgctgcacagaaaggccctgaccctgatcaagtacatcgaggacgacacccagaagggcaagaagcccttcaagagcctgagaaacctgaagatcgacctggacctgaccgccgagggcgacctgaacatcatcatggccctggccgagaagatcaagcccggcctgcacagcttcatcttcggcagacccttctacaccagcgtgcaggagagagacgtgctgatgaccttctag

SEQ ID NO: 197881 - protein, 329 aa, Artificial Sequence
  derived and/or modified sequence
MANPGGGAVCNGKLHNHKKQSNGSQSRNCTKNGIVKEAQQNGKPHFYDKLIVESFEEAPLHVMVFTYMGYGIGTLFGYLRDFLRNWGIEKCNAAVERKEQKDFVPLYQDFENFYTRNLYMRIRDNWNRPICSAPGPLFDLMERVSDDYNWTFRFTGRVIKDVINMGSYNFLGLAAKYDESMRTIKDVLEVYGTGVASTRHEMGTLDKHKELEDLVAKFLNVEAAMVFGMGFATNSMNIPALVGKGCLILSDELNHTSLVLGARLSGATIRIFKHNNTQSLEKLLRDAVIYGQPRTRRAWKKILILVEGVYRTSWIIYGFTRIVLFMLHP

SEQ ID NO: 197882 - protein, 552 aa, Artificial Sequence
  derived and/or modified sequence
MANPGGGAVCNGKLHNHKKQSNGSQSRNCTKNGIVKEAQQNGKPHFYDKLIVESFEEAPLHVMVFTYMGYGIGTLFGYLRDFLRNWGIEKCNAAVERKEQKDFVPLYQDFENFYTRNLYMRIRDNWNRPICSAPGPLFDLMERVSDDYNWTFRFTGRVIKDVINMGSYNFLGLAAKYDESMRTIKDVLEVYGTGVASTRHEMGTLDKHKELEDLVAKFLNVEAAMVFGMGFATNSMNIPALVGKGCLILSDELNHTSLVLGARLSGATIRIFKHNNTQSLEKLLRDAVIYGQPRTRRAWKKILILVEGVYSMEGSIVHLPQIIALKKKYKAYLYIDEAHSIGAVGPTGRGVTEFFGLDPHEVDVLMGTFTKSFGASGGYIAGRKDLVDYLRVHSHSAVYASSMSPPIAEQIIRSLKLIMGLDGTTQGLQRVQQLAKNTRYFRQRLQEMGFIIYGNENASVVPLLLYMPGKVAAFARHMLEKKIGVVVVGFPATPLAEARARFCVSAAHTREMLDTVLEALDEMGDLLQLKYSRHKKSARPELYDETSFELED

SEQ ID NO: 197883 - protein, 139 aa, Artificial Sequence
  derived and/or modified sequence
MANPGGGAVCNGKLHNHKKQSNGSQSRNCTKNGIVKEAQQNGKPHFYDKLIVESFEEAPLHVMVFTYMGYGIGTLFGYLRDFLRNWGIEKCNAAVERKEQKDFVPLYQDFENFYTRNLYMRIRDNWNRPICSAPGPLFD

SEQ ID NO: 197884 - protein, 215 aa, Artificial Sequence
  derived and/or modified sequence
NCTKNGIVKEAQQNGKPHFYDKLIVESFEEAPLHVMVFTYMGYGIGTLFGYLRDFLRNWGIEKCNAAVERKEQKDFVPLYQDFENFYTRNLYMRIRDNWNRPICSAPGPLFDLMERVSDDYNWTFRFTGRVIKDVINMGSYNFLGLAAKYDESMRTIKDVLEVYGTGVASTRHEMGEFTSSWQNALCVGGVLQADSVPQGPPWSWKMGRHSSLLE

SEQ ID NO: 197885 - DNA, 1659 bp, Artificial Sequence
  derived and/or modified sequence
atggccaacccaggtggaggcgccgtgtgcaacggaaagctgcacaaccataagaaacagagcaacggatctcagtcacgtaactgcacaaaaaacggaattgtgaaggaggcacagcagaacggaaaaccgcatttctacgataaactaatcgtcgagagcttcgaagaggcacctctgcacgtgatggtgttcacttacatgggatacgggattggcactctgtttgggtatctccgcgatttcttacgtaactgggggattgaaaagtgtaacgcagcagtcgagcgaaaagaacagaaggattttgtccctttataccaggatttcgagaacttctacacgaggaatctgtatatgagaattcgagacaactggaacaggcccatatgctccgcgccgggtccactgtttgatctcatggagagagtttcagatgactataattggacctttcgctttacgggtagagtgatcaaggacgtgattaacatgggaagctataattttctgggcttggctgcaaagtacgacgagtcaatgagaaccattaaggacgtcctggaggtgtacgggaccggtgtggctagcacccgccacgagatgggtacacttgataaacacaaggagttagaagatctcgtagccaaatttctcaacgtggaagcagctatggtttttggtatgggattcgccacaaattccatgaatatcccggcccttgtgggcaaaggctgtctgattttgtccgacgagctcaatcacacaagcctagtattaggtgccagactctctggagccacgattcggatttttaagcataacaacacccagtcacttgagaaacttctgagggatgccgtcatctatggccagcctcgcactcgtagggcatggaagaagatcctgattctggtcgagggcgtgtactccatggagggcagtattgtccatctgcctcaaattatcgccttaaaaaagaagtataaggcctatttgtacattgatgaggcacattcaattggtgccgtgggccccaccggaagaggggtcacagaatttttcgggctagacccacacgaggtggacgtcttaatgggcacatttaccaagagctttggagctagcggagggtacatcgctggcaggaaggacctggttgactacctgagggttcatagccacagtgccgtatatgcctcctccatgtccccacccatcgctgagcaaattataagatcactgaagctgatcatgggcctcgatgggaccacccagggacttcagagagtccagcagctggccaaaaatacccgttacttccgccagcgacttcaggagatgggattcattatctacggcaatgaaaacgcttccgtggtgccactgttgctctacatgccaggtaaggtggctgccttcgcccgccatatgctcgagaaaaaaatcggcgtagtggtggtcggcttcccagccaccccattagctgaggcgcgcgcccgcttctgcgtttctgccgcccatacccgggagatgctcgacacagttctggaggctctcgatgagatgggagacctcctgcagctgaagtacagcagacacaagaagagcgcacgaccagagctttacgatgaaacctcgtttgagctcgaggactag

SEQ ID NO: 197886 - DNA, 1659 bp, Artificial Sequence
  derived and/or modified sequence
atggccaaccctgggggcggcgctgtgtgcaatggcaagctgcacaaccacaagaagcagagcaatggcagccagagcaggaactgcaccaagaatggcatcgtgaaggaggcccagcagaatggcaagccccacttctatgacaagctgattgtggagagctttgaggaggcccccctgcacgtgatggtgttcacctacatgggctacggcatcggcaccctgtttggctacctgcgggacttcctgaggaactggggcatcgagaagtgcaatgctgctgtggagaggaaggagcagaaggactttgtgcccctgtaccaggactttgagaacttctacaccaggaacctgtacatgaggatccgggacaactggaaccggcccatctgcagcgcccctggccccctgtttgacctgatggagcgggtgtctgatgactacaactggaccttccgcttcaccggccgggtcatcaaggatgtgatcaacatgggcagctacaacttcctgggcctggccgccaagtatgatgagagcatgaggaccatcaaggatgtgctggaggtgtatggaactggagtggccagcaccaggcatgagatgggcaccctggacaagcacaaggagctggaggacctggtggccaagttcctgaatgtggaggccgccatggtgtttggcatgggctttgccaccaacagcatgaacatcccagccctggtgggcaagggctgcctgatcctgagtgatgagctgaaccacaccagcctggtgctgggcgcccggctgagcggggccaccatccgcatcttcaagcacaacaacacccagagcctggagaagctgctgagagatgctgtgatctacggccagcccaggacccggcgggcctggaagaagatcctgatcctggtggagggcgtgtacagcatggagggcagcatcgtgcacctgccccagatcatcgccctgaagaagaagtacaaggcctacctgtacattgatgaggcccacagcattggagctgtgggccccaccggccggggcgtgacagagttcttcggcctggacccccatgaggtggatgtgctgatgggcaccttcaccaagagctttggagccagcggcggctacatcgccggcaggaaggacctggtggactacctgcgggtgcacagccacagcgctgtgtatgccagctccatgagcccccccatcgccgagcagatcatccgcagcctgaagctgatcatgggcctggatggcaccacccagggcctgcagagggtgcagcagctggccaagaacacccgctacttccggcagaggctgcaggagatgggcttcatcatctatggaaatgaaaatgcctctgtggtgcccctgctgctgtacatgcctgggaaggtggccgcctttgcccggcacatgctggagaagaagattggagtggtggtggtgggcttccctgccacccccctggccgaggcccgggcccgcttctgtgtgtctgctgcccacacccgggagatgctggacacagtgctggaggccctggatgagatgggagacctgctgcagctgaagtacagccgccacaagaagagcgcccggcctgagctgtatgatgagaccagctttgagctggaggactag

SEQ ID NO: 197887 - DNA, 1659 bp, Artificial Sequence
  derived and/or modified sequence
atggccaaccccggcggcggcgccgtgtgcaacggcaagctgcacaatcataaaaagcagtctaatggcagccagagccgcaattgcaccaagaacggtattgtcaaagaggcccagcagaatgggaaaccccacttctatgacaagctgatagtggagagcttcgaagaagcccccttgcatgtgatggtgttcacctacatgggttatggcataggtacactgtttggttatctgagagactttttaagaaattggggtattgagaagtgcaatgccgcggtggaacgcaaggagcaaaaagacttcgttcccctgtaccaggattttgagaatttctacacaaggaacctctatatgcggatccgcgacaactggaatagaccgatatgtagcgccccagggccactctttgatttgatggagagagtgagtgacgattataattggacttttcgcttcaccgggagagttataaaggatgtgatcaacatgggatcctacaattttttgggtctggcagcaaagtatgacgaatctatgcgaacgatcaaagacgttcttgaagtgtatggaacaggggtggcctctacccgccacgagatgggcaccctggataagcacaaagagttggaggacctagttgctaagtttctcaacgtagaagctgccatggtattcggaatgggctttgccaccaattccatgaatatcccagcccttgtgggtaagggatgcttaatactgtcagacgagctaaaccatacatccctggtgctaggcgccaggttatccggggcgacgatccgcatttttaagcacaataacacccagagtctagagaagctgctccgtgacgccgttatctatggccagcctaggacccgcagggcttggaagaagatcctcatactggtggaaggggtttacagtatggagggttccattgtgcaccttccgcagatcattgcattgaaaaaaaaatacaaagcatacctgtatatcgacgaagcgcacagtattggcgctgtgggtcccaccggcaggggagtaactgagtttttcggactcgatccacacgaagtggacgttcttatgggcactttcaccaagagtttcggagcttctggtgggtacatagccggtcgaaaagacttagtggattacctccgggtccattcacactcagccgtgtatgcctcctctatgagccctcctatcgcagagcaaatcattcgctccctcaaattgattatgggcctcgacggcactactcagggcttgcagcgggtccagcagctcgcaaagaatactagatattttcgacagagactgcaggagatgggattcataatctacggtaatgagaatgcatcagtcgtgccactcctgttgtacatgccaggcaaggtagcagcgttcgcccggcacatgctggaaaagaaaatcggggtcgtggtggtgggctttcccgccactcctctggccgaagcacgcgcccgcttctgcgtgtcggcagcccacactcgtgagatgctggacaccgttctggaagcactggacgagatgggtgacctgctgcagttaaaatacagtcggcacaagaaaagcgcacgcccggagttatacgacgagacctccttcgaacttgaagattag

SEQ ID NO: 197888 - DNA, 1659 bp, Artificial Sequence
  derived and/or modified sequence
atggctaacccgggagggggagccgtgtgtaacggaaaattgcacaatcataaaaaacagtctaatggctcccaatcccgaaattgcacaaagaatggaattgtgaaggaggctcagcagaatgggaagccccatttctatgacaaactcatcgttgaatccttcgaggaagcaccccttcatgtcatggtgtttacatacatggggtacggcatcggaaccctgttcggctatcttcgtgacttccttaggaactggggcattgaaaaatgcaacgctgccgttgaacgaaaagagcagaaggattttgtgcctctgtatcaggactttgagaacttttacactaggaatctctatatgcgaatcagggataactggaatcggccaatctgctctgctcctggccctctcttcgatttgatggaacgcgtgagcgacgactacaattggaccttcaggtttactggccgagtgattaaggacgttatcaatatgggatcctacaatttccttggcttggccgctaagtacgacgaatccatgagaacgatcaaggatgtgctggaggtgtacggaacaggggtcgcctcgacccgtcatgagatgggaacattagacaaacacaaagagctcgaagaccttgtggctaaatttctgaatgtggaagctgcaatggtgtttggtatgggcttcgccacaaactccatgaacattcctgcactggtgggcaagggctgcttgatcttatccgacgagctgaatcacacgtcacttgtgctcggggctcgactttctggagccactatacggatcttcaaacacaacaacacccagtccctggagaagctactccgcgatgccgtgatctacggtcaacctcgaaccagaagagcctggaaaaagattctcatcctggttgagggggtatattctatggaaggatccatcgtgcaccttcctcagattatcgccctcaagaaaaaatacaaggcctacctttacatcgatgaggcccactcgatcggggcagtgggtcccactggccgaggcgtgacggagttttttggcctggacccacacgaggttgacgtcctgatgggaaccttcactaagtcattcggcgcttcgggaggttacattgccggacgcaaagaccttgtcgattacctgcgagtacactcccattccgcggtctacgcatcttctatgagtccacctatcgccgaacagataattcggagtctcaagcttattatggggctcgacgggactacacaggggctgcagcgcgtgcagcaactcgcgaagaatacgaggtatttcagacaacggctgcaagagatggggttcattatctatggcaatgaaaatgcaagtgtggttccgctgctcctctacatgcctggtaaagtggcagcatttgctagacacatgcttgagaagaaaataggcgtggtggtggtcgggtttccagcaacacctcttgcagaggccagagccagattttgcgtgtcggcagcccatacacgcgagatgctggacaccgtgctcgaagcgcttgatgagatgggcgatctgctgcagctcaagtacagtaggcataagaagagtgctagacccgagctgtacgacgaaactagcttcgaactagaggattag

SEQ ID NO: 197889 - DNA, 3830 bp, Artificial Sequence
  derived and/or modified sequence
ggacaatctcctttacagtttcggaagcaggtttgttgccatggagttcacattttgacgggagttgagaagtataaaggtaaccatttgttttagtttcaacgatctgacaaaaagataggctgttgctcttcttctggaaaagcctgattggtaagattcctttaagggctcagccccaaagagctttatcccatcccctcgcagactgaaaactaaagcctgcagagacctctgaaggaaaacctgtcccgggctctgtcacttcacacccatggctaaccctggaggtggtgctgtttgcaacgggaaacttcacaatcacaagaaacagagcaatggctcacaaagcagaaactgcacaaagaatggaatagtgaaggaagcccagcaaaatgggaagccacatttttatgataagctcattgttgaatcgtttgaggaagcaccccttcatgttatggttttcacttacatgggatatggaattggaaccctgtttggctatctcagagactttttaagaaactggggaatagaaaaatgcaacgcagctgtggaaagaaaagaacaaaaagattttgtgccactgtatcaagactttgaaaatttttatacaagaaacctttacatgcgaatcagagacaactggaaccggcccatctgcagtgccccagggcctctgtttgatttgatggagagggtatcagacgactataactggacgtttaggtttactggaagagtcatcaaagatgtcatcaacatgggctcctataacttccttggtcttgcagccaagtatgatgagtctatgaggacaataaaggatgttttagaggtgtatggcacaggcgtggccagcaccaggcatgaaatgggcaccttggataagcacaaggagttggaggaccttgtggctaagttcctgaatgtggaagcagctatggtctttgggatgggattcgcaactaactcaatgaatatcccagcattagttggaaagggatgcctcattttaagtgatgagttaaaccacacatcgcttgtgcttggggcccgactctcaggtgcaaccataagaatcttcaaacacaacaacacacaaagcctagagaagctcctgagagatgctgtcatctatggccagcctcgaacccgcagagcttggaaaaagattctcatcctggtggagggtgtctacagcatggaaggttccatcgtgcatctgccccagatcatagctctaaagaagaaatacaaggcttacctctacatagatgaagctcacagtattggggccgtgggcccaaccggccggggtgtcacggagttctttggactagaccctcatgaagttgatgtgctcatgggcacattcaccaaaagttttggagcttcaggaggttacatagctggaaggaaggacctcgtggattatttacgggttcactcgcatagtgctgtttatgcttcatccatgagcccaccgatagcagagcaaatcatcagatcactaaaacttatcatgggactggatgggaccactcaagggctgcagagagtacagcaacttgcgaaaaacacaagatacttcagacaaagactgcaggaaatgggattcattatctatggcaatgagaatgcttctgttgttcctctgcttctttatatgcctggtaaagtagcggcttttgcaaggcatatgctagagaaaaaaattggagtggtggtcgtgggatttccagccactcccctcgcagaagctcgggctcggttttgtgtttcagcggcacatacccgggagatgttagacacggttttagaagctcttgatgaaatgggtgatctcttgcaactgaaatattcccggcacaagaagtcagcacgtcctgagctctatgatgagacgagctttgaactcgaagattaagtttcctggtcctgaatgacacataaagactttgcgagaaagacctccctccttgcctcacaaggaatataaatggatttctcccccttcctcaggacaattttggttcccagaccagcttgattgaactgagggagacgttgttgtttttaatgtctccagcttggactgcagagacaaaaacatgattccagatttaagtctctcttcttccaagtattctactagaaatacacacacacacacacacacacttctgagaatatttttaatggcaataagcctgtgttttagctgctactgtgcagaccctttcagggattccaaccaaatgcaaatgagagaatttaaaatttttattcagtaagttcactatgtgtttacttattccatctgcagatgtaagtgagtgtggtggacagtagccaccttccttgttccactcataaaagcatcagctagatctcatctgtatcatgggaagttccaggcaggagggtaaagaaatgttgtttctaccatttgtcacatttggacgtttttcacagacaagtgtcaaaagacatagttaatgtttcgagggggaaagcagaactgatcaactgcgactagagacgtctttgaaggaaattttccttttcctcttgctggtctcctacagttttacagctgagcttttgaggtttggaaaattcaagatgtttgtttcataagaaaaggggcagaaagcaagcacaagacacttttaggtctagactaaaatggtagttacaacaatttgaaccttgttggtgcagtgcacggtgaatgcttaccctgcacagcctctattaccttaaggaattagttgtcattttcctattgaattttgagtaaatggtgaaattcagtgtcctttagaatcgactcccaagactatatttgaagaatgcattgattcaagaaggacatttaaaagcaaattctgactttttcaagaccaacacacttgtttaggcctattaaattgtactatcacttgttacatgccctctgaattgggagaaagtgggcttgcacactttgaggtaactaactgtaatttacttgtgttctctctttcttgctctccttctcaacatgaacacaaacctctatggaaaagtagcctcttgttaatctgatctagtttgtatggaaaaagcccatggagaaccttatctttaacaagctcccagagggtgcccagatttggaaattctagagagcagtggtgaccttttagcaaagcttctgtaacagttcgaatgagttgcagaacattccactccatcaaatgacactgtaaacaaatcacttcaagagaggcttggttttgtgtggcacagatggacccaagctttcatgctgtgcactgagatagaaactccacccgcagcgcctgcgatggatggagcagtgtgccctgatgctcaaagcgtattaaaggaaaaaaagtgatcagcatggaaagtttttatggggaaattataactccaagtgggtgcattggtttaaaaatggatcacaatgatagagttcttcatgaatgtttacaagttgtaaggaataccgttagtgaaagaggaaaagaagtgggttctgaaaatgcagtttcccatccaatgattttgataacaaaattccaacttttctcaatgaaactgatgcagtattatttgtgcaaataaaatgtgtcataaatatgcaaagaaagggagacatactgttcttatcttgaatatgtgcatttaaatgaattgtccaaaatgcataaatgccttgcgttctataaaggaaacaggaggtcaaaaagacagcgagatatctagtccttccacaaggtatggaaagcaataaacatcttcctttctttctg

SEQ ID NO: 197890 - DNA, 1659 bp, Artificial Sequence
  derived and/or modified sequence
atggccaaccccggcggcggcgccgtgtgcaacggcaagctgcacaaccacaagaagcagagcaacggcagccagagcagaaactgcaccaagaacggcatcgtgaaggaggcccagcagaacggcaagccccacttctacgacaagctgatcgtggagagcttcgaggaggcccccctgcacgtgatggtgttcacctacatgggctacggcatcggcaccctgttcggctacctgagagacttcctgagaaactggggcatcgagaagtgcaacgccgccgtggagagaaaggagcagaaggacttcgtgcccctgtaccaggacttcgagaacttctacaccagaaacctgtacatgagaatcagagacaactggaacagacccatctgcagcgcccccggccccctgttcgacctgatggagagagtgagcgacgactacaactggaccttcagattcaccggcagagtgatcaaggacgtgatcaacatgggcagctacaacttcctgggcctggccgccaagtacgacgagagcatgagaaccatcaaggacgtgctggaggtgtacggcaccggcgtggccagcaccagacacgagatgggcaccctggacaagcacaaggagctggaggacctggtggccaagttcctgaacgtggaggccgccatggtgttcggcatgggcttcgccaccaacagcatgaacatccccgccctggtgggcaagggctgcctgatcctgagcgacgagctgaaccacaccagcctggtgctgggcgccagactgagcggcgccaccatcagaatcttcaagcacaacaacacccagagcctggagaagctgctgagagacgccgtgatctacggccagcccagaaccagaagagcctggaagaagatcctgatcctggtggagggcgtgtacagcatggagggcagcatcgtgcacctgccccagatcatcgccctgaagaagaagtacaaggcctacctgtacatcgacgaggcccacagcatcggcgccgtgggccccaccggcagaggcgtgaccgagttcttcggcctggacccccacgaggtggacgtgctgatgggcaccttcaccaagagcttcggcgccagcggcggctacatcgccggcagaaaggacctggtggactacctgagagtgcacagccacagcgccgtgtacgccagcagcatgagcccccccatcgccgagcagatcatcagaagcctgaagctgatcatgggcctggacggcaccacccagggcctgcagagagtgcagcagctggccaagaacaccagatacttcagacagagactgcaggagatgggcttcatcatctacggcaacgagaacgccagcgtggtgcccctgctgctgtacatgcccggcaaggtggccgccttcgccagacacatgctggagaagaagatcggcgtggtggtggtgggcttccccgccacccccctggccgaggccagagccagattctgcgtgagcgccgcccacaccagagagatgctggacaccgtgctggaggccctggacgagatgggcgacctgctgcagctgaagtacagcagacacaagaagagcgccagacccgagctgtacgacgagaccagcttcgagctggaggactag

SEQ ID NO: 197891 - protein, 1494 aa, Artificial Sequence
  derived and/or modified sequence
MNGGKECDGGDKEGGLPAIQVPVGWQRRVDQNGVLYVSPSGSLLSCLEQVKTYLLTDGTCKCGLECPLILPKVFNFDPGAAVKQRTAEDVKADEDVTKLCIHKRKIIAVATLHKSMEAPHPSLVLTSPGGGTNATPVVPSRAATPRSVRNKSHEGITNSVMPECKNPFKLMIGSSNAMGRLYVQELPGSQQQELHPVYPRQRLGSSEHGQKSPFRGSHGGLPSPASSGSQIYGDGSISPRTDPLGSPDVFTRSNPGFHGAPNSSPIHLNRTPLSPPSVMLHGSPVQSSCAMAGRTNIPLSPTLTTKSPVMKKPMCNFSTNMEIPRAMFHHKPPQGPPPPPPPSCALQKKPLTSEKDPLGILDPIPSKPVNQNPVIINPTSFHSNVHSQVPMMNVSMPPAVVPLPSNLPLPTVKPGHMNHGSHVQRVQHSASTSLSPSPVTSPVHMMGTGIGRIEASPQRSRSSSTSSDHGNFMMPPVGPQATSSGIKVPPRSPRSTIGSPRPSMPSSPSTKSDGHHQYKDIPNPLIAGISNVLNTPSSAAFPTASAGSSSVKSQPGLLGMPLNQILNQHNAASFPASSLLSAAAKAQLANQNKLAGNNSSSSSNSGAVAGSGNTEGHSTLNTMFPPTANMLLPTGEGQSGRAALRDKLMSQQKDALRKRKQPPTTVLSLLRQSQMDSSAVPKPGPDLLRKQGQGSFPISSMSQLLQSMSCQSSHLSSNSTPGCGASNTALPCSANQLHFTDPSMNSSVLQNIPLRGEAVHCHNANTNFVHSNSPVPNHHLAGLINQIQASGNCGMLSQSGMALGNSLHPNPPQSRISTSSTPVIPNSIVSSYNQTSSEAGGSGPSSSIAIAGTNHPAITKTTSVLQDGVIVTTAAGNPLQSQLPIGSDFPFVGQEHALHFPSNSTSNNHLPHPLNPSLLSSLPISLPVNQQHLLNQNLLNILQPSAGEGDMSSINNTLSNHQLTHLQSLLNNNQMFPPNQQQQQLLQGYQNLQAFQGQSTIPCPANNNPMACLFQNFQVRMQEDAALLNKRISTQPGLTALPENPNTTLPPFQDTPCELQPRIDPSLGQQVKDGLVVGGPGDASVDAIYKAVVDAASKGMQVVITTAVNSTTQISPIPALSAMSAFTASIGDPLNLSSAVSAVIHGRNMGGVDHDGRLRNSRGARLPKNLDHGKNVNEGDGFEYFKSASCHTSKKQWDGEQSPRGERNRWKYEEFLDHPGHIHSSPCHERPNNVSTLPFLPGEQHPILLPPRNCPGDKILEENFRYNNYKRTMMSFKERLENTVERCAHINGNRPRQSRGFGELLSTAKQDLVLEEQSPSSSNSLENSLVKDYIHYNGDFNAKSVNGCVPSPSDAKSISSEDDLRNPDSPSSNELIHYRPRTFNVGDLVWGQIKGLTSWPGKLVREDDVHNSCQQSPEEGKVEPEKLKTLTEGLEAYSRVRKRNRKSGKLNNHLEAAIHEAMSELDKMSGTVHQIPQGDRQMRPPKPKRRKISR

SEQ ID NO: 197892 - DNA, 4485 bp, Artificial Sequence
  derived and/or modified sequence
atgaacggcggaaaggagtgtgacggtggggacaaggaaggcggactccctgccatccaggttccggtcggttggcagcggagagttgaccaaaacggggtgctctatgtctctccaagcgggtcacttttaagctgtctggagcaagttaagacatacctgctgaccgatggaacctgtaaatgtggtctcgagtgcccgctgattctcccaaaagtttttaactttgatcctggcgcagccgtaaagcagagaactgccgaagacgtgaaagcagacgaagatgtaacgaaattatgcatacacaagcggaaaattatcgcagtggccactctccataagtctatggaagccccacacccctccctcgtcctgacctcccctggcggcggaactaatgctacgcccgtcgttccgagcagggccgccacacctcgatcagtaaggaacaagagtcacgaggggataacaaatagcgttatgccagagtgtaagaatccctttaaacttatgattggaagcagtaatgccatggggcgactttatgtgcaggagctcccaggcagccagcagcaggagctccaccccgtgtacccaagacagaggctcggttctagtgaacacggccagaagtcacctttcaggggatcccatggtggcctcccctcccccgcctctagtggatcacagatatatggcgacggctcaatcagcccccggactgaccctttggggagtcccgacgtgtttacccggagcaaccccggcttccatggcgctccaaacagttcaccaatccacttgaacagaaccccccttagtcccccctccgtcatgcttcacgggagtcctgttcaaagctcctgcgctatggccggccggacaaacatccccctctccccgaccctcactaccaaatcccctgttatgaaaaagcccatgtgtaacttcagcacaaatatggagatccctagggccatgttccaccataagccaccccagggccctccaccgcctccccccccaagttgcgccctccagaagaaacccctgacaagtgagaaggacccgctgggtattttggatcccatcccctccaagcccgtgaatcagaatccagtgataattaacccgacctcattccacagcaacgttcatagccaggtgcccatgatgaacgttagtatgcctccagcagtagtccctctaccttctaaccttcccttaccgacagtgaagccagggcacatgaaccacggctctcacgtgcagagagttcagcacagtgcctccaccagtctcagcccctctcctgtaacctcccccgtccatatgatggggaccggcattgggcgaatcgaagccagccctcagcggagcaggtcttcgagtacatcttccgatcacggcaacttcatgatgccccccgtggggccccaagctacgtcaagcgggattaaggtgccgcctaggagtccccggtccacaatcggttcacctagacccagcatgcctagttccccctccacaaagtctgacggacatcatcagtacaaggacattcccaaccctctcattgccgggatttcgaacgttctgaataccccaagcagcgctgctttccctaccgcctcagcgggcagcagctcagtcaagagccaacctggcctgctcgggatgccactgaatcagatcttgaatcagcataacgccgccagcttcccggccagtagcttactgtccgctgctgccaaggctcagctggccaaccaaaacaagctagcaggcaacaactcatccagcagctccaattcgggggctgtagctggctccggaaacacagaggggcacagtaccctcaatacaatgttccccccgacagccaatatgttgcttcccaccggagaaggtcagtcgggccgcgccgccctgcgagacaagttgatgtcccagcaaaaggacgcccttcgcaaacgcaagcagccccccaccaccgtgctctcactgctcagacaaagtcagatggactcatccgctgtgcccaaacctgggcctgacctgctgagaaagcaaggccaagggtcgtttcccatctccagcatgagccagttgctgcaaagtatgtcctgtcagtcctctcacctctcttccaattccaccccgggctgtggggccagtaatactgctctgccatgctctgctaaccaactccactttaccgaccccagcatgaattcttccgtgcttcagaacattcccctgcggggagaggcagtgcactgccacaatgctaacacaaatttcgtgcattcaaactcacctgtgcctaatcaccatctggctgggctgattaaccagatacaggcttccggaaattgtggaatgctaagccaatctggtatggctctcggcaactcacttcacccaaaccctccccagagtcgaatctctacgtccagtaccccagtcatcccaaattccatcgtttcctcttacaatcagacttcaagtgaagcagggggcagtggtcctagtagctctattgcaatagctgggactaatcacccggctataactaagactactagcgtgctgcaagacggtgtaatagtcacaaccgcagctggaaatccgcttcagagccagctccctattggctccgactttccctttgtaggtcaggaacacgcattacatttcccctctaattccacctcaaacaatcatctaccccaccctttgaatccttctctgctctcgtcactgcctatttcgttaccagtgaatcagcagcacctcctgaatcagaacctcttgaatattctgcagccatctgctggggagggggatatgagctccattaataacactctgtctaaccaccaactcacccatctgcaatctctgttgaacaataaccaaatgtttcccccaaatcagcagcagcagcaactgctccagggctaccagaatttgcaggcatttcagggacaatccacaatcccgtgtccagccaacaataacccaatggcttgtcttttccagaattttcaggtgcggatgcaagaggacgcagccctgctcaacaaacgaatcagtacccaacccggtttgactgctctgcccgaaaatccgaatacaacactgccaccattccaggacactccatgtgagctgcagccccgaatagatcctagcttgggccagcaggtgaaagacggcctggtcgtcggaggcccaggcgacgcgagcgtggacgctatctacaaggctgttgtggacgctgccagtaaggggatgcaggttgtgatcaccactgcggtgaactccaccacccaaatcagtcctatcccggctctgagcgccatgtccgccttcaccgccagcatcggagacccactgaatctgagcagtgccgtgtcagcggtgatccatggcaggaatatgggtggagttgatcatgacggtagactcagaaactcccgcggcgcccggctccccaagaacctggatcatgggaagaatgtgaacgagggcgatggattcgagtattttaagtccgctagctgccacacatcgaagaagcagtgggacggtgagcagagtcctcgtggcgagcgcaatcgctggaagtatgaggagttcctcgaccatccgggacatattcattcttccccttgccacgagaggcccaacaacgtgtccacgctccccttcctgccaggcgaacaacacccgatcttgctccccccccgcaattgtcctggagataaaattttggaggaaaatttcagatacaataactacaaaagaactatgatgagctttaaggaaagactcgagaacacagttgagagatgtgcgcatataaatggcaatcgtccccgtcaatctagaggcttcggtgagcttctgtcaaccgccaagcaagacctggtcctggaggaacaatccccaagctcctctaactcccttgagaattcattagtgaaggattacatccattacaacggggatttcaatgctaagagcgtgaacggttgcgtaccaagcccttccgacgccaagtcgatcagttcggaggacgacctgaggaacccggatagcccctcaagcaatgaactgatccactacagaccacgcacatttaatgtgggagacctcgtttggggtcagatcaagggactcacctcctggcctggcaaactggtgcgggaggatgacgtgcataactcgtgtcagcaaagcccagaagaaggcaaagtagagccagagaagcttaaaactctaactgaggggctcgaggcatatagtagagtcaggaagagaaataggaagagcggaaagttaaataaccatctggaggccgccattcatgaagcgatgtcagagctggataagatgtcagggaccgtgcatcagattccacagggggacagacagatgaggccacctaagccaaagaggcggaaaatatcacgatag

SEQ ID NO: 197893 - DNA, 4485 bp, Artificial Sequence
  derived and/or modified sequence
atgaatggaggcaaggaatgtgatggaggagacaaggagggcggcctgcctgccatccaggtgcctgtgggctggcagaggagagtggaccagaatggagtgctgtatgtgagccccagcggcagcctgctgagctgcctggagcaggtgaagacctacctgctgacagatggcacctgcaagtgtggcctggagtgccccctcatcctgcccaaggtgttcaactttgaccccggggctgctgtgaagcagaggacagcagaagatgtgaaggcagatgaagatgtgaccaagctgtgcatccacaagaggaagatcatcgctgtggccaccctgcacaagtccatggaggccccccaccccagcctggtgctgaccagccctgggggcggcaccaatgccacccctgtggtgcccagccgggccgccacccccaggtctgtgaggaacaagagccatgagggcatcaccaacagcgtgatgcctgagtgcaagaaccccttcaagctgatgattggcagcagcaatgccatgggccgcctgtatgtgcaggagctgcccggcagccagcagcaggagctgcaccctgtgtacccccggcagaggctgggcagcagcgagcacggccagaagagccccttccggggcagccacggcggcctgcccagccctgccagcagcggcagccagatctatggagatggcagcatcagccccaggacagaccccctgggcagcccagatgtgttcaccaggagcaaccctggcttccacggggcccccaacagcagccccatccacctgaacagaacacccctgagccccccatctgtgatgctgcacggcagccctgtgcagagcagctgtgccatggccggccgcaccaacatccccctgagccccaccctgaccaccaagagccctgtgatgaagaagcccatgtgcaacttcagcaccaacatggagatcccccgggccatgttccaccacaagccaccccagggccccccacctcctcctccacccagctgtgccctgcagaagaagcccctgaccagcgagaaggaccccctgggcatcctggaccccatccccagcaagcctgtgaaccagaaccctgtgatcatcaaccccaccagcttccacagcaatgtgcacagccaggtgcccatgatgaatgtgtccatgcctcctgctgtggtgcccctgcccagcaacctgcccctgcccaccgtgaagccaggccacatgaaccacggcagccacgtgcagagggtgcagcacagcgccagcaccagcctgagccccagccctgtgaccagccctgtgcacatgatgggcaccggcatcggcagaattgaggccagcccccagaggagccgcagcagcagcaccagcagtgaccacggcaacttcatgatgcctcctgtgggcccccaggccaccagcagcggcatcaaggtgcccccaagaagccccaggagcaccatcggcagcccccggcccagcatgcccagcagccccagcaccaagagtgatggccaccaccagtacaaggacatccccaaccccctgattgctggcatcagcaatgtgctgaacacccccagcagcgctgccttccccacagccagcgctggcagcagctctgtgaagagccagcccggcctgctgggcatgcccctgaaccagatcctgaaccagcacaatgctgccagcttccctgccagcagcctgctgtctgctgctgccaaggcccagctggccaaccagaacaagctggccggcaacaacagcagcagcagcagcaacagcggggctgtggccggcagcggcaacacagagggccacagcaccctgaacaccatgtttcctcccacagccaacatgctgctgcccaccggggagggccagagcggccgggccgccctgcgggacaagctgatgagccagcagaaggatgccctgaggaagaggaagcagccccccaccaccgtgctgagcctgctgcggcagagccagatggacagcagcgctgtgcccaagccaggccctgacctgctgaggaagcagggccagggcagcttccccatcagctccatgagccagctgctgcagagcatgagctgccagagcagccacctgagcagcaacagcaccccaggctgtggggccagcaacacagccctgccctgcagcgccaaccagctgcacttcacagaccccagcatgaacagctctgtgctgcagaacatccccctgcggggggaggccgtgcactgccacaatgccaacaccaactttgtgcacagcaacagccctgtgcccaaccaccacctggccggcctcatcaaccagatccaggccagcggcaactgtggcatgctgagccagagcggcatggccctgggcaacagcctgcaccccaaccccccccagagccgcatcagcaccagcagcacccctgtgatccccaacagcatcgtgtcctcctacaaccagaccagcagcgaggccggcggcagcggccccagcagcagcatcgccatcgccggcaccaaccacccagccatcaccaagaccacctctgtgctgcaggatggagtcatcgtgaccacagctgctggcaaccccctgcagagccagctgcccatcggcagtgacttcccctttgtgggccaggagcacgccctgcacttccccagcaacagcaccagcaacaaccacctgccccaccccctgaaccccagcctgctgagcagcctgcccatcagcctgcctgtgaaccagcagcacctgctgaaccagaacctgctgaacatcctgcagcccagcgctggggagggggacatgagcagcatcaacaacaccctgagcaaccaccagctgacccacctgcagagcctgctgaacaacaaccagatgtttcctcccaaccagcagcagcagcagctgctgcagggctaccagaacctgcaggccttccagggccagagcaccatcccctgcccagccaacaacaaccccatggcctgcctcttccagaacttccaggtgaggatgcaggaggatgctgccctgctgaacaagaggatcagcacccagcccggcctgacagccctgcctgagaaccccaacaccaccctgccccccttccaggacaccccctgtgagctgcagcccagaattgaccccagcctgggccagcaggtgaaggatggcctggtggtgggcggccctggagatgcctctgtggatgccatctacaaggctgtggtggatgctgccagcaagggcatgcaggtggtgatcaccacagctgtgaacagcaccacccagatcagccccatcccagccctgagcgccatgtctgccttcaccgccagcatcggggaccccctgaacctgagcagcgctgtgtctgctgtgattcatggaagaaacatgggcggcgtggaccatgatggccgcctgaggaacagcagaggagcccggctgcccaagaacctggaccacggcaagaatgtgaatgaaggagatggctttgagtacttcaagagcgccagctgccacaccagcaagaagcagtgggatggagagcagagccccagaggagagaggaaccgctggaagtatgaggagttcctggaccaccctggccacatccacagcagcccctgccacgagcggcccaacaacgtgtccaccctgcccttcctgcctggagagcagcaccccatcctgctgccccccaggaactgccctggggacaagatcctggaggagaacttccgctacaacaactacaagaggaccatgatgtccttcaaggagcggctggagaacacagtggagcgctgtgcccacatcaatggaaaccggccccggcagagccggggctttggagagctgctgagcacagccaagcaggacctggtgctggaggagcagagccccagcagcagcaacagcctggagaacagcctggtgaaggactacatccactacaatggagacttcaatgccaagtctgtgaatggctgtgtgcccagccccagtgatgccaagagcatcagcagtgaagatgacctgagaaatccagacagccccagcagcaatgaactcatccactaccggcccaggaccttcaacgtgggggacctggtgtggggccagatcaagggcctgacctcctggccaggcaagctggtgcgggaggatgatgtgcacaacagctgccagcagagccctgaggagggcaaggtggagcctgagaagctgaagaccctgacagagggcctggaggcctacagccgggtgaggaagaggaacaggaagagcggcaagctgaacaaccacctggaggccgccatccacgaggccatgtctgagctggacaagatgtctggaacagtgcaccagatcccccagggcgaccggcagatgaggcctcccaagcccaagaggaggaagatcagcaggtag

SEQ ID NO: 197894 - DNA, 5992 bp, Artificial Sequence
  derived and/or modified sequence
aaccaaccagccacccgtcagagagggacatgcgcactccagggaaggcactcaaaagtggggggcaggaaagatgtacattgaagatgtcagtttctacatgtgggaagtagacattgaaggctttatggtttacagacaagatctttagaagataagcactaaaggaccaaggaaataaataccagaaatcaagaagagcacacactattttccttcatcaatccatagaaccctaatgcttctttagttccatcaaacacagaggaatgaccaccatggcagatggcaacagaggatgtcaacaattttttggagagagaagaggtactcccttatagggactcgtaaagacatagagcatctggaaattaactgcctccattacactgctgagtcacacacaacgcttgttatgttttcatcacttctctccagaaggctacattattggaattttgaagtcatgaaaacatcagatgaaccaacctgcaacaccttggattcagattggaagataaagagaaagtttaaagaatgtggcctataaaggcgggtacctggaaatattaaccgactcacactgtaaaaatgagaccagtttctaaacaatagagattgtcttagtacaacatcaaggttcaagacaaatgttgaactaaaaactttacactccccacccccacttcagacaggtaccagcattggtgaattatgattttccttagtcagaagcactcatttttacccatgtagaccatccttaggaattaaatattggttatttaatgtagattataatgggaagctgatttttttcacaatggcatatttcaaggacttggttccaaactgagctgaagcttcccaatgcgttttgtacagtctgggaaaaactgtgctgcactggcccacttttgaaggccatcatgctctgtaatataaggatatcatcttattgctgatatctttggagagtccctagcagacacagaaaatgaatggaggcaaagagtgtgacggaggggacaaggaaggaggtcttccagctatacaagttcctgtgggttggcagcgtcgtgtggatcaaaatggagtgctttatgtcagtcccagtgggtctttgttatcttgcttggagcaggttaaaacatacctgcttactgatggaacatgcaagtgtggcttggaatgtcctcttattcttcccaaggtatttaattttgatcctggagctgctgtgaaacagagaaccgcagaagatgttaaggcagatgaagatgtcacaaagctatgcatacataaaagaaaaattattgcagtggccacacttcataaaagcatggaagccccacatccttctctggtgctcaccagtcccggaggaggaacaaatgcaactccagtagtaccttctcgggcagcaactccaagatcagtaagaaataagtctcatgaaggaattacaaattctgtaatgcctgaatgtaagaatcctttcaagttaatgattggatcatcaaatgccatgggaaggctatatgtacaagaactgcctggaagccaacaacaagaactccaccctgtctacccccgacagagattgggcagcagtgaacatggacagaaatctccattccgtggcagccatggaggcctgcccagcccagcgtcatcaggttcccagatatatggagatggttcaatctctccaaggactgacccacttggaagtcctgatgttttcacaagaagtaatcctggttttcatggagctcccaattctagtcctattcacctgaataggactcctctttctccaccttcagtaatgctacatggttctcctgtacagtcatcctgtgcaatggctggaaggactaatatacctctttccccaaccttgactacaaagagtccagtaatgaaaaaaccaatgtgtaatttttcaactaatatggaaataccacgagcaatgttccaccacaaaccaccccaaggcccacctccccctcctccaccttcttgtgctcttcagaaaaagccattaacatctgagaaagatccacttggcattcttgaccctattcctagtaaaccagtgaatcagaaccctgttatcattaatccaaccagtttccattcaaatgtccactctcaggtacctatgatgaatgtaagcatgcctcctgctgttgttcctttgccaagtaatctcccattgccaactgtaaaacctggtcacatgaatcatgggagtcatgtacaaagagttcagcattcagcttcaacctccctgtccccttctccagtgacatcccccgtgcacatgatggggactggaattggaaggattgaggcatcgccccaaagatcacgctcatcttccacatcatcagatcatggaaatttcatgatgccacctgtaggaccccaggccacttctagtggtattaaggttccacccaggtcaccaaggtcaacaatagggtccccaaggccatcaatgccatcaagcccttctaccaagtccgatggacatcatcagtacaaggatatccctaacccattaattgctggaataagtaatgtactaaataccccaagcagtgcagcttttcctactgcatctgccggaagtagttctgtaaagagtcagcctggtttgctgggaatgcctttaaatcagatcttgaaccagcacaatgctgcctcctttccagcaagtagtttactctcagcagcagccaaagcacagctagcaaatcaaaacaaacttgctggtaacaacagtagcagcagtagcaattctggagctgttgccggcagtggcaacactgaaggacatagcactttaaacaccatgttccctcctactgccaacatgcttctcccaacaggtgaagggcaaagtggtcgagcagcactaagagataagctgatgtctcagcaaaaagacgcattgcggaaaagaaaacaaccacctacgacagtgttgagtttgctcagacagtctcaaatggatagttctgcagttcctaaacctggacctgacttgctaaggaagcagggtcagggttcatttcccatcagttcaatgtctcagttactacagtctatgagttgtcaaagctctcacttgagtagcaatagtaccccgggttgtggggcctcaaatactgctttgccttgctctgctaaccagctgcattttacagatcccagtatgaactctagtgttcttcagaacatacctttaagaggggaagccgtgcactgccacaatgcaaacactaactttgttcacagtaacagtccagtccccaaccaccatcttgcaggtttaataaatcagattcaggctagcgggaactgtgggatgctcagtcagtcgggcatggctttaggaaattccttacatcccaatccacctcagtcaagaatttcaacgtcctccactccagtgataccaaacagcattgttagcagctataatcaaacaagttctgaagcaggcggttcaggaccatcatcctccatagccatagcgggcaccaaccaccctgccatcacaaagacaacatctgttcttcaagatggcgtcatagtcaccactgcagctggaaacccactgcagagtcagctacccattgggagtgattttccttttgttggccaggagcacgcacttcattttccatccaacagcacttcaaacaaccatcttccacaccccttgaaccccagcctcctcagttctctacctatctctttgccagtgaatcaacagcatctcctaaaccagaatctattaaatatcctccagccttcagcaggagaaggtgatatgtcatcaataaacaatactttgagtaaccatcaactgactcatctacagtcgctgttaaacaacaatcagatgtttcctccaaatcagcaacagcagcaacttctccaggggtaccagaatctccaggcgttccaaggacagtccacaattccttgcccagctaacaataaccccatggcttgtctgtttcagaactttcaggtgagaatgcaggaagatgcagctctcctaaacaaaagaataagcactcagcctgggctcacagcacttcctgagaatccaaacactacacttccaccttttcaagatacaccttgtgagttgcaaccgaggattgacccatctcttggtcaacaggtgaaggatggcctcgttgtgggtggcccaggtgatgcttccgtagatgccatttacaaagcagttgtcgatgcagccagcaaaggaatgcaggttgtcatcaccactgcagtcaacagtacaactcagatcagccccattccagctctgagtgccatgagtgccttcactgcctcaattggtgacccattaaatctctccagtgctgtcagtgcggtcattcatggacggaacatgggaggtgttgatcatgatggtaggctgaggaattcaagaggggctcggctgcccaagaatctagaccatgggaaaaatgtgaacgaaggagatgggtttgaatatttcaagtcagcaagttgccacacatccaaaaaacagtgggacggggagcaaagccccagaggggagcgaaacaggtggaagtacgaggaatttttagatcatccaggccatatccacagtagtccttgtcatgaaaggcccaacaatgtctctacactgccatttctgcctggggaacagcacccaatactgttaccaccaagaaactgtccaggggataaaattctagaggaaaatttcaggtataataactacaaaagaactatgatgagttttaaggagagactagagaacactgtggaaagatgtgcacacataaatgggaatagacctcgacagagtcggggatttggagagctgctaagcactgcaaagcaagacctggtcctagaggagcagtctccaagttcctcaaatagtttggaaaattctctggtcaaagactacatccattacaatggagactttaatgccaaaagcgttaatgggtgtgtgcctagcccttcagatgctaaaagcattagtagtgaagatgacctaaggaacccagactccccctcttcaaatgaattgatacattatagaccaaggacgttcaatgttggcgacttggtctggggccaaatcaaaggactgacttcctggcctggaaaattagtaagagaagacgacgttcacaattcatgtcaacaaagccccgaggaagggaaggtggagcccgagaagttgaagacactaacagaaggtttggaagcctacagccgtgtccggaaaaggaacagaaaaagtggaaagctaaataaccatttagaagctgctattcatgaggccatgagtgaactggacaaaatgtctgggactgtacaccaaatcccacagggtgacagacaaatgagaccccccaaacccaagaggaggaagatctccagataacagagactactccactaatgcgcagtgtttattaaaggaacatgcacagatgtatctgtatataggtattgatatagccacagttatatcaatatttagactatggcagatagctaccaccaccacagggtgctaaaagaaacagtgatacaaaatttttttgatcaggaaggataatgaatgctggaaaagccaatcaaagtctctgtgtgatgagagtgatcaatggtcaagagattactgagaaactctttttctataatactaaattgtgattataagaaatagtccaaatgtttctgaagaattttcaatgttgtatatagaaaatacagaatttcatggtgatatcagaaatgtaaatattgtacagtattgtcatgtacaagcgtacctaatgcacactttatcttttattgtacaaagaaatagtgtacaaaattctttggtttctatggagtacacctaccagagactaccagtgtaaagtgataaataaaaatacaacct

SEQ ID NO: 197895 - DNA, 4485 bp, Artificial Sequence
  derived and/or modified sequence
atgaacggcggcaaggagtgcgacggcggcgacaaggagggcggcctgcctgcaatccaggtgcctgtaggatggcagagacgggttgatcagaacggagtcttatatgtatccccttccggttccctgctgtcttgtcttgagcaagttaagacatacttgctcaccgatggcacgtgtaaatgcggccttgaatgtcccctcatcctccctaaggtatttaatttcgaccccggagctgccgtgaagcagcggacagccgaagatgtgaaggcggatgaggatgttacgaaactgtgcatacataaacgtaaaataattgcagtcgctaccctgcacaaaagcatggaggcacctcatcctagcctggtccttacctcaccaggcggcggaactaacgccacccctgtggtacccagccgggccgctacgccacggtcagttcgcaataaatctcatgagggaataaccaacagcgtgatgcccgagtgtaaaaatccattcaagttgatgatcgggtctagcaatgccatgggcaggctgtacgtgcaagaactcccaggctcccagcaacaagagcttcaccctgtgtatccgagacagcggttggggagtagcgagcacggacagaaatcaccatttcgggggtctcacggaggcttacctagtcccgcaagtagtgggtcacagatttacggagatgggtctatatcgcctaggacagatccactggggtcccctgacgtcttcacccgctccaacccaggattccacggagcaccaaactctagcccgatccatctgaatcgcacaccacttagccccccaagtgtgatgctgcacggaagtcctgtgcagtcatcttgcgccatggccgggcgaacaaacattcctctctctcccacattaaccactaagagccccgtcatgaaaaagcccatgtgcaatttctcgaccaatatggaaattccccgcgctatgtttcaccacaaacctcctcagggacctccccctcccccgccaccctcctgtgcactccagaagaagcccttgacctcagagaaagaccccctgggtatcctggaccccatcccctccaaaccagtgaaccaaaacccagtcatcattaaccccacctccttccacagtaacgtgcactcccaggtgcctatgatgaatgtgagtatgccaccagctgttgtgcctctgccatctaatctcccattgcccacggtcaagccgggccatatgaaccacggctcccatgttcagcgagtgcaacacagtgccagcacttccctgagtcccagcccagtgactagccccgtgcacatgatgggcactggaatcggtagaatagaagcatcgccacaaagatcccgctccagctcaacatcaagtgaccacgggaacttcatgatgccacccgtgggaccacaggctaccagtagtggcatcaaggtgccgccccggtcgccgcgttcaaccattggctccccacgaccatccatgccaagctcgccatcgacaaagagcgatggacatcatcagtacaaggatattcccaatccattaattgccggcatttctaacgtgttgaacactccttccagtgccgccttccccaccgcctcagccggcagctcgagtgtcaaatcgcagccggggttgttaggcatgcccctcaaccagatcttaaaccagcacaacgcggcttcattccccgcatcatctctgctgtctgccgcagccaaggcccagctggccaaccaaaataaattggctggcaataatagctccagcagctctaattcgggtgccgtagcggggagcggcaacaccgaagggcacagcactctcaacacgatgttccctcccaccgcgaacatgctgctgcctactggggagggccaatctgggcgtgccgctttaagggataaactaatgagccagcagaaagacgcactcaggaagagaaagcagcccccgacaacagtactttctttattgcgccaatcccaaatggactctagtgcagtgccaaaacccggtcctgacctgcttaggaaacagggacagggatcctttcctatctcatctatgagccagctgctccagtccatgtcctgtcaatcaagtcacctgtcaagtaacagcacacccggatgcggagcctccaacacagccctaccgtgttcggccaatcagctccattttactgatcctagcatgaattccagcgtgctccagaatattcccctcagaggagaagccgttcattgccataacgccaacacaaacttcgtccactccaattctcccgttccaaatcaccacctcgccggcctaatcaatcagatacaagctagcgggaattgtgggatgctctcccaaagcggcatggctctcggcaactccctacaccctaatcctccccagtcccggatatccactagttctacccctgtgatccctaactcaatagtttctagttacaatcagacgtcaagtgaggctggtggatcagggcctagtagcagcatagctatcgctgggaccaatcacccagccattacaaagaccactagcgtgcttcaggatggagttattgtcacaacagccgccgggaaccctctgcagtcacaactcccaattggtagcgatttcccatttgtcggtcaagaacatgcactgcatttcccgtccaacagtactagtaataatcatctgccacatcccttgaatccaagcttgctgtcatcgctcccaatatccctccccgtaaatcagcagcacctcctgaatcagaatttgctgaacatcctccaaccatcggctggcgaaggtgatatgagttcaatcaacaacactctgagcaatcaccagctgactcatctacaatcgctgctcaacaataaccaaatgtttcccccaaaccagcagcagcagcaactgctccaaggataccagaacttgcaagcctttcagggccagtccacgataccctgccccgccaataacaatccaatggcctgtttgttccagaacttccaggtccgtatgcaggaggacgccgccttgctcaataagcgcatttcaacacagcctggactgaccgctctgccagaaaaccccaacactactctcccccccttccaggatacgccttgcgaattacagccccgcatagatccctcactcggtcagcaggtaaaggacggcctggtcgtcggggggccaggcgatgcttctgtagatgctatttacaaggccgtggtcgacgccgcgtccaagggaatgcaggtggtgataaccaccgctgttaattccaccacacagatctctcctatccccgcactgagtgcaatgtccgccttcacagcatccatcggcgatcctctgaacctgagtagcgcagttagtgctgtcattcatggaagaaatatggggggcgttgatcatgatggacgtctcagaaactcgcgtggcgcaagacttcccaagaacctggatcatggcaaaaacgtgaacgagggtgacggcttcgagtactttaaatctgcgtcctgccatacgagcaaaaaacagtgggacggggaacagtccccacgcggagaacgcaatcggtggaaatacgaagagtttctagaccacccgggtcacatacacagttccccatgccatgaacgaccaaacaatgtcagtacattgcccttcctcccaggtgaacagcatcccatccttcttccaccccgtaactgcccgggggataagatcctagaggagaactttagatacaacaactacaagcggactatgatgtcttttaaagaaagactcgagaacacagtggaacgctgcgcacatatcaatggaaatagaccaagacagagtaggggattcggcgagcttctcagtaccgcgaagcaggatctggtgttagaggaacagtccccctcctcgtcgaattccctggaaaactctcttgtgaaagactacattcattataatggtgactttaacgcgaagagcgtaaacggatgtgtcccttctccctctgacgccaagtccatatcatccgaggatgacttgcgtaaccctgactcacctagcagtaacgaactcatacattacagaccacggacattcaacgttggcgatcttgtgtggggccagattaagggccttacaagttggccgggcaagcttgttcgggaagatgacgtccacaactcttgccagcagagtccagaagaggggaaagtggaaccagaaaagctaaagacgctgacggaggggcttgaggcatattctagagtccgcaagagaaaccgtaagagtgggaaacttaataaccaccttgaggcggccatacacgaggcgatgagcgaacttgacaagatgagtggcactgtccaccagatcccccaaggggaccggcaaatgcgcccccccaaacccaagagacggaagatttcccgctag

SEQ ID NO: 197896 - DNA, 4485 bp, Artificial Sequence
  derived and/or modified sequence
atgaacggcggaaaagagtgcgatggaggagataaagaagggggactccctgcgattcaggtgcccgtgggctggcagcgacgagttgaccagaacggtgtgctttacgttagtccttccggtagcctgctttcctgtctggaacaggttaagacttacctgctgacagacggtacgtgtaagtgcgggctggaatgcccattaatcctgccaaaagtttttaactttgacccaggcgctgccgtgaaacagcgcacagcggaggacgtcaaggctgacgaggatgtaactaaactgtgtatacacaagaggaagatcattgcagttgccaccttgcacaagtcaatggaggcgcctcacccctctctagtcctcacatccccgggaggcggaacaaatgctacccctgtggtcccctcccgggctgctacacccagatcagtccgaaacaagagccatgaagggattactaattcggttatgccggaatgtaagaatccatttaagttgatgattgggtcatccaatgctatgggcagactgtatgttcaagaactgcctggctctcagcagcaggaactgcatccagtgtatcccaggcaacgccttgggagttccgagcacggacagaaatctcccttccggggtagtcatggcggattgccctcaccagctagctcggggtcccagatatacggggacggatccattagccctcggacagacccactgggttcccctgacgtttttacacgcagcaatccaggattccatggggctcctaatagtagtcccatacaccttaatcggacacccctgtcgccaccatctgtcatgttgcacggctctccggtccagtcatcatgtgctatggctggcaggacaaatatccctcttagccctaccctgacaactaagtctcccgtgatgaaaaagcctatgtgtaacttctccacaaatatggaaattccccgagccatgtttcaccataaaccgccacaggggccaccgccacctccaccaccaagctgcgccttacagaagaaaccgctgacgtccgaaaaagaccctctcgggattcttgatcccatcccaagtaaacccgttaatcagaaccctgtaataataaaccctacctctttccacagcaacgtgcacagccaggtgcctatgatgaacgtctcgatgcctcccgctgttgtgcctttaccctcaaacttacctctgcccacagtgaagcccggacacatgaaccacggaagccatgtgcagcgcgtgcagcacagtgcatccacctctctttcaccgtcccctgtgacatcacccgtgcatatgatgggaactggaatcggtcggattgaggcatctccacagcgcagtagatcctctagcacgtcttcggaccatggtaactttatgatgccacctgtcggcccacaggctacctccagtgggatcaaagtgcccccaagaagtcccagatctactatcggaagccccaggcctagtatgccttcatccccatccactaagagcgatgggcatcatcagtacaaagatataccaaaccccctaatcgctggaatcagtaatgtccttaacacgccctcctctgcagctttcccaaccgcatccgccggttcctcatccgtgaaaagtcagccaggccttctaggtatgcctctaaaccaaattctgaaccagcacaatgcagctagcttccccgcttcctctctgctgtccgccgctgctaaggcacagttagcaaatcagaacaagctggccggtaacaactcttctagcagtagtaatagtggcgcagtcgctggctctggcaataccgaaggccactcgactctgaatactatgtttcctcccactgcaaacatgctgctccccacgggggaaggccagagtggcagggccgcattgcgggataagctcatgagtcagcaaaaagacgcgttgcgcaagagaaagcagccacctactacagttctctctttgctgagacaaagccaaatggacagctccgcagtccctaagccgggacctgatttgttacggaagcaggggcagggcagcttccctattagttcgatgtcccagctgctgcagtccatgagttgccagtccagccatctgtctagcaattcgacacctgggtgtggcgcttcgaataccgccctgccttgttctgcaaaccagcttcacttcactgaccccagcatgaacagctccgtgttgcaaaacatccccttgcgcggagaggccgtgcactgtcataacgctaacactaactttgtgcacagcaattcacctgtcccaaaccatcaccttgccggtctgatcaaccagatccaagcatcaggcaactgcggcatgctgagtcagagcggcatggctctgggaaactctctccaccctaacccccctcaatcaaggattagcactagctcaactccggtcattccaaattccatagtgagcagttacaatcagaccagtagcgaagcaggcggttctgggccttcaagttccatcgcaatcgccggtaccaaccatcccgcaatcacgaagaccacctccgtgttgcaggacggggtgatcgttaccaccgcggctggaaacccactgcaaagccagctccctattggaagtgacttcccatttgtcggtcaagaacacgcactgcacttccctagcaacagtacttctaacaaccacctgccacatccactgaacccttcactcctgtccagcctgccaatatccttaccagtcaatcagcagcatctactgaatcaaaatctgttgaatattctgcaaccgtctgcaggcgaaggagacatgagtagtataaacaacaccctatctaatcatcagcttacacatctccagtctctgcttaacaataatcagatgttccctccaaaccagcagcaacagcagctgctccagggttatcaaaatctgcaggcgtttcaaggccagtctaccattccatgcccagcaaacaacaacccaatggcttgcctcttccaaaacttccaggtacggatgcaggaagatgccgctctccttaataaaagaatctccacacaaccaggcctaaccgctctccccgaaaacccaaacactactctgccacccttccaggacactccctgtgaattacagccacggattgatcccagtcttggccagcaagtgaaggacggtctcgtcgtgggcggaccaggcgacgcatctgtggatgcgatctataaagctgtggtggatgccgctagtaaggggatgcaggtggtgattaccaccgcagtaaactccactacccagatcagtcctatccccgcactctccgcgatgtctgcattcaccgctagtatcggagacccactcaatttgtccagcgccgtgtctgccgtcattcatgggagaaacatgggaggggttgaccatgacggtcggctgagaaattcacgtggcgctaggctccctaaaaatctggatcatgggaagaatgtgaacgaaggtgatggctttgaatatttcaagagcgcctcctgccacacctctaaaaaacaatgggacggagagcagagtcccagaggagaaagaaacagatggaaatatgaggagtttctagatcacccaggccacatacactcaagcccctgccacgaacgccctaataatgtgtccaccctgccttttttgcccggagagcagcacccaattctgctgcccccacgcaattgccccggagacaaaatactggaagagaacttcaggtacaataactacaagcgcactatgatgagctttaaagagcgtctggaaaacactgtcgagagatgtgctcacatcaatggcaataggccccgacagtctagagggttcggggagctcctgagtacggcaaaacaggatttggtcctcgaggaacagagcccatccagtagtaacagcctggagaactctctggtcaaggactacatacattacaatggagatttcaacgccaagtcagtcaacggctgcgtgccttctccctctgatgcaaaatcgatcagttcggaggacgacctaagaaaccccgatagccccagcagtaacgagttaattcactataggcctcgaactttcaacgtgggggatctggtgtggggtcaaatcaaggggctcacctcctggcccggaaaactagtgagggaggacgatgtgcacaacagctgccagcagtccccagaggaagggaaagtggaacccgagaaattgaaaacccttactgaaggtcttgaggcctattcccgggtgcggaaacggaacagaaaaagcggtaagctgaataatcatctggaggcagctatccatgaagccatgagtgaactggataagatgtctggtactgtccatcaaatcccgcagggggataggcaaatgcgaccgccaaaacccaagaggaggaagatcagtagatag

SEQ ID NO: 197897 - DNA, 4485 bp, Artificial Sequence
  derived and/or modified sequence
atgaacggcggcaaggagtgcgacggcggcgacaaggagggcggcctgcccgccatccaggtgcccgtgggctggcagagaagagtggaccagaacggcgtgctgtacgtgagccccagcggcagcctgctgagctgcctggagcaggtgaagacctacctgctgaccgacggcacctgcaagtgcggcctggagtgccccctgatcctgcccaaggtgttcaacttcgaccccggcgccgccgtgaagcagagaaccgccgaggacgtgaaggccgacgaggacgtgaccaagctgtgcatccacaagagaaagatcatcgccgtggccaccctgcacaagagcatggaggccccccaccccagcctggtgctgaccagccccggcggcggcaccaacgccacccccgtggtgcccagcagagccgccacccccagaagcgtgagaaacaagagccacgagggcatcaccaacagcgtgatgcccgagtgcaagaaccccttcaagctgatgatcggcagcagcaacgccatgggcagactgtacgtgcaggagctgcccggcagccagcagcaggagctgcaccccgtgtaccccagacagagactgggcagcagcgagcacggccagaagagccccttcagaggcagccacggcggcctgcccagccccgccagcagcggcagccagatctacggcgacggcagcatcagccccagaaccgaccccctgggcagccccgacgtgttcaccagaagcaaccccggcttccacggcgcccccaacagcagccccatccacctgaacagaacccccctgagcccccccagcgtgatgctgcacggcagccccgtgcagagcagctgcgccatggccggcagaaccaacatccccctgagccccaccctgaccaccaagagccccgtgatgaagaagcccatgtgcaacttcagcaccaacatggagatccccagagccatgttccaccacaagcccccccagggccccccccccccccccccccccagctgcgccctgcagaagaagcccctgaccagcgagaaggaccccctgggcatcctggaccccatccccagcaagcccgtgaaccagaaccccgtgatcatcaaccccaccagcttccacagcaacgtgcacagccaggtgcccatgatgaacgtgagcatgccccccgccgtggtgcccctgcccagcaacctgcccctgcccaccgtgaagcccggccacatgaaccacggcagccacgtgcagagagtgcagcacagcgccagcaccagcctgagccccagccccgtgaccagccccgtgcacatgatgggcaccggcatcggcagaatcgaggccagcccccagagaagcagaagcagcagcaccagcagcgaccacggcaacttcatgatgccccccgtgggcccccaggccaccagcagcggcatcaaggtgccccccagaagccccagaagcaccatcggcagccccagacccagcatgcccagcagccccagcaccaagagcgacggccaccaccagtacaaggacatccccaaccccctgatcgccggcatcagcaacgtgctgaacacccccagcagcgccgccttccccaccgccagcgccggcagcagcagcgtgaagagccagcccggcctgctgggcatgcccctgaaccagatcctgaaccagcacaacgccgccagcttccccgccagcagcctgctgagcgccgccgccaaggcccagctggccaaccagaacaagctggccggcaacaacagcagcagcagcagcaacagcggcgccgtggccggcagcggcaacaccgagggccacagcaccctgaacaccatgttcccccccaccgccaacatgctgctgcccaccggcgagggccagagcggcagagccgccctgagagacaagctgatgagccagcagaaggacgccctgagaaagagaaagcagccccccaccaccgtgctgagcctgctgagacagagccagatggacagcagcgccgtgcccaagcccggccccgacctgctgagaaagcagggccagggcagcttccccatcagcagcatgagccagctgctgcagagcatgagctgccagagcagccacctgagcagcaacagcacccccggctgcggcgccagcaacaccgccctgccctgcagcgccaaccagctgcacttcaccgaccccagcatgaacagcagcgtgctgcagaacatccccctgagaggcgaggccgtgcactgccacaacgccaacaccaacttcgtgcacagcaacagccccgtgcccaaccaccacctggccggcctgatcaaccagatccaggccagcggcaactgcggcatgctgagccagagcggcatggccctgggcaacagcctgcaccccaaccccccccagagcagaatcagcaccagcagcacccccgtgatccccaacagcatcgtgagcagctacaaccagaccagcagcgaggccggcggcagcggccccagcagcagcatcgccatcgccggcaccaaccaccccgccatcaccaagaccaccagcgtgctgcaggacggcgtgatcgtgaccaccgccgccggcaaccccctgcagagccagctgcccatcggcagcgacttccccttcgtgggccaggagcacgccctgcacttccccagcaacagcaccagcaacaaccacctgccccaccccctgaaccccagcctgctgagcagcctgcccatcagcctgcccgtgaaccagcagcacctgctgaaccagaacctgctgaacatcctgcagcccagcgccggcgagggcgacatgagcagcatcaacaacaccctgagcaaccaccagctgacccacctgcagagcctgctgaacaacaaccagatgttcccccccaaccagcagcagcagcagctgctgcagggctaccagaacctgcaggccttccagggccagagcaccatcccctgccccgccaacaacaaccccatggcctgcctgttccagaacttccaggtgagaatgcaggaggacgccgccctgctgaacaagagaatcagcacccagcccggcctgaccgccctgcccgagaaccccaacaccaccctgccccccttccaggacaccccctgcgagctgcagcccagaatcgaccccagcctgggccagcaggtgaaggacggcctggtggtgggcggccccggcgacgccagcgtggacgccatctacaaggccgtggtggacgccgccagcaagggcatgcaggtggtgatcaccaccgccgtgaacagcaccacccagatcagccccatccccgccctgagcgccatgagcgccttcaccgccagcatcggcgaccccctgaacctgagcagcgccgtgagcgccgtgatccacggcagaaacatgggcggcgtggaccacgacggcagactgagaaacagcagaggcgccagactgcccaagaacctggaccacggcaagaacgtgaacgagggcgacggcttcgagtacttcaagagcgccagctgccacaccagcaagaagcagtgggacggcgagcagagccccagaggcgagagaaacagatggaagtacgaggagttcctggaccaccccggccacatccacagcagcccctgccacgagagacccaacaacgtgagcaccctgcccttcctgcccggcgagcagcaccccatcctgctgccccccagaaactgccccggcgacaagatcctggaggagaacttcagatacaacaactacaagagaaccatgatgagcttcaaggagagactggagaacaccgtggagagatgcgcccacatcaacggcaacagacccagacagagcagaggcttcggcgagctgctgagcaccgccaagcaggacctggtgctggaggagcagagccccagcagcagcaacagcctggagaacagcctggtgaaggactacatccactacaacggcgacttcaacgccaagagcgtgaacggctgcgtgcccagccccagcgacgccaagagcatcagcagcgaggacgacctgagaaaccccgacagccccagcagcaacgagctgatccactacagacccagaaccttcaacgtgggcgacctggtgtggggccagatcaagggcctgaccagctggcccggcaagctggtgagagaggacgacgtgcacaacagctgccagcagagccccgaggagggcaaggtggagcccgagaagctgaagaccctgaccgagggcctggaggcctacagcagagtgagaaagagaaacagaaagagcggcaagctgaacaaccacctggaggccgccatccacgaggccatgagcgagctggacaagatgagcggcaccgtgcaccagatcccccagggcgacagacagatgagaccccccaagcccaagagaagaaagatcagcagatag
